United States Patent Application Publication US 2005/0228172 A9 - sequence listing, part 33

SEQ ID NO: 110812 - DNA, 511 bp, Homo sapiens
cactttccttgtgagccaggggtgagggtaactggcaaagcaatcaggtcttggygccaacaaaatcccatttcatccctgaaatacaaggcccatcaggacgtgacatctgtctgtattacttcctactatataatccccagtaactagaacaaagcagttaaacaatattcaacagtcagaaatatatttatcatatgctgctaaaaataccctccattttctagctctctaatcagttaacatgtgcacatttaaactacatcacagcattggatttgttctatctgtctgtatggatacaattatgctgctgacaatttagtcaagtgtttcatctctatgtagacaactgtcatgtaagaattaatgagaatttcctaacatcatggtggcaactggcagctattgctctgaacatttctagctctgaaaaattttaggccaacatgtttacagtaatgttttagtttaaagagcttggaaatggggtttcctggaatgtattgga

SEQ ID NO: 110813 - DNA, 511 bp, Homo sapiens
cactttccttgtgagccaggggtgagggtaactggcaaagcaatcaggtcttggtgccaacaaaatcccatttcatccctgaaatacaaggcccatcaggacgtgacatctgtctgtattacttcctactatataatccccagtaactagaacaaagcagttaaacaatattcaacagtcagaaatatatttatcatatgctgctaaaaataccctccattttctagytctctaatcagttaacatgtgcacatttaaactacatcacagcattggatttgttctatctgtctgtatggatacaattatgctgctgacaatttagtcaagtgtttcatctctatgtagacaactgtcatgtaagaattaatgagaatttcctaacatcatggtggcaactggcagctattgctctgaacatttctagctctgaaaaattttaggccaacatgtttacagtaatgttttagtttaaagagcttggaaatggggtttcctggaatgtattgga

SEQ ID NO: 110814 - DNA, 511 bp, Homo sapiens
cactttccttgtgagccaggggtgagggtaactggcaaagcaatcaggtcttggtgccaacaaaatcccatttcatccctgaaatacaaggcccatcaggacgtgacatctgtctgtattacttcctactatataatccccagtaactagaacaaagcagttaaacaatattcaacagtcagaaatatatttatcatatgctgctaaaaataccctccattttctagctctctaatcagttaacatgtgcacatttaaactacatcacagcattggatttgttctatctgtctgtatggatacaattatgctgctgacaatttagtcaagtgtttcatctctatgtagacaacygtcatgtaagaattaatgagaatttcctaacatcatggtggcaactggcagctattgctctgaacatttctagctctgaaaaattttaggccaacatgtttacagtaatgttttagtttaaagagcttggaaatggggtttcctggaatgtattgga

SEQ ID NO: 110815 - DNA, 567 bp, Homo sapiens
aacacacatgtcatctgagtctcagaggagaaaaggaaaaggagcgcagtgctgaaagaattttgaaaacctaacaggaaaaattacccaaatttggcaaaaggcaaacactaattgaactaaaagaagaaataacaaatgtacaattatgtttagataattcaacactcctctctcactaataattagtgaacatttgaaattaattgatggtaagtttgattaattctgagatttttagcagtattgtttatcacatagaattaacagattatttctgtatagcagacaaaaatgcattctgagccctatgtaatagttcatcacagaaaatgttgagttaatgccagtcagaatgtctctcttcttccagtacagggattacaaataatggcaagacctaaggtcatgtatgcagtgatgcactaagtaccttaaataataggacatgagattgcaagcacaatgcagtcactatgaatgagaaaattaygtaagagctcaagttcatgtactgaggaggcttctgagaagccttaaaggatatctggccaattcagctgttac

SEQ ID NO: 110816 - DNA, 524 bp, Homo sapiens
atgaatttttgggtaatttccaattgttggctatgaatctcctgtattagctttgcagctgtaatgaaacttttagtcatttccctcaagatcacaatatgttctcttaagttattagtactttggccacttcccaaagaatgcaagatccttacaagtttacttccatgtatttgtgtatctctcacccttgtgccattgttgtaatacacttttttattgcattttatatttctacaagatattattattattgtagttttaaaaagctttcaytactatttactcatgtttgccctttctctgcacttcatttattcttgcattcccccctgctgcttttgttttctagtttttgattgccaataagagctacagaaaatcatgaaatatttcttttgtttctatatttaatgtttaattgtttttgtgcttattgttagtaactttttgaaacacctttcattcctttaagtagagaggctcttcagccaaatttttattcattaatatttcctttttct

SEQ ID NO: 110817 - DNA, 547 bp, Homo sapiens
tcacaatatgttctcttaagttattagtactttggccacttcccaaagaatgcaagatccttacaagtttacttccatgtatttgtgtatctctcacccttgtgccattgttgtaatacacttttttattgcattttatatttctacaagatattattattattgtagttttaaaaagctttcattactatttactcatgtttgccctttctctgcacttcatttattcttgcattcccccctgctgcttttgttttctrgtttttgattgccaataagagctacagaaaatcatgaaatatttcttttgtttctatatttaatgtttaattgtttttgtgcttattgttagtaactttttgaaacacctttcattcctttaagtagagaggctcttcagccaaatttttattcattaatatttcctttttcttccagacattttgttgttgatgagagcagaaaagattttcctttttggaaaacattatcaagcaaaatattttatgggccaatgcttccataacctgaaacaattgaaagaatt

SEQ ID NO: 110818 - DNA, 608 bp, Homo sapiens
gaagccagcagctcttgtttctctgtgtgtttctgtgaggaaccaccaaattgttttccacggcaagtgcatcattttctattcctagcagccagttcatgagggctccaatttctccacctccttagcaacattgattttctgtgtcgttgttatgaaagccttactagtggatgcaaagtggtatctcatttgggttttgtcttgcattttattaatgaataacagtgtttagcatcttttcttatccgtcttacacatttgtgtatcttcttcggagaaatgtctattcaagtcctttgcctattttttaattgggatgttagaaattctgatgttgagttgtgggatattaagcttttatcagatacgcactttgattttatcagatacatattttctcacatactatgggttgtcttttmactcccttgatagtatcctttgatgcataaaggttttttattttgattaaatctaatttacgtgtattttcttttgttatctgtgcttttctgtcatatttcaaaatacacttaaaactcaaaggtcataaaggtttaccttgtgttttcttctaagagttacatactttagtccttacatgt

SEQ ID NO: 110819 - DNA, 548 bp, Homo sapiens
gacagcctgccctcgaatagccggagaacgcccggcctgtgccctgtgctcggcctggtgtcctggctcgtgcccctcagagccccgcacaaagcagtgtgacaggtgtggaaggaccyagcaccaggcagcggtgagcggatggatgctccagggatgtggggctgctggcagtcaagaacccattgccaaattccatggcataattttggatatttttcccttatatttttgtgtaagactttcagacttacacattttgagtttttaaaaaaatatagtataaactacaattctgacttctatattttacatgttgatagcaaatcttcataccttttttgtgttaaagggggctattattccctctccatagtttggcctttgcacccttgttgaagatcattttgaccatatatacaaggttttgtggagagaggggtctctattattttctatgtctacacgtcttgatttaatacatttctttttagattttctcctttttactttttgagacaggttctctgtcatccaggctggggtgc

SEQ ID NO: 110820 - DNA, 548 bp, Homo sapiens
gacagcctgccctcgaatagccggagaacgcccggcctgtgccctgtgctcggcctggtgtcctggctcgtgcccctcagagccccgcacaaagcagtgtgacaggtgtggaaggacccagcaccaggcagcggtgagcggatggatgctccagggatgtggggctgctggcagtcaagaacccattgccaaattccatggcataattttggatatttttcccttatatttttgtgtaagactttcagacttacacattttgagtttttaaaaaaatatagtataaactacaattctgacttctatattttacatgttgatagcaaatcttcataccktttttgtgttaaagggggctattattccctctccatagtttggcctttgcacccttgttgaagatcattttgaccatatatacaaggttttgtggagagaggggtctctattattttctatgtctacacgtcttgatttaatacatttctttttagattttctcctttttactttttgagacaggttctctgtcatccaggctggggtgc

SEQ ID NO: 110821 - DNA, 548 bp, Homo sapiens
gacagcctgccctcgaatagccggagaacgcccggcctgtgccctgtgctcggcctggtgtcctggctcgtgcccctcagagccccgcacaaagcagtgtgacaggtgtggaaggacccagcaccaggcagcggtgagcggatggatgctccagggatgtggggctgctggcagtcaagaacccattgccaaattccatggcataattttggatatttttcccttatatttttgtgtaagactttcagacttacacattttgagtttttaaaaaaatatagtataaactacaattctgacttctatattttacatgttgatagcaaatcttcataccttttttgtgttaaagggggctattattccctctccatagtttggcctttgcacccttgttgaagatcattttgaccatatatacaaggttttgtggagagaggggtctctattattttctatgyctacacgtcttgatttaatacatttctttttagattttctcctttttactttttgagacaggttctctgtcatccaggctggggtgc

SEQ ID NO: 110822 - DNA, 548 bp, Homo sapiens
gacagcctgccctcgaatagccggagaacgcccggcctgtgccctgtgctcggcctggtgtcctggctcgtgcccctcagagccccgcacaaagcagtgtgacaggtgtggaaggacccagcaccaggcagcggtgagcggatggatgctccagggatgtggggctgctggcagtcaagaacccattgccaaattccatggcataattttggatatttttcccttatatttttgtgtaagactttcagacttacacattttgagtttttaaaaaaatatagtataaactacaattctgacttctatattttacatgttgatagcaaatcttcataccttttttgtgttaaagggggctattattccctctccatagtttggcctttgcacccttgttgaagatcattttgaccatatatacaaggttttgtggagagaggggtctctattattttctatgtctacacgtcttgatttaatacatttcttttyagattttctcctttttactttttgagacaggttctctgtcatccaggctggggtgc

SEQ ID NO: 110823 - DNA, 613 bp, Homo sapiens
aggtgccttcaagatttttctcattgtctgtggttttcagcaatttggataccttacatatcgtttttatgaatcttccacagagatcagtggacacatgtggcacaaagaacatgtgaattaagaatgcactcctgaataayatattttacatatatgttattgagcatattcttaaatataaataatttcttgtgaatatattttgattaataaaaatatattaataaatgttaactcatgcatattcttcttactcaaaaatatgttcttatattaattactccctctctcttcctcctagtctccaaaggtaacatcaggggctagaacagagacacagaaatgttccttaaaatgtcaaaatgaaatattgtctattaaaacagaagaattaaaataaacaagagaagttaggtattggtcatctgatatttgtaacctgcagctttcccaggaaacttggttggacccttttcttggttcagctgtcagaagctaaatgttcccttcctctctctctttgcagtctgttcatgacatttggtattcctaatatgcccacttggaggaaattgccagcttaggccaaccagggtgaaatgcatgcact

SEQ ID NO: 110824 - DNA, 613 bp, Homo sapiens
aggtgccttcaagatttttctcattgtctgtggttttcagcaatttggataccttacatatcgtttttatgaatcttccacagagatcagtggacacatgtggcacaaagaacatgtgaattaagaatgcactcctgaataatatattttacatatatgttattgagyatattcttaaatataaataatttcttgtgaatatattttgattaataaaaatatattaataaatgttaactcatgcatattcttcttactcaaaaatatgttcttatattaattactccctctctcttcctcctagtctccaaaggtaacatcaggggctagaacagagacacagaaatgttccttaaaatgtcaaaatgaaatattgtctattaaaacagaagaattaaaataaacaagagaagttaggtattggtcatctgatatttgtaacctgcagctttcccaggaaacttggttggacccttttcttggttcagctgtcagaagctaaatgttcccttcctctctctctttgcagtctgttcatgacatttggtattcctaatatgcccacttggaggaaattgccagcttaggccaaccagggtgaaatgcatgcact

SEQ ID NO: 110825 - DNA, 613 bp, Homo sapiens
aggtgccttcaagatttttctcattgtctgtggttttcagcaatttggataccttacatatcgtttttatgaatcttccacagagatcagtggacacatgtggcacaaagaacatgtgaattaagaatgcactcctgaataatatattttacatatatgttattgagcatattcttaaatataaataatttcttgtgaatatattttgattaataaaaatatattaataaatgttaactcatgcatattcttcttactcaaaaatatgttcttatattaattactccctctctcttcctcctagtctccaaaggtaacatcaggggctagaacagagacacagaaatgttccttaaaatgtcaaaatgaaatattgtctattaaaacagaagaattaaaataaacaagagaagttakgtattggtcatctgatatttgtaacctgcagctttcccaggaaacttggttggacccttttcttggttcagctgtcagaagctaaatgttcccttcctctctctctttgcagtctgttcatgacatttggtattcctaatatgcccacttggaggaaattgccagcttaggccaaccagggtgaaatgcatgcact

SEQ ID NO: 110826 - DNA, 613 bp, Homo sapiens
aggtgccttcaagatttttctcattgtctgtggttttcagcaatttggataccttacatatcgtttttatgaatcttccacagagatcagtggacacatgtggcacaaagaacatgtgaattaagaatgcactcctgaataatatattttacatatatgttattgagcatattcttaaatataaataatttcttgtgaatatattttgattaataaaaatatattaataaatgttaactcatgcatattcttcttactcaaaaatatgttcttatattaattactccctctctcttcctcctagtctccaaaggtaacatcaggggctagaacagagacacagaaatgttccttaaaatgtcaaaatgaaatattgtctattaaaacagaagaattaaaataaacaagagaagttaggtattggtcatctgatatttgtaacctgcagctttcccaggaaacttggttggacccttttcttggttcagctgtcasaagctaaatgttcccttcctctctctctttgcagtctgttcatgacatttggtattcctaatatgcccacttggaggaaattgccagcttaggccaaccagggtgaaatgcatgcact

SEQ ID NO: 110827 - DNA, 597 bp, Homo sapiens
atcaggggctagaacagagacacagaaatgttccttaaaatgtcaaaatgaaatattgtctattaaaacagaagaattaaaataaacaagagaagttaggtattggtcatctgatatttgtaacctgcagctttcccaggaaacttggttggacccttttcttggttcagctgtcagaagctaaatgttcccttcctctctctctttgcagtctgttcatgacatttggtattcctaatatgcccacttggaggaaattgccagcttaggccaaccagggtgaaatgcatgcacttataaactcataagcccaataataattttcagaaggaggcactcattcacttcrgcttataaacttgcaaatctgtagattcattagtctatcacttacatggaaagacaaaatttatatttaattgttgagacttgacttcaaaattttcaagaatatcaacatttgtttttgttgtgcacctctctgtcaaaagataaatacgtagtacataatcattattatttattaataatatactctgcatggtcttacatttcacagttcatgcattgtttattcattaatataacctgttaacg

SEQ ID NO: 110828 - DNA, 531 bp, Homo sapiens
gcaattagattggttagtgacaattatctgtaattttcaggcaatgcctaggcaagtgcccaaggcacagtagcctcctccttgcctccgtgtgtgtgtgtgtgtgtgtgtgtgtgtgtgtgtgtgtagggtggtaacatttctgggaatttgtcttaacataaaatgataccacctttcacaaaacgacctagaggaagttggaaatcycactatcctggcttcctgctgagcaatatctgcttctctttctgactcaggctgatgcatctgtatacttagcttcacttctccagtaaataagggagagctttattataaaagacaacttctattgattttcaagggggtgggtggttgtcaagctcactcctttctatgcactgagggaaaattattgtaagcgatctgtaaaacaatagatgaaaaaagaggagataaaaattaaataaaatttaaataaaaactaggatcctaagtggaaaaatagctttaaattagaaattgataccaaaaaataatgatatgtaa

SEQ ID NO: 110829 - DNA, 531 bp, Homo sapiens
gcaattagattggttagtgacaattatctgtaattttcaggcaatgcctaggcaagtgcccaaggcacagtagcctcctccttgcctccgtgtgtgtgtgtgtgtgtgtgtgtgtgtgtgtgtgtgtagggtggtaacatttctgggaatttgtcttaacataaaatgataccacctttcacaaaacgacctagaggaagttggaaatcccactatcctggcttcctgctgagcaatatctgcttctctttctgactcaggctgatgcatctgtatacttagcttcacttctccagtaaataagggagagctttattataaaagacaacttctattgattttcaagggggtgggtggttgtcaagctcactcctttctatgcactgagggaaaattattgtaagcgatctgtaaaacaatagatgaaaaaagaggagataaaaattaaataaaatttaaataaaaactaggatcctaagtggraaaatagctttaaattagaaattgataccaaaaaataatgatatgtaa

SEQ ID NO: 110830 - DNA, 187 bp, Homo sapiens
aattgaggtttggcaaactctacctaggtttaagaggatgtgtggatgtccaggcagaagtctgctgcaagggtggagacctcgtggagatcatctactagggcagtgcaggggggaaatgtggggttggaggccccacacagagtccscactggggcactgcctagtgaagctatgagaagagggc

SEQ ID NO: 110831 - DNA, 538 bp, Homo sapiens
ttcttcctatggcaataacttaattgcatatggtatataaagaaccagttccagcagggagatttctttaagtggactgttttctttcttctcaaaattttctttccttttattttctagtaatcaagaaaggctggaaaactactgaaaaactgatcaagctggacttgygcatttatgtttgttttaaggcactgcattaaagagacatttgaaaagtatacacaaaaatcagatttagtaactaaaggttgtacaaaattttaaaactggttgtacaatcatgatgttagtaatagtaattttgttcttaaattaatttacccttaagagtatgttagatttgattatctgataatgattatttaaatattcctatctgcttataaaatggctgctataataataataatgcagatgatgttatataaggtatatcagacctacaggctgctggcaggatttgtcagataatcaacccacactaactatggaaaatgagcagcattttaaatgctttctagtgaaaaattataat

SEQ ID NO: 110832 - DNA, 538 bp, Homo sapiens
ttcttcctatggcaataacttaattgcatatggtatataaagaaccagttccagcagggagatttctttaagtggactgttttctttcttctcaaaattttctttccttttattttctagtaatcaagaaaggctggaaaactactgaaaaactgatcaagctggacttgtgcatttatgtttgttttaagrcactgcattaaagagacatttgaaaagtatacacaaaaatcagatttagtaactaaaggttgtacaaaattttaaaactggttgtacaatcatgatgttagtaatagtaattttgttcttaaattaatttacccttaagagtatgttagatttgattatctgataatgattatttaaatattcctatctgcttataaaatggctgctataataataataatgcagatgatgttatataaggtatatcagacctacaggctgctggcaggatttgtcagataatcaacccacactaactatggaaaatgagcagcattttaaatgctttctagtgaaaaattataat

SEQ ID NO: 110833 - DNA, 538 bp, Homo sapiens
ttcttcctatggcaataacttaattgcatatggtatataaagaaccagttccagcagggagatttctttaagtggactgttttctttcttctcaaaattttctttccttttattttctagtaatcaagaaaggctggaaaactactgaaaaactgatcaagctggacttgtgcatttatgtttgttttaaggcactgcattaaagagacatttgaaaagtatacacaaaaatcagatttagtaactaaaggttgtacaaaattktaaaactggttgtacaatcatgatgttagtaatagtaattttgttcttaaattaatttacccttaagagtatgttagatttgattatctgataatgattatttaaatattcctatctgcttataaaatggctgctataataataataatgcagatgatgttatataaggtatatcagacctacaggctgctggcaggatttgtcagataatcaacccacactaactatggaaaatgagcagcattttaaatgctttctagtgaaaaattataat

SEQ ID NO: 110834 - DNA, 538 bp, Homo sapiens
ttcttcctatggcaataacttaattgcatatggtatataaagaaccagttccagcagggagatttctttaagtggactgttttctttcttctcaaaattttctttccttttattttctagtaatcaagaaaggctggaaaactactgaaaaactgatcaagctggacttgtgcatttatgtttgttttaaggcactgcattaaagagacatttgaaaagtatacacaaaaatcagatttagtaactaaaggttgtacaaaattttaaaactggttgtacaatcatgatgttagtaatagtaattttkttcttaaattaatttacccttaagagtatgttagatttgattatctgataatgattatttaaatattcctatctgcttataaaatggctgctataataataataatgcagatgatgttatataaggtatatcagacctacaggctgctggcaggatttgtcagataatcaacccacactaactatggaaaatgagcagcattttaaatgctttctagtgaaaaattataat

SEQ ID NO: 110835 - DNA, 631 bp, Homo sapiens
tagcactcagtttaagtaatgctttaaaaaaatcttatttcactttttatgtaaagagataatttttgagaaggttactatgtttaaactgcatttgcatagaakgcatttactttgtattgtctatttgattattttattttaaaatcatttttattttaattgacaattaaaaattgcacatatttatcacatacatattgttttaaaaaacctatacattgtgaaacggcttaattgaggtaattaacagatagatatgggataacttttaaattgttgtcgaacagaaaacaacctagtttaaaggaacacatttaaaacatttggcaaatataaaaacttttattaataaatttacttatatttttaaacattttactttgcttttaaaaatatgaaaataatttataaaaatattattgaattacacaatttaaattttgcatttagatttttaaaatatactggttaaatataaatgaaaaacagtttatctttcattgaaattttataacaagggactttagagaggacaaaatacacaaagatttctaatgttacagtgttttgaaaaggaaatcatgatcataatatatagtgtatttctctctctagaaacaacaataaa

SEQ ID NO: 110836 - DNA, 584 bp, Homo sapiens
tgtctcgctttgttttcaacagccatcctaacaggtatgagataatatatcattgtaattttgatttatatttccatgacgatgagtgatgttgaggattttttcatattcctgttggccatttgtatgtgttctttggataaatgtctattcaagttatttgctcatttttaasttgtttttgcttttgagttgaaagaatcccttatatattttgtaatattaaaacttatcagacatatcttttgcaaatatgttcttccactccaaagattgcctttttattctgttgatttttttcttttgctgtgcagaatttttttagtttgatggagttccatctgtccctatatatttttggttttgttgcctgtgcttttactgtcatatacaggaaatcattgtcaagatcaatgtcgtgaaggtttccccctgttttcttttcttattttttgaaagagagtcttgctctgtcacccagcttggagtacagtcgtgtgatcacagctcaccacagccacgacctctctgggctcaagcgatccttccacctcaatcttccgaatagttaggaccacaggcgt

SEQ ID NO: 110837 - DNA, 584 bp, Homo sapiens
tgtctcgctttgttttcaacagccatcctaacaggtatgagataatatatcattgtaattttgatttatatttccatgacgatgagtgatgttgaggattttttcatattcctgttggccatttgtatgtgttctttggataaatgtctattcaagttatttgctcatttttaacttgtttttgcttttgagttgaaagaatcccttatatattttgtaatattaaaacttatcagacatatcttttgcaaatatgttcttccactccaaagattgcctttttattctgttgatttttttcttttgctgtgcagaatttttttagtttgatgkagttccatctgtccctatatatttttggttttgttgcctgtgcttttactgtcatatacaggaaatcattgtcaagatcaatgtcgtgaaggtttccccctgttttcttttcttattttttgaaagagagtcttgctctgtcacccagcttggagtacagtcgtgtgatcacagctcaccacagccacgacctctctgggctcaagcgatccttccacctcaatcttccgaatagttaggaccacaggcgt

SEQ ID NO: 110838 - DNA, 432 bp, Homo sapiens
agatattcaggacttgaactctaagcttgaccaaatagacctaacagacatttaaagaagtctacacccaaaaacaacagaatatacattcttctcatgtacatatgacacatactctaaaatcaaccacaatttggccataaaacaattattagcacatttaaataacgccagatcatacaaaccacactctcagaacacagagcaataaaaataaaaattaatactatgaagattgctgaaaaccatacaattacatagaaattaaacaacctgctcctgaataacttctgtaaacaatgaaattaaggcagaaactaagaagttctttgatattaaggagaaaaaagatataacataccagaatctctgggatacagctaaagcagtgggaggagaaartttgtagcacaaaacatcaacaagttacaa

SEQ ID NO: 110839 - DNA, 603 bp, Homo sapiens
aatgaacactcagactgcttctcacttcctatcacagtgaatactgctgcacaggcaccctgtggatatgtgtgagaatctcttcaacacgtgtattcagaarcagaattattgggccagagggggtgtctatacttaatttagtcaattttaaccaaatactgtcagattgcactccagaatgcccatctcttgcctgcttctccaaccagtctctaaattcctgcatcttcaaatccaggccaacacttcatgttgtctaactttctaatttttatccagtagactagatagagagtaacataccattgcaattttaatttttcatgtctcacattactaatgagcttaagcatctcttcatatgcttgagaaatttgggagtttccttttctattaattgcctattcctgtcctttgaccatttttttttttctatttagggttcttctttttagtctgatgaatttgcggaagttccttggatgatctagataccagacccgttgtcagttttaggcacttctaattttcatcttttatctttagacaaaattttactcctgagttcgatagccaaattgttatcagtagacagatctg

SEQ ID NO: 110840 - DNA, 468 bp, Homo sapiens
aagctgcacagcacattaggattaagagggaagctttgaaatatattttaaggttttaaattaacctacagtgaaattgactttttgctgtgttctgttttataaattttgacatgtgtagatctatggaactagcacaacaatcaggaaacataacatttccatcaaccacagaaactccctcatgaagtcacacacctccctccacccctagcccctggcagctactgctttgtttttgtctccataattttgtctttttgagcataatacaaatgggatgatacagtaygtgacattttgagttgggctcctttcattcagcaaaatcatttgacatgcatccaagttgtgtgtatcagtacttctgtttaattgctgagtagtattccattgtatagaaatatcacagtttattattcacctgttgaaggactttgagttgtttccattttgggggctattatg

SEQ ID NO: 110841 - DNA, 619 bp, Homo sapiens
agttgcaagaaagcgggtaaagcatcctatgtggtgagagctggggcaggctttctaaaggacaagctgcaaattttccctttatttctccagtttaccttttttcatttagaaatggttttcattaatttgcagccttctcatccttttttcagctactcaagayaaagatttgtctttgaaaaatagtggagttatgaggttaaagtggggtcactctttttgggtggatctgagatttgagaacatgctacagaattgtgatggagatcgatcgatcgatcggtagactgatagatagattgattttcatttctcaaaccacttatgttcagatctttaacatcaggtgaaaaagcaaggctcactgaaaaaaaagtcacctttctatgcttaaaaaaatattcttaaatgtacctaatgttcatcaattagagaacaaagctctcctgcatgtaagtcagagccaggtgcaagcgcagaagagtcagacagcagcaaaggacacatcctgtgctgtgggcaatgtggctcccagtgaataattctgtgtcacaacacatttaataagtaaaatagtaataaatagtgtttcacacaaggctgatatcctgaccat

SEQ ID NO: 110842 - DNA, 619 bp, Homo sapiens
agttgcaagaaagcgggtaaagcatcctatgtggtgagagctggggcaggctttctaaaggacaagctgcaaattttccctttatttctccagtttaccttttttcatttagaaatggttttcattaatttgcagccttctcatccttttttcagctactcaagataaagatttgtctttgaaaaatagtggagttatgaggttaaagtggggtcactctttttgggtggatctgagatttgagaacatgctacagaattgtgatggagatcgatcgatcgatcggtagactgatagatagattgattttcatttctcaaaccacttatgttcagatctttaacatcaggtgaaaaagcaaggctcactgaaaaaaaagtcacctttctatgcttaaaaaaatattcttaaatgtacctaatgttcatcaattagagaacaaagctctcctgcatgtaagtcagagccaggtgcaagcgcagaagagtcagacagcagcaaaggacacatcctgtgctgtgggcaatgtggctcccagtgaataattctgtgtcacaacacrtttaataagtaaaatagtaataaatagtgtttcacacaaggctgatatcctgaccat

SEQ ID NO: 110843 - DNA, 567 bp, Homo sapiens
cattgctattctcagggaggttatagttatgactaaaccatttttctaaatagcttatatcagaagtttaaagcaaccttcatactgcctattataattctagggaaacatcctctaaaccatgggtccccaacccttgggccatggactgatagcagtccatggtctcttaggaaccaggctgcacagcaggaggtgagtggcaggcaaacaagcaaagcttcatctgtatttacagccactcccctttgctcacattaccgcctgagctctgcctcctatcagatcagtggtggcatttgattctcataggaggcgaaccctatcatgaactacacatgagggatctaggttgggtcctcctaatgaaaatctaatgccttatgayctgtcactgtcattacccccaggtgggaccatctagttgcaggaaaatatgctcagggatcccactgattctacattatggtgtataattatttccttatatattacaatgtaataatgatagaaataaagtgcacaataaatgtaatgtgcttgaatcatcccgaaaccattctccac

SEQ ID NO: 110844 - DNA, 519 bp, Homo sapiens
aatattgtataatccctattgttgccacagcaactatgggccacatcatttgctctcctacagcccttgtcttctatggctctccatcctctgctaccacctgtgatcttatgaatatcataatgacaccaccataatgctattgattaccgacattgcatttctccctggaaaagtgtttattcctgcactcctcagatatatgagaaaccaatcccagaattctattttaagggtctgtttttttgggtcaattatggagccaatcacggtattggtcaaagtcgaagcaggaaacagatggcaaaaaagaaatcrggataactctagaaaaaattcataagggaactatccacgaaagtgtggatgagataaaagaaaactgcaagggatggtaaccacagaaccaatgcaatctctaggcccaacagatataacctctgggcccaaagggaagagaggagacactagttcctgggacgcagaaagagtcatctagcggggctgtcttgaggggag

SEQ ID NO: 110845 - DNA, 458 bp, Homo sapiens
cagccccaaaactacagctcctctaggcattttcctagcggaggctccctgctctgaccctgcctctgtgttatagagctgaactggggtcccattgcctggcacagtaaaaccagataccygccacaagatttttgcagtgatagaaaggaaggtgtttattgcagggcaccaagcaaagagaatcagcgtggctcatccttaagacttgaactccccaatgaatagcaggtaagagttttttcagtcaggggtaaatttcaggaaagcagaagctacaggcaaaattataaatcaatacttggaggttacacactggttttggcctaaaagtttgtgatatcctgaagcaggggcttacaggttatagatatatttaaagattttctgatttgcaattagttgataaagagaagctttgtttaaaaatttagagtcagtagaactggttaacggtt

SEQ ID NO: 110846 - DNA, 598 bp, Homo sapiens
gtggctacatgtagaagattccccacaatcaaacaagttaaatagctaggtcttctaaaacctaatttgttcctaaatccaraacaagcatggccattttggtgacaaacatagtgaaagactggtgcccagccttaaagatttgctcatagatattaaattgcaaaatttaaatcttagaaatagaggatgtggtgggcaatattagcagtcaactagattcaactgagggatgactagatgacaggcaaagtattatttctgggtgtgtttgtgagggtgttgataaaggagactgacatttgagttggtggactgggagaggaagacccaccctcagtgtgcgtgggcaacatccaataggctgccagtatggctagaacaaggcaggtgaaagaaggtggaattaggttgcttgctgagtcttctggttctctctctctctttttttttccacgccgaatgcttgcttccattcctcctctccttggacatcagactccagattctttggcctttggactccaggacttgcacctgtggcttcctaggggttctcaggcctttggctgcaatgttggtttccctggttttgaca

SEQ ID NO: 110847 - DNA, 598 bp, Homo sapiens
gtggctacatgtagaagattccccacaatcaaacaagttaaatagctaggtcttctaaaacctaatttgttcctaaatccagaacaagcatggccattttggtgacaaacatagtgaaagactggtgcccagccttaaagatttgctcatagatattaaattgcaaaatttaaatcttagaaatagaggatgtggtgggcaatattagcagtcaactagattcaactgagggatgactagatgacaggcaaagtattatttctgggtgtgtttgtgagggtrttgataaaggagactgacatttgagttggtggactgggagaggaagacccaccctcagtgtgcgtgggcaacatccaataggctgccagtatggctagaacaaggcaggtgaaagaaggtggaattaggttgcttgctgagtcttctggttctctctctctctttttttttccacgccgaatgcttgcttccattcctcctctccttggacatcagactccagattctttggcctttggactccaggacttgcacctgtggcttcctaggggttctcaggcctttggctgcaatgttggtttccctggttttgaca

SEQ ID NO: 110848 - DNA, 328 bp, Homo sapiens
caagcactgcctaagactgaatgataagggactacttcattaaggaaggaaatagtatgaaatccatcatgatcctgcattttaagtcttattcaccaatcacctttattaataataatgtttgatacccatctttctacatcctgcttctctcaattgtccattctagagatgatggaacagtttaacattaaaccctaaatccaaccaggatatgattaaaaggtatctaccactgcattcaggccaaggggatttaaaaaagacatatttttaataagatacctcaaattaaaaagtttamttagtgtaggatgatagaaatcag

SEQ ID NO: 110849 - DNA, 563 bp, Homo sapiens
tgatttaaatacccaatcctatttatctaaaacatacattgcaaacacacagatatctgttctctccacatgtcagcacccattcatgtcatggtttggaaatggggagaacagattccccttaaactgaaagtcagcaggtgtttctttacagttaactttagcaacattcatacaaaataataattaacaatgaccttcttgttaacgcacaaggaaacgccttcaaaactgcattttgttaaagtttctgtactaaaatgtagaaaaactgaactacacaaatattgaaaagttaaaaattcctttttattcctggtaccactaccacaatttacagggcaatatacctgatrtaatgaaaagaaaaagacaaagacaaagctacaacagataaaagacctcaggaatatacatctaattgacactacattgcattaatcaatagctgcactttgtgcaaactgtggctatgacagtcctgaacaagaagggtttcctgtttaagctgcagtaagttttctgactatggatcatcgttccttctgtggcagatttttaca

SEQ ID NO: 110850 - DNA, 616 bp, Homo sapiens
tatactattatgccaaatagtgtggattcccttcctttcttctcccttccaaattgctcccctttgggatcttgtggaaacagagggtctagtgctgtaccattgggctactggtggctgtccccttagttacccaaggatgagcattgagattattgccttgagaaggattccattaaaattttagtctagattttgcaaggcagaaggcaggtgactgwcttattttccagcttactcagttgactgggacagtgggactctggtcagaagggctgggagagaagaactagttccatcatagaagcaggcagaggaagctctgccttgcttgggggtcatgttgccagttgatggtgtggcaagatttaaaggagggctaagagctctcatgcccaaagataccctaacctcttcaccagtcaaattctcaccattaacaagagctcagtatctggttgtctggaaagcaaagtggaaccttggtcgggctgtctttctcaagctgtctcccagaataccttaactatgtttgagaatgtccatctcttaacatctctgctgatattgttagactttttaatcttgtgtcactcttttatgtaagaaataggat

SEQ ID NO: 110851 - DNA, 595 bp, Homo sapiens
acctactgtgaactagctaatgctaagaggtatgattgtttgatattaattcttaatacataatttaggcaaagtcaccccttgtcatttgggaggatactcctrttttttaatggtttccttagcagactatcacttactttcctatttggtcttcccatgaattggatttacctccaggttatatggcaatttaaaggattgtgatgagaaagaccaaggtcatggcattcagactagtgtggctttttttggtttctttatgtttttaaattttttttatcttttttaaaaaaataagtatctataggatatctttgaatgcccagctgctgagtctttggcctagaatgctgaatacttatgttgatgttgataagcttcattctcatatccacattgagaaacaagcagaaattcattgttatgtgagcatgtaaaggctgctcttttttggacagcatgtagcaattaaaagacaagggctgggttcttactgtcatctgaaaggttaggagaattctagtctcatgacagactttttccattattgtgaaagggagagagggatcttgtgcatatacccaactggggc

SEQ ID NO: 110852 - DNA, 622 bp, Homo sapiens
ctgacactgttcagctgaggacatttttcagatgaacgtcatccctagctacctacactcccagaaggtggacaactgagtgcctcakcagtggagaactgagctctgtgtgacataccacaacatacactacaagcaccatggctagaaataagaaccagtctggaatcaaaagagaagtctataagcatctacagtctacagtatcctgagagtaacaaagcaaaatagcatgagtcatggtatttgcaaggagggggctctttgaaaccctagatatggaagtcagaggtattattcagtgacacctcagtactgaccctaggctctcttctctctttcccccaatccaagcgcctggagagctgaatgtttgtgaatagtctttcacacaaatgcatttcatcattagttacatccttgtagaattgtgatacagcttgaacagtataagcatttagctgttttctccattctagagtacctctaaagtaatttccccaaaaggtcaccatgaacctcaatttcttacacatagtggttgcttctcagtcctgtcctagttgtcccttttgaggcatttatactcctgagcatcactactcctgttgaaaatatatcc

SEQ ID NO: 110853 - DNA, 622 bp, Homo sapiens
ctgacactgttcagctgaggacatttttcagatgaacgtcatccctagctacctacactcccagaaggtggacaactgagtgcctcagcagtggagaactgagctctgtgtgacataccacaacwtacactacaagcaccatggctagaaataagaaccagtctggaatcaaaagagaagtctataagcatctacagtctacagtatcctgagagtaacaaagcaaaatagcatgagtcatggtatttgcaaggagggggctctttgaaaccctagatatggaagtcagaggtattattcagtgacacctcagtactgaccctaggctctcttctctctttcccccaatccaagcgcctggagagctgaatgtttgtgaatagtctttcacacaaatgcatttcatcattagttacatccttgtagaattgtgatacagcttgaacagtataagcatttagctgttttctccattctagagtacctctaaagtaatttccccaaaaggtcaccatgaacctcaatttcttacacatagtggttgcttctcagtcctgtcctagttgtcccttttgaggcatttatactcctgagcatcactactcctgttgaaaatatatcc

SEQ ID NO: 110854 - DNA, 622 bp, Homo sapiens
ctgacactgttcagctgaggacatttttcagatgaacgtcatccctagctacctacactcccagaaggtggacaactgagtgcctcagcagtggagaactgagctctgtgtgacataccacaacatacactacaagcaccatggctagaaataagaaccagtctggaatcaaaagagaagtctataagcatctacagtctacagtatcctgagagtaacaaagcaaaatagcatgagtcatggtatttgcaaggagggggctctttgaaaccctagatrtggaagtcagaggtattattcagtgacacctcagtactgaccctaggctctcttctctctttcccccaatccaagcgcctggagagctgaatgtttgtgaatagtctttcacacaaatgcatttcatcattagttacatccttgtagaattgtgatacagcttgaacagtataagcatttagctgttttctccattctagagtacctctaaagtaatttccccaaaaggtcaccatgaacctcaatttcttacacatagtggttgcttctcagtcctgtcctagttgtcccttttgaggcatttatactcctgagcatcactactcctgttgaaaatatatcc

SEQ ID NO: 110855 - DNA, 622 bp, Homo sapiens
ctgacactgttcagctgaggacatttttcagatgaacgtcatccctagctacctacactcccagaaggtggacaactgagtgcctcagcagtggagaactgagctctgtgtgacataccacaacatacactacaagcaccatggctagaaataagaaccagtctggaatcaaaagagaagtctataagcatctacagtctacagtatcctgagagtaacaaagcaaaatagcatgagtcatggtatttgcaaggagggggctctttgaaaccctagatatggaagtcagaggtattattcagtgacacctcagtactgaccctaggctctcttctctctttcccccaatccaagcgcctggagagctgaatgtttgtgaatagtctttcacacaaatgcatttcatcattagttacatccttgtagaattgtgatacagcttgaacagtataagcatttagctgttttctccaytctagagtacctctaaagtaatttccccaaaaggtcaccatgaacctcaatttcttacacatagtggttgcttctcagtcctgtcctagttgtcccttttgaggcatttatactcctgagcatcactactcctgttgaaaatatatcc

SEQ ID NO: 110856 - DNA, 489 bp, Homo sapiens
agaatcaaatagtacagaactaggcctttaaattaaactgaacattggacctatcaccacgatatcctcctatccttcttatatctacctatctctcctatacccacctatcccttctatattctgtgacactaatattttccctttgatataagtgtgcatgtaaaagaattatttgaaaaagattttaaaatatatttctatcattgagaaaaaaacaaagttgytagggtgtcatgcgagcttaatccacttacggatgcatttattaatttatagaagaggaaaagcaaggctcatttactaggcattttgtgagaaagagctaattaataattgtacttcaagcatttgaagtggttacttatgaagttctttcaaatacaacaaggtaaataaaagtttaaaatgtgtaattgaatttgaaaacttttaataaaagctgaatatattagtgctttgcagatgatgattacacaaattgtgttg

SEQ ID NO: 110857 - DNA, 623 bp, Homo sapiens
aaagaccaagctgatggggaaaaaaaaagtatttggaaaaattgaaaaataagctttcaacattttgaaatacacccacatcttgataagcaaactaaccaactccaccttgggagataattctccatgggtaatttctccattgtctttctgtgcaatgttattatgcacagagtcacttgtttgggactgttttttcaaggatgtctatattacacatgtccttggaaaatggagacagtgtgtccctgcaggaagcaaatattgggcaggtctgcttacagcccaatagagaagattarcattaactgtccttggtgttgctcaggtgtgatgcaaactcactgagtgaacagattccacctagaattctctgtcttgcccctatagaatttgaggagcaagaaaaactggtgtgaatgtaaagcttaggctgcttgctgtgccacaacgataaagtccttttatctaaatcaggattgtcatgtcttctaatttcatcagtgagatttcggacttactacactgtaagtgttcgatatggtaatatctcagatccctcataatttttgacaatgcagcagagcctaaggtaacatttttaccttagtaattgtatctgt

SEQ ID NO: 110858 - DNA, 480 bp, Homo sapiens
atttcgttcagttcttcaaggtagaatccacaattctgaaaatattccacttgtggccatagtatcagtttctcaaagttgggtgatgataagtgatggtagttgtgaacctgaataattttctttacattcttttagactctgttaaacgggagcttaatggtagatgccttcggattaaatgcctttaggttcacatttcttagaagacacagtgaagttatttgyaagaaggaaaagcacaggagttaaaattgatccattccagtggaacagacttgctctatctctagctgcagggttgatctcccaaatgttaaggttgccacagacttcaaagtttagggagtcaggccctcacgtcaattaggcctcctacctctttgcttgcatagcaccacgtatatccataacatcaccccaatcaaatcggatttattttttctttccattttcttaaatcttcatgacagaagaatt

SEQ ID NO: 110859 - DNA, 609 bp, Homo sapiens
atacaaatatcttcatagtttttgactactcagagaggtccctccacatacctctaccctaaatttctttgttaccacttttccaaacatgcttttccaagtccctgaccatccagccaaacgattggctaaagcccattaatcagtatataattgcagatctggccacttctccttccatgcaaagtgcacaatcaggtgcactgctcaaagttctgcccactaggaagatttcccttcaccactgtccttcagggatgtcctaraaaggggctgtagtgcttcagctgtccacttttgggtggtgcctgcaatcgtgcagaaccatctgttaaccaggtcctagtcttcccttcctctgtcaactgatcattggaaactccccatgaggttatctttggaggctgggggagaaaagacatggttgcaggagtggagatcatgggcatttgagccacttccacatttaacttactatgccttcaggacctgctcgagcctgatcatgtatataccactttcatttgatgatagaatgctgctgtgcatgactgactttatgtctagatgggtcagaaagcacccggtttatgataggccgttcagttt

SEQ ID NO: 110860 - DNA, 596 bp, Homo sapiens
tcacttttctcctaaccccaatgcaaaataatgagaattagaatacaagaataaaatttattttttcttagaaaagtattttatgaactaaagcatgtatgtgaaaactaaaattaatttatatcatctttatatttttcaaaaaactgtgatttttattataaaaaagtgtttatgtagactatgaaagaatctgatgactttttcattgaatgatgtttgtttgttttttgtgagacggagtctcactctgttgcccaggctggagtgcagtggcgtgatcttgactcactgcaacctctgcctcccaggttcaagcagttttcctgcctcagcctcccgaatagctgggattacagccgcacaccaccasgcccagctaatttttgtatttttagtagagacgaggtttcatcatgttggccaggctggtctcaaactcctgacctcaggtgatccacctgcctcggcctcccaaagtactgggattacaggcgtgagccactatgcccgacccactgaatgatgttttcattctaccagaattatatgtgtatgtgctatttctaaacttaacaatttctaagggaattttt

SEQ ID NO: 110861 - DNA, 525 bp, Homo sapiens
taatttgtaaggagggctagtcattgagcacccattgaaaaactgatgggtaaaatatgccttggatcttccaacagatcaagggyagaacaaagttacatcactcagctctccttattcctgatcacgaattcactatgaaaactcattgcttcctctcaataccagtgagtcaggccaaaatcgacacttggtgggtgggcacattgggtgcttctctcagggtgaagtctcaaggcatctcattcttgatttgaaatgattcaaatgggttgccacttctcttttggaacctttattcctttgtttttcctgggaaatcttcaggaagcctctggaagttcccttggatgagtgaatctgggttgtgggggaatgagagtgaggatgggaaaggaaggaagagagtaggaagtgggtagcaattacattgatttaaaaaatcagatgctggttttgtgagtaactccttaaaagcccaagtccttccgctgttcatgaatatttgcataactgctaattaat

SEQ ID NO: 110862 - DNA, 581 bp, Homo sapiens
aaaaatttgaagaaataatggcttaaaatatgtaaattatgaaatgaaaaacataatgtgtagggagcaggaaatrtgtagtttttctatgtaatggaatttaaggggttatcagcttaaaacgtactgttatacctataagacgttatatatacacatcttggtgaccacaaaacaaaaacctatagtagatatataacagacaaagaaaaaaatcaaagcataccactacaacaaatcatcaaatcacaaaagaagactcaaaataagcaaaaaaaaagaaagaaagaaagaaagaaagagaaatctagcaaaatggcaataggaagttcttacctactgataattaccttgaaagtaaatagattaaattctctaagcaaaataaatagagtggttgaatggggtggttttgtttgtctgtttgtttgtttttgaaatggagtctcgctctgtcacccaggcaggagggcagtggcacagtctcagctcactgcaacctctccctcccaggttcaagtgattctcctgcctcagcctcccaagtagctgggactacaggtgcacactaccacacctgg

SEQ ID NO: 110863 - DNA, 581 bp, Homo sapiens
aaaaatttgaagaaataatggcttaaaatatgtaaattatgaaatgaaaaacataatgtgtagggagcaggaaatgtgtagtttttctatgtaatggaatttaaggggttatcagcttaaaacgtactgttatacctataagacgttatatatacacatcttggtgaccacaaaacaaaaacctatagtagatatataacagacaaagaaaaaaatcaaagcataccactacaacaaatcatcaaatcacaaaagaagactcaaaataagcaaaaaaaaagaaagaaagaaagaaagaaagagaaatctarcaaaatggcaataggaagttcttacctactgataattaccttgaaagtaaatagattaaattctctaagcaaaataaatagagtggttgaatggggtggttttgtttgtctgtttgtttgtttttgaaatggagtctcgctctgtcacccaggcaggagggcagtggcacagtctcagctcactgcaacctctccctcccaggttcaagtgattctcctgcctcagcctcccaagtagctgggactacaggtgcacactaccacacctgg

SEQ ID NO: 110864 - DNA, 484 bp, Homo sapiens
tactgaagttgttatttgaatagtcaataatcattgcaccaaaggttagatattcttgctctagagctgtcagtgaagcttctagattgtaaaccccagaggatttgggaactcagtgtattctgtttgaaaatagaaataacactagttcacatacccagagaaatttaacctgtatcacaacctactagagataaaagtaaccttgagtttgcacttacatctgcgactccctgtcacagttaaagtgtcattcattcaacaagtacttactgagcactcactctatgctcatctcaatgcagggaccaagaatgccatggtgagcaagacagaccggatccctcactgagctgtgagcatatcacttcacaatatctgcccctcccttcctcaaccccctgcattttctgtatcttgaccttattakgcctgccctactctctggcaggcggaagaagagtgctgggagcttgctggaatg

SEQ ID NO: 110865 - DNA, 461 bp, Homo sapiens
gaattcatttgggcaagttcagagctggaggttcctgcaggatatccaaaaggggatgcccagcaagcagttgtactcatgggtggagattccaggaaggaaktctgggcacatagatggtaaattcccgaacaagtaattttcatggcatgcttcatctttttacatatttttcatctgctttttgtctctcagcagttgcagaaatgaatcctgctactgtagtcaacagatggtttctcttctaatgctgaccaacacttaaaaaaaataaatgttttgcttattgacttgaacttcaccttcaatctgtaaacatcaaattctatcagcgcaaactctgagactgccaaatttttagagtctgtgaaaattttagggctgattcaatccagactccttcattatacaaataggaaatggtggccattacggttgtgagtttacaagattacatagct

SEQ ID NO: 110866 - DNA, 571 bp, Homo sapiens
attcttgctaccacttggtatttcattttttttttwaaattttattttagccttagtaatgggtgtgtaattatggctttaatttgcattttcctaatggctagtgatgttggacattttttcatggatttatttaccatctatacatcctctttggtaaagtatctattgaatgctttatccatttaaaaactggattgttttcttgttaagatttaagaattctttatatattctggataaaagtcctttgttggaaatgtgatttgcatatatattttattccatctgtagcttttattttcacactcttaacaatgtcttttgcagtgcaaaagtttttaattctggtgaaatccaacatgtcagtttcttcctttatggattgtgcttttgttgtcatgactaaaaactctttccttaacccaaagtcataaaagatttttatcctgttttcttctaaaagttttacaggtgtacattttctatttatatctgtgatccacgtgagttttttttttattctttatgctgttaatatggtgaattgcattgactgatatttaacgtt

SEQ ID NO: 110867 - DNA, 504 bp, Homo sapiens
tgagtatgtcttagggaattcctggcattttgacctaaaccctaattcttaaggaggctgagcctctggtaatctcaaactagtattgctgcaagtggacattcatagttacaattagacatgggaacataaaggggtatgcaagtgaatcatctgagttccatacatattcctctccaccctcactatgtgaaagcagacttaactcctcctgctaatcaattaccctggccaagatggtagcccctctcttcacctactggaccctggacacaaggagttcaaagtgcacagggggaagcaatggtttataattcattgggggcagtgttgtatgccttggtaaaatatgccaccttaaaagaaatcaacatatcaaagggatagctgcacttgcttgtttatcgcagyactattcacagtagcaaagacgtggaataaactaaatgcctgtcaacagatgaatggataaagaaaatgtggtacatatacacaatggaatac

SEQ ID NO: 110868 - DNA, 566 bp, Homo sapiens
ttgagtcttgtttctcaaatatcaaatatgggcaatagcaaccttctcaaattgtcattataaataattattaagataatacatgaaaaatgcccaccatagtactatgtcttacctttagcagaagccacaaaacaaaaaactgatttcaggagttactgagggaggggaggaaatagtcayacacacacttgcctctatttctactttggcaaaaagtggcatatggttataaagaccaaacatttctatgacaggattcattccttcaacagaaaacagtttaggtgaggtttggactctatataaaggaggggtcagattgcattttatttagaaactaataaaggatttgaagcagtcaaggggcatgctatgtttataataattattttggcttctatgtgtagaaatatttgaaggacggcaagactggaaagaggaaggtaagttaggaaactactacaattgctgaggcaaatgatgaaggcagtcagcaggaagagacacggatagaccggaacatgttctggatgtagagatgacagaagttaccggtgatacaa

SEQ ID NO: 110869 - DNA, 595 bp, Homo sapiens
aggcatttgataaaattcaacatccctttgtgattaaaatcctcaaaaaattgcttatggaagaaacatacctcaacacattaaaagccatatttaacagacctacagctagtgtcatattgaatgtggaaaaactgaaaatctttcttctaagttctggaacaaggtggggatgcccacttttgccactgttactaaacatagaactggcagtcgtagctgaagcagtcagagaagagaaagaaagaaagggcatccaaattgaaaaggaagaagtcaaattatccttgtttacagattacatgatcttatatttgaaaaaaatctaaagactctgccaaaactattagaactgataaatttagtaaacttgctggatacaaaatcaacatacaaaaattagtrgaatttctatatgccaacagtgaacaatctgaaagagaaatcaagaaagtaatcccatttaaaatagttacaaataaaataaaatacctaggaataaatttaaccaaagaagtgaaagatctatgcaataaaaactataaaatgttaatgaaagaaatttaagaggatgcacaagtcctcaagatatttc

SEQ ID NO: 110870 - DNA, 595 bp, Homo sapiens
aggcatttgataaaattcaacatccctttgtgattaaaatcctcaaaaaattgcttatggaagaaacatacctcaacacattaaaagccatatttaacagacctacagctagtgtcatattgaatgtggaaaaactgaaaatctttcttctaagttctggaacaaggtggggatgcccacttttgccactgttactaaacatagaactggcagtcgtagctgaagcagtcagagaagagaaagaaagaaagggcatccaaattgaaaaggaagaagtcaaattatccttgtttacagattacatgatcttatatttgaaaaaaatctaaagactctgccaaaactattagaactgataaatttagtaaacttgctggatacaaaatcaacatacaaaaattagtggaatttctatatgccaacagtgaacaatctgaaagagaaatcaagaaagtaatcccatttaaaatagttacaaataaaataaaatacctaggaataaatttaaccaaagaagtgaaagatctatgcaataaaaactataaaatgttaatgaaagaaatttaagagratgcacaagtcctcaagatatttc

SEQ ID NO: 110871 - DNA, 579 bp, Homo sapiens
gcctactttgtgcatttgaaacaggggcacactctgacagaagtaagcctttcaaaatcaatattgtgagaagagctgccaaaatttgaccagtaacaggaatcttgaagtcatcagtttttcagaagactgaggtggggcagtaaatccagggcagatgtatgaggtaatgaaagaaaatttaagaatgcactcacacattgatgtgagaactattaagatccccttctctctctyctatacctcaagttcgttatcatgcactccaagctaccaaatattccagtgtggttctaaaatgaacttataaatccccccacagacttgatggctgttgtcagtcacactttgctaaaataagtaaatatttctgtcttcttgtggtatgtgggtcctgttgatctttagtatccctggctttgctcttgtcttttgttagattgtgtgtggattattattggtggaaatgtcatagtcttctcattatttattgcttaaaatcatttaaaaaatattttaagaataaatttaccaaaaatactttgagtgtcctcagtactcccaaaatccagggacttc

SEQ ID NO: 110872 - DNA, 588 bp, Homo sapiens
atgttataggttcctgttctcatgtttcatgacaactgggtaagaaaacccaattcagctgcttctgcaaaaaaattgccttgaaatagaactaaaatatttgcattgcattgtccaagaccctgtctttgaatatgtactgtgtaccttgatatccttgattatttattatttgctcccttcctaagcaactatcctctgattaacagtttttatttaataaaggatgctaggtgttaatttaagaagtgaaatttgaaataaagcagacstgttacactctggctctgctaactacaaatttatcacattgaaaaaatgatttaccaattggtatttgagtttcttgtatgtaaaatgtttttaataaccatgcctgattcattggtttgtttttttttggaataaggaaaatagtgtggttctctattttggttctattgttgttcccactttatagattagtaaactcaggtttacagaagttaaatgacgtagccgatactaaaacactgctaaatacatgattcaggaatcaaacacaaatgtagtgacctgacaactcaactgcttaaccacagttccata

SEQ ID NO: 110873 - DNA, 381 bp, Homo sapiens
cagcaatgtctcactttggtcatttatacactccttcattcattcatcattgcattctttatttctttatcattttacttttttaagtacttactattaccaggctcccatcttattgaaaacttatggcatcagtagatagttttaagaacgtctgaccttcatgtagtgctttccacatttgagagagaaatataagttttgttattgtcattgtttttaatctgaacttacagtttccccttggccctttccctcacaacttagagtgctgaaggtaggaagcagcaaatttgaaccatagaaaacagataarttaatgctaaagggatttgaattgcatttcaatctagtctattgggaaactattaatagtttcag

SEQ ID NO: 110874 - DNA, 630 bp, Homo sapiens
actctaccacgttaatgtcaaatatactcttaacatttgggaaatcagtacaatagcctggatagtgctctagccaagcccactgatcacttccctttaacagatgctatgcttcatggtaaagtttatgtaagtcaataggcagagataattagggaaatttgagttacaaatttcaagaaactcagaaggagacagaattttttcttaaggaagatagaattctgtggggtgaggtgtcattctygaagtaaaataagagtaatctctaggaaaacgggaattttcaagtaaaggaccataaatttaagcatacatttccaaagaatgaaaatttatcaagtcagataaattgctggagtggctctttcaccttttaaagctttgtctgaaaataacagtagttcccttataagtgggggtactctcttgtcataaatcccaacacagaggatgacatttattataaactgaaaggtctataccttaaagtcagagaataagagaaaaatggaatgtttttcatattgcttctcatctcatgaacttaaaaaatactctttgcatcttctattttggcaaaaagcaaatgctttgccatgttgaaattaaaatagctatttcaattaa

SEQ ID NO: 110875 - DNA, 630 bp, Homo sapiens
actctaccacgttaatgtcaaatatactcttaacatttgggaaatcagtacaatagcctggatagtgctctagccaagcccactgatcacttccctttaacagatgctatgcttcatggtaaagtttatgtaagtcaataggcagagataattagggaaatttgagttacaaatttcaagaaactcagaaggagacagaattttttcttaaggaagatagaattctgtggggtgaggtgtcattcttgaagtaaaataagagtaatctctaggaaaacgggaattttcaagtaaaggaccataaatttaagcatacatttcyaaagaatgaaaatttatcaagtcagataaattgctggagtggctctttcaccttttaaagctttgtctgaaaataacagtagttcccttataagtgggggtactctcttgtcataaatcccaacacagaggatgacatttattataaactgaaaggtctataccttaaagtcagagaataagagaaaaatggaatgtttttcatattgcttctcatctcatgaacttaaaaaatactctttgcatcttctattttggcaaaaagcaaatgctttgccatgttgaaattaaaatagctatttcaattaa

SEQ ID NO: 110876 - DNA, 630 bp, Homo sapiens
actctaccacgttaatgtcaaatatactcttaacatttgggaaatcagtacaatagcctggatagtgctctagccaagcccactgatcacttccctttaacagatgctatgcttcatggtaaagtttatgtaagtcaataggcagagataattagggaaatttgagttacaaatttcaagaaactcagaaggagacagaattttttcttaaggaagatagaattctgtggggtgaggtgtcattcttgaagtaaaataagagtaatctctaggaaaacgggaattttcaagtaaaggaccataaatttaagcatacatttccaaagaatkaaaatttatcaagtcagataaattgctggagtggctctttcaccttttaaagctttgtctgaaaataacagtagttcccttataagtgggggtactctcttgtcataaatcccaacacagaggatgacatttattataaactgaaaggtctataccttaaagtcagagaataagagaaaaatggaatgtttttcatattgcttctcatctcatgaacttaaaaaatactctttgcatcttctattttggcaaaaagcaaatgctttgccatgttgaaattaaaatagctatttcaattaa

SEQ ID NO: 110877 - DNA, 544 bp, Homo sapiens
taagtaaagtctagagtattctcctatgttcccagcagagtttaacttttatcttataaatataaatgttccatgtagatggaaattcctgaggactgtaatatctggggactaattttttttcctttaggctgcaggagtgtccaatcttttgccttttctgggctacaytggaaaaataattgtcttgtgccacagataaaatatactaatgatagctgctgagctaaaaaaaaaatcgcaaaaatatctcatattgttttaacaaagttgatgaatttgtgtggggccgcattcaaagtcttcctaggctgcatgcagcccatgggccacaggttggacaagcttgctttgggacattaacttagaatatgagatcaatagcttttcaaaacttatcttggaagccattatccttagcacactaacacagaaactgaaaaacaaatactgcctgttctcacttagaagtgggagctaaatgatgagaacacatggacacatataggggaacaacacacactggggcctttcaaagggtaga

SEQ ID NO: 110878 - DNA, 548 bp, Homo sapiens
aactgagggtactttgggggcagtagtagccagaagaagccttgtctgtccagagacaaatcctccaataaatactcaattgtcacccattctctccccaggggttttgttaaacaggagttttactctcatcacaggagagtaaaactagaagttggcatcacactcagataaactgatgcaaactatcatattgaagcagcctcgtcatctggggtaacacccaggsttcaatatctcacagccatggagatcaaggatgtggacacacaaagggtgaagtttagagcagaaatttaatagatgaaagaaagagaatagctccctggtacagagaggggtcccagaaaaatgggttgctgattcacactttggatatagaggcttttataagaaaccaacagaggggctgggcatctcatttgtataaggtgtgcattactggtagttctgccccatcctcctagtgtgcatgcaggcccttaacttgagttattccatcttcctttgttctccttactgcaaatgtgtcaggggttggaattttc

SEQ ID NO: 110879 - DNA, 572 bp, Homo sapiens
acactgtctttattaaggattattgtttggaaaattgtctcctctctcaaataataaaggtttccaccttttttgaaatctgtgggttattactttggctaaatgaatgacctgttttacaatgacctgtgattctattctggcaatataaagtgttttaaactttttatgttcagcaagctttccaaaattaagttctaacttcagtcctcattaatttttggattttggtttcctgaagtccaaaagagacatatttggcttattatcatacaagaagtattgtcaaatatgaaacagtgtttaatcttcttgggattatatttatataaatgtattattagtgtgtgttccagaattgtatgaaattcctgtgattctaatatgtcttaacgtaygttatcagtagtaattatgattattatgtaaaatcggtgtatgccatagaagtaaacaaatttccttgtcaattgtgtctttagctatgcctgttctaaaacttgtcatatacagttctttttacttttatccttttccaaagatgtttttataatcagctataggattctgac

SEQ ID NO: 110880 - DNA, 572 bp, Homo sapiens
aataaattattttaagtcactcaaacctgaatttcaaccagaaacattctatttttaatctattttattaaaaaaattaattgtagtgtatgtgacccaaggttttcctagctaaaccaagttattgaaatcttccacactataacatactgtgcttatgtaataaaatggtagctaaatggattactgggacttgataaaccatactccgagatgaagtccccagaaatagcttcagaagcaaatttttctctctgattttttttggcctgctgtytctgaacccctcattcttgcctgaggctagaaatagaaactagaatccctcttcttcaatgcaagtcttacaaaccagaatcttttttccccaaagctagccataaagcctaaaaatattactctaactctccttctgcctttctttgtaaaatcaggtcataaggacataatctaagctaccatgtttggttgaaggtaataacaccctccctccagaaagaattctgccccacacacagaaagaaagaatactgcatagagaggccaaaaagcatgtaaatggacagaaattg

SEQ ID NO: 110881 - DNA, 572 bp, Homo sapiens
aataaattattttaagtcactcaaacctgaatttcaaccagaaacattctatttttaatctattttattaaaaaaattaattgtagtgtatgtgacccaaggttttcctagctaaaccaagttattgaaatcttccacactataacatactgtgcttatgtaataaaatggtagctaaatggattactgggacttgataaaccatactccgagatgaagtccccagaaatagcttcagaagcaaatttttctctctgattttttttggcctgctgtctctgamcccctcattcttgcctgaggctagaaatagaaactagaatccctcttcttcaatgcaagtcttacaaaccagaatcttttttccccaaagctagccataaagcctaaaaatattactctaactctccttctgcctttctttgtaaaatcaggtcataaggacataatctaagctaccatgtttggttgaaggtaataacaccctccctccagaaagaattctgccccacacacagaaagaaagaatactgcatagagaggccaaaaagcatgtaaatggacagaaattg

SEQ ID NO: 110882 - DNA, 609 bp, Homo sapiens
atgatgaacatctggatttttctagttttctattttatatacaataatgttaataacatttatataattaaattgcatgctttggtgtaaatatatagagaataaagttttaaacacgaagttgctaggccagtcgcagtggctcacgccagtaattctagcacttttagaggctgaggcatgtagatcacttgaggccaggagatggagaccagcctagccaacatggtgaaaccccgtctctactaaaaatacaaaaattagctgggcaagtgccgtgtgcctgcaataagttgctgagtcatatgatacatgcatatgtccattttaaattttaataggcgttaccaaatgcacttaagaacacaccagaccaggcacagtggctcacacctgtaatcccaacactttgggaggccaaagcgggtgaatcacaatgtcaggagttcgagaccagcctggccagcatggtgaaacctcgtctctactaaaaatacaaaaaattatcctgacatgtggcacatgcctgcagttccatytacttgggaggctgaggcaggataattgcttgaacccagcaggcagaggttgcaatgagctgaggtcaca

SEQ ID NO: 110883 - DNA, 592 bp, Homo sapiens
ctgactgtgggaatagtttctcaaggtgtcactcttgagttggttcttcctttttatgaatcttagtggtcctaagtaacttgggtgcttaaggcastaggtgatcagcctttatgcatgcccaccagattatgcaagctttcctgtatgttcttctcaagggatttccagtaagaatatttcatgtcatgagtgatagtgataacttccaacactcccataagatgtttgtcacctaagatgcctctcagctggaggaacagtggctcttatatttaggacttattttgacctcacagagagtcttttataattttggtcactcaggaagaaagtttagacttgtcaattgaattcggctccagaatttggccagttttaaagatttacaaactatgcttaacccacaaagactcatttccttttttcaaagagaaactgatttctccttgattaaaattttgaatgagagaaaaagttatagaaacatcaacaagtaattcaaaatgaaactttaaccttagagaaagtgaagttaagatgaaagtcacaaatcttgatcagtagaatctctagagaataacaaatgaaa

SEQ ID NO: 110884 - DNA, 577 bp, Homo sapiens
aacagcaacaaacaagggtaatttgaaattaaaaatataataccattaacattagcaccaccaaaatgaaatacttagytgtaagtctaataaaataggtacaagacctataaaacagaaactataaaactctgatgaaagaaatcaaagaactgtaaaactgaggctgttttacagttaactttttaaaataaatagaacactagaatataaccataaaaagtataatatagtaaatacataaatctataacaatttatcagtattaaatattatgtattgtacataatcaaatgtgctatatttttatataagtggcagttcagtagtttataccagcctcaccacaaatatgtgagtaatgccttgtactatgatgtttgaatggttaggaccactgtggtatatgcagtctgttaaatgccattatatggaacatgactgtatacatacaaatatgtgtatctataatatatatatataatatatatagtcagcatagtatgtatatcttttgagagaattctgtatgtagagtcactgaaaatgtgtcgatgtccagccaaacatccatatg

SEQ ID NO: 110885 - DNA, 628 bp, Homo sapiens
gcatgctggtatttcataagccaatacggataccttttacattaatagccagtgtctgtttcttcttggcaaatggcatgggagctgctgtgcagacactcattagcaaaactgtagaggctctcaaccctccatatctggcagaataagcttatgagtcacttaatctaaagcatttaactatcagtgctctgaaatttagagggaaaaagatatggaaaaagacaataatttctggaggttctctctgtgtgtgtgtgtacatttatgatgcatcagtgttctatgtcctcctcctgactgaaataaaataataaaagttgattacttataatgaaagtcactttacaataaccccaaatgtctcctattatmcctcataattttccccatataaatgttagtttctttccccttaaaacatcttttaaatttacagtgaaagacattaattttgagagcctactttatgacagacagtgtgctaagtgctttagctttgtatattttaggacacaggatgagcccataaactgaagcaaaaattcaaaaagggatcctatatgggtgatgtaatacttaggactaacttctatgatatttagttctatccaaactcaaactggcc

SEQ ID NO: 110886 - DNA, 473 bp, Homo sapiens
actattcagctgagtacttatcagtggacatatgtgaggaaaatatctaaggctgaggaaaacacaacccaaaaggattaggagaaacaatactaatacctcacacaggctgagagtaaagcctatttccaacaggcaggctggaaaaaggaaayttgtatatccagcaccttccacagtttctttgtgtgtgttaagagcacctaaaatgtgttcaacaacacagcgggataggaggtcctaggctttactactttattagtccattctcacactgctataaagaactacctgagactgggtcacttataaggaaaagagatttaattggctcatagttctgcaggctatacaggcttctgcttccggggaggcctcaggacacttacgattgtggcggaaggtaaagaggaagcggggacatcgtcacatggctgacaggaaagagagagtgcaaagggggaggtgctaca

SEQ ID NO: 110887 - DNA, 473 bp, Homo sapiens
actattcagctgagtacttatcagtggacatatgtgaggaaaatatctaaggctgaggaaaacacaacccaaaaggattaggagaaacaatactaatacctcacacaggctgagagtaaagcctatttccaacaggcaggctggaaaaaggaaacttgtatatccagcaccttccacagtttctttgtgtgtgttaagagcacctaaaatgtgttcaacaacacagcgggataggaggtcctaggctttactactttattagtccattctcacactgctataaagaactacctgagactgggtcacttataaggaaaagagatttaattggctcatagttctgcaggctatacaggcttctgcttcyggggaggcctcaggacacttacgattgtggcggaaggtaaagaggaagcggggacatcgtcacatggctgacaggaaagagagagtgcaaagggggaggtgctaca

SEQ ID NO: 110888 - DNA, 610 bp, Homo sapiens
agatgttttacaaaatagcccacctgtttactctggcttttttaattccacaaagccacatattctcttgattagaaaaacataaaatactccctcactaaaaggccagagaggaggaaagactatcaatgtttattctctgaaatttttccctggattatactttttccggagaaacaaatctattatttatatgttatatgcataaatatatttttacacacacacacacacacacacacacacacacacacagcacagagaatggattctgtctcatatataaaagaaaaagtcctcagggtgatgtcagcaacaaaatggtggaatagaaggctctcgactactctcctcccacagacacactgagtagacacctacacacagatcagttctctccaagagaaagccaaactctagttaaaagactcctacacactggattactgagaaaatatccacatcaaaacgagtagaaaaaaygaagaaaaacttgcacactaaccccatcctgagcacagtgccttacaacctagaaggaatcctcaattcctagcttcttcctgaagagttaggggtttgtaccacacatacagtgccccaattttac

SEQ ID NO: 110889 - DNA, 610 bp, Homo sapiens
agatgttttacaaaatagcccacctgtttactctggcttttttaattccacaaagccacatattctcttgattagaaaaacataaaatactccctcactaaaaggccagagaggaggaaagactatcaatgtttattctctgaaatttttccctggattatactttttccggagaaacaaatctattatttatatgttatatgcataaatatatttttacacacacacacacacacacacacacacacacacacagcacagagaatggattctgtctcatatataaaagaaaaagtcctcagggtgatgtcagcaacaaaatggtggaatagaaggctctcgactactctcctcccacagacacactgagtagacacctacacacagatcagttctctccaagagaaagccaaactctagttaaaagactcctacacactggattactgagaaaatatccacatcaaaacgagtagaaaaaacgaagaaaaacttgcacactaaccccatcctgagcacagtgccttacaacctagraggaatcctcaattcctagcttcttcctgaagagttaggggtttgtaccacacatacagtgccccaattttac

SEQ ID NO: 110890 - DNA, 610 bp, Homo sapiens
agatgttttacaaaatagcccacctgtttactctggcttttttaattccacaaagccacatattctcttgattagaaaaacataaaatactccctcactaaaaggccagagaggaggaaagactatcaatgtttattctctgaaatttttccctggattatactttttccggagaaacaaatctattatttatatgttatatgcataaatatatttttacacacacacacacacacacacacacacacacacacagcacagagaatggattctgtctcatatataaaagaaaaagtcctcagggtgatgtcagcaacaaaatggtggaatagaaggctctcgactactctcctcccacagacacactgagtagacacctacacacagatcagttctctccaagagaaagccaaactctagttaaaagactcctacacactggattactgagaaaatatccacatcaaaacgagtagaaaaaacgaagaaaaacttgcacactaaccccatcctgagcacagtgccttacaacctagaaggaatcctcaattcctagcttcttcctgaagrgttaggggtttgtaccacacatacagtgccccaattttac

SEQ ID NO: 110891 - DNA, 613 bp, Homo sapiens
tcacaacttccatttcactgattctgtattaatccgttttcacactgctgtaaagacataccagagactgggtaatttataaagaaaatgagatttaatgcactcacagttccatgtggctggggatgcctcacaatcatggcagaagacaaaagtcatgttttacatggtggcaggcaagagagaatgagagccaagtgaaaaaggaaaccccttataaaaccatcaggtctcatgagacttatacaccaccacaagaatagtatggaggaaaccacctccctttcaattatctctcaccaggtccctcccacaatacgtgggaattatgggagctacaactcaagatgagatttgggtgaggacacagccaaaccatatcagatttatttccattgctctttttatacaaacttttacttctgacaatggcctaccaagctctacatacctagtacctgcctaactcttcaaactcattacgaatcaatctgcccactgcatrcaatgcttcattcactctggctttttaaaatttacgatccaggaagtcaaggcttttccagttttcagtctttggacttgtttctctgcctacgccattgttccccta

SEQ ID NO: 110892 - DNA, 598 bp, Homo sapiens
ttgttttccacttcagtgtcttacaaggctgcagtcaaagtgtcagttacgtcttggtttttatccagctttgtctaagaaaggatcttcttccaagttcatatggatattgacataattcaattctttacagcctgtaatgatgagggtattagtttcttgctgttagccagcagccggtctcagttccttgccacatgggcctctccagcatgcctgcttgtttcatcaaagttaaggagaaagtgtctcctagcaagaggggtatttaaccttatgcaaygtaatcagcaaagtgacattccattacctttaccataatatattgtttagaaacaaatcctgtgccctgccaaagggaaggaatgacacaaacaggcaggagtatgaggagagagaaatcattgggagtcatctgacagttttgtcacatgtgtccatgaaatgggaatcaatggctcttgcctagtttatggctctattctgatagtgcccagaaacatgctacttgattttcagaaaggtgacttttcagttcaaaatgtgtatttccagtggttcctgaattagatttaatggactagtaaaatttgattga

SEQ ID NO: 110893 - DNA, 642 bp, Homo sapiens
ttccttttctctctcacacactcacacatacaacaaatacatcctgttcattttctaatcagaattccatgctaaaagaatcatctttctgttcttaccatgtttgtgaaacataggcctcttcgtacaaagataaagaaagtttccattctttccacagattacctgtcttttgaaatgcattttgtggtccactcagtccatttctagagtatgaaaagaacagcacatggtaattaagacagtcaccgcatgtgcaacactataataataatggtcaggattagggacccaattttgcccatgtttatttgcagatgtgttcattttgatctgcatatcatgctgtggtgcttgtgttcaaggctgtcataatgtgctgtgcatgtgttatatttccagtgacttctttctttgctggcaccaaggagcatckgattcagtgggagacaagttgaggagcattgcttccacgccattccatcttccctacctggtcactggccccacatagacaggttctctcaatccaaccacagaattcctcaccacaaaacactcactgttctccaaatgaatgtcacttgtaataattggccaacatttttatttttttaatctgtatctattatgatgttattt

SEQ ID NO: 110894 - DNA, 595 bp, Homo sapiens
gtgtgactttacaattttattgcagttttgcaggggcatggggagaggcctcagctcggactacagtgtccagctctaacctccctggcgatcccattttcctcccatttgccttctttcctttcctcagcagattcctgttgtgattgcayacaaagcagctttatcaaattctccaccaccttgggaacagaagatacccaatttccctgggaccctcctgccataagcagaataattaaagcataacccaatatagtgagtctgtctctggcaaaataatttgcctcctgctaagagaataaaatttttctttgacacattatacctgtgttctcagtggccagtataggacccgacctgagatacatggttattgaatgtgtgaatacattaatttataaaatggtatgtatgaaagttattataaactgaaaagaatctacatcattgataaattatattattttcataacaattagtaacaagtagccctgctttgggcatccatttataagaagaggataagagcccaatcaggacatctcagatttctcctaagttttctttccttgctaaaggaggcagttgttca

SEQ ID NO: 110895 - DNA, 595 bp, Homo sapiens
gtgtgactttacaattttattgcagttttgcaggggcatggggagaggcctcagctcggactacagtgtccagctctaacctccctggcgatcccattttcctcccatttgccttctttcctttcctcagcagattcctgttgtgattgcacrcaaagcagctttatcaaattctccaccaccttgggaacagaagatacccaatttccctgggaccctcctgccataagcagaataattaaagcataacccaatatagtgagtctgtctctggcaaaataatttgcctcctgctaagagaataaaatttttctttgacacattatacctgtgttctcagtggccagtataggacccgacctgagatacatggttattgaatgtgtgaatacattaatttataaaatggtatgtatgaaagttattataaactgaaaagaatctacatcattgataaattatattattttcataacaattagtaacaagtagccctgctttgggcatccatttataagaagaggataagagcccaatcaggacatctcagatttctcctaagttttctttccttgctaaaggaggcagttgttca

SEQ ID NO: 110896 - DNA, 596 bp, Homo sapiens
tgcatctgcattgttcccatagacaggatctctgacataaagatcacttaatatgcttttcagaacagtggatcagagtgagaatacagcttcttcatctcgccctgccccaggacttcaccctgcactcatcaaccaatcaaggatctccacaccttggcccacttcaaaacctttaaaaactcttaccctaaactcctcaggaaaatggatttggggttccttcccatctcatttggtgaccctacctctttctctgctgcaacccagtgtctgggcatattgactggctgtgtgcattgggcaatgaacctatttgttaggatgatgacaatgaattccttccccatcttgcttgggaaatattcacacttgtttggggtgcacttgaacccttgcccaccagtatggatgagacaataaattgtgcagaaaaatggcaaccaatatgggaaaacctaattagaattaatgacaacattcttgggtaataacaattgtgttcattrggtttggtgctgttttacatgcattatttcttgtacttctcccagtaccccttatgagataagaactatcaccatcctcattcttcc

SEQ ID NO: 110897 - DNA, 346 bp, Homo sapiens
accatgtcctcctccaaaagtgctgggattacaagcgtgagccactgcacttttttaaaaaagagaatttttcaaatgtaacccagaatcccagacccccattctatttgagcaaatgagaacaaaacctgggaatctgcctgctaacaagaaacccagatggtccttgatacagtggctgtggcctacaccttaggaagcactatggtcagtacmagtctcttagcagaaaacgaggggacctggaagggcagcaaggttcatgtgagattttacagaggagcatctcttcctctaagtcaagaaggaagaagtcaggtgcccaagaggaatatgcacagagtag

SEQ ID NO: 110898 - DNA, 570 bp, Homo sapiens
ctaatctacatgtatctcaacaccagtacattctggtatgttgactgggatgtgctcctacttaaaattaaacttctgagttggccacattgagtctatgggacaggattcagtagcttcaacaaagggtttgtttcagcatttgaacagatccatggactttgccctgccttagctgctttgaagtgttttatgaagaggaactggttccatctgggcataacttcaagtggaactaggaggccgtcagttttctcataatctctaaagaggtatgattgcaaatctgcctttaaacagcagctcagagcttcttcacccttctacactgtacagcaatctcagacagaatcgtagtcaagaggagacatactggaaaattgtctaaagcagtgcttttcaaacttgtttttactacaacgtgcagtaagggatgtattcagccacaggtatacacacttccacatgcacacacacacactcatatacacacacacaagttttatgttacagtacttacccttaatacaaatactctatttgtayacatgtacatatgaatacatatga

SEQ ID NO: 110899 - DNA, 556 bp, Homo sapiens
ttatctcacaccacatatagaaatcaactcaaaatggattaaagacttaaatgtaagacctgaaactgtaaaactctagaaaaataggggaaaagcttcttggcattggatatcacaccaaaagcacaggcaacaaaagcaaaaaagacaagagggcttatatctgactaaaaggtttctgaacagcaaaggaaacaatcaacagggtaaaaagacaacctacagaatggagaatatatttttcaaaccatgtatctgattagaaattaatatccaaaatataagaaatgtagctcaatagaaagcagtagaaatagctcaatagaaaaacaaacaaaaaccaaaatcccaaataactcratttaaaaatgggtaaaggacctgaataaacatttctcaaaagaagacacctactggtcagtagatgtacaaaaagagacttcaataatcattagagaaatgcaaactacacaatgagatatcacttcacctgttagaatggccattatcagatggacgaaagataataagttttggggaggatgtgaagaacaga

SEQ ID NO: 110900 - DNA, 583 bp, Homo sapiens
gcccatcaatcaatgagtggataaagaaactctgagaggtacatatatatatatatgacggaatamtactgagccataaaaaggaataaattaatgacatttgcagcgatctcgatgagattagagactattatcctaagtgaaataattcaggaatggaaaaccaaacactgtatgttctcacttttaagtgggaactaagctatgaggatgcaaaggcataagaatgacacaatggactttggggactcagagggaaagggtgggaaggggtgagggataaaagactacaaatagggtgcagtgtatactgcttggatgatgggtgcaccacagtctcacaaatcacaactaaagaacttactcatgtaaccaaacaccacctgttccccaataacctatggaaataaaaaattttaaaaaaataaaataaaagatagagttcaaggaggctaggtttacttacagaagcaattatctgaacagtcgaggcaattaagatgtcatctgaactaagacctaaatcatagatgaaattgtgggcaagttgttcattggggggaggggcacagaaagaggtagc

SEQ ID NO: 110901 - DNA, 615 bp, Homo sapiens
atactactgagccataaaaaggaataaattaatgacatttgcagcgatctcgatgagattagagactattatcctaagtgaaataattcaggaatggaaaaccaaacactgtatgttctcacttttaagtgggaactaagctatgaggatgcaaaggcataagaatgacacaatggactttggggactcagagggaaagggtgggaaggggtgagggataaaagactacaaatagggtgcagtgtatactgcttggatgatgggtgcaccacagtctcacaaatcacaactaaagaacttactcatgtaaccaaacaccacctgttccccaataacctatggaaataaaaaattttaaaaaaataaaataaaagatagagttcaaggaggctaggtttacttacagaagcaattatctgaacagtcgaggcaattaagatgtcatctgaactaagacctaaatcatagatgaaattgtgggcaagttgttcattggggggaggggcacagaaagaggtagcagatgtggtatttgtgtatttgtatttcacaaagaaagygaggtgaataatacagtggggaacatgttacaatctattacttgtgagaacacaa

SEQ ID NO: 110902 - DNA, 569 bp, Homo sapiens
gttctattgtactgcacctaaggtggcactcaaaccacaagacacagtgcttcccactcttccctttttttcccaaaggcagagaagcctctcccaccacagtcccatcaagcattctgccagacaccactgatatttccttaaagstcaagggttaagtcagcttattgtgaattttccctggcctgggactcaacctttagggcaggaagctcccctccagcccagggcaggtccagagatgctgtccgagaatccagtgctgaaatcggggacccccccccccccacacccccaggagcctgcttggtgctctaccctgccgtggttgagttagtacctgaggtgcaagacaaagtctcctttactttttcctctgcttttctcaagtagaaggaatttcatcccttcaccaccactgctggtaatatgttgaatctcacctaaagccagtaagcctcagaggctcacccaaggcccttgacagtatctgggtgtagatctggttgttcagggcccaacggttcttcagttaggtgataaatgttgtcaggacttgtttcttgact

SEQ ID NO: 110903 - DNA, 535 bp, Homo sapiens
gccatgttgccctatgggacgaatcatatggaaaggaattgcgtgtaatcccagccctttgggaggctgaggtgggcagattacctaaggtcaagtttgtttttctggttccttgaggtgtgaccttagattatgtgtttgtgctctttcagactttttgatgtaggcctttagggatataaacttacctcttagcactgcctttgctgtgtcccaaaggttttggtaggttgtgtcactattgtcrttcagttagaaaaaattttaaatttccatcttcatttcatttgtgacccagtgatcattcaggagcatgttatttaatttccatgtatttgcatggttttgaaggttccttttggagttgatttccagttttattccactgtggtctgagagtgcctgatataatttcaattttcctaaatttatattgtctatatattgtgtataatattgtctatcttggagaaagttccatgcactgttgaatagaatgtatattctaccgttgttggatgaaatgttctgtata

SEQ ID NO: 110904 - DNA, 608 bp, Homo sapiens
ttttacattccccctctccaccctctttgtttattggactgttttagtcatcataaagtgcttcaatctttactaaagcaaatgccgtaaaggatctgccttacaggcaattatttctccatgagtaaggtgaggtagcagtactacggaagtgaagtcagctgggagtacagctcatctccttgtatggaaagtaattttgcaggaagaattactttgtacgccacccattaacagttaggcattccagaagatgctccttttggaatggtcataaaggtgtgttttcttcttttgatgaactataagtagccctrgaagatttggcactccttcattcttgcgtagtatatgggccgtctttaatagtatattgtctatttttaatcatggaggaatagaatggctaattgagacaagtagctgtgttagcagctgtgaaccgggcctatctatgtcagtctggaatactttgtccctggttctggaactttacagggtgtgggaatgcttgatgaattatcttaggttacacaacatgcagttctttggaatgcatatacatgtatattatacatactttggatagacacttgtatttgaatact

SEQ ID NO: 110905 - DNA, 608 bp, Homo sapiens
ttttacattccccctctccaccctctttgtttattggactgttttagtcatcataaagtgcttcaatctttactaaagcaaatgccgtaaaggatctgccttacaggcaattatttctccatgagtaaggtgaggtagcagtactacggaagtgaagtcagctgggagtacagctcatctccttgtatggaaagtaattttgcaggaagaattactttgtacgccacccattaacagttaggcattccagaagatgctccttttggaatggtcataaaggtgtgttttcttcttttgatgaactataagtagccctggaagatttggcactccttcattcttgcgtagtatatgggccgtctttaatagtatattgtctatttttaatcatggaggaatagaatggctaattgagacaagtrgctgtgttagcagctgtgaaccgggcctatctatgtcagtctggaatactttgtccctggttctggaactttacagggtgtgggaatgcttgatgaattatcttaggttacacaacatgcagttctttggaatgcatatacatgtatattatacatactttggatagacacttgtatttgaatact

SEQ ID NO: 110906 - DNA, 541 bp, Homo sapiens
agtttactatctgtcatcagtatatcttgtacacggcagccataagtgtgtatgtatttcataaaagcacagtgtaggaaggaagcagttgtgggaggctcctgggtcgagctcagcataaatcaaactaatcacaagcaaatgcttcctttttgatctttaaatgcatttttcagtactgctatccaattttccacagactttaattgtagctgagtgcttcttcaaaaacattactttgtggtctcacytcagttgcaagcacacatggctgtacatgttggaactgcctctgagttcaggtctgttcactgatgctgaaatgaaggaaaaccagaaaactgtatgctcctgaagagagtgttatctttaccaagcctccccattaacttcagtacgaaaggatctaatatcagttatctgtacttagattaaaactcatccctaggaacagctgcattttaacccttttatctgtaatcatggatgacaagaagtcttctcttgaaaaggaagtccagtcttcagcaagcagatagga

SEQ ID NO: 110907 - DNA, 621 bp, Homo sapiens
aatatcacatgggtcaatggaatttttgttctactcagtattttggaagcctcagaacgacaagataaaaaaacaaaagatgccttgaccctgtggggccccctctctcaatgacaacgtgaagctcactgtttacttcgtttgctatgtgtctacatggaccagtgtaagggttgtgtgttcacacaagataaaaccaaaataaattaaaaatcaacaataagaacaactttcagaggtgcagtcatctagccctccttcattgttccttggaaactcagtatggcaatcatgagcgcgccaaccacgtttaaatctcatacacaaacgttggttggaggagcacttagcacgtggctctatgaacaayggtaactcaaatactgaagaagctcatcacagaacacaggaccagctggtcaggctaagcactaaagccccttctggctgtgggacattatgagctccacaattctcactggcacacacactatatatatgtatatgcacacacacacacacacaataaaaattctcactggcaaagcaacttggaatagcaactttgttgtcagacacacaactcctcatttgaatgcagaggcctatacacaattaatc

SEQ ID NO: 110908 - DNA, 629 bp, Homo sapiens
gactaacagtggctgaagattacactatactcttttaaaaataagtgaataaaagcacctgtgcatgtattgtgaaaatttcaaaggatcccacaggcaggaggggagatgagggtagcctgattgcctctctggctctttcctgcatccttctcttccactcctagggctaaaagtgccaggcttgcaccctcaggagaagcccaggccccttcttgcaggctctcccatccctctcacctgccagccccatgctgcctaaggcattgcagcctgtctctttctaattggttcytttttctcctgcactatattctggatttgctttccctcaaatcagagtggtgagacatacaatttggctttaggtgaaatagaggaagccttctatgctgttaggattctagggcacttcaaccatctagcttaggtaaaggccttctccttgggcccagcctagcttctcagagtttacatagggtttggggtggaggggcagaaagttaaaaagaaaatattgttgactttgtgtttttttttttttttttctgtgtgtttgtgtgtgtatataccctttagggacctttgagggaaaggactggagaggccaaggcagaatttaggtacca

SEQ ID NO: 110909 - DNA, 629 bp, Homo sapiens
gactaacagtggctgaagattacactatactcttttaaaaataagtgaataaaagcacctgtgcatgtattgtgaaaatttcaaaggatcccacaggcaggaggggagatgagggtagcctgattgcctctctggctctttcctgcatccttctcttccactcctagggctaaaagtgccaggcttgcaccctcaggagaagcccaggccccttcttgcaggctctcccatccctctcacctgccagccccatgctgcctaaggcattgcagcctgtctctttctaattggttcctttttctcctgcactatattctggatttgctttccctcaaatcagagtggtgagacatacaatttggctttaggtgaaatagaggaagccttctatgctgttaggattctagggcacttcaaccatctagcttaggtaaaggccttctccttgggcccagcctagcttctcagagtttacatagggtttggggtggaggggcagaaagttaaaaagaaaatattgttgactttrtgtttttttttttttttttctgtgtgtttgtgtgtgtatataccctttagggacctttgagggaaaggactggagaggccaaggcagaatttaggtacca

SEQ ID NO: 110910 - DNA, 580 bp, Homo sapiens
gcctcttttttttaaatttagggaacaaaaccatctttatattgatgaatatgagacaatgttgtatgcttatttcatattgtcattttgaartgaaatatatttttaatttaatttaatggcatggataaattggagctcttttcttatttcttattttatagcttaatttgtctcgttgtctctctaaatacattgtaagcactttgttggcatatactgtctttctttcatttgcaatttgttgaatgaagattgcgtgactaactcaaatgtggggattcagtgagaggagatatgagtgtggttggtgaactgaatttaaatcttcctagtggacactctgaaccaacagaaagcatcattggtaaaatgtcttctccattctgctattcattaagttgacatgtattaatagtgttctcaacgtgacagacaagtacaaagcccttgttcttatagtagtttttttctagggagacaaatgctaagaaagcaatcaagctaatacctttgcaaaggtttcttataggcagaaactaaaagaaggtcaatgtgattagagttggagagcaaaggg

SEQ ID NO: 110911 - DNA, 589 bp, Homo sapiens
gcctttggggtgcctgcatactttcttgctacatcgtaactgtaaataaagccatgcagcaaacctggcctaggaaggtgccatggaatacatttttgtgtctctccaaaattcatatgttgtgtgtctcttcccaattcccaatgtgatgatattcagaggtgcggccaactgaggggtaattaggtcatgagaatagatcgcttacaaatgggagtagtgcccttataagaagagacacaagaggaatgatctatttctctgccatgtaggacacagccagaaggcagcttacagccagaaaaagaggtctcaccaagtgcccaaccatgctggctcccagatgtcagacttctaacctccatatctgtgagaaataaatgttggctttttgtccttcccattctacagtatatttgaacccttagttaacataaccctctctcttagttcaaagtacccaggagatacatgtcgtaacaccaagtaagccatggagtcaaaggaggaaaggggattttagcatagatagtgtaaacaaggagttgattattrccagttttggtactaatatcatgtgcagcaatgg

SEQ ID NO: 110912 - DNA, 530 bp, Homo sapiens
tcacaactattttcaagtcttaaggtggtacacatggacacaccatcttttggaaacattaagggaggtttatgtttctctacaatctaytaaagtctatactgattggttgccattaacattaatatacagttaggttgatataatgacagctaaattcaataggtctgcagtcatatttttggtatctatagtgcttaaaacatctaacaataatcctgacattgagttgtacccacctatgtattcataacatatggcaatatttgagcgtggtatagaatgtagtattgtattttgtcttcatgtctaaatacaactttacagctaataaactgtacaaattatcattctatgatggagatccaggtcccagtgatcaatatagtgatgttttactggtattaaataacacaatctcaaagaatattgattacaatttttctgtcttttgaggtgctgtttatgcagctgaatttagaaatcccagaatattccacatggaattcatccagttttaagttcttaaa

SEQ ID NO: 110913 - DNA, 587 bp, Homo sapiens
gaacatttccattacgtccccaaaaacaaaaatgacagagatgaaacaaggaagaaagggagaaaaaggagagaactgtcacaactattttcaagtcttaaggtggtacacatggacacaccatcttttggaaacattaagggaggtttatgtttctctacaatctattaaagtctatactgattggttgccattaacattaatatacagttaggttgatataatgacagctaaattcaataggtctgcagtyatatttttggtatctatagtgcttaaaacatctaacaataatcctgacattgagttgtacccacctatgtattcataacatatggcaatatttgagcgtggtatagaatgtagtattgtattttgtcttcatgtctaaatacaactttacagctaataaactgtacaaattatcattctatgatggagatccaggtcccagtgatcaatatagtgatgttttactggtattaaataacacaatctcaaagaatattgattacaatttttctgtcttttgaggtgctgtttatgcagctgaatttagaaatcccagaatattccacatggaattc

SEQ ID NO: 110914 - DNA, 530 bp, Homo sapiens
tcacaactattttcaagtcttaaggtggtacacatggacacaccatcttttggaaacattaagggaggtttatgtttctctacaatctattaaagtctatactgattggttgccattaacattaatatacagttaggttgatataatgacagctaaattcaataggtctgcagtcatatttttggtatctatagtgcttaaaacatctaacaataatcctgacattgagttgtacccacctatgtattcataacatatggcaatatttgagsgtggtatagaatgtagtattgtattttgtcttcatgtctaaatacaactttacagctaataaactgtacaaattatcattctatgatggagatccaggtcccagtgatcaatatagtgatgttttactggtattaaataacacaatctcaaagaatattgattacaatttttctgtcttttgaggtgctgtttatgcagctgaatttagaaatcccagaatattccacatggaattcatccagttttaagttcttaaa

SEQ ID NO: 110915 - DNA, 602 bp, Homo sapiens
tagaatgctaacaaatacgaaatctctggaaccaccacactatcacaaataaaccatcamaaatgaaatcaaactcatttgagcaagcacaagacacattaagtaacaagagctattgctaaatgtaaaaattttcttccaatccctttcaccctgatgtgaaaatcaaggcattgtgtttgtattaacctttttattttaattttttattaacaactttaattctaggttctcagccagagccactaaattaataaaaataaaggcctttggagtaaaacagatctggaagatcaaagggagtcaaaatccctggcaagcagcagacaccaacatcagccatttagtaaaaagcagtgctaaaaatgttaatgtggtgataaatatttaaatttagcttgttgataaaaatgcctaaaacataaagcagataaaacttctattactgtgaatactaagaaaaatataagataaactggtactaatagagaaagaagctaaaagaagtcttgtataggaacacttagatttcagaattttagaggttttgtagtacattaggatgaatatatttaaagtgttagggaatagggaacaaggat

SEQ ID NO: 110916 - DNA, 633 bp, Homo sapiens
acttccttgctgtggaccatctatcattttcttaaatcagaacacaaaaatcatgttatttattattttatatctccttatgtctccactggaatatttattttaaacccctcaccaggaagacctttaaaaaaagaaagaaaacatgatactcagtctaatgtgaatactgaaatttattacagtagtaacaagcactgtacagcaatgatttgctgtatttagattgcatgtgatcataaacaaagaattgatctcacacaagcctacttatacttcctgtgactcccacacaagcctacttacacttcctatgaacccrgagagacattgtaaagtagcaactatagtaaaaaaattttcagatgcagtgtgtctttaataacatattgtagttttgtgatctccaaggagcctttaaaagatagattttctttaaggcaggcttacctatgcaattcttttttgattacagttaccttccctttctttttcaaatctttcaaaagcaataacaactgagttcacaaaacaatttcattgctattctttattatgtattttacaaataagctttttattctcatattttatgattaaccaatatatgttaaagtaggactgctatgtagt

SEQ ID NO: 110917 - DNA, 555 bp, Homo sapiens
ggctggggaggcctcacaatcatggcggaaggtgaatgaagagcaaagtcaagcaggcaagatgacatgtgcaggggaaatcccttataaaaccatcagatctcataagatttattcactatcatgagaagagcacaggacatccccactgccatgattcaattacctcccactgggtccctcccaggacaagtggggattattacaattcaaggtgagatttgggtggggacccagagccaaaccacatcagggttgattaaaaaagtaacaaaaggaaaaaacctcccaaagtatagttaacatttattgaatacacacttcaagtcatgcattcttatgcatgcttatatattcaaaataacaatatacatattattcttagtctcattaaaaattaggaaastgaatcagagagatgttaaataatttaccaaaagttacaaaactagcgaattgcagaattaaattttgagccccagtcatcttgctcttaaccactctgcaagcatctctcaaaacaattttttaaaatatctcaatccacagtaagaa

SEQ ID NO: 110918 - DNA, 549 bp, Homo sapiens
tacgatttcctatttctttatttgctcctgtgagggttagggggcttagaggcagtgcctgctgaaacatctagtttccagtttatagggctttaagaaagcacagcttattttgaagtcttgtagtcagaaaaattagaatttaattaaacagtagcaaataataactgaaaaacatcaggcaactctagaatttaacaagaggkgtgtcatagttttggaaacataatttcctctctccactttcccatttttattaaaagacaaattatggtaggtttgctttaggatacttggcttacttatttgcatacagtgctgcaagaataattatttgttacataggccttttaaatgggctttggtggaatttggttttgtagaagcaatctgagataaaagactttttaaagccaagcccagccatggatttgtaccattaaatacctatgacttgggtgaattcctctcctcttgatgtttcaagataacttagggttcctggcctgttagaaagtgacatgttctgtttaccacagatcacaaacc

SEQ ID NO: 110919 - DNA, 549 bp, Homo sapiens
tacgatttcctatttctttatttgctcctgtgagggttagggggcttagaggcagtgcctgctgaaacatctagtttccagtttatagggctttaagaaagcacagcttattttgaagtcttgtagtcagaaaaattagaatttaattaaacagtagcaaataataactgaaaaacatcaggcaactctagaatttaacaagaggggtgtcatagttttggaaacataatttcctctctccactttcccatttttattaaaagacaaattatggtaggtttgctttaggatacttggcttacttrtttgcatacagtgctgcaagaataattatttgttacataggccttttaaatgggctttggtggaatttggttttgtagaagcaatctgagataaaagactttttaaagccaagcccagccatggatttgtaccattaaatacctatgacttgggtgaattcctctcctcttgatgtttcaagataacttagggttcctggcctgttagaaagtgacatgttctgtttaccacagatcacaaacc

SEQ ID NO: 110920 - DNA, 549 bp, Homo sapiens
tacgatttcctatttctttatttgctcctgtgagggttagggggcttagaggcagtgcctgctgaaacatctagtttccagtttatagggctttaagaaagcacagcttattttgaagtcttgtagtcagaaaaattagaatttaattaaacagtagcaaataataactgaaaaacatcaggcaactctagaatttaacaagaggggtgtcatagttttggaaacataatttcctctctccactttcccatttttattaaaagacaaattatggtaggtttgctttaggatacttggcttacttatttgcatacagtgctgcaagaataattatttgttacataggccttttaaatgggctttggtggaatttggttttgtagaagcaatctgagataaaagacttttkaaagccaagcccagccatggatttgtaccattaaatacctatgacttgggtgaattcctctcctcttgatgtttcaagataacttagggttcctggcctgttagaaagtgacatgttctgtttaccacagatcacaaacc

SEQ ID NO: 110921 - DNA, 487 bp, Homo sapiens
gactgtagtgtaaaggtatagatgacatggtgaaaatgtgtgatagagatattgaagatatttaaggactagagctacctgcattcataacagaacaagaggtcatgtcagtttataaaattaaagagagacttccaagacaaaagcccttgataatgaggcagatgactctggagaaacattataaaaarccatctggcagaatgcctcctcagcctcagaggactcacctcctagttgctcaactcctgatatttcttctcacctaaaaaaagaaaaaaaatacaatgtacagtaaccttttaatcaaaacgcagccttgtaggtggagcctgaaagcttgccattgtttatacagctgtttaacagctgatgcaggtattctggtgatgctactgtgttgcttattattttttactgtattaatggcatgtcatatttttacttatgtgtgaataattgtgtgaaaatgattgctcatcagtag

SEQ ID NO: 110922 - DNA, 487 bp, Homo sapiens
gactgtagtgtaaaggtatagatgacatggtgaaaatgtgtgatagagatattgaagatatttaaggactagagctacctgcattcataacagaacaagaggtcatgtcagtttataaaattaaagagagacttccaagacaaaagcccttgataatgaggcagatgactctggagaaacattataaaaaaccatctggcagaatgcctcctcagcctcagaggactcacctcctagttgctcaactcctgatatttcttctcacctaaaaaaagaaaaaaaatacaatgtacagtaaccttttaatcaaaacgcagccttgtaggtggagcctgaaagcttgccattgtttatacagctgtttaacagctgatgcaggtattctggtgatgctactgtgttgcttattattttttactgtattaatgkcatgtcatatttttacttatgtgtgaataattgtgtgaaaatgattgctcatcagtag

SEQ ID NO: 110923 - DNA, 405 bp, Homo sapiens
gaattccatacacgtcagatctgaaaatgtgtgtgtgtgtgtgtgtgtgtgtgtgtgtgtgtctgtctgtgtgtgtttgtgtgtgtgtgaagcagggagaaagagcaagagtgaaagtgagcaagagagagaggagagagagggagagaatcagacagatacagaaagagattgacagagctacagagacagaattgaaaggggacaccaagaatattgagctgagaaactataaaatgggagttgccattaaacagaatggkgaagagcaaatttggggagtttcagtggctcaatatagacatattaattttgagattcctaactgacatccacgtggataagtcagggagtgttgggtgtagtgtccagtgtttaggtgtaatatgaaatatcaggaaatta

SEQ ID NO: 110924 - DNA, 636 bp, Homo sapiens
tcttcctgtagatgcatttatgaaacaaaaccacaaaacatacagcttacccgcttctcaaaactcattgcacaataggttgagggacttctctacaccaggacctattattaaaaccagtaagtcctcagtgaaaatcatttatttgcccggagtgtcatctgatgtgtctgttgtaggcagctgtggcagtggtgggtggtttagtgacacggaccctgcccacrtctgtccatccatcagtgggctagtgtctctctggctgcacctgagaagggtctataggagttaacagcattagcatgggattcaaaagaaatcatcttggattcaaacttccatttcagtattcatttccagctaagtttgtgtagcatgcttaatgtttctgaagctcaattttagtaatggtaaagtatatctgcttaaaagacagggacacatcccagttttgtgtttttttatttttattttattgtatttttcttgagacggagttttgctcttgctgcccaggctggagtgcaatggtgcaatctcggctcaccacaacctccgcctcctgggttcaagggactctcctgcttcagcattctgagtaaatggaattacaggtgcccgccaccacgcccagct

SEQ ID NO: 110925 - DNA, 636 bp, Homo sapiens
tcttcctgtagatgcatttatgaaacaaaaccacaaaacatacagcttacccgcttctcaaaactcattgcacaataggttgagggacttctctacaccaggacctattattaaaaccagtaagtcctcagtgaaaatcatttatttgcccggagtgtcatctgatgtgtctgttgtaggcagctgtggcagtggtgggtggtttagtgacacggaccctgcccacatctgtccrtccatcagtgggctagtgtctctctggctgcacctgagaagggtctataggagttaacagcattagcatgggattcaaaagaaatcatcttggattcaaacttccatttcagtattcatttccagctaagtttgtgtagcatgcttaatgtttctgaagctcaattttagtaatggtaaagtatatctgcttaaaagacagggacacatcccagttttgtgtttttttatttttattttattgtatttttcttgagacggagttttgctcttgctgcccaggctggagtgcaatggtgcaatctcggctcaccacaacctccgcctcctgggttcaagggactctcctgcttcagcattctgagtaaatggaattacaggtgcccgccaccacgcccagct

SEQ ID NO: 110926 - DNA, 636 bp, Homo sapiens
tcttcctgtagatgcatttatgaaacaaaaccacaaaacatacagcttacccgcttctcaaaactcattgcacaataggttgagggacttctctacaccaggacctattattaaaaccagtaagtcctcagtgaaaatcatttatttgcccggagtgtcatctgatgtgtctgttgtaggcagctgtggcagtggtgggtggtttagtgacacggaccctgcccacatctgtccatccatcagtgggctagtgtctctctggctgcacctgagaagggtctataggagttaacagcattagcatgggattcaaaagaaatcatcttggattcaaacttccatttcagtattcatttccagctaagtttgtgtagcatgcttaatgtttctgaagctcaattttagtaatggtaaagtatatctgcytaaaagacagggacacatcccagttttgtgtttttttatttttattttattgtatttttcttgagacggagttttgctcttgctgcccaggctggagtgcaatggtgcaatctcggctcaccacaacctccgcctcctgggttcaagggactctcctgcttcagcattctgagtaaatggaattacaggtgcccgccaccacgcccagct

SEQ ID NO: 110927 - DNA, 604 bp, Homo sapiens
ggccatgaataaaatcttttccttcttttataagttcagtccaatgtaactaaatcttgttctgcttgatttcaaatagcaattctcattcagttttttgtgttttgcttgatttcaattggaaatyctcattcagctttttagagtcctggaagattttcctagtccaatggtatgatccccaaagttatctgaaaccatatttaagagaacttgtcagagtcctttccattaaaaataatttagatgatagctgattgtaaaggcttttttttttttttgagacatggtctggttctatcactcaggatggagtgcagtggcatgatcttggctcaccacaatttcttcctcccaaactcaagccatcctcctacctcagcctccgaagtagttgggaccataggcatgcaccatcatgctggctaatttttgtatttttgtagagacagggttttaccatgttgcccaggatgctttcaaacttctgagttcaagcaattcacccacctcggccttgcaaagtgctgggatttttacacgtgtgagccaccgtgccctgcaccacgcccagcaccgtgccctgcacagcctccagcagcac

SEQ ID NO: 110928 - DNA, 604 bp, Homo sapiens
ggccatgaataaaatcttttccttcttttataagttcagtccaatgtaactaaatcttgttctgcttgatttcaaatagcaattctcattcagttttttgtgttttgcttgatttcaattggaaattctcattcagctttttagagtcctggaagattttcctagtccaatggtatgatccccaaagttatctgaaaccatatttaagagaacttgtcagagtcctttccattaaaartaatttagatgatagctgattgtaaaggcttttttttttttttgagacatggtctggttctatcactcaggatggagtgcagtggcatgatcttggctcaccacaatttcttcctcccaaactcaagccatcctcctacctcagcctccgaagtagttgggaccataggcatgcaccatcatgctggctaatttttgtatttttgtagagacagggttttaccatgttgcccaggatgctttcaaacttctgagttcaagcaattcacccacctcggccttgcaaagtgctgggatttttacacgtgtgagccaccgtgccctgcaccacgcccagcaccgtgccctgcacagcctccagcagcac

SEQ ID NO: 110929 - DNA, 597 bp, Homo sapiens
ttcatctgcctactaagttttaaattgtaagaactgagcaggagttagacaagctagagtaaaagtgtcccagtcagtaggaatcatccgactggaaacagcaacattctttaacagtcccatttcaaaaggagaacctggtccatactgatttatagcttgtttaatttttttgagtaatttaaaaggaaaaggctcaaatgtagctataatatttccctgttgatctggggggtgtattcaaacagggaactgccaagcctctaaatcccacttttgtctagcttgctgtattcctgcctgaatagaactaagagcagtcgctcaaggcgctgctcgaacagtcaccagggcaactacttttcacccagtgtcctccagaamagaaagatctggagggtcgttttcttcaaaatagtaatgagggtgtgcagaaggatagggatgaacctctccctccttttctgctttagctttaggtgacaaataaacctggtctgtaacctctactgttactttgttatactctccttcctcctcatcatcagtgtgaaaaagttccaaggtagaacgaaccacagcccacacttgtcctat

SEQ ID NO: 110930 - DNA, 600 bp, Homo sapiens
ttattaacagcaagccagtcattagcattgtttctatagatattagattaactaaaagtatcccttattcttaaggcacagatcactcatgctattgtttgtggcttaagaatgcctttaagtggttttccaccctggacgggccaggtattccttgttctcattccagtaaacccacaaccttccagcgtgggtgttatggccatcatgaacatgtcacagtgctgcagagattttgtttatggccagttttggggccagtttatggccrgatttggggaggcttgttcccaacagttcctcagggtaagggtgccctaactcctgtggggaccttctttggtggctccccaggaagtaaggagatgggaattgtgctgtagaggtctacagcagcactgcttgctgaggcgggggacaattgctgtacatatgtaagggcagtggctgtgctgggtatgcctcagtttgttgaggggcttgaggcgggtccctcttcctatttcctgaaagaggttgtccatctttgctaaatttagaatgacacggacttgcccagtgattgcctttcttacaccagggacgtacgttgggactttt

SEQ ID NO: 110931 - DNA, 600 bp, Homo sapiens
ttattaacagcaagccagtcattagcattgtttctatagatattagattaactaaaagtatcccttattcttaaggcacagatcactcatgctattgtttgtggcttaagaatgcctttaagtggttttccaccctggacgggccaggtattccttgttctcattccagtaaacccacaaccttccagcgtgggtgttatggccatcatgaacatgtcacagtgctgcagagattttgtttatggccagttttggggccagtttatggccagatttggggaggcttgttcccaacagttcctcagggtaagrgtgccctaactcctgtggggaccttctttggtggctccccaggaagtaaggagatgggaattgtgctgtagaggtctacagcagcactgcttgctgaggcgggggacaattgctgtacatatgtaagggcagtggctgtgctgggtatgcctcagtttgttgaggggcttgaggcgggtccctcttcctatttcctgaaagaggttgtccatctttgctaaatttagaatgacacggacttgcccagtgattgcctttcttacaccagggacgtacgttgggactttt

SEQ ID NO: 110932 - DNA, 600 bp, Homo sapiens
ttattaacagcaagccagtcattagcattgtttctatagatattagattaactaaaagtatcccttattcttaaggcacagatcactcatgctattgtttgtggcttaagaatgcctttaagtggttttccaccctggacgggccaggtattccttgttctcattccagtaaacccacaaccttccagcgtgggtgttatggccatcatgaacatgtcacagtgctgcagagattttgtttatggccagttttggggccagtttatggccagatttggggaggcttgttcccaacagttcctcagggtaagggtgccctaactcctgtggggaccttctttggtggctccccaggaagtaaggagatgggaattgtgctgtagaggtctacagcagcactgcttgctgaggcgggggacaattgctgtacatwtgtaagggcagtggctgtgctgggtatgcctcagtttgttgaggggcttgaggcgggtccctcttcctatttcctgaaagaggttgtccatctttgctaaatttagaatgacacggacttgcccagtgattgcctttcttacaccagggacgtacgttgggactttt

SEQ ID NO: 110933 - DNA, 600 bp, Homo sapiens
ttattaacagcaagccagtcattagcattgtttctatagatattagattaactaaaagtatcccttattcttaaggcacagatcactcatgctattgtttgtggcttaagaatgcctttaagtggttttccaccctggacgggccaggtattccttgttctcattccagtaaacccacaaccttccagcgtgggtgttatggccatcatgaacatgtcacagtgctgcagagattttgtttatggccagttttggggccagtttatggccagatttggggaggcttgttcccaacagttcctcagggtaagggtgccctaactcctgtggggaccttctttggtggctccccaggaagtaaggagatgggaattgtgctgtagaggtctacagcagcactgcttgctgaggcgggggacaattgctgtacatatgtaagggcagtggctgtgctgggtatgcctcagtttgttgaggggyttgaggcgggtccctcttcctatttcctgaaagaggttgtccatctttgctaaatttagaatgacacggacttgcccagtgattgcctttcttacaccagggacgtacgttgggactttt

SEQ ID NO: 110934 - DNA, 562 bp, Homo sapiens
gcaacatcaattgatgtaaagtacattcagggcaatagagtttctttaaatattactttgttattcaaaataatcacaaaagcactcatcgtaggaaaacttgtgaggactcaaatatagggaaatactttttctttytaaggcacaattctctaaagaagttcaccttaatttgaatatacatgggaaaatatccttgttcactaatagtctatattcactctgttttcttccctcatagaccagccggttcactattattttccaaatgatgtgtgcctctctagagtccaggctatctgcatatctaatttttcccacaaattactgttttgaattgcactgaattcaattcaaggggatgtcatttataaacagtgcaaatatatactgcacgagggatcttagaactcatacacatggtttgatccataagctcatatgagcgtgcaatgtcaacttttttcatgttttttttaagtccacttaaattctattttaagccaccatctgccagtgctgttagggcagttagccttcaatcattttaagatggtcccct

SEQ ID NO: 110935 - DNA, 424 bp, Homo sapiens
tatgctttagtcactgaggcggcatctagtgtcagaccgcagccttgttaaacagagccagactttggaggatggttggtgggtttaaaatttggggcttkacatcttgtccccacaagctgctgctggcctcttccttgtccatttctgtgtggcctgtttaggccccccagcttcctgcttcttctttaccataattggaatgcaaaaatctacacgtaatttggcccatggtcccttctgcttagacatatccttgtagctactttttttttaaaagatgactatgctttctagaatatttctaagaaattgcctaagtcaccactgttcaccaagaggcctttgttttttcctcttcttaaccatgggaaaggaatgtaggagggtagggagtggatattttctaacctggaaaaaactc

SEQ ID NO: 110936 - DNA, 486 bp, Homo sapiens
acagagtgtgactccgtctcaaaaaaaaaatgagatgaccatttcacctaaaatataccctcttaagtatttttttaagtgtacaatacaggacggccatgcatcagagatatatgtgggtttggttccagaccactgcaataattatacaatttcttttkgtttcccagtgcatgtaaaagtatgtttatactgtgctgtataaagtgtgcaatagcatatgtctacaaagtatgcacactttaatttacaaatactttattgttaacaagtgctaacagtcatctgagccttcaaaaagctgcaatcttttttatgtgtgtgacagggttttactctgtggctcaggctggagtaattgcagcctcaacctcatgctcaatcaaacccccacctcaaactcctgactagctgggactacaggtgcatgccaccatgtccagctaatttttgtatttttttttttgtagagatggggttttgcca

SEQ ID NO: 110937 - DNA, 486 bp, Homo sapiens
acagagtgtgactccgtctcaaaaaaaaaatgagatgaccatttcacctaaaatataccctcttaagtatttttttaagtgtacaatacaggacggccatgcatcagagatatatgtgggtttggttccagaccactgcaataattatacaatttctttttgtttcccagtgcatgtaaaagtatgtttatactgtgctgtataaagtgtgcaatagcatatgtctacaaagtatgcacactttaatttacaaatactttattgttaacaagtgctaacagtcatctgagccttcaraaagctgcaatcttttttatgtgtgtgacagggttttactctgtggctcaggctggagtaattgcagcctcaacctcatgctcaatcaaacccccacctcaaactcctgactagctgggactacaggtgcatgccaccatgtccagctaatttttgtatttttttttttgtagagatggggttttgcca

SEQ ID NO: 110938 - DNA, 486 bp, Homo sapiens
acagagtgtgactccgtctcaaaaaaaaaatgagatgaccatttcacctaaaatataccctcttaagtatttttttaagtgtacaatacaggacggccatgcatcagagatatatgtgggtttggttccagaccactgcaataattatacaatttctttttgtttcccagtgcatgtaaaagtatgtttatactgtgctgtataaagtgtgcaatagcatatgtctacaaagtatgcacactttaatttacaaatactttattgttaacaagtgctaacagtcatctgagccttcaaaaagctgcaatcttttttatgtgtgtgacagggttttactctgtggctcaggctggagtaattgcagcctcaacctcatgctcaatcaaacccccacctcaractcctgactagctgggactacaggtgcatgccaccatgtccagctaatttttgtatttttttttttgtagagatggggttttgcca

SEQ ID NO: 110939 - DNA, 530 bp, Homo sapiens
taaacataggaccctgatgggcaccagttatcaagtggattcccaggccccaggtgaatatcaagtcctaggtggataccaggccccaagtggataccaggatctggtagacatcaggtcccaagaggacmctagaacccaggagtacattagactcagcactcagatgaacattaggcttcaggtggacatcgtgcctcaggtgaactccaggccccagatgaacatcaggccccaggtggatgcccaggatccgggtgcacatctggccacagttggacattcaaccccaggtgaccatcaggccatgggtgaatacacggtttccaggtagacatcagatcaaaggggaacatcagtcccccagtggacatcaggcccaaggtggacactcaactagaggtttacatcaggccacatgttgacacctagtcccaggtggacatcaggccccagctagatacctaggcttccagtgaatttcagaacccaggttgacattcaggcccccagtggtcatctggcctcat

SEQ ID NO: 110940 - DNA, 530 bp, Homo sapiens
taaacataggaccctgatgggcaccagttatcaagtggattcccaggccccaggtgaatatcaagtcctaggtggataccaggccccaagtggataccaggatctggtagacatcaggtcccaagaggaccctagaacccaggagtacattagactcagyactcagatgaacattaggcttcaggtggacatcgtgcctcaggtgaactccaggccccagatgaacatcaggccccaggtggatgcccaggatccgggtgcacatctggccacagttggacattcaaccccaggtgaccatcaggccatgggtgaatacacggtttccaggtagacatcagatcaaaggggaacatcagtcccccagtggacatcaggcccaaggtggacactcaactagaggtttacatcaggccacatgttgacacctagtcccaggtggacatcaggccccagctagatacctaggcttccagtgaatttcagaacccaggttgacattcaggcccccagtggtcatctggcctcat

SEQ ID NO: 110941 - DNA, 530 bp, Homo sapiens
taaacataggaccctgatgggcaccagttatcaagtggattcccaggccccaggtgaatatcaagtcctaggtggataccaggccccaagtggataccaggatctggtagacatcaggtcccaagaggaccctagaacccaggagtacattagactcagcrctcagatgaacattaggcttcaggtggacatcgtgcctcaggtgaactccaggccccagatgaacatcaggccccaggtggatgcccaggatccgggtgcacatctggccacagttggacattcaaccccaggtgaccatcaggccatgggtgaatacacggtttccaggtagacatcagatcaaaggggaacatcagtcccccagtggacatcaggcccaaggtggacactcaactagaggtttacatcaggccacatgttgacacctagtcccaggtggacatcaggccccagctagatacctaggcttccagtgaatttcagaacccaggttgacattcaggcccccagtggtcatctggcctcat

SEQ ID NO: 110942 - DNA, 530 bp, Homo sapiens
taaacataggaccctgatgggcaccagttatcaagtggattcccaggccccaggtgaatatcaagtcctaggtggataccaggccccaagtggataccaggatctggtagacatcaggtcccaagaggaccctagaacccaggagtacattagactcagcactcagatgaacattaggcttcaggtggacatcgtgcctcaggtgaactccaggccccagatgaacatcaggccccaggtggatgcccaggatccgggtgcacatctggccacagttggacattcaaccccaggtgaccatcaggccatgggtgaatacacggtttccaggtagacatcagatcaaaggggaacatcagtcccccagtggacatcaggcccaaggtggacactcaactagaggtttacatcaggccacatgttgacacctagtmccaggtggacatcaggccccagctagatacctaggcttccagtgaatttcagaacccaggttgacattcaggcccccagtggtcatctggcctcat

SEQ ID NO: 110943 - DNA, 534 bp, Homo sapiens
gcatccaggccacatctatctctgcattctaagtttgcttccaagataaagatacaartgcaggctggctccaacctagccagagatcccagccccactctctgcatcccaaaatccctcaaagactcaagagactttccagatttctacagtctcctcacaggttcccttgacagttaaatgccctctctttacctcaactagctgcaggtagaatataatgggcacaagagaaaatcactgtaagtgtaatatgaagatacacagcccttttaagcatttcattatattacatctagcttacttctaagggatttattcagatgtgactgaagaaagtctaaagggaaaaaaagcaatttaatttgataaattaaattatcaattatagccaaattatttggctataacaaattaaacattttaagctgacagaagatgcaaacattttaagttgacagaagatataaaatgttcactatcaaaatgtcacaactgataaaaatgttctcaaatatttctgtctcaaacttg

SEQ ID NO: 110944 - DNA, 481 bp, Homo sapiens
gaattatccacaagtctttttttttttttttgagatggagtcttactgttgcccaggctctagtgcagkggcatgatctcagctcactgtcatctctgcctccctgattcaagtgattctcctgcctcagcctcccaagtagctgggactacaagtgtgtaccaccatgcctggctaatttttgtatttttagtagagatgaagtttcaccatgttggccaggctggttttgaattcctgacctcaagtgatccactgcctgggcctcccaaagtaggaattatccaaaattcttatgataaatatggataaatcagcacaactcaagatttaagaaataaaaatttccaagagaagaaacccaggaatatgcattgaaaatgactccctcaggtgattctgatgtgatatgtggtctgagtttaaaatgcaaggaaaattaccttccctgccctccagttggcccttatgtccagatgtc

SEQ ID NO: 110945 - DNA, 493 bp, Homo sapiens
acatttacaaccaattcaagtccactttcagataacactatcccacttcacgggtgactacctgcttaacaaagaaaacacctgattcctcyctcccatccttccattccattccttgtattatttttccttatttcacttgtgtataagcatacataatctatctgtgtgtatttattattatctacaaacttattggtcagatcaattttgaataaatacatgtttttattgtaccacaattcctccctcccatccttccattccattccttgtattagtgttactcatttaacttctgtataagcatacataatctatctgtgtgtatttgttattgtctatgaacttcttggtcagatcaattaagaataaatacataggtttttattgtaccacaattctttaatgctctttttaaaaaaatgttgatccaggtttcagttatatatcttttgtttccctctaaagaatttcatttaacatttcttgc

SEQ ID NO: 110946 - DNA, 493 bp, Homo sapiens
acatttacaaccaattcaagtccactttcagataacactatcccacttcacgggtgactacctgcttaacaaagaaaacacctgattcctctctcccatccttccattccattccttgtattatttttccttatttcacttgtgtataagcayacataatctatctgtgtgtatttattattatctacaaacttattggtcagatcaattttgaataaatacatgtttttattgtaccacaattcctccctcccatccttccattccattccttgtattagtgttactcatttaacttctgtataagcatacataatctatctgtgtgtatttgttattgtctatgaacttcttggtcagatcaattaagaataaatacataggtttttattgtaccacaattctttaatgctctttttaaaaaaatgttgatccaggtttcagttatatatcttttgtttccctctaaagaatttcatttaacatttcttgc

SEQ ID NO: 110947 - DNA, 493 bp, Homo sapiens
acatttacaaccaattcaagtccactttcagataacactatcccacttcacgggtgactacctgcttaacaaagaaaacacctgattcctctctcccatccttccattccattccttgtattatttttccttatttcacttgtgtataagcatacataatctatctgtgtgtatttattattatctacaaacttattggtcagatcaattwtgaataaatacatgtttttattgtaccacaattcctccctcccatccttccattccattccttgtattagtgttactcatttaacttctgtataagcatacataatctatctgtgtgtatttgttattgtctatgaacttcttggtcagatcaattaagaataaatacataggtttttattgtaccacaattctttaatgctctttttaaaaaaatgttgatccaggtttcagttatatatcttttgtttccctctaaagaatttcatttaacatttcttgc

SEQ ID NO: 110948 - DNA, 498 bp, Homo sapiens
tgagggacaaacattcagaccctcgtagcagtgttctggaatcttatgtgagggacaaacattcaaaccacagcagcagtgttctggaatcctacgtgaaggacaaactttcagaccacagcaggagagttctggaatcctatgtgagggacaaactttcagaccaaagcaggagtgttcttaaatcctatatgaagracaaacattcagaccccaggagcactgttctgaaatcctatgataagggcaaacattcagaccccaacatgaatgttctggaatcctatgtgagggacaagcattaagaccatagcaggagtattctggaatcctatgtgagggacaaacattcagacccttgtagaagtgttctggaatcctatgtgattaaaaaacattgagaccacagcaggagtgctctggaatcctatgtgagggacaaacattcagaccccagaaggagtgttctggaatcctatgtaaaggacaaacattcag

SEQ ID NO: 110949 - DNA, 498 bp, Homo sapiens
tgagggacaaacattcagaccctcgtagcagtgttctggaatcttatgtgagggacaaacattcaaaccacagcagcagtgttctggaatcctacgtgaaggacaaactttcagaccacagcaggagagttctggaatcctatgtgagggacaaactttcagaccaaagcaggagtgttcttaaatcctatatgaagaacaaacattcagaccccaggagcactgttctgaaatcctatgataagggcaaacattcagaccccaacatgaatgttctggaatcctatgtgagggacaagcattaagaccatagcaggagtattctggaatcctatgtgagggacaaacattyagacccttgtagaagtgttctggaatcctatgtgattaaaaaacattgagaccacagcaggagtgctctggaatcctatgtgagggacaaacattcagaccccagaaggagtgttctggaatcctatgtaaaggacaaacattcag

SEQ ID NO: 110950 - DNA, 498 bp, Homo sapiens
tgagggacaaacattcagaccctcgtagcagtgttctggaatcttatgtgagggacaaacattcaaaccacagcagcagtgttctggaatcctacgtgaaggacaaactttcagaccacagcaggagagttctggaatcctatgtgagggacaaactttcagaccaaagcaggagtgttcttaaatcctatatgaagaacaaacattcagaccccaggagcactgttctgaaatcctatgataagggcaaacattcagaccccaacatgaatgttctggaatcctatgtgagggacaagcattaagaccatagcaggagtattctggaatcctatgtgagggacaaacattcagacccttgtagaagtgttctggaatcctatgtgattaaaaaacattgagaccacagcaggagtgctctggaatcctatgtgagggacaaacattcagaccycagaaggagtgttctggaatcctatgtaaaggacaaacattcag

SEQ ID NO: 110951 - DNA, 352 bp, Homo sapiens
ggagcgttctggaatcctatgtgacggacaaacgttcagaccatagcagtagtgttctgcaatccaatgtgagggacaaacattcagagcccagcagcagtgttcaggaatcctatgtgagggaccaacaatcagaccctcgtagcagtgttctgaaatcctrtgtgagggacaaacattcagaacccagctgcagtgttctggaatcctatgtgacagaaaaacattccgaccacagcagcagtgttctggaatcctatgtgcggtacaaactttcagaccacagcaggagagttctggaatcctatgtgagggacaaactttcagaccccaggagcagtgttctgaaatc

SEQ ID NO: 110952 - DNA, 480 bp, Homo sapiens
  misc_feature (1)...(480): n = A,T,C or G
ngaattctcttgagcaatctattttcttgatttttaaaagtcaatgtactctcaaagaaacaaaactmttattcgtggattctgttatttgaaaacatttactgatcatttaccttacagcaagtgatctccagctcgtggaaaaatatgtaaagttgcccagctgcattaagcttaaactcttctgaaggagaaaagaagcaatggagtagggacattaaagcaggagtgtggtgatatggctgagacttctacttgcacactgtggtagctgtgtggagaatggattaaaaaagggcaatgacagaagcttaaattagtatcaaatatggcaatcctgtaaatttaggtgtccttgaaataagaaaaatgtataatagttctcattatttccccaagaaatctctgcacttggccttgtgagggaagcgctatagttaccaagtggtgggggtgggaaggtgaatttgaaacaacatt

SEQ ID NO: 110953 - DNA, 493 bp, Homo sapiens
  misc_feature (1)...(493): n = A,T,C or G
ngaattctcttgagcaatctattttcttgatttttaaaagtcaatgtactctcaaagaaacaaaactcttattcgtggattctgttatttgaaaacatttactgatcatttaccttacagcaartgatctccagctcgtggaaaaatatgtaaagttgcccagctgcattaagcttaaactcttctgaaggagaaaagaagcaatggagtagggacattaaagcaggagtgtggtgatatggctgagacttctacttgcacactgtggtagctgtgtggagaatggattaaaaaagggcaatgacagaagcttaaattagtatcaaatatggcaatcctgtaaatttaggtgtccttgaaataagaaaaatgtataatagttctcattatttccccaagaaatctctgcacttggccttgtgagggaagcgctatagttaccaagtggtgggggtgggaaggtgaatttgaaacaacatttggaattactaca

SEQ ID NO: 110954 - DNA, 471 bp, Homo sapiens
tgaattccccaactctgctcttgtttccatgacatctttactcattgcttctgaacccatagtttctctatacccactacctgcttcttctcccccttccctttccccagtacctccccaagaccagtcattacaaagtcacttcattttccagatatcatcatgtatatttagtaagtagtatccacagkgaaatcttacttcaattcttctagtcctaagctgacatgaaagtgcccaatttctggagattagaaaaaaagggtatctggtgttaagaaaacaaaatttggggattttgctttattttgaaagtgggtattgctgccacctaaaatgtataattagcagaagcagagacttggcacatctcttctgaaagcctgccagccgctcctttgtactttattaagatataagatataaacttgtctgccataaaattacacagcccatcacatttttgacagg

SEQ ID NO: 110955 - DNA, 596 bp, Homo sapiens
ggctggcactgtgctcattaagctctccccagcatcagcacatagtgttttgcccatggtggatgctttatcaggccgggcacagtggctaatgcctgtaatcccagcactttgggaggctgaggcgggtggatcatctgaggtcaggagttcaagaccagcctggctaacatggtgaaacctcgtctctactaaaaatacaaaaattagctgggcatggtggcaggtgcctgtaatcccagctactcaggaggctgaggcaggagaatcgcttgaacccgggaagtggaggttgcagtgagccaagatcgcaccatcgcaatctggcctgggggacaagggcaagacttcatctcaaaataaataaataaataaataaataaataaataaaataaaaaataaaataaatgctttataaatatctgtttaataaatcaattgaacttttgctatttaagtcgaagcraatgtaatttctagctcactaggccacatggctatggccagaataaccattcagggcctgaataacaatcatgatggaaacaaaataatgatacctttaagaggagcttacgctacaaactttggtatg

SEQ ID NO: 110956 - DNA, 617 bp, Homo sapiens
aacctattccttttgtcttttgcaaggtrtatttatttaatttgcctcaacagaagataggcaaaatagttgcttcattgtttaaacaagtccaagttgagaatttacctgttcaagtagtttcaggctgcctagattctgggaatgggaagtgtcaatggcaggagttgcttgaatgagccagagtcaccatgagagtgaaaggaactgcttccctcagcactcttcttccccatcccctcagctccccacttcagttcaaattcaagtactatttattgagcattgactatatgtcaggcacactcatattaatttgctttgcaaccccaaaacaatcctaagagaaaagtaacaatcgccccatcatcatctaaccctatggagcttacaaccattcagccagtagtgctaagattcaaacatggtctcttcactgtagaccagtagtgtccaatcttttggcttccctggaccacactggaagaagaattctcttgggccacacataaaatacactaatactaatgatagctcatgagcaaaaaacaaaaaacaaaacaaaacacatacacacatacacaaatcttataatgttttaacaaagtttatgagtt

SEQ ID NO: 110957 - DNA, 617 bp, Homo sapiens
aacctattccttttgtcttttgcaaggtgtatttatttaatttgcctcaacagaagataggcaaaatagttgcttcattgtttaaacaagtccaagttgagaatttayctgttcaagtagtttcaggctgcctagattctgggaatgggaagtgtcaatggcaggagttgcttgaatgagccagagtcaccatgagagtgaaaggaactgcttccctcagcactcttcttccccatcccctcagctccccacttcagttcaaattcaagtactatttattgagcattgactatatgtcaggcacactcatattaatttgctttgcaaccccaaaacaatcctaagagaaaagtaacaatcgccccatcatcatctaaccctatggagcttacaaccattcagccagtagtgctaagattcaaacatggtctcttcactgtagaccagtagtgtccaatcttttggcttccctggaccacactggaagaagaattctcttgggccacacataaaatacactaatactaatgatagctcatgagcaaaaaacaaaaaacaaaacaaaacacatacacacatacacaaatcttataatgttttaacaaagtttatgagtt

SEQ ID NO: 110958 - DNA, 487 bp, Homo sapiens
ggattatctaggtgggcgcaatttgatcacatgggtccccagaagtggagaacctttcccacctgtagaaagccagagagctggcacctgagaaggacagaactgtcaytgcaggatttgaagatgaaggggcccatgagccaaggaatgccagtgacctatagaggctaaaaaacagcaaggaaatggactctccccagagcctccagaggaatgcagccctgttgatcacatgatcaccagatggctgccccagagccaaatgtcgcttcctgagcaccatactcaaaggcaggggaagtggatggagggcaggagctccattcttgtttgccactctccttttgtcaattgggaaaaaattccagaaactctgggagccctccccttacatttcctgggtcatggggccagccctagctgctggagggactgagaactgctgttgagcagtttacctgacggcatctgccatggcttggcagga

SEQ ID NO: 110959 - DNA, 549 bp, Homo sapiens
agcattagttagaaggaagcttgcttgtgagaacagagtagcaggagaaatgactccaaaaaaacaattacattgatgggcattaccagcgacagggcatttcaggctggagagaataggaaagctgaaagagatacacggagccgcataaaaagaaaaggataaaaagatttttttttaacacaagaaaatcaggcattcaatattaaccagcctgtgtccctatgttayaatttatggcttctatctcttcagaaatgttgaacaatttcacaaaagactcatgtgtttaggcttttggagggaattaaaggaaagggctgagtccatatttgggttgacacagcagtaaacataaagcaacagctgcaagatgcatgagtggagacagaaacacagaagtagcaagaagtaatcaaaaatatgacaaaaaaatgacagtttgaggaatttatagaatttctaggaaggactttaggtttttccatagaaaagagcatagaatagatatcaattaacttgtaaattaatataagttaataagagaac

SEQ ID NO: 110960 - DNA, 596 bp, Homo sapiens
aaccttatgaatttgaatcatgttctaaaatgattggtcattacttaaattcaaattttattttttatattcttattcttttttgcatgtaagggatataaaacccaaaattaattattgaattaatttacttctgatttgttttttctaatcttaatcttattgactccatacactttttctttgcatccttaaatgctctgaaaattttttgcttatgtacattttttaaactttgaatcagacatgtgcagactaaatgtttgaatctcatagaaatggttttatgctcttcctaaagagctcattaacattgaygagtttacaagttattcagtagttttcatttgtttgttcatttgactccaaagctgtttggtttcttactcatttgtttaattctctaggcccttgtttcttcattttgccttttcatttgttcagcgttggcctttttttcatttagcaacccacaacatgcataaaaaagtatagttgttcacagaatatctaatgtcagagcgattcattatgttgacgttttatagtctttccaattataccttattctctggttgtcctaaagtatcctattt

SEQ ID NO: 110961 - DNA, 629 bp, Homo sapiens
tgaatacaaaccttatgaatttgaatcatgttctaaaatgattggtcattacttaaattcaaattttattttttatattcttattcttttttgcatgtaagggatataaaacccaaaattaattattgaattaatttacttctgatttgttttttctaatcttaatcttattgactccatacactttttctttgcatccttaaatgctctgaaaattttttgcttatgtacattttttaaactttgaatcagacatgtgcagactaaatgtttgaatctcatagaaatggttttatgctcttcctaaagagctcattaacattgatgagtttacaagttattcagtagttttcatttgtttgttcatttgactccaaagctgtttggtttcttactcatttgtttaattctctaggcccttgtttcttcattttgccttttcatttgttcagcgttggcctttttttcatttagcaacccacaacatgcataaaaaagtatagttgttcacagaayatctaatgtcagagcgattcattatgttgacgttttatagtctttccaattataccttattctctggttgtcctaaagtatcctatttatctttgtaagtactttccttaact

SEQ ID NO: 110962 - DNA, 662 bp, Homo sapiens
tgctctcttgtggcctttgcagaggtccaggctrcctatgtcttgtcttagatccttaccctcttgctatactttgaatgtatttttctaaaattcattttgaagcctaattcccattgtggttttattgagagttgaggcttttgggaggtgattaagtcatgagggcagagccctcatgagtgggattagtgcctttataaaagaacttgaaagaacctatccttttttttctaccacgtgagaagacaacatgaaaaggcaggccatctctgaagcagagagcagcccatagtagacaccaaatccactggtgccttgatcttggacttcgtagcctccaaaactgtgaacaataaatttctgttgtttataagttggcagtttaaggtattgtgttatggcagtccaaatgaactaagatattgctgaagaaaaagttattattttatggacagagccaccattaactgcagcccttcaaagtcaaaatagcctatgtgtggcttaaaacctcaatcacagtccacagacataaaaaaactaaacccagattcatctaattgtacacttaaaaaagtaagttttattttatgtaaataacatcttaatttttttaaatgatgtagcaaagcaaacaaggagaaatgtatagaaacaga

SEQ ID NO: 110963 - DNA, 662 bp, Homo sapiens
tgctctcttgtggcctttgcagaggtccaggctgcctatgtcttgtcttagatccttaccctcttgctatactttgaatgtatttttctaaaattcattttgaagcctaattcccattgtggttttattgagagttgaggcttttgggaggtgattaagtcatgagggcagagccctcatgagtgggattagtgcctttataaaagaacttgaaagaacctatccttttttttctaccacgtgagaagacaacatgaaaaggcaggccatctctgaagcagagagcagcccatagtagacaccaaatccactggtgccttgatcttggacttcgtagcctccaaaactgtgaacaataaatttctgttgtttataagttggcagtttaaggtattgtgttatggcagtccaaatgractaagatattgctgaagaaaaagttattattttatggacagagccaccattaactgcagcccttcaaagtcaaaatagcctatgtgtggcttaaaacctcaatcacagtccacagacataaaaaaactaaacccagattcatctaattgtacacttaaaaaagtaagttttattttatgtaaataacatcttaatttttttaaatgatgtagcaaagcaaacaaggagaaatgtatagaaacaga

SEQ ID NO: 110964 - DNA, 662 bp, Homo sapiens
tgctctcttgtggcctttgcagaggtccaggctgcctatgtcttgtcttagatccttaccctcttgctatactttgaatgtatttttctaaaattcattttgaagcctaattcccattgtggttttattgagagttgaggcttttgggaggtgattaagtcatgagggcagagccctcatgagtgggattagtgcctttataaaagaacttgaaagaacctatccttttttttctaccacgtgagaagacaacatgaaaaggcaggccatctctgaagcagagagcagcccatagtagacaccaaatccactggtgccttgatcttggacttcgtagcctccaaaactgtgaacaataaatttctgttgtttataagttggcagtttaaggtattgtgttatggcagtccaaatgaactaagatattgctgaagaaaaagttattattttatggacagagccaccattaactgcagcccttcaaagtcaaaatagcctmtgtgtggcttaaaacctcaatcacagtccacagacataaaaaaactaaacccagattcatctaattgtacacttaaaaaagtaagttttattttatgtaaataacatcttaatttttttaaatgatgtagcaaagcaaacaaggagaaatgtatagaaacaga

SEQ ID NO: 110965 - DNA, 605 bp, Homo sapiens
cagagctaggtgttgagacccatggatgttgataagaatgcccatgtagaagtgattccctggaataggagctagaggctgaggcaggctgtggtgatcagttcagtgaggtaaatcagagactgacatagaaaagggagacatctgggtaggaatccttcaaatactttgaaatgggaaacccaattgctcaatccaggccaaaacatcatattgcataatccctgaggataaaactgagagaatcaagtmgctttcttcttaaggcaatgtatgtatatgtaggctgttctcccatgtctttttcattgctgcaagtacagcaagaattattagcaactgcgtacatactaccatcactaccaacaagtatctagaggaatgcattgtccatcattacttgtgcccatgacttgagactgatttgtattccatttaaggcagaggtagtgtcattaataatttctgccagagttagtgacaagtttcttgcagtcttctgtccttgggacatgtctctgattattagtatgtataaacaataagtcaataactcctccaggtagaatgtctgattaatcaagagtaggcttgtttttgagctc

SEQ ID NO: 110966 - DNA, 448 bp, Homo sapiens
ttactaatattatctgctactgtttataaaacctctttaaatttttcaaagatcttgaagtctgtagaaccacccaggggcttttgttactttgcttgctttctaagtgacacatacacactttgcaaatacttgaatgtgtaataggcttttggagtggaggaaaggtggtgaatttttgtaactgttggcaagtagtggcaatctttttactgaartgataaatatgatattaataatgcatgtagatgtatagtgattctaccatttcttcaaaatagaaatatatccccttgaatttagcaaatattattgctgtgcccatccacatccattgacaggtttgatgagaccgcacatcctgttttcctttttcaggcagcaaaagctgtttcatggaacaagtgttttagattaaaatgaataggtaggaaataaaactataatg

SEQ ID NO: 110967 - DNA, 457 bp, Homo sapiens
tggaattcactggtcttaccatgttccccatcatcctgaagcagctggattgatagaatggtggaatggccttttgaagtcacaattacaatgccatctaggtgacaatactttgcaagggtggggcaaagttctccagaaggccgtgtacrtgctgaatcagtgtccattatatagtactgtttctcccatcgccaggattcatgggtccaggaaccaaggggtggaagtggaagtggcaccactcaccatcgcctctagtgatccactagcaaaatttttgcttcctgttcctgcaacattatcttctgctggcctagaggtcttagttccagagggaggagcactgccaccaggagacccaacaaaaattccattaaactggaagttaagattgccccctggacactttgttctcctcctattcttaagtcaacaggctaagaagggagttaca

SEQ ID NO: 110968 - DNA, 570 bp, Homo sapiens
atatatgtagctctgcatattcacttttatacccatttattactctccccaagtgctcaatattgtctcccatggcctctgtaacttatggtaattgcatgtttcccatagatcttcagtatctttgctcctctggaaacatggtgcctgcatscttcccggcagccctctcacgatggtgatagacacgccctggaagaaggactcactgcccagctgcagtgaggtcctcagacaggttgaggctgtcagcatcttcagggactctttaaggaaggaggtcatgtccctcagggacagcccactggtgaatgagggatttagaggtggaggaataactggggtgggcaaagcttgctccccagccctgatcagggtgaagtatcctgaatcctctttctgtgcaatcctcctttctttcacttttccccacattcctaaagtgcattcaaatcactttcagtgtctgtgtccagagaactccacctgccacataggtggacactgatttctcttttgttctcttacatcactcagtctggagcagggcaaggtccaccttgctgtttc

SEQ ID NO: 110969 - DNA, 570 bp, Homo sapiens
atatatgtagctctgcatattcacttttatacccatttattactctccccaagtgctcaatattgtctcccatggcctctgtaacttatggtaattgcatgtttcccatagatcttcagtatctttgctcctctggaaacatggtgcctgcatgcttcccggcagccctctcacgatggtgatagacacgccctggaagaaggactcactgcccagctgcagtgaggtcmtcagacaggttgaggctgtcagcatcttcagggactctttaaggaaggaggtcatgtccctcagggacagcccactggtgaatgagggatttagaggtggaggaataactggggtgggcaaagcttgctccccagccctgatcagggtgaagtatcctgaatcctctttctgtgcaatcctcctttctttcacttttccccacattcctaaagtgcattcaaatcactttcagtgtctgtgtccagagaactccacctgccacataggtggacactgatttctcttttgttctcttacatcactcagtctggagcagggcaaggtccaccttgctgtttc

SEQ ID NO: 110970 - DNA, 570 bp, Homo sapiens
atatatgtagctctgcatattcacttttatacccatttattactctccccaagtgctcaatattgtctcccatggcctctgtaacttatggtaattgcatgtttcccatagatcttcagtatctttgctcctctggaaacatggtgcctgcatgcttcccggcagccctctcacgatggtgatagacacgccctggaagaaggactcactgcccagctgcagtgaggtcctcagacaggttgaggctgtcagcatcttcagggactctttaaggaaggaggwcatgtccctcagggacagcccactggtgaatgagggatttagaggtggaggaataactggggtgggcaaagcttgctccccagccctgatcagggtgaagtatcctgaatcctctttctgtgcaatcctcctttctttcacttttccccacattcctaaagtgcattcaaatcactttcagtgtctgtgtccagagaactccacctgccacataggtggacactgatttctcttttgttctcttacatcactcagtctggagcagggcaaggtccaccttgctgtttc

SEQ ID NO: 110971 - DNA, 570 bp, Homo sapiens
atatatgtagctctgcatattcacttttatacccatttattactctccccaagtgctcaatattgtctcccatggcctctgtaacttatggtaattgcatgtttcccatagatcttcagtatctttgctcctctggaaacatggtgcctgcatgcttcccggcagccctctcacgatggtgatagacacgccctggaagaaggactcactgcccagctgcagtgaggtcctcagacaggttgaggctgtcagcatcttcagggactctttaaggaaggaggtcatgtccctcagggacagcccactggtgaatgagggatttagaggtggaggaataactggggtgggcaaagcttgctccccagccctgatcagggtgaagtatcctgaatcctctttctgtgcaatcctccyttctttcacttttccccacattcctaaagtgcattcaaatcactttcagtgtctgtgtccagagaactccacctgccacataggtggacactgatttctcttttgttctcttacatcactcagtctggagcagggcaaggtccaccttgctgtttc

SEQ ID NO: 110972 - DNA, 596 bp, Homo sapiens
atgcagtgctgtttgatagcattttacccacaacagaacttctttcaaaactggagtgaatcctctcaaatccygccactgctttatcaactaagttcatgggatattctgaatcccttgttgtcatttcaacaatattcacagcatcttcaccaggagtagattccatctcaagaaaccactttctttgctcatccataagaagcaactgctcatctgttagttttatcatgagattgcagcaattcagccacatcttcagcctccacttccaatcctagttcttactatttccaccacatctgcagttatttcctccactgaactcctgaagccctcaaagtcatcgaggaggcttggaatcaacttcttccaaattcctgtgaatgtggatatttttgccttctctcatgaatcacacatgttcttaatggcatctagaatggtgaattctgtccagaaagttttcactttacttttctcagatccatcagaggaatcactatttatggcagctatagccttacaaaatgtatttcttaaataataatatttaaaattcaaaattactcctttattcatggggtgcaaaatca

SEQ ID NO: 110973 - DNA, 579 bp, Homo sapiens
tcacagcatgtttcaggggcacaggaccttagaggtgacctactgcagtgccttcttttatagatgaagaaactgaggctcagagaaagaagtgatttgctgaaggtcttactaccaggctagtagcaaagatgaggctggagcctcagagttcttttctataaatcttaccagggtactaggaagggaagaataaaaggagagaagggggaagtgagacagaagtggcaaaatgaataaggtctcagtctctgtagggggaaggagataatcagcctctgactagatactttagacagattgtattaattattccctgcaacractctgtgaaacaaaatgtgctgtcttcattttattatctaggatagtgaaataagaaatgctgggtgagttgtccaggtaaacggtggagttaggattcaaaccctggtctgtctcactccaaagacagtactttatccaggagagcatgttataagggagaagggtggaatgaaagtaggaagtggaatgaagggatggtgatgggcaggttaactggggaacactgccaaggaaaacaggaggggggtttga

SEQ ID NO: 110974 - DNA, 627 bp, Homo sapiens
aatgatttttgttatatttaccaaaatgaatagcatttgttcagggactctttgggcacattctgagtagtaatctttaaaaagatctgtgaggaaaattaggaatgtgcgatatgttttgagaaataaatccagggatgtgtgctccttartgtccgtctgcttatagtccccaaatgtacaaagcaaagaataattggccattgggttttgctttctgaactgctggcacataagtactagctacttactaccttatacctaaaaattgcttttaaaatgcacaacttaacctccattttcactgaaatttctgacattttatcccctattacactattacaaagtgtcaggagctctcagttcctgacctagaacagaagccaggtccactaatatatatcagtgggtctgactcattagactgattataaaggttgatttgattctgactccagaaataattcttttgcagcagtagtagaattgaatcctctaatggaaaaatgttactttccaattaaaaaaaaaaagactccgaaagagtgactattcagaatacttgtaagttaaaagcactttcttttcccccataagtgtactggaatgtagagatccaaattcaca

SEQ ID NO: 110975 - DNA, 624 bp, Homo sapiens
accacaatctcttcatctgtaaaatgggacagtgggagtaaaggtcactaaggccccttccaactctgatactctgtgattcataatcatcccctcttttgctcccacaagagcacatcatgttctgcaaggagatsgctgccaaaccgcctggaagagggaagcaaacactcatccaccccgagcctcaccccagggaaaccagctgagtttgaagaaaaggctgcagtggagtccagaaggcttgggttttagctgctggcccccattctctgcataaatttgctgtgggaaccatttgaacaactttaatctctggaaagagcaacagccgacattacttgattaagtaactcaccctccttaactcatctcccagctcccttttcccaggtttggtacctcctgggtcctgaccacagtcccgtgggtagaatgaaccactgtctgcagcaccatgttgaagacggcagcttcaatcaaagaacttggccagctacctgtcactcaaataacttgatggatgatgaaaaatttagtcaactaacactgttccaagcagagaagaagctttttaagtggatctccttttagcctactatattctgtctttgtccattcttg

SEQ ID NO: 110976 - DNA, 624 bp, Homo sapiens
accacaatctcttcatctgtaaaatgggacagtgggagtaaaggtcactaaggccccttccaactctgatactctgtgattcataatcatcccctcttttgctcccacaagagcacatcatgttctgcaaggagatcgctgccaaaccgcctggaagagggaagcaaacactcatccaccccgagcctcaccccagggaraccagctgagtttgaagaaaaggctgcagtggagtccagaaggcttgggttttagctgctggcccccattctctgcataaatttgctgtgggaaccatttgaacaactttaatctctggaaagagcaacagccgacattacttgattaagtaactcaccctccttaactcatctcccagctcccttttcccaggtttggtacctcctgggtcctgaccacagtcccgtgggtagaatgaaccactgtctgcagcaccatgttgaagacggcagcttcaatcaaagaacttggccagctacctgtcactcaaataacttgatggatgatgaaaaatttagtcaactaacactgttccaagcagagaagaagctttttaagtggatctccttttagcctactatattctgtctttgtccattcttg

SEQ ID NO: 110977 - DNA, 623 bp, Homo sapiens
  misc_feature (1)...(623): n = A,T,C or G
acctctgcagaggatagaagggagcctgcttggtggctgttggaaagagtgactcaacaatgccagtgggggtcaccaagggagagcacgtggtcaccctcgcgggtccctacagtcttctggagtgggttgttctgggttaggaaccagatggcctcttgaccctgatttcagtaacgccatgaaaggaaacccaaggggaacatgaaggagaactgattttccttttcattactggctgcctcacttcttctcagggctgcactcrcctttattttcctgcctgccttcctggagggcagtgagacgcaggcccagatccttcacacaggggagcgagaagagagggaggaagaggctgcccatcaacattgccaccatggcagcctcctgcccctgagaaagtggaaatgcccaggtatgacacgaaagcaggttttcccaggcagccaggggaagctaagatcccacgtccccgtggcttcagggtggaatgtgctgtggtgggtgggctgtcgggcaacatccaggcctgaggtcccacccatcaggaacggtgggancggcggtgcagaagtttccttgcctgattttganagtcttattcaggctgttcaagctgc

SEQ ID NO: 110978 - DNA, 492 bp, Homo sapiens
gcaggagaattgcttgaaacagggagacagagactgtagtgagcctacattgcaccactgcactccagcctgggcaacagagcaagactccatctctcaaacaagtaaaataaaataagtaaatcaacatgcagtagtcagtgagcatcagccatgcaattgtgctaggtacagaagatggaaaaaatatccttgaggtaggagaaacatgttaacagataaattacagcagacagacttgatagacgagggtaaaagttattaggaacagaaggcctaattctccctagaaaaggtactatttgagatgggtctcaaygaagagtaaagagtaaatattctttgctgggggaaggggatggagacacaacaaaaagaacaacccatgcaacagcaggggcagtaaagaattattcagtgtgtcagtgatgtggaagacagagacaagagccaagactagcaatttggtttggaagcagatatgggtcttcg

SEQ ID NO: 110979 - DNA, 492 bp, Homo sapiens
gcaggagaattgcttgaaacagggagacagagactgtagtgagcctacattgcaccactgcactccagcctgggcaacagagcaagactccatctctcaaacaagtaaaataaaataagtaaatcaacatgcagtagtcagtgagcatcagccatgcaattgtgctaggtacagaagatggaaaaaatatccttgaggtaggagaaacatgttaacagataaattacagcagacagacttgatagacgagggtaaaagttattaggaacagaaggcctaattctccctagaaaaggtactatttgagatgggtctcaacgaagagtaaagagtaaatattctttgctgggggaaggggatggagacamaacaaaaagaacaacccatgcaacagcaggggcagtaaagaattattcagtgtgtcagtgatgtggaagacagagacaagagccaagactagcaatttggtttggaagcagatatgggtcttcg

SEQ ID NO: 110980 - DNA, 567 bp, Homo sapiens
aatacttcataaactattacacaggctgggcacagtggctcrtgcctgtaatcccagcactttgggaggccaaggtgggtgaatcacctgaggtcagtagtttgagaccagcttgaccaaccctgtctctactaaaaatatgaaacttagttgggcatggtggcaggcacctgtaatcccaggtacttgggaggctgaggtagaagaattgcttgaaaatgtcatgccaaggttgcagtgagccaagatagcaccattgcactcccgcctgggctatacagcaagactccgtctcaaaaaaaaaacaaaaaaaaactattaaacaaacaaacaaacaaaaattatgggtctaacatgagtaatagtcaacttaaaacagagaattttcatggggagattctgaagcataagccaaggattatacagtaataaattcaatacaaagcagacagaatagatttgctttcagcatttttgagaatttctttctagtaaattagacaccttcttaaaatgatttattttgctccaaaattgcttttttctgctaaaaatagtttcaaactt

SEQ ID NO: 110981 - DNA, 567 bp, Homo sapiens
aatacttcataaactattacacaggctgggcacagtggctcatgcctgtaatcccagcactttgggaggccaaggtgggtgaatcacctgaggtcagtagtttgagaccagcytgaccaaccctgtctctactaaaaatatgaaacttagttgggcatggtggcaggcacctgtaatcccaggtacttgggaggctgaggtagaagaattgcttgaaaatgtcatgccaaggttgcagtgagccaagatagcaccattgcactcccgcctgggctatacagcaagactccgtctcaaaaaaaaaacaaaaaaaaactattaaacaaacaaacaaacaaaaattatgggtctaacatgagtaatagtcaacttaaaacagagaattttcatggggagattctgaagcataagccaaggattatacagtaataaattcaatacaaagcagacagaatagatttgctttcagcatttttgagaatttctttctagtaaattagacaccttcttaaaatgatttattttgctccaaaattgcttttttctgctaaaaatagtttcaaactt

SEQ ID NO: 110982 - DNA, 487 bp, Homo sapiens
cacggattattaaaagtcacaatacgcacataattgcttcaaagggaggggaagttaaaagctagagagtttgagtatcacaataacaaagttatgtttcctgcaggaattttaataataaaagtgtttstaatagctgtaagtgtttagctgtgaaaccagtacatcgtttagtaaatgcagcctttgctgattctggcttttcagctccagaggaatggctgctctttttctatcacctgcagcgctaacataccactaatttttatcattcttatgtattgaaaacaaagcccaaacctctcaaacaaagcagcagggttacacatcacctttccaccaagcaaatccagtttcccagcagatacagaaacttgcctcagtttcctgatctataaaatgaaggtagtaataagttctacttcaaagaattataaataggattgcatcaattaatatttgtaatgtgcttggggcagcatctggc

SEQ ID NO: 110983 - DNA, 571 bp, Homo sapiens
tagctgagctgattgagaaatcagggtagtcaagttacagatgtagccactggctggggatcaacctagactcatgatcttttggggtcatgaggtgaatggagaagactactttccctatacttggtctatgtccatgaactccagactttaggggaattgctttatattagccaacttaatgtctaaagtgctaaataaataaacaggtaatctctggggccaaactgccaaaagtagctcataccttcctgcctcctagaagccctttcaaagaggacatcaacaaacaggtcgttaggaaaaagcaaaatgtggctcactttgcaaatctcacttttccttcaatgcttctttgtccctatggatttcaactcactccatttgacattctcagttcctttgataagaagttcttagaagcttatggcaactcagacccgctgaatctggaggcaggtctgtaggaattctggtaattrgttaaacaaccttgaacaagttgtttcacttctctgagtctcagtttctcactcaaaaatggtgaataatttgtaagacttcgctaata

SEQ ID NO: 110984 - DNA, 619 bp, Homo sapiens
cacattacaaacaacctttaataaacactaccatctattgagttttggcatagtatcaaattaaaggtctgcaattatcttaagaagctattaaaatagtccttttccaactatttattcatatgaggtgacattttcttcattaacatcaagtgaaataacattgtattagtttcctgtggttgctatgacaaattactacaaacgttatgtcttaaaactaaagacatttattctctcaaagttctagatgtcaaagtcaccaaaaaacagtatcgctgagtcgaaatcaaggaattgataagaccctgttctctctaagactctaagggagaatctgttttctgcctcttccagcttctggcaactataggcatctctttgcttgtagccgcatcattccaatctctgtctttgtgatcacactgctttctcttctgtgtcaaacctcccttagcctctgttttataacaatacttgtgattacattcagggcccacccagataattccgggtaatcttcccatgtcaagatctttaacttaatgacattygtaaggatcatttttccttatgaggtaacactcatagtttccagagattaggacctaatatcttt

SEQ ID NO: 110985 - DNA, 579 bp, Homo sapiens
ataaattgtaccaaagcatgacacacaagacaaactacctaagctcaaacctgtttaacgggtttattcrgaccctatgttctaagctaaagcacagatcaactgatctaacagtaactccaagacacatatattttaaagataagaccactgatcttccagcagcttattttacaaaatcatatcaatccctatgaagaccatctgatgactaattccagtatccaaaatgctataaataacctccagtatccaaaatgctataaatgaccttccctgattctccattttgagaatcttcgtggttccccatcatttgcattttcttttcctgtaacaagctaataaacctaacagcagagtgtccctaatggtcttagtctgttaaagcttaacaagcagaatcctcaatgagatttgtcaagttccttactgatatctacagggacctcaattctgtaatagtgtgtacaactgagacatgtgacattgccccctgctgaaggccaccctgcccatgactatgtagttaagttttacactgaatctgagctccaactgtttcacagagtcctcaat

SEQ ID NO: 110986 - DNA, 579 bp, Homo sapiens
tcttgctgtttcttccgcctggaatacatgtttcccaatctttataagactatacttgtctgtaagtttcatctcagatgtcacatctaggagaggttttccttgaccactgtagccaaagcaaatgttgatcattgagtgaataagggaatgaatgaatggagtggtatataatgtagcagagtagaaaatttaaggctaattctctatatatctccaagcaaatagatttgtaatgcttttcctgccaacaatctatacagctgattcacaaatacttggttgacaggttttatatatcattgtggctcatcagcttatatrttgttggggccagaatctatacttacactttattcaaatttgattttacagaagagttgaggtttttatttttcttttaattaagagggctgtgaaattattatctataattctaaatctcatttaattcctcccaataggtttcaagatggattggaaccaaagttcacttctttaacaaaagtgctttatgactttaataaaacagtagagaatggtagaatccatggcagccctttacaaaaacttgtgata

SEQ ID NO: 110987 - DNA, 579 bp, Homo sapiens
tcttgctgtttcttccgcctggaatacatgtttcccaatctttataagactatacttgtctgtaagtttcatctcagatgtcacatctaggagaggttttccttgaccactgtagccaaagcaaatgttgatcattgagtgaataagggaatgaatgaatggagtggtatataatgtagcagagtagaaaatttaaggctaattctctatatatctccaagcaaatagatttgtaatgcttttcctgccaacaatctatacagctgattcacaaatacttggttgacaggttttatatatcattgtggctcatcagcttatatgttgttggggccagaatctatacttacactttattcaaatttgattttacagaagagttgaggtttttatttttcttttaattaagagggctgtgaaattattatctataattctaaatctcatttaattcctcccaataggtttcaagmtggattggaaccaaagttcacttctttaacaaaagtgctttatgactttaataaaacagtagagaatggtagaatccatggcagccctttacaaaaacttgtgata

SEQ ID NO: 110988 - DNA, 474 bp, Homo sapiens
gcaacaacatggatagaactggaggtcgttatgttaagtcaggaacagaatgtcatgagccagacccagaaaatcgaactttgcatgttctcacttatttgtaggtgctaagcaaatgaaagtaattgaactcatggagatagagtagaatgatggttatcagagactgggaaggataaagtgggggtgaagtgcggatggttaatgggtataaaaatggagttagatagggctgggcacagtggcttacgcctgtaatcccagctctttgggaggccaagkcaggtggatcatgaggtcaagagacccagaccatcctggccaacacggtgaaaccccatctctaccaaaaatacaaaaattagctgggtgtggtggtgtgagcctgtagtcccagctactcgggaggctgaggcaggagaaacccttgaacccagaaggcaaaggttgcagtgagctgagatcgcacaactg

SEQ ID NO: 110989 - DNA, 607 bp, Homo sapiens
atattgttaaaatgtccatactacccaaagcaatctaccgattgagtgcaatccctagcaaaataccaatgacattcttcacagaaacagaaaaaaaaaaaatcctaaaattcatgttgaaccacaaaagacccagaatagccgaagctctcgtaattaaaaagaaacaaactggaggaatcagattacctgacttcaaattatactacagagctatagtaaccaaaacagcatagtactagcataaaacagacacagaccaacggaacagaatagagaatccagaaacaaatccgcacatctacggtgaactcattttcgacaaaggtaccaagaacaaacactggggaaaagacaatctcttcaataaatggtgttgggaaaacttgatattcatatgcagaagaatgaagctagattcctcttttgccatatwaaagttaaaaaaattatgttaagtatcttctctgatcacaatggactataactaaaaatcaataacgaggaattttggaaactccaccaacacatgggaattaaacaatatgctcctgaatgaccaacaggtcagtgaagaaattaagaatgaaattaaacaatttcttga

SEQ ID NO: 110990 - DNA, 571 bp, Homo sapiens
taatacacaatggagtactattcagccataagaaaaagaatgagatcctatcatttacaacaacaygggcagaacttgaggacaatatgttaggtgaaataagccaggcactgaaagacacactttccatattcttgctcatttatgggagctaaaaattaaaacatttgaactcttggagatagagagtagagtgacggttaccagaggctgggaagggtagttgggagaggggtgagaagtggggaaagttaatgggtccaaaaatgtagttagatagaatgaataagatgtagtatctgatagcgcaacaggataactacagtcaacaataatttatctttgtacatttttaaataactccaacagtataattgggatgtttgcaacataaagaaatgataaatgtttgaggtgatggataccccatttaccttgatatgattatttcacattgcatgtctaaatcaaaaaatctcatgtaccccataaatacatttattatgtacccataaaaataaaacatatgtttaattttatatatatataatatataattcaaaagaaaaaa

SEQ ID NO: 110991 - DNA, 571 bp, Homo sapiens
taatacacaatggagtactattcagccataagaaaaagaatgagatcctatcatttacaacaacatgggcagaacttgaggacaatatgttaggtgaaataagccaggcactgaaagacacactttccatattcttgctcatttatgggagctaaaaattaaaacatttgaactcttggagatagagagtagagtgayggttaccagaggctgggaagggtagttgggagaggggtgagaagtggggaaagttaatgggtccaaaaatgtagttagatagaatgaataagatgtagtatctgatagcgcaacaggataactacagtcaacaataatttatctttgtacatttttaaataactccaacagtataattgggatgtttgcaacataaagaaatgataaatgtttgaggtgatggataccccatttaccttgatatgattatttcacattgcatgtctaaatcaaaaaatctcatgtaccccataaatacatttattatgtacccataaaaataaaacatatgtttaattttatatatatataatatataattcaaaagaaaaaa

SEQ ID NO: 110992 - DNA, 550 bp, Homo sapiens
gtcatggaaccactgaactagactgtcaaagatagcattagcatacctctatagcagtcttgacagcaggaaagttaaggatgggaatttaaaagttgggccatctatgctataagctgagtgaaaatgattattcaagaagtcgacaaaaaatttttcaagtgaaactatccagtttcccagataaaaactatttatgctgaatactgttttaatgagtttgatctaatacgaactattaaatacataaaacaaatcaccttcaaagcaatccaagtttcaggcttatgcaagtttttttctttttcctttttttttkggggggcaagatgtataagatatgctgtccaaagataactgtgcattttatttttatcatcataaccttcacttagataaccataacaaataagggttgcatagggtatgtatggaacataagtgtgtatctctttcttgacactcaggagtaaatgaaaaaataagtatataaataacaattaaaatttaaaaaacccccaaaacctaagtgtatatccctaaaaatgtc

SEQ ID NO: 110993 - DNA, 550 bp, Homo sapiens
gtcatggaaccactgaactagactgtcaaagatagcattagcatacctctatagcagtcttgacagcaggaaagttaaggatgggaatttaaaagttgggccatctatgctataagctgagtgaaaatgattattcaagaagtcgacaaaaaatttttcaagtgaaactatccagtttcccagataaaaactatttatgctgaatactgttttaatgagtttgatctaatacgaactattaaatacataaaacaaatcaccttcaaagcaatccaagtttcaggcttatgcaagtttttttctttttcctttttttttgggggggcaagatgtataagatatgctgtccaaagataactgtgcattttatttttatcatcataaccttcacttagataaccataacaaataagggttgcatagggtatgtatggaacataagtgtgtatctctttcttgacactcaggagtaaatgaaaamataagtatataaataacaattaaaatttaaaaaacccccaaaacctaagtgtatatccctaaaaatgtc

SEQ ID NO: 110994 - DNA, 231 bp, Homo sapiens
ctaccattgatcctggatatttcatatttcctatttccattggcattttctcaactcccagattctggagaaccttgagctaaaacttaaataaaaataagttccaaatggtacgttgaaaacgctrctgatttaatgaagacgaagtcaccttgaccaattcattaaaataatgtatagatgcccaggggaaaatgtaattaaataaatatggatcctagtatctgttcc

SEQ ID NO: 110995 - DNA, 531 bp, Homo sapiens
tgctttgaaatctaattctatgatcttcagcaaatcactaacctctgtgactcaaagattcctcacctataaacaggtttcaaagggctgttacactgaacgagtgaaaaaaaaatgcataaacagtgtctagcgcagtgcctggaacaaaacaggcactctaaaaagttttggttcccttctctctccctcaactcataattatagatatccaatgagatgatgtgacataaaaataatttgaacataagacaccacacaaatctctcacttaagggggaaaaatcctaacattaatctttgcatttatataccctttcttctccttgggcctgtaagaaatactccggaggaaaagtcggaacctgctttttcagagtgtgtggtttatttgaatatagtctgtacataataaaataaagatttaaaaaaggaaagaaaaatactctgcagaaatgatggtttttaaacatttmccccaaattatgtaattatttaggattctagaattaaaacaattcagttagtacc

SEQ ID NO: 110996 - DNA, 602 bp, Homo sapiens
ttcttctcagtgcttcaaactagatcttgtacagacatgttctaataagttagtatgcattcattttggttcaaaacaaaactgaaatgcatgcatagttttccacaattattcatttttcatgaattttttgaagatccctatatatacatagtaggaacatgttctatttatacatgtctaagtgtacctctacttcaaaagtattatatatatacacacatatatgcatcaagatcacaatctatttacacatacaagaataaaagwatctaattagacactcatttctcctttgcaacaggctctctttagtatctaacaacccttatgctgctatcagtttaattacacttttaacagaaattcagttaaatgttccatcaaacctgtccatgacaaaacttttaattaattattttgtggaagaataaaacgtaaatgcagaaagagctgttgcttctctaaattagtttaacaatttgggaagacctaagtggagttgccaaaaacaattctgaattacatgtgagcaaattacctataaaacactgggggaaaaaatctataagtaatccgcattcgtattgttttgtaaatac

SEQ ID NO: 110997 - DNA, 600 bp, Homo sapiens
gagttgcaggaaagaaatagtcagaggtgtctctgtcctttccaaaatagccatgaaatttcagtagggatataaattatgaatcagatccaataaagtgtaatggctggatacttgctgtcattagaaaggaaagctgcaaatgaatacttggacatattcacaattaggtaaaagatagtagatgatttctagaccctaaactagatgagaaagaatttgtaatgtcccaccaagcctaggtaatttaaaagcaaaatgtgctgtttctagtttcatgtgttttttatctcattgacaaagcatgcttcctatacaaagcaatgaaaacagaaatcattcagggatggcaatagtaaaagctgataayttaaaataactaaggatcactatcattattatgattgatacatccttccaaatgctttggtgatattatctcatataaccttcccaagaaccacattaggcaggatactaccattaaccctattttttagcaactgaggcacacagagattaatttggccaagatctcagaaaattcagaaaataaataaaatgagtcatttaggatttcattacagggaggcactagat

SEQ ID NO: 110998 - DNA, 656 bp, Homo sapiens
agggaccaatcagttgctgccttcactctccagcagcaaagttgagtaattgtgacagagaccgtatggctcacaaaatctaaaacatttactatctgggtttttacagaaaaggtttgccaatccctgcatgccaagcttagcatgcagttagctcccacattgctgtagtggtgaactaacccgggacccaagcaactaggacaagtctgatgttctccctccagtatgttctttgcaaatatccttaagccgaccctgaaatgcatagaaggttatgatttgcagtggatacaactattcctgtatgtcagactgccatgccatcttaaagatacccaamcttccccccagtccctgaagacatccagcctataaattgtcttatttaactcacccctccttctgcattgtacatacccctcaaccatttcaaatcaatctttaacttttttctacaacctctggcaaaacccagttatactgaactatcataactgtcgttctccctcaattttgcaacctttcaactttttcagtgtctccgatgagcctggacccttgatccatctccaaaatgaatgcctttccgtttgactacttgtcatgaatctccatctttcaatgtttctattaaggtcagccaggaggaccag

SEQ ID NO: 110999 - DNA, 656 bp, Homo sapiens
agggaccaatcagttgctgccttcactctccagcagcaaagttgagtaattgtgacagagaccgtatggctcacaaaatctaaaacatttactatctgggtttttacagaaaaggtttgccaatccctgcatgccaagcttagcatgcagttagctcccacattgctgtagtggtgaactaacccgggacccaagcaactaggacaagtctgatgttctccctccagtatgttctttgcaaatatccttaagccgaccctgaaatgcatagaaggttatgatttgcagtggatacaactattcctgtatgtcagactgccatgccatcttaaagatacccaaacttccccccagtccctgaagacatccagcctataaattgtcttatttaactcacccctccttctgcattgtacatacccctcaaccatttcaaatcaatctttaacttttttctacaacctctggcaaaacccagttatactgaactatcataactgtygttctccctcaattttgcaacctttcaactttttcagtgtctccgatgagcctggacccttgatccatctccaaaatgaatgcctttccgtttgactacttgtcatgaatctccatctttcaatgtttctattaaggtcagccaggaggaccag

SEQ ID NO: 111000 - DNA, 656 bp, Homo sapiens
agggaccaatcagttgctgccttcactctccagcagcaaagttgagtaattgtgacagagaccgtatggctcacaaaatctaaaacatttactatctgggtttttacagaaaaggtttgccaatccctgcatgccaagcttagcatgcagttagctcccacattgctgtagtggtgaactaacccgggacccaagcaactaggacaagtctgatgttctccctccagtatgttctttgcaaatatccttaagccgaccctgaaatgcatagaaggttatgatttgcagtggatacaactattcctgtatgtcagactgccatgccatcttaaagatacccaaacttccccccagtccctgaagacatccagcctataaattgtcttatttaactcacccctccttctgcattgtacatacccctcaaccatttcaaatcaatctttaacttttttctacaacctctggcaaaacccagttatactgaactatcataactgtcgttctccctyaattttgcaacctttcaactttttcagtgtctccgatgagcctggacccttgatccatctccaaaatgaatgcctttccgtttgactacttgtcatgaatctccatctttcaatgtttctattaaggtcagccaggaggaccag

SEQ ID NO: 111001 - DNA, 590 bp, Homo sapiens
ggtcagccaggaggaccagggatggattcagggtctcctcagagcacatggcgccttccttaaacacaagagaactagaaacatttagacttagaaccgtattgtatgtcataacagaagaggaagctaaaggttagaaaaaaatcaaaaagctttcccaagttgcagaggcagttcctagcagacttggaactaagaccacagaatccagtctggcactgctttccacaaattacctcatttattttgggattctaaggagaagccatatttttcagtaatatctttcccatttcctctatctttatcataatactggccacactcactatcaccaacgtcattttctgaatcctttccatgtctcttccatcttactagctatcttttcctctcggcttttccctgaccttggcattttccagatatcctgcctttggtttatctaaattaaatctcttcccatgactatttacctatttctctaagctcttcaatctggttggtaatttattttatcttctcctgtgtttgcaatcctatgtaatttggtartgtctgtaaatctgaataaagtaaattaactttat

SEQ ID NO: 111002 - DNA, 598 bp, Homo sapiens
gcttaaggctctgcagagctgaaatgttcaaaaccgtcagtctcccgcagagtgaacccttcaaaggaccttaaagaagctttcctggtggtgtttgcttgctctctctgcttcattcctagcagaggaggctgcagacagccaagtgtgcagaatgcctggggaggccacgggaccgggtgagctcagaccattcccagagaccctacgtccacctcttgcctgacccatcagcctgtatgacagctgagtggcactagcaccggcttgccggtgggaccagctttagcaaacaaatatgatttttcattaaacaacttgttcaactagcaaagattagtggtgcagaatcccctcttcctggaaaaggaaggagaataactggcaacccattttartctctaaggctgagatattacatttcatttgagaagggagagtaaggacaccagagacctaacaaaccacaacactgagtttttagagtctccatctctcctgcctctcctccacccagcttttccagcgtcagaacaggggctccaagttgatgaacagagccttggatttggagtcaggagtgctgagttctagatcc

SEQ ID NO: 111003 - DNA, 576 bp, Homo sapiens
agcaagcaagcaaacaaacaaaaaacaataaagcagaaacacaaaaagtttaagagtgtgctatttggcttggttgtgaaggtatttatttagtcatcataacgtaaatactgaatattaatttaatattctgcatctgccatagtacagtcaaaaactaatatctaaaattgaaaaatcaggaaacggcattgctatggactccatgtttgtgccccctacacaaattcataagttgaaaccctaatctctagtgggataggattagaagatggagtctttggggggtaatcagatttattattattttttatttttttgagatggaattttactctgtcacccaggtgggagggcagtggcgtgatgtcagcttactgcatcctccaccttccaggctcaagtgattctcatgcctcagcctcccgagtggctgcgactacgggmatgtgttaccaagccaggctaattttttgtatttttagtaaagacagggttttgccatcttggccaggttggtctccaactcctgaccttgagcaatccacccacctcggcctcccaaagtgctgggat

SEQ ID NO: 111004 - DNA, 561 bp, Homo sapiens
ttttagctgaaatctcataatggctttttatagaatattaatgacttacagagctctttgctctgggttatggacttaggtttctaaattgtcatctccttctagataacttttcaggaacttatcagcacccacacaggactggatgtgcttttggaaggtaccatggaggctgatatggtgtggctatatcaaatctcatcttgaattgtagctcccataacccccacgtgtcaagggagggaccaggtgggaggtaattaaatcatgggtgtgtgtttttccgtgctgtcctcgtgacagtgaataagtctcatgagatctgatggttttataaagggcagttcccctgcacatgctttcttgcctgccaccatgtaagaagtgcctttgctcttctaccatgattgtgaggcctccctagctgtgtgcaactgtgagtctayttaacctctttttctttataaactactcagtcttgggtgtgcttttattagcagcatgacaacagactagtctaatacagaggctttgggcataagctatgggcctttggttttg

SEQ ID NO: 111005 - DNA, 644 bp, Homo sapiens
aggtgataggttggcttgaagttgatattttggaagatttgaaataataggacctggccaaccacggtggctcacatctataattccagcactttgggaggccgaggtgggtggatcatttgaggtcaagaagttcaagaccagtttgccaacatggcgaaacttcatctctactaaaaaatacaaaaattagcctggcgtgctggtgggcccctgtaatcccagctacttgtggggctgaggcaggagaatttcttgaacccgggaggttgcagtgagccgagattgcrtcactgcactgcagcctgggcaacagagtgagactttgtcaaaaaacacaaaaacccagaaaaaggaaataataggacctgatgaagcctaggttatgactacaagaatgagtagatgaggaaggacaggcctatgagaagaaaagaggttaagaaattggggtgccatagtgctgggatgacagttccctatggtgactgggcactgttcagcactggagatcctgggacactagaattagaatggcataccttaccagacaatccgtattccctccagagcaaggaccacttagtactatcttttaaaaaatggaatggtttactttgccatccatagacaattgttatctt

SEQ ID NO: 111006 - DNA, 600 bp, Homo sapiens
gactcacaatgcgtatgcacattcattttaaatttccttttattcctgctattaagtgaaaaagaaaatctgtttggtaaattatttatctccataccttgccatttcccttttattttaaacaaaaagaggcaagaatcaggctcagaacgctatgaatgcaatgkcatatggctagaatataataacaatgctttgttttaattttatagcttctaactattaatagtgatactggtttttctatttgcaatagttgatatgtttcctttttaaataactttaattaaaatatgtttgttaaaggaaaatataagtaaatgcacagatatgataaatacatgaagataggagaagggttgtgtttaggaaacagtgacctaatttaatcattctctcagccctggccagctagttaccccttcatgaggtttgattagttcacaaacccagccagtgtcattccaaggaagatattgacagaaaataattcaagaacagaaccaagagtagttttcaagaggaaggacttcattggaattacacatgctaggattaagatattttagtataggttacaggtaaggtagttttgaggat

SEQ ID NO: 111007 - DNA, 600 bp, Homo sapiens
gactcacaatgcgtatgcacattcattttaaatttccttttattcctgctattaagtgaaaaagaaaatctgtttggtaaattatttatctccataccttgccatttcccttttattttaaacaaaaagaggcaagaatcaggctcagaacgctatgaatgcaatggcatatggctagaatataataacaatgctttgttttaattttatagcttctamctattaatagtgatactggtttttctatttgcaatagttgatatgtttcctttttaaataactttaattaaaatatgtttgttaaaggaaaatataagtaaatgcacagatatgataaatacatgaagataggagaagggttgtgtttaggaaacagtgacctaatttaatcattctctcagccctggccagctagttaccccttcatgaggtttgattagttcacaaacccagccagtgtcattccaaggaagatattgacagaaaataattcaagaacagaaccaagagtagttttcaagaggaaggacttcattggaattacacatgctaggattaagatattttagtataggttacaggtaaggtagttttgaggat

SEQ ID NO: 111008 - DNA, 594 bp, Homo sapiens
cacaataaggccctttcccccaaaggagctgtcagtctaacagtcatgcatacaaatcttgctaatgtacggcagaatgataagggatataatgggggaaggctaattcttgtggaggtaggggtgggagattgaggaaagcttattggtagggattagatctaaacttggccctgagggacgattaaaagtcttgagaggagacagggatgaagaaagaaaaaaacrgagagcattgctggcaaattgagtttggtcagagggcagaaacaggagggaaatgagggaaatctggctattgtttagaacacagacaagaatttgtggcataatttaggggaggggtgtggaaggacaattgagatgggacagggtcagagtctgctgagccttcaatatcacactacggaggctggatttccccaggtgtggaacaaggagtgccacagtagatgatttgttttaaaaggacgattctgacagcaagaattgggatggatttggcagtgggtaagcagtggtggcagaagccagttaggagctgctgtcggtatttcctgccaccattgacagcgtgacagattagagggagac

SEQ ID NO: 111009 - DNA, 594 bp, Homo sapiens
cacaataaggccctttcccccaaaggagctgtcagtctaacagtcatgcatacaaatcttgctaatgtacggcagaatgataagggatataatgggggaaggctaattcttgtggaggtaggggtgggagattgaggaaagcttattggtagggattagatctaaacttggccctgagggacgattaaaagtcttgagaggagacagggatgaagaaagaaaaaaacggagagcattgctggcaaattgagtttggtcagagggcagaaacaggagggaaatgagggaaatctggctattgtttagaacacagacaagaatttgtggcataatttaggggaggrgtgtggaaggacaattgagatgggacagggtcagagtctgctgagccttcaatatcacactacggaggctggatttccccaggtgtggaacaaggagtgccacagtagatgatttgttttaaaaggacgattctgacagcaagaattgggatggatttggcagtgggtaagcagtggtggcagaagccagttaggagctgctgtcggtatttcctgccaccattgacagcgtgacagattagagggagac

SEQ ID NO: 111010 - DNA, 594 bp, Homo sapiens
cacaataaggccctttcccccaaaggagctgtcagtctaacagtcatgcatacaaatcttgctaatgtacggcagaatgataagggatataatgggggaaggctaattcttgtggaggtaggggtgggagattgaggaaagcttattggtagggattagatctaaacttggccctgagggacgattaaaagtcttgagaggagacagggatgaagaaagaaaaaaacggagagcattgctggcaaattgagtttggtcagagggcagaaacaggagggaaatgagggaaatctggctattgtttagaacacagacaagaatttgtggcataatttaggggaggggtgtggaaggacaattgagatggkacagggtcagagtctgctgagccttcaatatcacactacggaggctggatttccccaggtgtggaacaaggagtgccacagtagatgatttgttttaaaaggacgattctgacagcaagaattgggatggatttggcagtgggtaagcagtggtggcagaagccagttaggagctgctgtcggtatttcctgccaccattgacagcgtgacagattagagggagac

SEQ ID NO: 111011 - DNA, 521 bp, Homo sapiens
cagttctgccaaatatagcaaatatttccactggactacaatcaactatgagatggacttaatgagtgatctttgactttcagtagcaatatttcctacagagacctgtaggatcttactatattacaggttcactggagttgcaattaggaaactgtatttttcaatgcatcaacaaagtttgttggccaasaacgtacaaatccctgagctaatactatacagaagacactgggtacaaagacagaatcaagtgttattagagaagcctactgtaaaaaagtgtgaccagcttcactttcaaacctagtgccatttagaaaagcacacactatatcaattaagtgaacacaaattaattcaattctaatgcattgattttttagaagtgatctagcctggaattaaatgagttagctatgcaggaaagctagtccagaaggatagaaagtttattcatccttatagatgagttgtcttacaaagccctaccaggaaaagatttgtttccagtcaagagg

SEQ ID NO: 111012 - DNA, 521 bp, Homo sapiens
cagttctgccaaatatagcaaatatttccactggactacaatcaactatgagatggacttaatgagtgatctttgactttcagtagcaatatttcctacagagacctgtaggatcttactatattacaggttcactggagttgcaattaggaaactgtatttttcaatgcatcaacaaagtttgttggccaacaasgtacaaatccctgagctaatactatacagaagacactgggtacaaagacagaatcaagtgttattagagaagcctactgtaaaaaagtgtgaccagcttcactttcaaacctagtgccatttagaaaagcacacactatatcaattaagtgaacacaaattaattcaattctaatgcattgattttttagaagtgatctagcctggaattaaatgagttagctatgcaggaaagctagtccagaaggatagaaagtttattcatccttatagatgagttgtcttacaaagccctaccaggaaaagatttgtttccagtcaagagg

SEQ ID NO: 111013 - DNA, 521 bp, Homo sapiens
cagttctgccaaatatagcaaatatttccactggactacaatcaactatgagatggacttaatgagtgatctttgactttcagtagcaatatttcctacagagacctgtaggatcttactatattacaggttcactggagttgcaattaggaaactgtatttttcaatgcatcaacaaagtttgttggccaacaacgtacaaatccctgagctaatactatacagaagrcactgggtacaaagacagaatcaagtgttattagagaagcctactgtaaaaaagtgtgaccagcttcactttcaaacctagtgccatttagaaaagcacacactatatcaattaagtgaacacaaattaattcaattctaatgcattgattttttagaagtgatctagcctggaattaaatgagttagctatgcaggaaagctagtccagaaggatagaaagtttattcatccttatagatgagttgtcttacaaagccctaccaggaaaagatttgtttccagtcaagagg

SEQ ID NO: 111014 - DNA, 561 bp, Homo sapiens
acctgaaaataaactcagtgagcctgattactaatatttcaaagtgttggccatgcctggcactgaacaatgatgagaacagggatcattaatgtgtaccatctcaattatccagcctggttgaaagaaccaggttttaacctggttgaaaggagggggagctcattttctggttagctgattgttaactctttaagttcatcagagctgtttgctacctaaatatctcacttctgagctttagaagttgtatagtatttactcaagtttgttgtttttaaaatacacagacatcctaaacatccaataaagactctgttgaacacattatgatatattacatcaaggaattcgacatagctatttaagagctagtgtgaatgcctatttattaacatgaaagatgctcataatataataacagtgaagaatgaaaaactgtgcatacaccataatcccagtcttagaaaataataaaaaacccaacatatgaatagyaggtctaaagggacatatagcaacataataagagggttatctcagagttgtgcaatgatagat

SEQ ID NO: 111015 - DNA, 563 bp, Homo sapiens
gtccttattattccctgaagtacctttatttctcttgatcacgttttaattttttaagaaccaatgcaattcccatcttccctacaatgctctcccatactgattttggcctctctgagtatctgtattacttactgattttaattgacatttaacttgactctttccacttgattttcagcctcttakgggtcaggaatcatgactataatgtgagctaatttttttttgagcacttacatgtgtcaggcacagtgccaggctacataactgcctcattttgtgtgatgttcacaacaactctctgaagtatgaacacttattattccatttacaagtggagaataaagggttggggaggttatgttacttgctcaagcttatacagctatttagaggcagggctggaatttcaacctagatctgcctggcttccaaggctggttctcctaaccacttttctatattgtcccaagggacatggtaaatttggtaaaatcactttggtaaatttgcactgcacaggcccttggcaatgtgtacaatacttccagaaaggtaaa

SEQ ID NO: 111016 - DNA, 576 bp, Homo sapiens
agacctttgacataagaaactaagagaggctgcagggaagagtgcggaggatgccttgtgacttctgctagggcatctggagtgaggcaccatttctcaaggactccttgaccactatacagatggtccagatgttagcctattgacaaagccaagcttgccaaatgtaaccctcaaaattattaactttttacccaactaatatttagagtgtggactctggagtcagagtgcttgagtttgcagactagctccaaggcttatttgccatgtgacctcaagcagagtattttagctccctgaacctccttttcccacctataaaatggggataataatacctcaggagctattgtgsgcattaaaagaaaagctacatgtatagtgcttggcacaatgccttgtcaacaattgaccttcaatacatgttcatggttagctacaatttattggcaccttatttgggtcagtgctgaattggatacttggaaccagaaaagcagtttctatcttgtattttctatgacaaaaataaaacaaggactttagggagcatgtggagatgcttctgtgcat

SEQ ID NO: 111017 - DNA, 537 bp, Homo sapiens
agagaaagtaagatagttcaattttttgtctatttccccatttcaaaacctagccacgttttagttatataaatacatattcattttagcaaatgttagctcatgaaagtatragaaaagtcgtcacttaaaaacttctactgaaacaaccattatcaacacttctgtgaccatttttttctgcatttctttatacaaactagacattcacatatttacatttatatggatgagatcatagtttatctgttttatcatggatatactttgtattgcttttgttgagagtggagtagagaaatactgagcacatatatctgttgaaagaactatcaaatggaggaagacaaatgagagatccaagagaagagacatggagatatagtcagcaaaatccagaatatggaaatctctgcagaacaaattaccagtttcttcaaccaataaattgcacaggaaatttgtcaatggacatatcaaccaaatgcaatatgcataccttgttaggatagtgattggaataaataatttaaaaaa

SEQ ID NO: 111018 - DNA, 597 bp, Homo sapiens
aatgttcacatactgatgcatttattcaaatatttatcagacacaactaagtgctagggataacatggtgaaaaaattaaaaaacagagaaggacattgctttcatggagattacattctggtctgtctctacttacacattttggtgatttagctctctgcccttcaacyacaataaaatcttggtttcaaaggatccttataaggcactggtccaagtgctggttcttcacattaacatacccactaatgaaagaatgctgcagttgtgcaataggacaatgtgttggttaggagtgtcagctgtgggagcagagctgagtttgaggcctgactttggcacttataataaactgtgtttccttgggccaattatcaaacctgactctcaatttcttcatctgtaagacgttccccatacctgcttcccatgactgttggaacaacttgagatgatgcttgtggagccctgggcacagtgcctcagtgaatggctgctgctgtgctaatgaccattacattataataagcataaattatcatcatcggtaataattattgaattccttcattcatggagaacctatgggaatgact

SEQ ID NO: 111019 - DNA, 347 bp, Homo sapiens
agggtggccttctgacttacatactggcttgaccttaccatgctgtatgcatgcraaaagagagataaatctctctctctcgttcttcttataaagccctaaattctatcaacttaagatcccctctatgacctcattcaaacctaattatctgctaagagctttgtcttctaataaaatcacattgagagtttgggcttcaacatattatttggggggacaaaattccacatatatcagttatcaaatcactccatcaagccatttaaaaatattgaagagaacaacgatttggtcgtctgtgtgtattccatgtgtatattcatatacagatcacactttcagac

SEQ ID NO: 111020 - DNA, 347 bp, Homo sapiens
agggtggccttctgacttacatactggcttgaccttaccatgctgtatgcatgcaaaaagagagataaatctctctctctcgttcttcttataaagccctaaattctatcaacttaagatcccctctatgacctcattcaaacctaattatctgctaagagctttgtcttctaataaaatcacattgagagtttgggcttcaacatattatttggggggacaaaattccacatatatcagttatcaaatcactccatcaagccatttaaaaatmttgaagagaacaacgatttggtcgtctgtgtgtattccatgtgtatattcatatacagatcacactttcagac

SEQ ID NO: 111021 - DNA, 534 bp, Homo sapiens
cagtacttaatttgttgatagccttaacagttgtggccagagtataattggtatgggcccttgtgcaagaaaaataaattgggttgtgcacaaaactaagcaacataattaccaacaattagacgttaattaccaagtagcagattctcaaacctttctcctgaatttggccaaagctagacctaattatatttttatgttgtgaaaacatccatgtgcctgagataatcaggtgttccgaaggtgccttctgtagatactgtgttttgttatggattctcatgtcaggaaattaaatatgtttatatttgggcttatctaataatcacagaaaagttagtgaggtgggatttgtgctaatttggtagtcatttatttacyttacctatttaatttgatcacttctgaaaatactgatgtaaaaaagaatgaaaattattttaggattataaaaagaaagaacagaaagattttgctcaggcaaaaatagagtttctccaagtatccttcactataacaaagaaatcttttcca

SEQ ID NO: 111022 - DNA, 578 bp, Homo sapiens
aagggtagtgagagacaccyccctgcccccgagaagtccacctttccactgctcctacaatcctagccacaggagaggccctcaacccttgtgggccctgagatgaatatagggaacttcccagagtctgtgtgactgcattgcttcagagagggagatcacggtgggtctcacacaccccatgagtcctatgaagctacagaatggcacaattttgggaccctagtccccaccagactgcatactgcccttgggcccaatagcctctgcatcatccctggagccccattgacaatctcttcctggagctgctgccactgctagctgctgccagggctgaagcaggaaccattagtagcaaccctgctgctcccagcaatgagaggctgtgcattttcatgtgcctttaggacagactcctccacctgcagccaatgtgactgctggctgttgctgctggggcagaaacatgaacgactggcaagcaatcctgctacccccagcagtgaggccaccattcatttacaagtacccccaaaacaggctcccttcttggcagccaccacctggggatgagg

SEQ ID NO: 111023 - DNA, 578 bp, Homo sapiens
aagggtagtgagagacacctccctgcccccgagaagtccacctttccactgctcctacaatcctagccacaggagaggccctcaacccttgtgggccctgagatgaatatagggaacttcccagagtctgtgtgactgcattgcttcagagagggagatcacggtgggtctcacacaccccatgagtcctatgaagctacagaatggcacaattttgggaccctagtccccaccagactgcatactgcccttgggcccaayagcctctgcatcatccctggagccccattgacaatctcttcctggagctgctgccactgctagctgctgccagggctgaagcaggaaccattagtagcaaccctgctgctcccagcaatgagaggctgtgcattttcatgtgcctttaggacagactcctccacctgcagccaatgtgactgctggctgttgctgctggggcagaaacatgaacgactggcaagcaatcctgctacccccagcagtgaggccaccattcatttacaagtacccccaaaacaggctcccttcttggcagccaccacctggggatgagg

SEQ ID NO: 111024 - DNA, 557 bp, Homo sapiens
agtacctggttttagcttcatattgctgaaagaggcactgaagagggtaagaaagatggtcttgaatcattgacaccacacctccctcatttcccagcagcagttacttggtgtggagagacaatctgtgcacytgggggagggacagcacagcaactgtaggactttgcattgaactcaatgtggccctatcacagcagaaagaacacttggctgaactcagccaatgcctgaccacagagggagcatttagagcagccctagccagagggggattgtccatcctagcagtcagagattgagttttggcaagcctcaccaccataagctagagtcctctggggtcctaaataaatgtgaaaggtagtctagtacacaagaactgcaattcttaggcaagtctagtgctgtgctggggttggagctagtggagttgaggggcaagtgatctagtgagacaccagctgggacagcaaagggagtgcttgtgccacccctccctcagcctcaggcagtacagtgtcttctgcttgaggaaagaatgaagagtaaaaagg

SEQ ID NO: 111025 - DNA, 583 bp, Homo sapiens
aatatcttcattgatgactcaattaccatctaatgttcatagccatttatcaatgttttcagaaatactacaatagccttaaatcctctattcagagcctttttggcatgatccacttcctgggttgcaacagaatttttgagactagatgacaaaaattgctgcaatgatttctgggctttattctcgtagatttgtcagaggtgtttgaacacagcaactccatcttgaataggggctgggtaaaataaagctaagacctgctggtccgcattcccaggaggtaaggcattctaagtcacagaatgagataggaggtcagcacaagatacaggtcataaagaggttgataaaagagggtgctgataaaagaggttgtagtaaagaagttggctaaaacccaccaaagayggtgatgagagtggcctctggtcgtcctcactgctatactcccatcagtgccatgacaattagaaatgccatggcaacgtcaggaagttaccctacatggtctaaaaggaggaggcatgaataatccaacccttgcttagcatatggtcaagaaataattataaaaatgggc

SEQ ID NO: 111026 - DNA, 569 bp, Homo sapiens
tggggaagagcattccaggctgagaaaatagaaagtgcaaaggccctaaggtggaagcaaacttagtgcaacaaaccagctttggggagaagcaaagagggcttttaggcctcttttgctggaagagaaatgggatctcaggaaagtaaagacctttgccctctagtaaggggtgggttgggaatatagtcttctaactccttagacaagtctcttcctggggccccccacagttggcctaaaggggagacacacccaaggctcgggtttccctctggcctgctccagccccagatgaacaaaggccccctttctccctctggccctgctggtccagttgaagcacccattgtgtggctggacagctctggccatagcccagatgcctcccatgccctctgccatttgcccactccagcctttctggttcttctctgtttgcccagcctgcccgtctctccacccaggccttgcacctgtgtctgctgtgttggtctggtagcttcggctgctgtaagtgacmagttgtagttgcctgttgagttggtccagccctgggctgacaaggg

SEQ ID NO: 111027 - DNA, 550 bp, Homo sapiens
agtggggggatcagaatcacataggcagccctgaattctttctcattttctctccctgctgtcaccacacacaatagagaactttccacctattcttcttattgaggcctcagcagggcacactgtataacatagcctacagtgactgatttttgagcccgtcccgtcaaagcttgccctatggcctgccctgaccaccacctaaccaatggttagtcagcaaagaatagattatttcccccaaaactccccagttacagtcttctgaaattcctagagtcccttctgtcctcacttcccacctcctaagccsccgtttgagcttaagtcccccattcatcagaggttcccacctcccattccaatcatctcccattcttccccacccaaccttgggctctgccacccccactgtggctgaggtcatcctctgggaccctcctccctacctggcaccaagatgctcctgaggggctgaacttccacaccctgtagggggtactggagcggggagttggcaggggctatgagcagctggtcagctggggac

SEQ ID NO: 111028 - DNA, 615 bp, Homo sapiens
tttcgtataaaattgaacattttatagaattttttttgaaacaatggattttaatgtcagtcattttctttgttatactcaaaattctgtcccatggtttttaagtttaatttttttattttgaagtatcacaaagaatatagatatcatatgttcagtttatgagaatgagtaaagtggatagacaggtactacgattcagcttaacacatagaatatttccagtagcttagaatgtatgcccttttcctctctggaaattatttaaagagcagttataaatatctcttggtaaatgtgcccaatttacaaaatctctttctaatgtgactatttttagaaatttatttcagttattcagttcttttataagagagaatattatcttaggattttaaagccttctgaatttttttttaagaacaagagtaataatatcactgaagaagtrcatcaacatataacattaataacattagttatatataatgttattaatatgttatatgtataacattaattatatatatttacttatatatataacattttatgtatgacatatgttatatatgttattaatagttatatgtataacatgttattaataggtat

SEQ ID NO: 111029 - DNA, 559 bp, Homo sapiens
gacccattatgcatacacacacacacacatatacacacagccaaatggatttgaggaaaaacggatccacaagaaaaagatgctggcagaaaaaaacaacgtaccactacaacatgagacagaatccctgtatatttgtacaccctactcccacagctaagaaacttataaggataacagaaagtttttagaaataagcaatgcttgacttatatttttcaaaatcactactctataatttcaagaaaygtctgggttgagcgagtggagtaaactgacgctaggaaatcacctcttacgaacccctatctgactattcaagagagaagaaagaaattcaaattgtcagtagtcaaattattataaaagtaaaataaggttgagttaggcaattcatgggataatgtattcaggatataaacaagaaaacgctgcatagataggtagaatgtggtcctacttagtagcaattatatttttcttccaataacattggaaaccagcatttctagattagtatagctaaaggagagtcatagctgtctcttaattcattctc

SEQ ID NO: 111030 - DNA, 610 bp, Homo sapiens
cccgtcttcagctagccaaaacattccctggtatttgaggcccttccaatttcctcctggttttgtgggtgggagaataaagaaaaaactgcactgttcccacccacatagttacagccactttatcaaacrgaagagcagtctggagccattgcaaaacaaaatacctgccacaactcctctcttctcatttcgactccagcttttcatcttagcaaaaaagttgcaatcagcaccccctagacggaaggaatatcctgtcttaatgggagtccataggaggctgcaggctgctcccctacagagactaacatcaaggtagttgcagaattcagattctaattacagtgtggttggaggcggggtggattccagggaggtcaggaagaggtaaagtacagaattgagctccttgggaggaggtcataggaactttgcagtatgaaaatggctagagattgggtagaattgagcaggctggcaatggcagttttgtgtgggtggtaggacctaggattcaaacttgagggcaaattgtggagcacatacgacaaatgatgtagagcctttcctatttcccttcctgctgtgtcatccgaaacaataaata

SEQ ID NO: 111031 - DNA, 541 bp, Homo sapiens
tccaggtttgaaaccaagcaaacctgttaatcacagctgtatcacttagcattgtgaccttaagagatttagtctctctgagctgtctccatgagtgaaatggagaaccatttacataataattttcttgtgatgattaagtgaagtgatatgtgaaaatcacttatgcttgagggttaaatgataggccttcatagaaaacagctatcacttgttttaaggcttctcaggaagacgtttttctccctttctttcttgggaagcttcagtctattttgataagacagttcatagattgtaagtactggttgtttctttctcctacgactgcactataaacasagtgggttatgaatagggttactactgaataaacaagagtctctatataaatagccagaacttcagcctgtttctgaaaattttgtcagaaaattaatttttaatttactgcttaattcacatagagcaatttttatttggaaggtgtatgagactaaagctctttaacttctaccaataataacacagatgtattgct

SEQ ID NO: 111032 - DNA, 424 bp, Homo sapiens
gttggcaaatctctttacatcaaataaagcacattccctcaagaaacagcaggaagatcttgaaacagaatggatttatctttgtagactaatgatttcatattgggggattaggttgcacttgcatattacaaatgaatgaacatggttattatattcctggaagtctggctcaagcctatattcataaatttagtaataatatggccatagtttattcactatagatgtgaagttaagcagttaaaattatacaatgaaattatttgaygttaaaattaaaagttgacatcacaacttaaagtaagaaaaaaactacattttaatcagaaaacatttcatacttttttgttgttttagaaaatacaactttaaatgctctaacttaaaaatcatctttgaactctggtttttaaattttaaa

SEQ ID NO: 111033 - DNA, 424 bp, Homo sapiens
gttggcaaatctctttacatcaaataaagcacattccctcaagaaacagcaggaagatcttgaaacagaatggatttatctttgtagactaatgatttcatattgggggattaggttgcacttgcatattacaaatgaatgaacatggttattatattcctggaagtctggctcaagcctatattcataaatttagtaataatatggccatagtttattcactatagatgtgaagttaagcagttaaaattatacaatgaaattatttgatgttaaaattaaaagttgacatcacaacttaaagtaagaaaaaaactacattttaatcagaaaacatttcatacttttttgttgttttagaaaatacaactttaaatgctctaacttaaaaatyatctttgaactctggtttttaaattttaaa

SEQ ID NO: 111034 - DNA, 499 bp, Homo sapiens
aatattggcaactctcaaccgtgttgcagaagcattttcccattgaggatgcagcaatatttctggtcccacgtgtgctcccccatttacaggtggacgatttttctccttcccttgaacctggcaggtgaatgaacaggatgtggtcaaagtgatgcacctgacttctgtgcctgcctctctcacttttcagatgctcacctgtgcaacccagtgacacactgtgaagaagccctgcccacagggagaagccacagggagatgtttcaggcaagaggcccagccagggtcccatgtgacagccyctcatgtgagtaaataagacttcaggctgttccggcccccaaccttcagcttcccaggctcatgctgagaatttcccttcaccactgttgttcgagttcacctctgagtgttgggggaggccccttctccctcttggcctctgcccagcaccagcctacagtctggaggaacagcagctctgagaccggccagg

SEQ ID NO: 111035 - DNA, 564 bp, Homo sapiens
ggattacagcgatgttcagggaacaagggagataaccattaggtctgactcccttagagccaggtggaacagagccatatttctcttcttacaaaagcgaataggagaaatatcgctgaattctttttctcagcaaggagcagctctgagaaagagaatgcattcccagggataggtctctaaaatgaccactctgggagtgtctgtcttatacagttgtagataagggatgaaataaaccccgtctcccgtagcgctcccaggcctattaggatgaggaaattcctgcctagtaaattttagtcagacyagttgtctgctctcaaaccctttctcctgataagatgttatcaatgacaatgtgtgcctagtgggacacgaaacttcattagcaattttaattttgcccccatcctgtgatctgcccccatttgccttgtgatattttattgccttgtgaagcatgtgatctctgtgacccacacgctattcgtacactccctcccctttaaaaatcactaataaaaacttgctggttttgcggctcatggggcatcacagaac

SEQ ID NO: 111036 - DNA, 624 bp, Homo sapiens
atacacgaacataaaagttaaaactatgggccagatgcagtggctcatgcctgtaagcccagcactttgagaggctgaggcgggtggatcacctgaggtcaggagttcgacaccagcctggccaatatggtgaaaccccatctctactaaaaatacaaaaaattagccgggcatggtggcagaygcctgtaatcccagctacttgggagactgaggtgggagaatcgcttgaacctgagaggcagaggttacagtgagcggagatcatgccactgcactccagcctgggtgcgacagagcaagactccatctaaaaaaaaaaaaaaaaaaaaagctaaaactgtgaaacttctgggagaaaatgttgtgcattggtttggcaaaaagtttttagatatggcaccaaaaacacaatctatgaaagaaaccattaataaatacaatgccattaaaatttcaaatttttgtgcttcaagatgccattaagaaaataaaaacagacaagacacagactgggagaaactatttgtaaacatacatttaagaaaggacttgtattcagaatacaaaaaaactcttaaaactcaataagagtacccactttaaacatgggcaaaagaattc

SEQ ID NO: 111037 - DNA, 624 bp, Homo sapiens
atacacgaacataaaagttaaaactatgggccagatgcagtggctcatgcctgtaagcccagcactttgagaggctgaggcgggtggatcacctgaggtcaggagttcgacaccagcctggccaatatggtgaaaccccatctctactaaaaatacaaaaaattagccgggcatggtggcagacgcctgtaatcccagctacttgggagactgaggtgggagaatcrcttgaacctgagaggcagaggttacagtgagcggagatcatgccactgcactccagcctgggtgcgacagagcaagactccatctaaaaaaaaaaaaaaaaaaaaagctaaaactgtgaaacttctgggagaaaatgttgtgcattggtttggcaaaaagtttttagatatggcaccaaaaacacaatctatgaaagaaaccattaataaatacaatgccattaaaatttcaaatttttgtgcttcaagatgccattaagaaaataaaaacagacaagacacagactgggagaaactatttgtaaacatacatttaagaaaggacttgtattcagaatacaaaaaaactcttaaaactcaataagagtacccactttaaacatgggcaaaagaattc

SEQ ID NO: 111038 - DNA, 624 bp, Homo sapiens
atacacgaacataaaagttaaaactatgggccagatgcagtggctcatgcctgtaagcccagcactttgagaggctgaggcgggtggatcacctgaggtcaggagttcgacaccagcctggccaatatggtgaaaccccatctctactaaaaatacaaaaaattagccgggcatggtggcagacgcctgtaatcccagctacttgggagactgaggtgggagaatcgcttgaacctgagaggcagaggttacagtgagcggagatcatgccactgcactccagcctgggtgcgacagagcaagactccatctaaaaaaaaaaaaaaaaaaaaagctaaaactgtgaaacttctgggagaaaatgttgtgcattggtttggcaaaaagtttttagatayggcaccaaaaacacaatctatgaaagaaaccattaataaatacaatgccattaaaatttcaaatttttgtgcttcaagatgccattaagaaaataaaaacagacaagacacagactgggagaaactatttgtaaacatacatttaagaaaggacttgtattcagaatacaaaaaaactcttaaaactcaataagagtacccactttaaacatgggcaaaagaattc

SEQ ID NO: 111039 - DNA, 624 bp, Homo sapiens
atacacgaacataaaagttaaaactatgggccagatgcagtggctcatgcctgtaagcccagcactttgagaggctgaggcgggtggatcacctgaggtcaggagttcgacaccagcctggccaatatggtgaaaccccatctctactaaaaatacaaaaaattagccgggcatggtggcagacgcctgtaatcccagctacttgggagactgaggtgggagaatcgcttgaacctgagaggcagaggttacagtgagcggagatcatgccactgcactccagcctgggtgcgacagagcaagactccatctaaaaaaaaaaaaaaaaaaaaagctaaaactgtgaaacttctgggagaaaatgttgtgcattggtttggcaaaaagtttttagatatggcaccaaaaacacaatctatgaaagaaaccattaataaatacaatgccattaaaatttcaaatttttgtgcttcaagatgccattaagaaaataaaaacagacaagacacagactgggagaaactatttgtaaacatacatttaagaaaggacttrtattcagaatacaaaaaaactcttaaaactcaataagagtacccactttaaacatgggcaaaagaattc

SEQ ID NO: 111040 - DNA, 524 bp, Homo sapiens
ggaacacggctcagataagtttccccagtgtttccttctgatctgttgtatcgtcatgccctgccctcctttgtttatcccgttttcatatagacaatcacccaaaccagaaacctctgctttcttccccaggtgcaccaccagccccctgctaacatcccattccaattctgtctttacaccctactagggttttctgtgccatctcctattttctgttccactgctaatctctcttkggttcaaacccttttgatctttcaccatggtgacaaactcccatataatctctctgtgcttccttctctcctgttccagttcatcttttatacctgttgtcacagttatccaaaaatgcaggactgatctgctgaaaatcattagatgtcttcaggacattcaaagtaccctagggtttaaggtcacgatttggctccaactcacctctgtgggctccgtggctatctttccctcttgcacactatgtttaggccaaattcaccagttcactggcctgcctttcc

SEQ ID NO: 111041 - DNA, 602 bp, Homo sapiens
agaagtagactatagaaggaaaagactatcttgctctataatgcatatataagatttgaattaaagtgactgtgaggtacaattatttagcagttatgagggctgtcatccagaagatataaagggtataaagatagcaagctgttatttttttttatacgtaggctgcccagagacacgtaaggtgtgcatgtgtctgtcaaatatacacacctctaaactattaccaagttacagaagatgggttggtgcttactgccatatctgtaagtcatccctatgtttagcagtgtaacaaaaaataaattcctcagggaactttggctctctgtcttcgaaataattgatgtgttgattgggagagttggttactaaactatatttctctaagcaccttcatcatttttattattgcctacactgtggaaatataaatatgtaggaacatacaaaataatatatataaagcaatgtaatatattktttattatgtaatagtcaatactgtactaaactgaattgttatggtactgacccaatgcaaagaaggattcaaaaatttagttcaaaaggtaaaaactctcatctttactctgctgagt

SEQ ID NO: 111042 - DNA, 635 bp, Homo sapiens
aagatcacgtccgtggaatgctgggctctggcgtggtctgacccttgcagtgagcctcttttctcagctatttcatgactctatccagataggagctaccttaggaaaagagcaacacctacgattcctatccatagaatggctttagtcgggtcccatggaatacaattgattacaccctgagctcagatcaggttctacaaattcatgctgacattcctgcactgtagataaacctgcgtcctgtggcttccctgccctaggtgcagctccagctccttccttaactccactggtattccctttaatctgcaggaggggccagygattgactttgggtgtacactgtccctccacaccacttccctgtcttccatggttttttgtattcattttcttccacctcccaggcactgacccccagtagtgaccctggggggagaccatgccaggaagcacactggctggggcgaccctgaggcatcccagggagaggcaggagccagaggcagcaggagctgaaaggagatacctgttctctgcaggtctgtgctgtgcaccctctgcacccacgaggcatcctcagaagtggggagggagaaggagggatggaggagtcttttagcatagtgtgg

SEQ ID NO: 111043 - DNA, 635 bp, Homo sapiens
aagatcacgtccgtggaatgctgggctctggcgtggtctgacccttgcagtgagcctcttttctcagctatttcatgactctatccagataggagctaccttaggaaaagagcaacacctacgattcctatccatagaatggctttagtcgggtcccatggaatacaattgattacaccctgagctcagatcaggttctacaaattcatgctgacattcctgcactgtagataaacctgcgtcctgtggcttccctgccctaggtgcagctccagctccttccttaactccactggtattccctttaatctgcaggaggggccagtgattgactttgggtgtacactgtccctccacaccacttccctgtcttccatggytttttgtattcattttcttccacctcccaggcactgacccccagtagtgaccctggggggagaccatgccaggaagcacactggctggggcgaccctgaggcatcccagggagaggcaggagccagaggcagcaggagctgaaaggagatacctgttctctgcaggtctgtgctgtgcaccctctgcacccacgaggcatcctcagaagtggggagggagaaggagggatggaggagtcttttagcatagtgtgg

SEQ ID NO: 111044 - DNA, 413 bp, Homo sapiens
cacggagctgcagccacttgctgcaggaaaggcaagtagcttaaagtcatgaattaagaaaaagcaaactgttcyttcaaaaacttgggggtttaatgcaaaacattaaggatagcacgctgcacatatctgtctacagcttgtgctttcccccaactcagaaacacgtctgggagctatcgatatcaaaacaaatatctctacttcattttttcaattgctgcattgatattccacattttatttgggcattctctattggtggacatctagatcacttctcattttttgctataaaaaatgatgtatttgcagaaacagccttgctcatgcctcacagtagattctgaaaagccaaactgctgagtcataatatataagcatttttaaactttgatagtaccaaagaattc

SEQ ID NO: 111045 - DNA, 627 bp, Homo sapiens
ttctatattggtttaaatgtttacgtatatctgtgggaccacttatgtttgcttattagtaggcaatttatgtgtgtaagcctgctaacaaaaagggaactgacatttaagtagtattgagagaccataaagagagaggtttaaatgtataatctttatttttttcataaacaaataaaatgacataaaatgacagtgataaacactgtcatccttctcattaccttctcatgactgttgctaaggacatggctgggactcaaatgcagaaagcccaaagccaaagctagtgctcatgaacccccagaccctcctgtgtctggcctgagagtggagagagtgctaggagtgctcctaacaatggccttgtcatttgttcragaactcagtaagtctgagacctgagcccagcaaagaatgtgaggagcagcatttccagcacaaaaacagcacgtgaaaggcctctgccttgaaagcacccatcatgtcagaagatacagaaggtcagcctggctggaacctcgtgagccaggagacattgacacagtggtgtccatgtcaaggagaagaaagcagagccataaccctgtggggaacaggcatatgaaaagccatgttacaagaggg

SEQ ID NO: 111046 - DNA, 589 bp, Homo sapiens
gaaggcaatattgtatttgtaatccaaaattcaagaccatttttcttatttcattcacacggtgggaattgaccattacaaagcaatgtgatctgattctttaatccgacacctaagaaaaagagtgaatgttataagagttcaaaagaagaagcaaaatatgttcttaaaacaaccccaaacttatctacctcatgtaagttgcttactgctgtatatctgataaaactttttaccaatttttttaatagtttaccatgcttttctaatgccctataacatgggcttttggyaggcactgatcatatcttctctttatcacgtcaggtctcctaagaacttagtgaatcctgtggatcctcaatattatttgtcaataaagattataatggatttagtgtaacagagtagcatgaacctctcttaggaccagtatggaagtgatttagcaggccaactgaatatgaaccccatagtgaaaaagaaaaacctagccttaaacacaaaaatacagactacagaaagaaattttagtaagatcaaaatggtttaaaatagtttagacaaacatgaaatgagttttgtttgg

SEQ ID NO: 111047 - DNA, 555 bp, Homo sapiens
gagacagtaaactgttgaacaaaaattgtttcattacaatgctcatgtgttgccaacaagaaacccatgcagtccgtggacaacgctgcaaagataaaatactttaggatgtgaacattgagttgcctccaactcaatgctccaactccttgctccctcagcaaggagaaaggtgggggtggggactgtgctcagcatgagagagcaaagaggtgtttgtgcaaacagacaaacaaaccagcaaaacccagcaacacctctgatggctgcatttggacacatgccaccccaggttaagacatgtcacatagcattttccctttgttctcggggctttaagtaaagtgggtttggattcatattcattcgagacgtcgccattgaaattagatgtgggcagatcagaacacagtcagggaggatggacttgggatgtgtgtcaagaggacaattgctaraacactgagagagcctttatcctgaagggtgggaggcagcacggtgctctaaataggatgcaggtgtttccatgacagcacttcgcggtggagggat

SEQ ID NO: 111048 - DNA, 590 bp, Homo sapiens
gtgcatttttgcattcatgtagtattacacatatgcttaaataagcattaaattttaaagaaaaattggaaaatatatatttaaaaccttaactgggttctcctgagagatgcatcaaatgagacttatttatgaatacactttaacaatgtaaatttttattcactgaaaatgaacaaacatagagtatgattactcaaataaatagagaagctaggtgstcacatgcttgtatattccaatacacatcatgtccgggtcatggagtctgcgggcactgccctttgtttgcagtggtgctgcagctgagccccaccacagggatgatgtgtgtcttctgggaatggggttgtattttggtttggccatattcatttttgcttctgcaagtaaaaaccagagtgccagaacaatacagggtgcagctatgaagtagaataaaagctgcacaatggccagtcttacggaagaacgtgagggaataaagaacacgtcagcctctgcattttagaacccaaactgtgtgctgccaaaacaggcagctgaacatcgttgggatccttctctcctccacaagcatcctcgaaatt

SEQ ID NO: 111049 - DNA, 618 bp, Homo sapiens
aaggtcactctctgacaatctccctttcttctttcctgaagaacctcatattacaggtgttctgccctatacaggatgggaagaaatgtcacacagagacacagaaaagaatctgaacaaataggcgttgatgagtttttcccagtttattgccattacatcatatcctttcgtcctccagtcatacttcttctgcatgactgtccgcaaaaatacatggatcttcatttctgaaggccctcacctaaaatgtgtattaaatcaatgtgtatatttttctctttttatctgtcttttgttttagggttctcagccatgaaccttatgatgaatagcaaaaaattttgttttatctcccttaatataccaggacagtcttgagaagaggaggtttagagaggttatttataggatttggaattgggctgtgtggttacagggaaggtttaaggaaaccaagcatattctagattgagaagaaaacctaggtaataccattcaggacataggagtgggcaaagacttcatgactaaarcaccaaaagcaattgcatcaaaagttaaaattgacaaatgggatctaattaaactaaagagcttctgcacagcaaaagaaac

SEQ ID NO: 111050 - DNA, 633 bp, Homo sapiens
accctgatcttggatgtccggcttccagaactgtaagaaaacaaatgtttgttgcagtttgtggtactcgattatagcagcttcagcggactaattggaatgggttataaactggtttttatgattgctcaatactgtagaccaatattactgtcttttctaaaaagtaggaattcctttttctttcttagttatttatgtaggggaagccatcatcagttgtccagatattcaactctgtgttgattctccatgaagatcatattaatttgtagagatctatatttagtttgaaagttgatcaacattatttcattctgtttttatttttgaatcgtttattgatttttttgccgtccagagacttttaaaattctgggtaacggatgcatttgacaacaacaactaagctaaaagcattcagagaaagaacagaacatactctgcatttttcagacttcaccaagaargtcttaatgattccatgagtctaccttacgtggatatgttaccttgctttgaaacttgtgttagtgtaaaatttgagttgcctttcctttggaaagccaaaaagatcaagaaaaaaaaagtcagaatattttattatcatctaaaattaattttatttgattt

SEQ ID NO: 111051 - DNA, 606 bp, Homo sapiens
gatggtttcatggacacattcttatcccaaaactcaatgagatggggatattmagtaccacagcttttaaaatgtctatcctatcataataaagtagttaaaatatgtaattcaaaaaagataccccaaaatttagtagcttaaaaagcaagagggttttttcttaagtaaatgttctgggcaggtatatcggccagcagaatactcttctgccttgtcatccaaaagctaagcccacagcagctatgaaattcaacagatgtctccaaggtcactttggttgttaccaggccagtcattcaagatggacaaagaacatggagtatcatacatgtgagaatttatgaacaagatctggaaggggtacccatcgattcctctaaccggtgatcgaatataaattaaccacatggccattcctaattgtaaaggaggatgggaaaaataaactagttttattatcaataaataagagaatatatatcagttggcagttagcagtctttcaattcaaaaaggtttctgcaaaaacattgagtcttacaaatataggtgcagataatgatatattttaatttttataataggaaattggaaacaaaatac

SEQ ID NO: 111052 - DNA, 598 bp, Homo sapiens
cagcatggcacaatgtaacacttggtttttaagagactttccttaagagtgtctctttattttaaataccttagaggcaccatggccttttataaaaagctacccatcacagaataaacaccagctctcttgacgtgatttactgaaagtcaactcttgattcaaacttgtttgaaaatagaaatggagaaaacacactgaatgaatccgtggctgatggctccacagtaggatactaaaggacaagagtgtccagggtgcatttyaaacccttgagcgtaaagtcatggagaactatggaggcttctatcttctcttgcgtctctaaatgcagctttatagatatatccctagaatttcatgcttataagggataatctagaccactctttcattataaatggaactaaggcccagaaagataaatttatagaagggcacacatctaaattgagtctagatgaaatttcttatgttcttagtcccatgttctttcttctttatcttatttccttttagatagacaataagatttcataagtcattgggtccacatgttgctgtgtcacaggagtgagtgagtgggcacactgtacca

SEQ ID NO: 111053 - DNA, 617 bp, Homo sapiens
tgattacacactggggaaagatatatccaaacattttgagagctaagagacacagcatataagttggcactgaaattagaggaccaaaagtgtcactatggttccacttttagagtgtaggctcaggggggcatgtaataaatgaactcttggataacgagtaacacgtaatgggtccactgagtttgcaaaccatccaatcaccatttccccagtcccagaatttataattgggattgattgtcattagtataacaaccacattgggccctttgcctattagataaaagctagcatcaggggaaaatgacaaatggaagtgtttccaattcgcttcttggccaaaataaatcatatagatggaaagaatggaagggactagtgataccattaaagacataaagaatgaaatgttggtggtccctgttatttttatacttacaattacactccctgccyatagagaacccagtgaatcctagggaacactggagaaaactgaaaactcaactaaactgtggcctcaattgtagctcctgcactgaaagttgtataattgctagagcagattaataaattcttagtctcttatatgcagttgctcatctcttaatgtg

SEQ ID NO: 111054 - DNA, 566 bp, Homo sapiens
ctatccctccccttgtcccccatctgtcactttcaggtacaccaatcaatcgtaggtttggtctttccacatagtcccatatttcttagagactttgttcattccttttcattcttttttctctaatcttgtcttcatgctttatttcattaagttgatcttcaatctttgacatcccttctgcttgattgatttggctattgttacttgtgtatgcttcacgaagttctcatgctgtgtttttcagctccgtctaggtcatttatgctcttttctaaactggttgttctagttagcaatttgtctaaccttttttcaaggttcttagcttccttgcattgggatagaacatgctcctttagctcagaggagtttgttgttacctgccttctgaagcctacttgtgtcaattcatygaactcattatccatccagttttattcccttgctggcgaggagttgtgctcctttggaggagaagaggcattctggctttgggaattttcagcatttttgtgctgcttttttttttttcatcttcttggatttatctacctttggtcttt

SEQ ID NO: 111055 - DNA, 601 bp, Homo sapiens
aaatcgacctagaatagtcctctaatgttaactgtttcctcagagatttcttatacaaattatgtatagatgcatagcaatactgcttgctttaaataactgaattttgttttgttttttgggtttttgtttttttacagctgtgawttttttttaatcagtgcaaacaaaataagataatatttataataagaaatgctttaataaagttcctggtccttcaagtacagaaagtgaagaataaaattgtccctgtatcctgcaggaaaattatctctgttggtagcctgcaagtaatttaggaaatacatgctccactagttgtatggtagagctggttgcctgggataaggtacaatatttaaaatttgtttatgcttcaatcattttttaaaaaatattcataattcagagagctgacagcagagaaggcactgtttatctgcaattatgcaatatttgaattaaatgataaataacaagaaaaagtaaagactatttatttttcagctcagtgattctcaaatttcagtatagacaacaaccccatggggttcatattaccaattccttggaagtattctaggcctacacattagaa

SEQ ID NO: 111056 - DNA, 601 bp, Homo sapiens
aaatcgacctagaatagtcctctaatgttaactgtttcctcagagatttcttatacaaattatgtatagatgcatagcaatactgcttgctttaaataactgaattttgttttgttttttgggtttttgtttttttacagctgtgaattttttttaatcagtgcaaacaaaataagataatatttataataagaaatgctttaataaagttcctggtccttcaagtacagaaagtgaagaataaaattgtccctgtatcctgcaggaaaattatctctgttggtagcctgcaagtaatttaggaaatacatgctccactagttgtatggtagagctggttgcctgggataaggtacaatatttaaaatttgtttatgcttcaatcatttttwaaaaaatattcataattcagagagctgacagcagagaaggcactgtttatctgcaattatgcaatatttgaattaaatgataaataacaagaaaaagtaaagactatttatttttcagctcagtgattctcaaatttcagtatagacaacaaccccatggggttcatattaccaattccttggaagtattctaggcctacacattagaa

SEQ ID NO: 111057 - DNA, 649 bp, Homo sapiens
tacgtttgttccattgaccttagctcagtcatatggctccaactagaggttaagggggctgggaaaaaaatcccttatctctgttaccatgaagaaaagggaaacaaagatgttggtgaacagtaactcattaacgaacccctctccaacccagacctctgcagaatttttaccttttctccctaatgaactttctaatgtcatgaattggagcttcatrcagtgttgctgccttggtttctcccacaaaaatcaatcctttggaagttaaagagcaaaatatttttgagaggacacagaggactagtcaagggaatgtcataactgtgttccagcaaagttggctataaagtgaaaacttcagtttagttctaatattgacttcaatttacaataagaaatagaatgccctgaaaaaaaaaaaaagtccttcaacatactcaattgaagacttctccggataagtgttaaattgattttttaaaggccattctctgaactatgtgatattttcacaattcaagagtctcctttctttttttacttcctcccagaacttcccctatggtatctcccatgtctatggattcttgcctcactgtacatttaccaatactggaatttttgagtattataatggccaagaggt

SEQ ID NO: 111058 - DNA, 600 bp, Homo sapiens
gatatctctctgagctaatgcacagatagatctaactcatactttttaatagctatataatattccatggtgaggctgaacatattttcttcagccattccccttgtccaagtttttgctgtcactctgagcagtgccacaataaacagccttctgcatgcatcctaatttgttagagcctttattgctctatatgaggtagattgtcccactgagatgcctggatgaaagagaacatgtattcctaatgctcatatatcttgcctgatgactttccccaaaagcgtctgtggcttccaccctgtctgagaatgtccattaccatatgatcatcgggctggtgttgatcctttgaatttttgccaatcttgtgggtgaaaaatgacatttttaccaccttaatctctttgtatattttttgttttcaactatttatttttaaataaratttcccctctgtcacttgtctatccatattgtttgctcattttatcaagttattcatctttttttctatcaatttataggtgctctttaaatagagaaagtgaccctttgtgtgttgtcagtttttttccaaccagattatcatttttttat

SEQ ID NO: 111059 - DNA, 600 bp, Homo sapiens
gatatctctctgagctaatgcacagatagatctaactcatactttttaatagctatataatattccatggtgaggctgaacatattttcttcagccattccccttgtccaagtttttgctgtcactctgagcagtgccacaataaacagccttctgcatgcatcctaatttgttagagcctttattgctctatatgaggtagattgtcccactgagatgcctggatgaaagagaacatgtattcctaatgctcatatatcttgcctgatgactttccccaaaagcgtctgtggcttccaccctgtctgagaatgtccattaccatatgatcatcgggctggtgttgatcctttgaatttttgccaatcttgtgggtgaaaaatgacatttttaccaccttaatctctttgtatattttttgttttcaactatttatttttaaataaaatttcccmtctgtcacttgtctatccatattgtttgctcattttatcaagttattcatctttttttctatcaatttataggtgctctttaaatagagaaagtgaccctttgtgtgttgtcagtttttttccaaccagattatcatttttttat

SEQ ID NO: 111060 - DNA, 600 bp, Homo sapiens
gatatctctctgagctaatgcacagatagatctaactcatactttttaatagctatataatattccatggtgaggctgaacatattttcttcagccattccccttgtccaagtttttgctgtcactctgagcagtgccacaataaacagccttctgcatgcatcctaatttgttagagcctttattgctctatatgaggtagattgtcccactgagatgcctggatgaaagagaacatgtattcctaatgctcatatatcttgcctgatgactttccccaaaagcgtctgtggcttccaccctgtctgagaatgtccattaccatatgatcatcgggctggtgttgatcctttgaatttttgccaatcttgtgggtgaaaaatgacatttttaccaccttaatctctttgtatattttttgttttcaactatttatttttaaataaaatttcccctctgtcacttgtctatccatattgtttgctcattttatcaagttattcatctttttttctatcaatttataggtgctctttaaatagagaaagtgaccctttgtgtgttgtcagtktttttccaaccagattatcatttttttat

SEQ ID NO: 111061 - DNA, 482 bp, Homo sapiens
agccaggcgtcctgctgctgccaagacgtgctctaaccactggccaacatggcccccttagtagagtgcaaggctgcccgtrgggtataaagtggtgtaatcttttctgggcagcagtttggcagcttgtatcaaggacttcaaaaatgttaataccctaggtcccataattctattttaagcaatttatcccaagagaattatcatatacacataaccatcatatataaggattatttctagaattaagcattacttatatttatatatcaagttttatttatgagctcagaagaagaggtactttaagtgtcctcaacaataggagattcttacataattgctgtattatttatatagagtgccatgcagataccaaaagtagtgattttaaagtgatttaaccctggatggaaaaatgtccgtgacatgatactgataaagcaacatcaaagaaaacagatgagatgttcagaacatcc

SEQ ID NO: 111062 - DNA, 482 bp, Homo sapiens
agccaggcgtcctgctgctgccaagacgtgctctaaccactggccaacatggcccccttagtagagtgcaaggctgcccgtagggtataaagtggtgtaatcttttctgggcagcagtttggcagcttgtatcaaggacttcaaaaatgttaataccctaggtcccataattctattttaagcaatttatcccaagagaattatcatatacacataaccatcatatataaggattatttctagaattaagcattacttatatttatatatcaagttttatttatgagctcagaagaagaggtactttaagtgtcctcaacartaggagattcttacataattgctgtattatttatatagagtgccatgcagataccaaaagtagtgattttaaagtgatttaaccctggatggaaaaatgtccgtgacatgatactgataaagcaacatcaaagaaaacagatgagatgttcagaacatcc

SEQ ID NO: 111063 - DNA, 591 bp, Homo sapiens
gggttgattttttcttgttgatttgtttaagttccttaaagattctgaatattagacctttgtcagctgcatagtttgcaaatattttctcccattctgtagattgtttactctgttgatagttcttttgctgtgcagaaggtctttagtttaattaaggccaaattatcaatttttgtttttgttacaattgcttttgaagacttagtcataaactctttgcctaggctgatgtccacaaaagtattttttaggttttgttctaggattttatagtttgaggtcttacatttaagtttttaatccatcttgagttaatttctgtatgtagtgaaaggtaggagttccgtttctatcacaacttatgtggcataagtgcgagtcctttcaccatgctagttacatccctttgsatatactcttccttcacattgtcctatgaaagttgaagaaaacaaaaagatactaaagatatagtcttattagttgcttatagaagaggtctatttcatcccatatttggggactcaggtttctactaatgcaacctcagtttacatgtgcttttcatggtagtcatagcatattgtt

SEQ ID NO: 111064 - DNA, 566 bp, Homo sapiens
gctgagaaacacaatcccaaaaaaatccacatggaactcttcctcaggcagttcctccacgtgacagccatccatcattaccacttagaatacattcagaagctagccccaccagtaatttaaaagctgtcacaaaggcacttcatttggaactcactctgaatcacagacccaataatatactaggaaagtgattagttgtcatactgctaccwttttccatgctacctaattggaaaagaacatctcagtggagttattttcctctctcagtgctcgaaaataagaaaaaaagaatagtttcattttttttcaaaaaaaaaaaagactatccctaactctactcttgaaagaagaaaagaaatcaaacgtgttgagaaattctgccacttttctaggacagttcttgagactcttacagctgtgtgatgaaacatttcctaggggcaatgaatcctaggaaactcttgttaaaaaaaaaaataaagtaacaaagcacatcttgtgatgttgtagcgctgacctgtttgtgccactcatttatgaatttataaaattctgaattc

SEQ ID NO: 111065 - DNA, 607 bp, Homo sapiens
agtctgaaaccaaactcatcacctttctgctaccgctgcctcctagggaaccctttcttttgacatccatccctatttatttaatgggatccccatttgtcccctcacataggcatggggctccaagtaccctttatttatctccttcactccttacctctgattagtctttataaactatagttcttttttgtttatttcttcattgatacttttagttcaggccattattaccagcactagtattgtggcagttccataactgacaatataactttacactttaagatgatagataaaatgtgattgtttggggaatacagatgacagaacagagagtactgacatatcctttaggctctcgggagaacatagaagaaatgatgactttcaataggcaaaaatggtttaaagtttagaaattctattttgcattctgaccctagtctccacgtcatgcatggttttgtatttgtgcctctgttgcgatgtcccctctgcctagaatgcttgcaattctttcttctaccaatcagagttayctctgttactcagagtccagatcatgtaccatctccttccctgaccactccaggcagaagtattt

SEQ ID NO: 111066 - DNA, 590 bp, Homo sapiens
ctataataggatcatatattagttcagtagaacaggacaaaatctgggaatagacccatgtatacataatataacccaactatttctagggccccatatggcctagtggatgtaaatcagaaatctgactgtggaagccttgaatatgaagatctttattttacttgttcctaaaggagtatattcatggatttcacaaagtatactccctaaaatattttccagaaatcttgtctaaatagccttcactctcctgcaaggtgcaaactcacggcagcctctaaaaatgtgtccccatctctctggtcttcgtggttttctaactttctcttcccccaccattccctgccccccatacattgtgttcccaatttgtgaccacctccacagagggcagcccttgggaagggtagtttttttccccagttggctgcttttctggagagcgggatattcccggaattctgctgatggaaattccccaggagactcccagaattctgatgagcaaaaattcccaacttcatttctttgggaatttactrtatcttaaccctgccattttaagtcactgaactagtcaatatatg

SEQ ID NO: 111067 - DNA, 547 bp, Homo sapiens
ggcctgccaggtgatggaaaacacgcggatctttcctgtttaactttgaaatgaattatgtgattgttttacagaagtagtaacagatttggcttccttgttgaggccactgttgaaagttggtattctccaagcctgcaactgggcagagtttgtgtgtaattaataactgagagtccactaaatgggcactcggccctgtaagccatcacaggtgagcacgctggggcagtgatcataaaggtgacccctctgagatcaggctctgggccagaatgcatgagaatcagacaaaaaaaaaacagaggcagagtcctcctgctaggaartctagagcctccttctttttggtcttaaattaacgtggaacacaatttttaaatttaaaatcacccagcacatctagtcaagtagttctcaggtcttcttttgttaaaagttgcagagcccatcatccaaatgaatacttagtcaagaaaccctggaaagatgaacaagaaaccaataaaaataattacctaccggggattcaggggaggagagggca

SEQ ID NO: 111068 - DNA, 547 bp, Homo sapiens
ggcctgccaggtgatggaaaacacgcggatctttcctgtttaactttgaaatgaattatgtgattgttttacagaagtagtaacagatttggcttccttgttgaggccactgttgaaagttggtattctccaagcctgcaactgggcagagtttgtgtgtaattaataactgagagtccactaaatgggcactcggccctgtaagccatcacaggtgagcacgctggggcagtgatcataaaggtgacccctctgagatcaggctctgggccagaatgcatgagaatcagacaaaaaaaaaacagaggcagagtcctcctgctaggaaatctagagcctccttctttttggtcttaaattaacgtggaacacmatttttaaatttaaaatcacccagcacatctagtcaagtagttctcaggtcttcttttgttaaaagttgcagagcccatcatccaaatgaatacttagtcaagaaaccctggaaagatgaacaagaaaccaataaaaataattacctaccggggattcaggggaggagagggca

SEQ ID NO: 111069 - DNA, 605 bp, Homo sapiens
ccccaatagaggccacagtcatgatgtccaggagcagtaagattgctccagtctgcctcaccagcttgagccagcttccagcacaatggtctcacttctgccagtgccggtccttgttcccccaggaagcacccgaatggcagagccaggcgactccacccatcctccgccgtacatgacccagcagattacacttgctggagctttcagcacagcggacctgattccgccggaactttgtgggcaggagtgtcgctagattagctgactccatccacctctrctgctcctagcctgttacaacacactggctcgggtggcgcccaagcaaggggagagccctcactctcagaacactgagaggggtgaggtgcccacgttcatgggcctgcaagggagcgaagcattcctccctttgcagggccaggccagaagggtataaatgactaccaactgtggcccctgactgagggagccctgcagaccagaacaaccaacaaaagaaacatggatgtagagccagtgactagagggtgttcttccaatgctcaggagtggaccaagtgaagggttatttctttctccccacgacacagaacacgact

SEQ ID NO: 111070 - DNA, 609 bp, Homo sapiens
atttgaactagcagtcctttaaggaaagagaggattgggtgaagacctacgcacaaatatgttcatggggtattacttaaaagatcaagttattggaaacaacctaaatgatctacaaaaggagatggttacaaataactttacatccttcaaataaaatgctgtggagatattaaatatcattctacgatagttgaaaatrtagagatatattcatgatatgcttttaagagaaaattgcaggttattgcacattaggtactgtgtaagcctaattttgtatgtgtctatgctcaaatgttaactgtgataatcctaggaagctagaattgttagttatatttttcttttctgttgctgtatttttgagattctttagacacttactgcttttgtatcagaataaaatattaattgaaaattttcaataaaggcagatcatgttttccaatttctgataagaagccttaaaaatagtgtttatttatccatagttatgccccttttcaatgcatttttaaatagattaacaaattagagaaaaatgacacattgtagcctagtacaaaaaacaaaacaaaacaaagcattctgcctattcaatgaaat

SEQ ID NO: 111071 - DNA, 580 bp, Homo sapiens
aaaatttcactgtattctgtggaaatcacacagaatctggaatattcagcaggcttatttcttgaaaaattgcagacattttttatgataatttaaatatctaaattttgcaatgagtctttctagttaaaaggataaagcctaactcatctagttaaaaatgttaggctgggtgaggtgactcatgcctctaatcccagcactttgggaggccrcggcaggaagattgcttgagcccaagagtttgagaccagcctgagcaatatggcaaggccccatctctacaaaaaataaaaataaaataaaaaattacgcaggcatggtggcacgtgcatgtagccccaactacttggaggttcagacaggaggatcacttaagcccaggaggttgaagctgcaagtaagccgtgatctccccactgcactctcacctgggccacagagcaagaccctgtctcatgaaaataaataaataaataaaatgttgatagagataccttcatcaattacttgtaaacattcacacacacacacaaaggaacatctttctgatttttcacaggaatagcatactgcaata

SEQ ID NO: 111072 - DNA, 586 bp, Homo sapiens
tttaattttaaaatgtggatcaagtgaacatgcttcctgctcatttttatttttccagcctcacatattgaagtgcttaatatttggtctttggacaacatttatttttcgagttcacttccttgagaatttcatttaatcttatggcttgggaaacttacttttaccctttgatatagtttgtatatttgtgccctacaaatctcatgttgaaatgtgatctccagtgttggaagtggggcctcgtgggaagtgtttgggtcatagaggaaagtcccccatgaatggcttggtgctgccctcatggtaatgagttaattctcctttttaattcccttgagatctggttgtttaaaagagtcttgaacctccctcctctctttctccttaccttgccatgtgacacacctgctccttcttctccttctgccataactggaaactttctgagatccttaccagaagcagttgatgttgccatgcttcttttacagcctgcagaaccattagccaaataarctttttttctttgtaagttacccagtctcaagtattcctttagagtaaggcaaaatggacccttgta

SEQ ID NO: 111073 - DNA, 586 bp, Homo sapiens
tttaattttaaaatgtggatcaagtgaacatgcttcctgctcatttttatttttccagcctcacatattgaagtgcttaatatttggtctttggacaacatttatttttcgagttcacttccttgagaatttcatttaatcttatggcttgggaaacttacttttaccctttgatatagtttgtatatttgtgccctacaaatctcatgttgaaatgtgatctccagtgttggaagtggggcctcgtgggaagtgtttgggtcatagaggaaagtcccccatgaatggcttggtgctgccctcatggtaatgagttaattctcctttttaattcccttgagatctggttgtttaaaagagtcttgaacctccctcctctctttctccttaccttgccatgtgacacacctgctccttcttctccttctgccataactggaaactttctgagatccttaccagaagcagttgatgttgccatgcttcttttacagcctgcagaaccattagccaaataaactttttttctttrtaagttacccagtctcaagtattcctttagagtaaggcaaaatggacccttgta

SEQ ID NO: 111074 - DNA, 400 bp, Homo sapiens
tttctgaatgtaatacatattggaatatggycccatctttctgaaagtataaactattaaaaattgagtaagaaaattttaaaggtagaagtatccttaaaggttatgtagcccactttttaagttctttcatgtgcccctcatgtttttgagccatctcaacattttggtttttgttttgcaaatttccactcatttatctacactcatcgtaaagttcactaaacattactgaagcttaggtagagtgaagttatgtaccattccattccccaaacctgttttaaatgaagggatattttatcaagtaaatatgtttaagcaaactccccatgtgggacacaatgacatttgaatgtagtttggaaagcaatgctatgacaagtataagaggccaatc

SEQ ID NO: 111075 - DNA, 552 bp, Homo sapiens
ttttaattcgtagttaccccccctccattcttctccttttttccccttttcccttcttgcctttgttaaatgcccaggcacgccacactaccaagtgttatcagtaccagctcacattcctttccttatttggaaagaggactaactttatggctcattacagacaccccttcccctattctctccactttcctttacgtgcccaccctatctaaaaaaaatacaatgtttagccaaccaggattagtttagattgtacgacccgaccccggccaatggggaaagggtacaggggcaggacttgcatcaggaataaaggctctcgtgcccctttgttcaggtgtgctctcaggacaactggccagggaggcaccctctgtgcagaagtaaaattgctttgctaagaatcctttgttcaagtgttcaatttccttaggattttgagtgttattcctaacattagtatagccactccagttttcttgtggctgtttggatatatattatttttcatcyttatatcttatttagatataaatatcattatataaa

SEQ ID NO: 111076 - DNA, 529 bp, Homo sapiens
ttaggtgtcataggaccagaggtcaaggagataggcatgttagatatcagcttttttctacttttattcacttagagccccagaggcagaagggaaactacgagaagtttcattcatgatttttatttattgaaaagtaaagcttatgcttttatgtctgatcccacacaaattgcctcctacatatcatttctaatcatctaaaaccaaggaagatcatggatcaaccactttggttttacaggtgaggaaactgagacaggggcttccttctagttgtgacttactgatcgaggtgggattggtacctaaatcctgaacctaaagttgacccacaacccctctgatttccttycacctccagccaggatttctttctggcccattgtattcatctcacatcccacagacccatctggcctatcgataaaaggaaagctagaattcaacagaagacccctctccccatttgaggtccaatggaccattccagtgcgccatgaatttttaacttctgcccagattttca

SEQ ID NO: 111077 - DNA, 492 bp, Homo sapiens
ttgttttcttgcaactagactgtcccatctgggggtgaacggatgcagtgacacatcatcaggcattagattctcataagaagcatgcaacccagatccctcgcatgcacagttcacaatagggttcatgctcctatgagaatttaatgctgccgctgatctsacaggaggcggagcttaggtgggaatgtgagcaatggagagcagcatgtaaattcagatgaagtttcgctcacttgcctgctgctcacctcctgctgtgcagcccagtttttaacaggccacagaccaataccagtctatggcccaggggttggggacccctgctttaaagaactttcagtcaaatgtcagttcccaattttattttcaaatacctaaaaaatatcctgaattttctcatgtcccatatcatcaccctactcccgccatcactaccaagcagacctgtagtttatctttttccatcgttagaggccagagttctaccta

SEQ ID NO: 111078 - DNA, 492 bp, Homo sapiens
ttgttttcttgcaactagactgtcccatctgggggtgaacggatgcagtgacacatcatcaggcattagattctcataagaagcatgcaacccagatccctcgcatgcacagttcacaatagggttcatgctcctatgagaatttaatgctgccgctgatctcacaggaggcggagcttaggtgggaatgtgagcaatggagagcagcatgtaaattcagatgaagtttcgctcacttgcctgctgctcacctcctgctgtgcagcccagtttttaacrggccacagaccaataccagtctatggcccaggggttggggacccctgctttaaagaactttcagtcaaatgtcagttcccaattttattttcaaatacctaaaaaatatcctgaattttctcatgtcccatatcatcaccctactcccgccatcactaccaagcagacctgtagtttatctttttccatcgttagaggccagagttctaccta

SEQ ID NO: 111079 - DNA, 492 bp, Homo sapiens
ttgttttcttgcaactagactgtcccatctgggggtgaacggatgcagtgacacatcatcaggcattagattctcataagaagcatgcaacccagatccctcgcatgcacagttcacaatagggttcatgctcctatgagaatttaatgctgccgctgatctcacaggaggcggagcttaggtgggaatgtgagcaatggagagcagcatgtaaattcagatgaagtttcgctcacttgcctgctgctcacctcctgctgtgcagcccagtttttaacaggccacagaccaataccagyctatggcccaggggttggggacccctgctttaaagaactttcagtcaaatgtcagttcccaattttattttcaaatacctaaaaaatatcctgaattttctcatgtcccatatcatcaccctactcccgccatcactaccaagcagacctgtagtttatctttttccatcgttagaggccagagttctaccta

SEQ ID NO: 111080 - DNA, 492 bp, Homo sapiens
ttgttttcttgcaactagactgtcccatctgggggtgaacggatgcagtgacacatcatcaggcattagattctcataagaagcatgcaacccagatccctcgcatgcacagttcacaatagggttcatgctcctatgagaatttaatgctgccgctgatctcacaggaggcggagcttaggtgggaatgtgagcaatggagagcagcatgtaaattcagatgaagtttcgctcacttgcctgctgctcacctcctgctgtgcagcccagtttttaacaggccacagaccaataccagtcyatggcccaggggttggggacccctgctttaaagaactttcagtcaaatgtcagttcccaattttattttcaaatacctaaaaaatatcctgaattttctcatgtcccatatcatcaccctactcccgccatcactaccaagcagacctgtagtttatctttttccatcgttagaggccagagttctaccta

SEQ ID NO: 111081 - DNA, 565 bp, Homo sapiens
acaaattctcagctacataaactctatggcattgaataaaggtcagtgggtttgaataaaacccaagatatggataaaactttgagaataatcagaataatccaataaacagttctggggagagcatctgaagtgagaagtagcccggatatacagtaagtctggggtccacatgaagcccagaatgtgtctgaaacccagagactggtgagagtaagtaaaacctgaacactaatgaagtctggggctcgggtgctggctgaagtgtatgctccactaggaatctgctcttctctgtgaggcactgctgaagagcattcctaaaggaccatggtccccaccaaccaggagcctccactgtccctctttcctttcctgtgggtggcactgccttaggctaaatcctcttctctcctagaggcacgaacaaacactcagttcctttgacactttcccagaatgggacaagagaacccagtccataygcttgaggccactcatccttccactttctcccaagattcccaccagtcccaaagaagtttttcttttatcttcttctggg

SEQ ID NO: 111082 - DNA, 587 bp, Homo sapiens
tggtggtaaacctattatcagcccttactctatctttaaaattttaagttaaatttttgatttaatgtagaatcattttatacacacacacacacacacatgccacacaccaaaacatataactatttttcttgaaatatcaaaataccacaaaagcattatgattttgttttcctaaaatgttttagtgtaaatgacagttagatctgtagtctgattgccttaaaaagttgtttcatctctctgaacttgaattattattattattrttttttgagatggagtctcgctctgtagcccaggctggagtgcagtagcacgatctcggctcactgccagctccacttcccaggttcacgccattctcctgcctcagcctcccgagtagctgggactacaggtgcccaccaccacgccaggctaattttttgaatttttagtagagacaggatttcaccatgttagccaggatggtctcgatctcctgacccagtgatctaacccccttggcctcccaaagtgctgggatcacaggtgtgagcctgaaccctgaacttgaattttttaatctgtaaaatgacatgata

SEQ ID NO: 111083 - DNA, 587 bp, Homo sapiens
tggtggtaaacctattatcagcccttactctatctttaaaattttaagttaaatttttgatttaatgtagaatcattttatacacacacacacacacacatgccacacaccaaaacatataactatttttcttgaaatatcaaaataccacaaaagcattatgattttgttttcctaaaatgttttagtgtaaatgacagttagatctgtagtctgattgccttaaaaagttgtttcatctctctgaacttgaattattattattattgttttttgagatggagtctcgctctgtagcccaggctggagtgcagtagcacgatctcggctcactgccagctccacttcccaggttcacgccattctcctgcctcagcctcccgagtagctgggactacaggtgcccaccaccacgccaggctaattttttgaatttttagtagagacaggatttcaccatgttagccaggatggtctcgatctcctgacccrgtgatctaacccccttggcctcccaaagtgctgggatcacaggtgtgagcctgaaccctgaacttgaattttttaatctgtaaaatgacatgata

SEQ ID NO: 111084 - DNA, 338 bp, Homo sapiens
gaattttttaatctgtaaaatgacatgataatattaatatgctgatcaaagtttgtttgcwctcagatcaatttcctcagcagttttcttttattttttcactgtaacagaaatctgcatttcccatgcttccttgtcatctagtctttgggtagattcaggcaagggaaggcaaaaaccaaagattgaagggcaggaaaaggcaaggagaagggccacttctgtttttgtttgtttgttttctctgcttctaatgacacctacatcagaggtcatatttctccctggtcccatttctcaccagcagtaattctactgtgaaatggctcattactgga

SEQ ID NO: 111085 - DNA, 338 bp, Homo sapiens
gaattttttaatctgtaaaatgacatgataatattaatatgctgatcaaagtttgtttgctctcagatcaatttcctcagcagttttcttttattttttcactgtaacagaaatctgcatttcccatgcttccttgtcatctagtctttgggtagattcaggcaagggaaggcaaaaaccaaagattgaagggcaggaaaaggcaaggaraagggccacttctgtttttgtttgtttgttttctctgcttctaatgacacctacatcagaggtcatatttctccctggtcccatttctcaccagcagtaattctactgtgaaatggctcattactgga

SEQ ID NO: 111086 - DNA, 338 bp, Homo sapiens
gaattttttaatctgtaaaatgacatgataatattaatatgctgatcaaagtttgtttgctctcagatcaatttcctcagcagttttcttttattttttcactgtaacagaaatctgcatttcccatgcttccttgtcatctagtctttgggtagattcaggcaagggaaggcaaaaaccaaagattgaagggcaggaaaaggcaaggagaagggccacttctgtttttgtttgtttgttttctctgcttctaatgacacctacatcagagrtcatatttctccctggtcccatttctcaccagcagtaattctactgtgaaatggctcattactgga

SEQ ID NO: 111087 - DNA, 584 bp, Homo sapiens
ttttctatatgacatttttgagaaaaggaagtcaataaatcccatttgatatgcaacagaaataaagatctcttatttcaattttaaaatgctttataacttacattgctttgttttatgcattatttgttttgatcagatgcaaaatgagtcagtaatgtcatctaaccacaagtttgatacatttttttaaagaaaaatttccaaaatactataactgarcaataggctaatacttcataaattaaaatatttaaatattcaatctttctgactggatatttgttgcatatctgataacttggcctaattctgtaattgggatgagaactacccaattttattggtaacctcttctgctctgcaactttggaaataatatggaggactccaaattcatttgagacaaaaatattaaaaatgtaacccctgattaggatttcagttccaaagctctccttggagggatatagagctggagaaaatcacatttatttttcgtctctttaatattgatatataaaagtcaggttaaaattagtatcaaattgggaagcctgcatggtaaactggctggaataata

SEQ ID NO: 111088 - DNA, 622 bp, Homo sapiens
taaaatgaaatgcttaggttttagtacattaataattacattaaatataagtgacataaatacaccaatcaaaagagaaattagctgaataaatwaaaaaatgcaaccttaactattgctatagtaagaaatacactttaattcaatagtatcagtaggttgcaagtaaaataatataaaaatacataccatggaaatatttatcaataaaagggcaaaagtggctatattaatatctgataatctagaagttagattcaaaaatcttacaaagaacattactaacaacagaggaggcagttagaggctggctaggcagatagagaggaagggtcttgggagaaagacagcacccatgggaatgcacctgcactacctttgtggtgtagctagaatgtggaaatgtggttaacaacttcctcttataccaagatgtctctcagaagggactgtcccaattatgtttcaataaatcaactaaatgtccttaacttgacccagagctaattgtaatatcattagcattgcagttttggtgcccccatgaattttgcttaggcacttatgactaataatcaagatggagtcactactgccaaacctaggtatgcacagacagaac

SEQ ID NO: 111089 - DNA, 622 bp, Homo sapiens
taaaatgaaatgcttaggttttagtacattaataattacattaaatataagtgacataaatacaccaatcaaaagagaaattagctgaataaataaaaaaatgcaaccttaactattgctatagtaagaaatacactttaattcaatagtatcagtakgttgcaagtaaaataatataaaaatacataccatggaaatatttatcaataaaagggcaaaagtggctatattaatatctgataatctagaagttagattcaaaaatcttacaaagaacattactaacaacagaggaggcagttagaggctggctaggcagatagagaggaagggtcttgggagaaagacagcacccatgggaatgcacctgcactacctttgtggtgtagctagaatgtggaaatgtggttaacaacttcctcttataccaagatgtctctcagaagggactgtcccaattatgtttcaataaatcaactaaatgtccttaacttgacccagagctaattgtaatatcattagcattgcagttttggtgcccccatgaattttgcttaggcacttatgactaataatcaagatggagtcactactgccaaacctaggtatgcacagacagaac

SEQ ID NO: 111090 - DNA, 622 bp, Homo sapiens
taaaatgaaatgcttaggttttagtacattaataattacattaaatataagtgacataaatacaccaatcaaaagagaaattagctgaataaataaaaaaatgcaaccttaactattgctatagtaagaaatacactttaattcaatagtatcagtaggttgmaagtaaaataatataaaaatacataccatggaaatatttatcaataaaagggcaaaagtggctatattaatatctgataatctagaagttagattcaaaaatcttacaaagaacattactaacaacagaggaggcagttagaggctggctaggcagatagagaggaagggtcttgggagaaagacagcacccatgggaatgcacctgcactacctttgtggtgtagctagaatgtggaaatgtggttaacaacttcctcttataccaagatgtctctcagaagggactgtcccaattatgtttcaataaatcaactaaatgtccttaacttgacccagagctaattgtaatatcattagcattgcagttttggtgcccccatgaattttgcttaggcacttatgactaataatcaagatggagtcactactgccaaacctaggtatgcacagacagaac

SEQ ID NO: 111091 - DNA, 596 bp, Homo sapiens
taaccaccaataaaaggaagccagccattccacacagaggattttgttaatkgattgcatgattcaaggaaataatattattaggtgtgtattagtccattactgcattgctataaagaaatacctgagattgggtaatttataaagaaaagaggtttaactgactcacagttctgcatgctgtacagaaagaatgttgcatctgctgggcatctggggaggcctcatgaaatgtataaccatggtgggaaaatgaagagggagccagtgcttcatatagctgggagcaggaagaaaagtgagaggtgaggaggtgctacacccttttaacaaccagatttcataataactcactcactcactatcataagaatagcaccaaggaaatggtattaaaccattaaaaagaaaccactccacaatccaataacctcccatcaggccccacctccaacactgggtattacaatttgacatgagatttggttggggacatagatccaaaccatattattttgccctagtccctcccaaattttatgtctttctcagtttgcaaaatataatcatgccttcccatcagtcccccaaagtct

SEQ ID NO: 111092 - DNA, 596 bp, Homo sapiens
taaccaccaataaaaggaagccagccattccacacagaggattttgttaattgattgcrtgattcaaggaaataatattattaggtgtgtattagtccattactgcattgctataaagaaatacctgagattgggtaatttataaagaaaagaggtttaactgactcacagttctgcatgctgtacagaaagaatgttgcatctgctgggcatctggggaggcctcatgaaatgtataaccatggtgggaaaatgaagagggagccagtgcttcatatagctgggagcaggaagaaaagtgagaggtgaggaggtgctacacccttttaacaaccagatttcataataactcactcactcactatcataagaatagcaccaaggaaatggtattaaaccattaaaaagaaaccactccacaatccaataacctcccatcaggccccacctccaacactgggtattacaatttgacatgagatttggttggggacatagatccaaaccatattattttgccctagtccctcccaaattttatgtctttctcagtttgcaaaatataatcatgccttcccatcagtcccccaaagtct

SEQ ID NO: 111093 - DNA, 491 bp, Homo sapiens
gttcttattttagataaaactgacattaaactaacgatgatcaaaacagacaataaagggcattacgtaatgatgaaggattcaattaaacaagaagacttaactatcctaaatatatatgcacctaacactggagcactcakattcacaaaacaagctcttagagatatacaaagaaacttacataactacacgatgacagtggcagacctcaacaccttactgacagtgtaagacagatcactgaggcagaaaactaacaaagatattcgggacctaaacttgacacttggccaaatacacctaacagacatctgcagaacactccacacatcaacaacagaatatatattcttatcatctgcacgtgacacatattctaaaatcaaccacatgctcagctataagtcaattctcaacaaataaaaaaaaaaattttaccagccacactctcagaccagagcacaataaaaatacaaatcaataccaag

SEQ ID NO: 111094 - DNA, 491 bp, Homo sapiens
gttcttattttagataaaactgacattaaactaacgatgatcaaaacagacaataaagggcattacgtaatgatgaaggattcaattaaacaagaagacttaactatcctaaatatatatgcacctaacactggagcactcatattcacaaaacaagctcttagagatatacaaagaaacttacataactacacratgacagtggcagacctcaacaccttactgacagtgtaagacagatcactgaggcagaaaactaacaaagatattcgggacctaaacttgacacttggccaaatacacctaacagacatctgcagaacactccacacatcaacaacagaatatatattcttatcatctgcacgtgacacatattctaaaatcaaccacatgctcagctataagtcaattctcaacaaataaaaaaaaaaattttaccagccacactctcagaccagagcacaataaaaatacaaatcaataccaag

SEQ ID NO: 111095 - DNA, 491 bp, Homo sapiens
gttcttattttagataaaactgacattaaactaacgatgatcaaaacagacaataaagggcattacgtaatgatgaaggattcaattaaacaagaagacttaactatcctaaatatatatgcacctaacactggagcactcatattcacaaaacaagctcttagagatatacaaagaaacttacataactacacgatgacagtggcagacctcaacaccttactgacagtgtaagacagatcactgaggcagaaaactaacaargatattcgggacctaaacttgacacttggccaaatacacctaacagacatctgcagaacactccacacatcaacaacagaatatatattcttatcatctgcacgtgacacatattctaaaatcaaccacatgctcagctataagtcaattctcaacaaataaaaaaaaaaattttaccagccacactctcagaccagagcacaataaaaatacaaatcaataccaag

SEQ ID NO: 111096 - DNA, 644 bp, Homo sapiens
ggattaaatataaagtcttaaataaaaatctaaaaatatatttcaacaaatgaaagaaaaatacaacatatcaaaatataggaaatacagctaaggctgtggtgggaaagaaatttatagtactaaatgcttcattaaaaataagaaaagatctcaaatcaataacttacacttgtatctcaagaaactagaaaaagaacagagtaaactgaaagcaggcagaagaagaaaaataatcatcacaataacaaaaattcatgaaattgaaaacagaaaaaaatgtgaaacaaaaagctggtttattgaaaaaatcaatcaattgataaacatctatcaaaaccracaaaaataaatagagatgacacaaaacacaacagcaaattttttaaaaaaaatgcaaatgatccaattaggtaatggacaaaagacatcaatggacgttttaacaagaaaaatattcagatgtcaaataatccatgaaacatgttcaatattattaatcatcatggacatgtcaaataaaaccatagtgagatatttctacacacctatcaaaatgacttttaaaaattgtgacaatagcaaaagctattcaggatgtaaaaaatacgatcactcataagttgctagtggaaaagtaaaat

SEQ ID NO: 111097 - DNA, 576 bp, Homo sapiens
gttttctggaagattatagtttttcaaaactgcaamcagtaggcagataaatataaattatgataaacataatgtagatgtatctttacagaaaactttagatcaaatgttagctttttctacaaagggtcagattttaagtatgttaggctttgacaatcatacagtttctgttgcaaccactcaactctgacataatagcctgaaaacatctatagaccacatgtaagtgaatgatcttgtgtccaaaaaaaaaccttgttatttatgaaaacactgcagtttttactttctgcaatcgttatatgctacaaaatgtaattttaaaaaattgtttcaatcatttaaatctctaaaaaccattattaccttgcaggctgtaccaaaaccataggccacaggctgccaatgctcacactgaagaaacaaaattgtgatatcagtacagccttcacacagaaaatagagtttgaaactagaatatcaactacaactggagagttaaatgaaaagtcttattagttagatggagtgggttttgcaagacactggtgagaagtacagaatttggggtaa

SEQ ID NO: 111098 - DNA, 576 bp, Homo sapiens
gttttctggaagattatagtttttcaaaactgcaaccagtaggcagataaatataaattaygataaacataatgtagatgtatctttacagaaaactttagatcaaatgttagctttttctacaaagggtcagattttaagtatgttaggctttgacaatcatacagtttctgttgcaaccactcaactctgacataatagcctgaaaacatctatagaccacatgtaagtgaatgatcttgtgtccaaaaaaaaaccttgttatttatgaaaacactgcagtttttactttctgcaatcgttatatgctacaaaatgtaattttaaaaaattgtttcaatcatttaaatctctaaaaaccattattaccttgcaggctgtaccaaaaccataggccacaggctgccaatgctcacactgaagaaacaaaattgtgatatcagtacagccttcacacagaaaatagagtttgaaactagaatatcaactacaactggagagttaaatgaaaagtcttattagttagatggagtgggttttgcaagacactggtgagaagtacagaatttggggtaa

SEQ ID NO: 111099 - DNA, 576 bp, Homo sapiens
gttttctggaagattatagtttttcaaaactgcaaccagtaggcagataaatataaattatgataaacataatgtagatgtatctttacagaaaactttagatcaaatgttagctttttctacaaagggtcagattttaagtatgttaggctttgacaatcatacagtttctgttgcaaccactcaactctgacataatagcctgaaaacatctatagaccacatgtaagtgaatgatcttgtgtccaaaaaaaaaccttgttatttatgaaaacactgcagtttttactttctgcaatcgttatatgctacaaaatgtwattttaaaaaattgtttcaatcatttaaatctctaaaaaccattattaccttgcaggctgtaccaaaaccataggccacaggctgccaatgctcacactgaagaaacaaaattgtgatatcagtacagccttcacacagaaaatagagtttgaaactagaatatcaactacaactggagagttaaatgaaaagtcttattagttagatggagtgggttttgcaagacactggtgagaagtacagaatttggggtaa

SEQ ID NO: 111100 - DNA, 576 bp, Homo sapiens
gttttctggaagattatagtttttcaaaactgcaaccagtaggcagataaatataaattatgataaacataatgtagatgtatctttacagaaaactttagatcaaatgttagctttttctacaaagggtcagattttaagtatgttaggctttgacaatcatacagtttctgttgcaaccactcaactctgacataatagcctgaaaacatctatagaccacatgtaagtgaatgatcttgtgtccaaaaaaaaaccttgttatttatgaaaacactgcagtttttactttctgcaatcgttatatgctacaaaatgtaattttaaaaaattgtttcaatcatttaaatctctaaaaaccattattaccttgcaggctgtaccaaaaccataggccacaggctgccaatgctcacactgaagaaacaaaattgtgatatcagtacagccttcacasagaaaatagagtttgaaactagaatatcaactacaactggagagttaaatgaaaagtcttattagttagatggagtgggttttgcaagacactggtgagaagtacagaatttggggtaa

SEQ ID NO: 111101 - DNA, 526 bp, Homo sapiens
ttattaccttgcaggctgtaccaaaaccataggccacaggctgccaatgctcacactgaagaaacaaaattgtgatatcagtacagccttcacacagaaaatagagtttgaaactagaatatcaactacaactggagagttaaatgaaaagtcttattagttagatggagtgggttttgcaagacactggtgagaagtacagaatttggggtaattgcagtaattacgtgggcttaaatatatatgtgtgggtagaagagggagatgtcaagygatgagagtagagatgagtttaggataaattacaaatgtcttcaggccatccaaagtgtttataatttattctaatggaagtgacaagacattaatgagatctaaaatagggactacaagaaacagattacaatagataaacaagactgtaggcagagagcttcttaattccacagttcataggcaagtccaagaagaaacttaaggtgacctgaactatagtaatgacagcggattcacttataagtacagt

SEQ ID NO: 111102 - DNA, 526 bp, Homo sapiens
ttattaccttgcaggctgtaccaaaaccataggccacaggctgccaatgctcacactgaagaaacaaaattgtgatatcagtacagccttcacacagaaaatagagtttgaaactagaatatcaactacaactggagagttaaatgaaaagtcttattagttagatggagtgggttttgcaagacactggtgagaagtacagaatttggggtaattgcagtaattacgtgggcttaaatatatatgtgtgggtagaagagggagatgtcaagtgatgagagtagagatgagtttaggataaattacaaatgtcttcaggccatccaaagtgtttataatttattctaatggaagtgacaagacattaatgagatctaaaatagggactacaagaaacagattacaatagataaacaagactgtaggcagagagcttcttaattccacagttcatwggcaagtccaagaagaaacttaaggtgacctgaactatagtaatgacagcggattcacttataagtacagt

SEQ ID NO: 111103 - DNA, 478 bp, Homo sapiens
cactgtaaaggccatcaaaaggcatcagatcccattgctcagggcaatrcttatgctgataaaatagctaaagaagcagctagcattccaacttctgtccctcacggccagtttttctccttctaatcggtcactcccacctactcaccgactgagacttccacctatcaatctcttcccacacaaggcaaatggttctttgaccaaggaaaatatctccttccagcctcacaggcccattctattctgtcgtcattgcataacctcttccatgtaggttacaagctgctagcccacctcttagaacctctcatttcctttccattgtggaaatctatcctcaaaaaatcacttctcagtgttccatctgctattctactactcctcagggattattcaggccccctcccttccctacacatcaagctcagggatttgcccccacccaggactggcaaattgacttcactcacatgct

SEQ ID NO: 111104 - DNA, 478 bp, Homo sapiens
cactgtaaaggccatcaaaaggcatcagatcccattgctcagggcaatacttatgctgataaaatagctaaagaagcagctagcattccaacttctgtccctcacggccagtttttctccttctaatcggtcactcccacctactcaccgactgaracttccacctatcaatctcttcccacacaaggcaaatggttctttgaccaaggaaaatatctccttccagcctcacaggcccattctattctgtcgtcattgcataacctcttccatgtaggttacaagctgctagcccacctcttagaacctctcatttcctttccattgtggaaatctatcctcaaaaaatcacttctcagtgttccatctgctattctactactcctcagggattattcaggccccctcccttccctacacatcaagctcagggatttgcccccacccaggactggcaaattgacttcactcacatgct

SEQ ID NO: 111105 - DNA, 488 bp, Homo sapiens
ggaaaatacaataaatattattkggttaaaatagagaaagttaagtggaaagatgaaatgatgaagagcccggagaaaattgttcagtttgcatacaaattgggaaattaacacctaacctgcctaggtagaatttcatagcattaactaaaataattacttaaacttacaagatttattagaaaaatatgaatagaaaaataaaatgcattgttgcattttatgtaattttacttgaacttagtttataacatgtacatagattaagttgatttaaatattttatgtacaaaaaactatattgttgaagattctaagagcttaaaactaaaatacaatataaacatttacttaacaaaaagagtaaataagatgaagaatttgaaagaatttaagaattaatttcagtttcttttccaaaatgtatgtggttagcctacaatgcttttacaatctgttattttatgagtatgaatattgattttatt

SEQ ID NO: 111106 - DNA, 603 bp, Homo sapiens
tacaaattgggaaattaacacctaacctgcctaggtagaatttcatagcattaactaaaataattacttaaacttacaagatttattagaaaaatatgaatagaaaaataaaatgcattgttgcattttatgtaattttacttgaacttagtttataacatgtacatagattaagttgatttaaatattttatgtacaaaaaactatattgttgaagattctaagagcttaaaactaaaatacaakataaacatttacttaacaaaaagagtaaataagatgaagaatttgaaagaatttaagaattaatttcagtttcttttccaaaatgtatgtggttagcctacaatgcttttacaatctgttattttatgagtatgaatattgattttattattacctaaacatgtatgatttttaaaatatggcaaaagaattaaagttctatagtttgacaaagctgtaaagcagatcaatcctttgacagcttaatgaataaagcatgcatgtagttgacactaattcatttaataaacatttgtagaacatatatgtgtaagaaattgtgctaaggagatgaatggcacattaaaataagaagac

SEQ ID NO: 111107 - DNA, 488 bp, Homo sapiens
ggaaaatacaataaatattattgggttaaaatagagaaagttaagtggaaagatgaaatgatgaagagcccggagaaaattgttcagtttgcatacaaattgggaaattaacacctaacctgcctaggtagaatttcatagcattaactaaaataattacttaaacttacaagatttattagaaaaatatgaatagaaaaataaaatgcattgttgcattttatgtaattttacttgaacttagtttataacatgtacatagattaagttgatttaaatattttatgtacaaaaaactatattgttgaagattctaagagcttaaaactaaaatacaatataaacatttacttwacaaaaagagtaaataagatgaagaatttgaaagaatttaagaattaatttcagtttcttttccaaaatgtatgtggttagcctacaatgcttttacaatctgttattttatgagtatgaatattgattttatt

SEQ ID NO: 111108 - DNA, 488 bp, Homo sapiens
ggaaaatacaataaatattattgggttaaaatagagaaagttaagtggaaagatgaaatgatgaagagcccggagaaaattgttcagtttgcatacaaattgggaaattaacacctaacctgcctaggtagaatttcatagcattaactaaaataattacttaaacttacaagatttattagaaaaatatgaatagaaaaataaaatgcattgttgcattttatgtaattttacttgaacttagtttataacatgtacatagattaagttgatttaaatattttatgtacaaaaaactatattgttgaagattctaagagcttaaaactaaaatacaatataaacatttacttaacaaaaakagtaaataagatgaagaatttgaaagaatttaagaattaatttcagtttcttttccaaaatgtatgtggttagcctacaatgcttttacaatctgttattttatgagtatgaatattgattttatt

SEQ ID NO: 111109 - DNA, 404 bp, Homo sapiens
gagctgctcagtctatggcattttgttatagcagcccatgctaatgaatacagatgaccgtgtgtctgcagaccttcctaggaaattattgagtccttcattgaatactaaactgtgaatacatgagagaaaataactgaagcctggggtaaaatgccaacacaaagggtttgaagaacaattctcaaagctcagaaagctctgcaaatattattgttgccacaaaccaaagtagaagacagggtaatgtrtgagctattaggtagaatctttggaagaatcctgcttttgtgatggaactcgctcattcctaaacctaaagcaactcaacatcttctctaagaaaattttatagcaatctctaaaagcatcaaattgattccaaataatttaactgtgtttga

SEQ ID NO: 111110 - DNA, 404 bp, Homo sapiens
gagctgctcagtctatggcattttgttatagcagcccatgctaatgaatacagatgaccgtgtgtctgcagaccttcctaggaaattattgagtccttcattgaatactaaactgtgaatacatgagagaaaataactgaagcctggggtaaaatgccaacacaaagggtttgaagaacaattctcaaagctcagaaagctctgcaaatattattgttgccacaaaccaaagtagaagacagggtaatgtgtgagctattaggtagaatctttggaagaatcctgcttttgtgatggaactcgctcattcctaaacctaaagcaactcaacatcttctctaagaaaattttatagcaatctctaaaagcatcaaaytgattccaaataatttaactgtgtttga

SEQ ID NO: 111111 - DNA, 420 bp, Homo sapiens
  misc_feature (1)...(420): n = A,T,C or G
nnnnnnnnnnnnnnnnnnnnnnnnnnnnnnntatgagcaaacacaaatccagtggtgaaagatacacactcgagttctgtttgttgtcttggaacaatacggtttagaggtgactggcgggtgaggagaacatatgcgagttcaccaaagagaaaagstgaatgagcaatgcctcttcctgaccatatctcttactcagataactatataatttattgtccagtaaagggtatattaaaaaatcatattaaaagtcatgcagtgaagttgtccagggaaatcaagacttaacagtctcactctgacaataatgaacagggggattccctcaagatagactaggacatgaccccacactggcaggtagtagtaccagaaaagaacccatggaaaatctttaccttatgcttgaggtaggga

SEQ ID NO: 111112 - DNA, 573 bp, Homo sapiens
aatcccgtttccaacgaaatcctgaaagctagacaaatatccacttgcagattccataaaaagagtgtttctaaactgctctctgaaaagaaaggttcaactctgttagctgagtagatacatcatgaaaaagtttctgacattgcttctatgtagcttttattggaagatatttcctttttcaccgyagtcctgagagcgctccaaatgtccacttccagatactacaaaaagagtgtttcaaacctgctctatgaaagggactgttcaacactgtgacttcaattgaaacatcccaatgaagcttctgagaatgcttctgtctagagtttatatgaagacaatcccgtttccaacgaaatcctcaaagctatccaaatatcctcttgcagattttacaaaaagagtgtttcaaaactgctctttcaaaagaaagcttcaacactgttagttgagggcgcacatcacaaataagattctgagaatgcttctgtctagttttcaggggaagatatttcctttttcaccataggcctgaaagcgctccaaatgtccacatccagatactacaaa

SEQ ID NO: 111113 - DNA, 573 bp, Homo sapiens
aatcccgtttccaacgaaatcctgaaagctagacaaatatccacttgcagattccataaaaagagtgtttctaaactgctctctgaaaagaaaggttcaactctgttagctgagtagatacatcatgaaaaagtttctgacattgcttctatgtagcttttattggaagatatttcctttttcaccgtagtcctgagagcgctccaaatgtccacttccagatactacaaaaagagtgtttcaaacctgctctatgaaagggactgttcaacactgtgacttcaattgaaacatcccaatgaagcttctgagaatgcttctgtctagagtttatatgaagacaatcccgtttccaacgaaatcctcaaagctatccaaatatcctcttgcagattttacaaaaagagtgtttcaaaactgctctwtcaaaagaaagcttcaacactgttagttgagggcgcacatcacaaataagattctgagaatgcttctgtctagttttcaggggaagatatttcctttttcaccataggcctgaaagcgctccaaatgtccacatccagatactacaaa

SEQ ID NO: 111114 - DNA, 386 bp, Homo sapiens
gaaagggaatgttcaactctgacacttgaatgcaaacatcacaaagaagttactgggaatgctgctgtctgctttttatatgtaatcccgtttccaacgaaatcctcaaagctagacaaatatccacttgcagattccacaaaaagagtgtttcaaaactgctctctcaaaagaaaggttcaacgctgttagctgagtagatmcatcatgaaaaagtttctgacattgcttctatctagcttttattggaagatatttcctttatcaccgtattcctgaggtctctcaaaatttccaattccagatactacaaaaagagtgtttcaaaaatgctctatgaaagggactgttcaacactgtgacttcaattgaaacatcccaatgaa

SEQ ID NO: 111115 - DNA, 577 bp, Homo sapiens
ttagtagtttatggacttactataccatactttttatagttatttcatagtatattccatatatatatatatataaccagttaaggccgggtgttgtggctcacacctgtaatcccagcactttgggaggccaaggcaggtggattgcctgagctcaggagtttgagactagcctgggcaatttggtgaaaccctgtctctactaaagtacaaaaaattagccaggcatggcggcatgcacctgtaatcccagctactcgggaggctgagacaggagaatcccttgaacccgggaggcagaggttgcagggagccgagamcgccccattgcactccagcctgggcaacagagcaagactcctctcaaacaaaaaacaaacaaacaaacaaacaaacaaaaaccagttaattgtaaaacagcctcaggcaggtcctttgggaggtattccagaagaagacattgttctcataggagatgacagctacatgcatgtttttgccccaaagatcttccagtgggacaagatgtggaggtggcagacaccaactctgtgtgggtctaggctaataagtgtgt

SEQ ID NO: 111116 - DNA, 519 bp, Homo sapiens
catggaactttttggtgaaggcacttgggcctrcaaatttctttatgggaagattttcatgactgattcaatatatttaatctatgtaagttttttttctacttttggagtgaattttgatttttttccctagaaattcatatctcaccaagtatggtggcttatgcttgtaatcccagcactttgggaggctcaggtgggaggaccacttgactacagtagttcaagaccagcctgggcaatatagtgagactccatctctacaaaaaaaataaaaattagcttggtgtggtggcgggtgcctgtagtgtgagctacttgggatgctgaggtgggaggatcatttgagcctggaaggtcgagactgcagtgagctgtgattgtgccactgcactccagcctgggtgacagaatgagacgttgtctaaaaaaaaaaaaaagatttttcatctatgctttaaagtctgttggcataaaggtattcataattttacattatgaaattgtttatttgagaca

SEQ ID NO: 111117 - DNA, 519 bp, Homo sapiens
catggaactttttggtgaaggcacttgggcctasaaatttctttatgggaagattttcatgactgattcaatatatttaatctatgtaagttttttttctacttttggagtgaattttgatttttttccctagaaattcatatctcaccaagtatggtggcttatgcttgtaatcccagcactttgggaggctcaggtgggaggaccacttgactacagtagttcaagaccagcctgggcaatatagtgagactccatctctacaaaaaaaataaaaattagcttggtgtggtggcgggtgcctgtagtgtgagctacttgggatgctgaggtgggaggatcatttgagcctggaaggtcgagactgcagtgagctgtgattgtgccactgcactccagcctgggtgacagaatgagacgttgtctaaaaaaaaaaaaaagatttttcatctatgctttaaagtctgttggcataaaggtattcataattttacattatgaaattgtttatttgagaca

SEQ ID NO: 111118 - DNA, 519 bp, Homo sapiens
catggaactttttggtgaaggcacttgggcctacaaatttctttatgggaagattttcatkactgattcaatatatttaatctatgtaagttttttttctacttttggagtgaattttgatttttttccctagaaattcatatctcaccaagtatggtggcttatgcttgtaatcccagcactttgggaggctcaggtgggaggaccacttgactacagtagttcaagaccagcctgggcaatatagtgagactccatctctacaaaaaaaataaaaattagcttggtgtggtggcgggtgcctgtagtgtgagctacttgggatgctgaggtgggaggatcatttgagcctggaaggtcgagactgcagtgagctgtgattgtgccactgcactccagcctgggtgacagaatgagacgttgtctaaaaaaaaaaaaaagatttttcatctatgctttaaagtctgttggcataaaggtattcataattttacattatgaaattgtttatttgagaca

SEQ ID NO: 111119 - DNA, 519 bp, Homo sapiens
catggaactttttggtgaaggcacttgggcctacaaatttctttatgggaagattttcatgactgattcaatatatttaatctatgtaagttttttttctacttttggagtgaattttgatttttttccctagaaattcatatctcaccaagtatggtggcttatgcttgtaatcccagcactttgggaggctcaggtgggaggaccacttgactacagtagttcaagaccagcctgggcaatatagtgagactccatctctacaaaaaaaataaaaattagcttggtgtggtggygggtgcctgtagtgtgagctacttgggatgctgaggtgggaggatcatttgagcctggaaggtcgagactgcagtgagctgtgattgtgccactgcactccagcctgggtgacagaatgagacgttgtctaaaaaaaaaaaaaagatttttcatctatgctttaaagtctgttggcataaaggtattcataattttacattatgaaattgtttatttgagaca

SEQ ID NO: 111120 - DNA, 480 bp, Homo sapiens
tcttcattcctcgatgtcacattttaaatttgtattactttttcttcattttccaaagctccagctcagcatctttgtatgcctctcatatatatatatatatatatttttttttaaagtctcagtagmctttttaatgtgtcgatttctacaccccagcctcaggtagtataagcttcatgaggacaggaaccagccctgcctgctcacactgtcaccagcatgttcacagggccgacacatgccaggcactcaggtattagttgaataggtaaatggaagactggaaaatgtaggctgaactgagaacttgtggatagacacacctcagtgatttgtgaaaaggaagattggtccaaagcaatgtttgttaaccaaattttcattatcaaagaggaaaaactaaacattccctaacagaaatgaaaaaggaataaaatttttgttagatgatgttgagctttgaaatgccaccaagga

SEQ ID NO: 111121 - DNA, 348 bp, Homo sapiens
tgagcatgatggcatgagcctgtagtcccagctactcaggaggctgaggtgggagaatcccttgagccagggaagtggaggttgctgtgagccaggatcatacccttgcattccagtctgggtgatggagggagatcctatctcaaaagtctgaaggagtgtgatctaaacaatgtagtgtttccactgaagcacagatgttttycctgtgatttgtagtgattggcatttttaaactgcagattgctgtctatattaacttgacagtttgtaataactgcttgagattagcagtttgtctttcttcagttaattgtcatatttagctcctctgtgtaatatgagaaa

SEQ ID NO: 111122 - DNA, 348 bp, Homo sapiens
tgagcatgatggcatgagcctgtagtcccagctactcaggaggctgaggtgggagaatcccttgagccagggaagtggaggttgctgtgagccaggatcatacccttgcattccagtctgggtgatggagggagatcctatctcaaaagtctgaaggagtgtgatctaaacaatgtagtgtttccactgaagcacagatgttttccctgtgatttgtagtgattggcatttttaaactgcagattgctgtctatattmacttgacagtttgtaataactgcttgagattagcagtttgtctttcttcagttaattgtcatatttagctcctctgtgtaatatgagaaa

SEQ ID NO: 111123 - DNA, 472 bp, Homo sapiens
tatatgattccacttatatgagatatctagatcagtaaaattcatagaaacaaagtaggatagtcaggctcagtggctcattcctgtaatcccaacatcttggaargataaggcaggaggatcacttcagcccaagagttcaagaccaggctagacaacatagggagacctcatctctactttaaaaagaaaagtcaggtgtggtggaacatacctgtagtcccaactactggggaggctgaggtgggttggatcactcgaatctgggagttcaagctttcagtgaactatgatcatgccactgtactccaacctgggcgacagagagaccctgtcagaaaaaagaaaaaaaaaaaggtagtttggtggttgccagaggctggggtagagaggcatgagggcttattgcttactgggtacagagtttcactcgggatgatgaaaatgttctggagatggatggtggtgatgg

SEQ ID NO: 111124 - DNA, 472 bp, Homo sapiens
tatatgattccacttatatgagatatctagatcagtaaaattcatagaaacaaagtaggatagtcaggctcagtggctcattcctgtaatcccaacatcttggaaggataaggcaggaggatcacttcagcccaagagttcaagaccaggctagacaacatagggagacctcatctctactttaaaaagaaaagtcaggtgtggtggaacatacctgtagtcccaactactggggaggctgaggtgggttggatcactcgaatctgggagttcaagctttcagtgaactatgatcatgccactgtacyccaacctgggcgacagagagaccctgtcagaaaaaagaaaaaaaaaaaggtagtttggtggttgccagaggctggggtagagaggcatgagggcttattgcttactgggtacagagtttcactcgggatgatgaaaatgttctggagatggatggtggtgatgg

SEQ ID NO: 111125 - DNA, 624 bp, Homo sapiens
aggaagaattagtgtcctttcctttaggttctttacttcctcactactcaactcctcaactcttaataaatatcttcaaatctaagtcactcagatcactatctagactgtttcacagctagagagacctaaaaacagaacacaaagagacaaatatatagaatgttatagtaatgtctttgtatatgtttgtttagaggcaaggagagcaagaccaatatttcattgtggataaacggctagcctgtgccttatttgtatttatgaatgcagccgactttttgggaacatgatttaacacctggtatatccaaattcatgtgataacacatcatgatacagtgaggttttaatattaccagaaaagcaacaatagtttccatttcaaaatagattttctgcttaagagttcaaggtctgttttctgttcatccaacttggtttgcagcatgcagaggtgaagaatgataattataattagcttcatggaagtgagtgtgcagtaaaccattgccctaggtcttatcaaatgcctattggctaastagacgtgctcacaggttctcacttttgacagaatctccatatgccacacagagacatgtgcacacgtacccaggcacg

SEQ ID NO: 111126 - DNA, 596 bp, Homo sapiens
aagcctccatctcaaaaaaaaaaatatatatatatatatatatatatatatatactttactatgataaagacattttataarcaccatttaccatttgatcacctattaagctaaaggctgcacatacatttcactaatccttagaacaactttgttcagtaaaaattattcctggtttacagaggagaaaactgaggctcagaaaggctactcatttatttgaagtctcacagccttcataatgttattcatgcactctttatgccctagatagttggagaaattacaggggagaatctcagaaataactaaaataattgaagatgtaatcaagaaacaaaagtacagtgtttgaatagagaccaactaaagacagctgggactggttcagtctgcctataattgaaaggtaaatcactaggaaagggaaggagtctctgggtttcaagatgaaatagaagtcatgagaattctataaatttcaattcaagttcactgaagagagctaggagtcagctactgtttgctgcagataatattcagtaaggagctaactgctaatgcactggcctggggaagtgtttagtgtcaaata

SEQ ID NO: 111127 - DNA, 596 bp, Homo sapiens
aagcctccatctcaaaaaaaaaaatatatatatatatatatatatatatatatactttactatgataaagacattttataaacaccatttaccatttgatcacctattaagctaaaggctgyacatacatttcactaatccttagaacaactttgttcagtaaaaattattcctggtttacagaggagaaaactgaggctcagaaaggctactcatttatttgaagtctcacagccttcataatgttattcatgcactctttatgccctagatagttggagaaattacaggggagaatctcagaaataactaaaataattgaagatgtaatcaagaaacaaaagtacagtgtttgaatagagaccaactaaagacagctgggactggttcagtctgcctataattgaaaggtaaatcactaggaaagggaaggagtctctgggtttcaagatgaaatagaagtcatgagaattctataaatttcaattcaagttcactgaagagagctaggagtcagctactgtttgctgcagataatattcagtaaggagctaactgctaatgcactggcctggggaagtgtttagtgtcaaata

SEQ ID NO: 111128 - DNA, 596 bp, Homo sapiens
aagcctccatctcaaaaaaaaaaatatatatatatatatatatatatatatatactttactatgataaagacattttataaacaccatttaccatttgatcacctattaagctaaaggctgcacatacatttcactaatccttagaacaactttgttcagtaaaaattattcctggtttacagaggagaaaactgaggctcagaaaggctactcatttatttgaagtctcacagccttcataatgttattcatgcactctttatgccctagatagttggagaaattacaggggagaatctcagaaataactaaaataattgaagatgtaatcaagaaacaaaagtacagtgtttgaatagagaccaactaaagacagctgggactggttcagtctgcctataattgaaaggtaaatcactaggaaagggaaggagtctctgggtttcaagatgaaatagaagtcatgagaattctataaatttcaattcaagttcactgaagagagctaggagtcagctactgtttgctrcagataatattcagtaaggagctaactgctaatgcactggcctggggaagtgtttagtgtcaaata

SEQ ID NO: 111129 - DNA, 497 bp, Homo sapiens
gccttaggtctgcatgtctgggagcagtgcattctagccccacctaggccagtgggattggccatgtggccataatccaggtgatctgaatttcactatgttttaatctgtaatatggaatgatttctatttgccaagcttagtacatagggttagggtgaggagtgacaggatctaaacacactttgagaaaggaaagtgttatgcttctccaccctgccagagtcagaggggtgatcggggctgctccgccacaagctgaaggtttcactgtgctataaaggaaacttccatccaaaggaatcgttctgctagcaaaacacagacatgcacacagctgaaacaacttccacrcacagtgtatgatttcctattctgcgcacagagagaaaggacagatgtgttagcagaggattactgttggaataattatgttagctaagacacaaatgggctcccatgccagctccagttttgggttctcactgaattgaatt

SEQ ID NO: 111130 - DNA, 546 bp, Homo sapiens
gggtttctgcgagtagaaacatgtaagctgcagagagatcatttttgtaaactccatgcagatagatgcacagagaaagagctggaagaacccacactgcatggttagcactgggaaggaagaacaggctttcacgttttacctaaggtatttgttcactgattatgttttaagggtatatgctcattttgaaataaaaaaggacttttcaaaagatgcacccagtaattatatgcattggggaggtgacttagagcaggaatactgctgaataatttggttcaaacatgaaacctacacaagacaaagtcacttgacagaggatgactcttcagatgttcagggaaactcacgcactcactcacacwcgatgcatcggccgggctccctgatgcccccaacgcctctcctatgtccaaggaaatacttctgcagagcacgttagagtttccaatgcatgtgtgttatctcagagacaaagggcagaaaggggaaaaaacagaaagtacagtacggtaagtctcaaatttcagcatcctgttgtct

SEQ ID NO: 111131 - DNA, 621 bp, Homo sapiens
cagccatgaatccagaggtcataagatttgtaacttccccaattactcctgtaaataacatcatcattgtagagcctgaaactggccttttgagatgtgtttwcagacttttgcatttctgactgctggacgactccaccaggaccagcaactcctgtggtccccacccagaagcggactcagtgcatgaggaccattttccacacccccatgatcatatccccaaccagtcagcaatacccattctctagccccccgcccaccaaactatatttaaaaaacactagcctccaaaatttcagggtggcttatttgagtaataataattctccattctcctgttgagccagctctgtgtgtattaactccctctctactacaatttccctgtgttgggaaatgggccctctctgggcagtgggcaagaagaacctgttgtgtggttacaacatccaccacttcattaccaaacactaatgaaacagaaaggcctcattttagagggactgacccttgagtgagcagatccatctgccggagattttccaaggctcctggcctgctccccacgcccagtagccatcaagtcaactcttgaaggcagggtggatgtctgaattc

SEQ ID NO: 111132 - DNA, 571 bp, Homo sapiens
tgtctcctctttcctccacccccatcccccaggacaggaaaaggaggggaaatctcgacatggaaaaactctacagtgaaaatgaaggaatggcttcaaaccaaggaaagatggaaaatgaagaacagccacaagacgagagaaagccagaagtaacttgtactctggaagacaagaagttagaaaacgagggaaagacagaaaacaagggcaaaacaggagatgaggaaatgttaaaggataaaggaaagccagagagtgagggagaggcaaaagaaggaaagtcagagagggagggagagtcagagatggagggaggatcagagagagagggaaaaccagagatagagggaaagccagagagtgaaggagagccagggagtgaaacaagggctgcaggaaagcgcccagctgaggatgatgtacccaggaaagccaaaagaaaaactaataaggggctggctcattacctcaaggagtataaagaggccatacaygatatgaatttcagcaatgaggacatgataagagaatttgacaatatggctaaggtgcaggatgagaagagaaa

SEQ ID NO: 111133 - DNA, 519 bp, Homo sapiens
ccactgctgggaggtatctcccattccagagccatgggggtcagagacccacatragcaggcagtctgtcccttagtagagctcaaacactgtgctgggaaatgtgctgctctcttcagagccggcaggcaagaatgtttcagtctgctgaagccgtgtccacagccgacccttcccccaggtgctctgtcccagggagataagagttttatcatctataagctcctaactggggcggctccctttctttcagagaccccctgcccagagaggaggaatctagagaggcagtctggctacaatggctttgcagagctgtggtgggctctgcccagttagaacttcactgaggctttgtttacactgtgaagggaaaactacctactcaagcctcagtaatggcggacaccctttccctcaccaagcttgagcaacccaggttgacttcagactgctgtgctggcagcaagaatttcaagccagtgtatcttagcttgctgggctccatgggggtggtaa

SEQ ID NO: 111134 - DNA, 472 bp, Homo sapiens
tcatcttcactccatgccagcaactctcactgatgtcaccattggcctttttgccactacatcattggataaacttaatcaccattttgtttacacttttagcaacaataaacactactgtctaatagattagtggtgaaaaaatgttcctctgatttaaacatgccacattcttttttatttcctcctacatctctagcttattcttctactgaatactatgaaagtcatttagataccctctcccttgactcctacaataaaacctggaaactaaactagcctatttctttagactttttatagctagctgtgactaagctatatattgctaatatgttctggaaaatataatttagtcagaagtctytgagggaggttatattttcactttgcccattatgctcatctctgcttttacttttactatctgacccacacattccattttttgtagatggcagcagttact

SEQ ID NO: 111135 - DNA, 636 bp, Homo sapiens
ttaatttccctcaataacttttccattgcattcacaacttggctaaccatctggcacaagaggcctaattttcaacctatcttggcttttactaagatgccttcttcactaagcttaatcatttctacttttcgatttaaagtgagagacttgtgacccttccttgaacatttagaggacattgtggggttattaactggcctggtttcaatattacgtcttagggaatagggaggcctgaggggagagagagagagagagataagggaatggctggtcagtggagcagtcagaacacacacacacaacatcgattgattaagttcactgttttatacgggtgcggtttgttgtgccccaaaacaattccaatagttaacatcaaagatcactgatcasagatcaccataacagatacaataagaatgaaaaagtttgaaatgttgtgagagttgccaaaatgtgacacaaagaccgaaagtgagcacatgctgttgaaaaagttatgccaatagacttgctcaatgcagggttaccataaaccgtcagctggtcaaagaagtgcaacatctgaaaagtagaataaagtggagtgcaatagaatgaggtatccctgtatatgttcttgcaaaacat

SEQ ID NO: 111136 - DNA, 614 bp, Homo sapiens
gttagtttctgatatgaagtgtcaggggaaacagtaatgctattgaaggcaaaataacactactatgtatactactatgtatacttcctaatcaaattgatatagttttctcatctttgtggacgacgttgaaccatcagcttttaattcagaatacagtcttgccgagcatggcaagaaggcagcagaactgttggatccgaggcagcacatggtgtcaggatatgagcatctccaaggtaagcttataaagagaagaagctgattacgtatgcctgttgctgtgtaagacctcaagactataaaacatcacttttggagggaggagaataataatgactaggactgaatatccctctcaacagtgataagatggagacttaactaagagttacatttttatgcattagatattaaggaatttgctctcttttatgctcctgagattgtgggttgagatgattgcacattacatatggagtcctcattaaggtttactaagaattcttatactgcacttacatgcaccgtggaccaatttcaatctctagaattggagytaattcacttcaagataacaatcatgatcattttttaaaaaggtacatagatat

SEQ ID NO: 111137 - DNA, 549 bp, Homo sapiens
actgacatacaagcatcgtcaccctactggaagacaagcgccttaggagaaggttcaatgtctaatygaactgtgagtctcccacaaattctggtgaaaatatacttgcacacagtaggtacttaaatatttgacaaatgaatgaaaaaattacaaatcagctttctcggttataacacaagcttttcagcacaagaacttgtgcccatttacttaatttttttaaaacatacaaattgtgaagactaatcataatttccatgaaaccagccctttttggttcctagaatacccgagaaaggtgcttattttatttgaagacaaaaaaagtagcatcagttagctaggtcaggcaccatctaactctactattcactgaggccaggaacatttcctagggcctcagctttggtccttctggatgaagcctcagggggactttcctctgataatggactaaacgattcaagatgaccttaatgaccaccctgtttaaaacagcctccttatttctccaatacttcttctccaaacattgatgtttccacc

SEQ ID NO: 111138 - DNA, 453 bp, Homo sapiens
ttccctattacacatttccttttacacaggcaaatattatacagaaaggctagaaattattagaagtgaacttctttattatctgactgcttgagaaagaagttatttatgtaattcaagacattaattttagagaatggagtcttaaagattaaaggcatcatgcatataatttatttctgatcacagaaaagcaaatttaattgtgaaaattaatacaaaaagttaatattttaattattagacctacttagtttaggacaactcagatgagccactttctttctttttgcaaatagttaatgcttgtcasagaatccagattttgtcttcccctggccagattcttcttgtagaggataagtttcaaagagattaaaaacctttagctcaggtttaaaagtggggggaggactcctggagtcttttagggaaagatataatgtttgtcta

SEQ ID NO: 111139 - DNA, 566 bp, Homo sapiens
tgctgtcttctgtgtatatgctggtttgtgtgaggttttactaaaccagtatgtggattaatctagtttcacgagtgacaggtaagtgatttagaaagatccgttcctttagcacgatgttaatcttgaatcgtttggaggtagaatgcctagagtgagggtgaaagagaggacctggggacaggaagagagggcagctggagcaattatgctccttccctcagaccgttttggcctggactctgactcttggacttctaccagacagagaggcggtaggcttgtggccatgttttgcgaggaaaatcagaatctaagaatctctaaggcaagagcaagaatggattgggataggggaagtgataggaaaacagaggcactaagaagagggttggttttcatgtactgcatagttcattyccttagttgagaaatcaggtatctcaacctcagatatcttctgtccagcatatcgctggccagatctgattcatatgagggatccagagtaaggaagcatctgttagccaagtctttggttaccccaaattagctcaggtccttta

SEQ ID NO: 111140 - DNA, 596 bp, Homo sapiens
aaagtgtttgtgtttcttaatttaaatgcttctcagagattccatttaaacaacttcattatgaaaatggagacttaccatgcctttttgatattgttcagagaaaattgtcataaataatacacacagtttgaaatggttgtacatcttatgaatcaaggggtggcatgtaaaaaggttcctcagtgcctcaatgtggaaaatatcatagaatgttattcttcaattgattccttccttcactttggtgtttatatggtatcttagatattttatgttattttaattatattttgtgcctttttatttggttaaaaatgcctactacttaaatattaacagatttttaaatatccctttgaactcttccccattcctgtacctcctttccctttttccgttgtaatgtcagccacctgaacataacccagaaaactaggtatcagccaattgatgtttcagtggaaataagagaaagaagcrcttactatttctcaatgcttaattgaggaaaagcacatgatatcttacatattttaaattggaggggataatagggtcaagttcatgcattatattgtggacatcttaatcct

SEQ ID NO: 111141 - DNA, 417 bp, Homo sapiens
cagtgctttgggagtctgaggcaggaggatcgcttgacaccaggagtttgagactaacctgggaaacatagcaagaccccatctttatgaaaataaaaaaattagccaggagtgggggtgcacacctgtggtcccagctacttgggaggctgaggcaggaggattgcttgagccccagaggttgaggctgcagtgagccatgattatgccactgcacatctgtctgggtgacagagcaagatcctgtctccaaaaaaaaaaaaaaaaaaaaccaaaaaaaagtggtattgggcctgtctaattgcmaagccacattctttactgcatgctttagtccattgttttttaaactgcagatcatgaccacgaatgggtcatgaaaccaatttggtaggtctccaacagcactttggggaa

SEQ ID NO: 111142 - DNA, 417 bp, Homo sapiens
cagtgctttgggagtctgaggcaggaggatcgcttgacaccaggagtttgagactaacctgggaaacatagcaagaccccatctttatgaaaataaaaaaattagccaggagtgggggtgcacacctgtggtcccagctacttgggaggctgaggcaggaggattgcttgagccccagaggttgaggctgcagtgagccatgattatgccactgcacatctgtctgggtgacagagcaagatcctgtctccaaaaaaaaaaaaaaaaaaaaccaaaaaaaagtggtattgggcctgtctaattgcaaagccacattctttactgcatgctttagtccattgttttttamactgcagatcatgaccacgaatgggtcatgaaaccaatttggtaggtctccaacagcactttggggaa

SEQ ID NO: 111143 - DNA, 663 bp, Homo sapiens
atgtggtcctcgtgtcatcggcattttcttcatatttccacctcagtggagtgatcctggctctgctttgccgctgtgctttccttttaattgctgtttcaccaggtctccttagcagcagcagcrcctgaaataactcctgaggaagctcctaagtgaattctcataatttgcttctcaattctcccaattgattgaggcactctttcttgagtgctttgcagttctgtgtaagtggctgatgtttggggtcactgctgaatgttttgtttgaatatccctttcatgatgaagggaagactgctgcttttaactacatggggtgatgccctttgtggtaagccttgaaaggcaaaaatcgtttttcatagtgatatgccaaatgaaattattctctttgtcactttgtccttttatcctttcagtctgataacctcagttcttgtgatttgtttgttttcttcaattaagcttagttgtttcctgtacccaggtgcatgctatttctgctcttggttatgatggtgtgtggagcatatttctgacctggaagtgtggtttctttgactgagagccacatcagcatgccttccatcctctacttcctttgcattatttccttttggagggctcagtttgccatcatttaatctatagatgatt

SEQ ID NO: 111144 - DNA, 544 bp, Homo sapiens
agatttttgtcagcagtgttcaagtataaaaatattgtggccaggtgcagtggttcatgcctgtaatcccagcagtttggaaggctgagacaagaggatcgcttgaggccaggagtttgagaccagcctgggcaacaaagtgagacaccgtctctacaaaaataaaaaaattagttgggcatggtggcgtgcayctgtgattccagctacatgggaagctgaggcaggaggtcaaggctgcagtgagttatgttcacacctctgcactccagcctgggcaacagagctagactctctctctctctcttaaaaaaaaaaaaaaaaaggccttagccttggtatgctttagtttttatctgataatttatttttatcctttaacaatgtctatcatacaccatcctgcaggtttttcatttttagattctatttcagatatgattctttttttttttgagatagagttctgctcttgttgcccaagctggagtgcaatggcacgatgtcggctcactgcaccctccggctcttgggttcaagcagt

SEQ ID NO: 111145 - DNA, 530 bp, Homo sapiens
tgttttatactgctatattttaggttccaaaagtgagtaaaaataatttttattaaaaaaattagaacagtagactatggtgtgctattttcatgattagccttctttggcaagctatgctgtcagacacrttaaagcacttagtggaatagaatacatttaagtgggtagtcaataaatattgatgatgatgatgatagcattcgcagtgaaaagtatgaagtaaccatggcactttgcaatttgtggtaaacaatggcaattagcaacttctgctgttgttgtcttccaggcaagtgcctgaaaacattaattaactggagagattgctgcaaagtttcttggtaacaggcagcctttaatcagccaagcagtggaaatcggtatgagctggatgtttagaataaagcattaattgtatgaattacagtgtttcatcgtaattataagtcatcaaagaggaatcccttgggagagaaatatctgtggaggctattatggagaggtcaacgtggtactgaggactggcc

SEQ ID NO: 111146 - DNA, 630 bp, Homo sapiens
attttcatgattagccttctttggcaagctatgctgtcagacacattaaagcacttagtggaatagaatacatttaagtgggtagtcaataaatattgatgatgatgatgatagcattcgcagtgaaaagtatgaagtaaccatggcactttgcaatttgtggtaaacaatggcaattagcaacttctgctgttgttgtcttccaggcaagtgcctgaaaacattaattaactggagagattgctgcaaagtttcttggtaacaggcagsctttaatcagccaagcagtggaaatcggtatgagctggatgtttagaataaagcattaattgtatgaattacagtgtttcatcgtaattataagtcatcaaagaggaatcccttgggagagaaatatctgtggaggctattatggagaggtcaacgtggtactgaggactggccagggtcagtgtggactctagtgtttgctttagtcaccattaaaaagtatctgtgctgaatcatgatggcattggatctcagttgtcccatggcttttgttgttgttgttgttgtcagtcaggtactccgagggcatgggtaattgataacaggactttgagtcaagtacaaaggaagaatagctgc

SEQ ID NO: 111147 - DNA, 530 bp, Homo sapiens
tgttttatactgctatattttaggttccaaaagtgagtaaaaataatttttattaaaaaaattagaacagtagactatggtgtgctattttcatgattagccttctttggcaagctatgctgtcagacacattaaagcacttagtggaatagaatacatttaagtgggtagtcaataaatattgatgatgatgatgatagcattcgcagtgaaaagtatgaagtaaccatggcactttgcaatttgtggtaaacaatggcaattagcaacttctgctgttgttgtcttccaggcaagtgcctgaaaacattaattaactggagagattgctgcaaagtttcttggtaacaggcagcctttaatcagccaagcagtggaaatcggtatgagctggatgtttagaataaagcattaattgtatgaattacagtgtttcatcgtaattrtaagtcatcaaagaggaatcccttgggagagaaatatctgtggaggctattatggagaggtcaacgtggtactgaggactggcc

SEQ ID NO: 111148 - DNA, 559 bp, Homo sapiens
tgttttaactatggatccaatttgataggtatgcttcagccctcatttcaatcgaattgccactttcatcatttttattattaccctacatgtcgctgtaactattaagaacatcaatgagtgcttgtactttatgtccaagtttttcatctggagatttttaaatggatgttggaggaatgttgtccatgtcaatatgccaaatattatctcagctacagggttataaataatacagcytcaatttatgtcacctataataacatttcttgctttctatggcaaatctcctttcaagaacccctaacaagtgtgtaatcagttagggggtcttgtggctctgggatagggcaacatagaactttttccttaatcattacaaatctatagcaggatgataataataatcagaaattgagtacaatacctaagggccagtctctttacagacatcttatctaattctcaaaacaaccttacgaagtaaatgctttcattctcgttgtacagatctggaaactcaggcttaggaaaaataatttccttacctgagatcaga

SEQ ID NO: 111149 - DNA, 569 bp, Homo sapiens
tgggtgatttctgcatttccaactgaggtacctggctcatctcactgggactggttagacagtgggtacagcccatggagggcaagccaaagcagggtggggtgttgcctcaccagggaagtgcaaggggtcagggaactccctcccatggccaagggaagccgtgagggaccgtgccatgaggaatggtgcactctggcccagacactacgcttttcccatgatcttcgcaacctgcagatcaggagattccctcgggtgtctatgccaccagggccctgggtttcaagtacaaaactggacagccatttgggcagacaccaagctagctgcaggaggttttttttcatatcccagtggtacctgaaatgccagtgagacagaaccrttcacttccctggagaggggactgaagccagggagccaagtggtctagctcagcagattccacctccatggagtccagcaagctaagagccactggcttgaaattttcactgccagtacagcagtctgaagtcaacctgggtgcttgagcttggtggggagagggctgtccaccattactg

SEQ ID NO: 111150 - DNA, 611 bp, Homo sapiens
acctgattttccaggtgccatctgtcacagctttccttggctaggaaagggaattccctgaccccttgtgcttcctgggtgaggtgatgccttgccctgctttggctcatgctcagtgcgctgaacccactgtcctgcacccactgtctgacaagtcccagtgatgtgaaccccgtacctcagtgggaaatgcagaaattacccatcgtctgcatcagtcttactgggagatgtagattggagctgttcctattccaccattttggaaaaaaaggtctggttgtgatttttcccagcttcttctaaaaattatttttcatcttctgctttgactggcaggtccttgcctgaaagaatagctttatctttgccactccttcctttatttgctgtagagattcycagttgttgtgctgaaatggcttacactggggatccagctgcacaattgttcagaaggagcattcactgtggatttggtatattatgcaacatttggtgtcaccagctaaggcctgacaagattcatcactcagttttctgggacaactgaaattggaatggagtatggatttggtcagacagattcctcagtatggaaacctagtggt

SEQ ID NO: 111151 - DNA, 578 bp, Homo sapiens
atattggtcatgcttgtctcaatattcagacctcaagtactctgcctgccttggcttccaaaagtactggaattacaygtgtgaatcgccatgcctggcccctgattgaatttctaattgaataaaaaagtccatcttgcaaaaccttattttctacatcatatttttgatgagtttctttatatgtctcataattcaagaaaaataatataattttaatgtattatacttggaaattaatttatttttattaatatgtaactaaaatagtaggtatatttagaatgttattttgctttggtgtaaagttctgaagttttagaaatttctgtaaaaatctaatttggataattagttacattagttgattgcactcagttttttttcctcaggattttcttttgtaagaaaattcaaaattgtttcaagatacattgagatgtttaattatgtgaaatagacttaaaggtattttctttgaaaataaagtttttataacctgtcttttctactaataatatgtgattacttcttctaacttactagaaattaattcgttttcatcttgccttcatcta

SEQ ID NO: 111152 - DNA, 652 bp, Homo sapiens
atgcctgagattatgtataataatcacctcagaaatccatattactcatcatcaaataagcatttttattatcaaataaaccttttaatcactgacaaaaaagtactgcttcctagtcctgcaagataaaatatatatgatatacttttatataaatatataatctataacttcatgtaatatacacataatttttgcaagcctgaatgtaatctcatagattttgagcctcttacaaaagtgaccaataacacttggtccgtgtttagatttgaaaaatctcaactaggccaggccctgtcactcacatggatagccttagcactttgggaagccaagggagtcagattacttgatttcaggagttcaaaaccagcctgtgcaacatggtgatatcccatctctactaagatgcaataaattagctgagtgtaattgtctgcactagtcccatctayccgggacactaaggcgaaaacatcacctgagctgtaaccgtgttgctgcattgcagactgagtaatgaagagaagctgtgccacacaaacacacacaaccacacatgcacacaaaaccacacacacacacagagaaagagtttagtgttctttcaagaaggtatttcttagatagctcagaggtaggaagaaaa

SEQ ID NO: 111153 - DNA, 599 bp, Homo sapiens
aaaactagaaattgtttatgagataaaacaatatcttaaggccaattgcaaggacacttggttctatgaccataagcaaaaaagttttgtcaacaattccctttagaagtccatttctgaaaggatttctggaaggcttatagctgtggtgattcagttcccttgggtcccaatctgactttaaaaaaatgatgatcttaaatcatatttgccaattcatccaagttaagaattgaattaatattttactctgtgtcatacttacgctttctacattcattacttttttctataaattctgtgctcattttataactgagacacacattcagacttatttttgtgtttagttcactttgcatttaattttcattctttctctgcagttcattaagtatatgacttttaagactgcattcacatcctatattcagcagtgctatttggttcctgagtattaattaataaattacatgtgtttcaatttactgaaggcttatcatgygccaggcactttacatactttatctcaaatctgacctccccccgccatacaaggtagatattactacttcttattacaggtgagttaactgagg

SEQ ID NO: 111154 - DNA, 637 bp, Homo sapiens
ctcaatgccatgtctctcacataatattataagaaaaatagaagaacagctaaggacatttttccccccactggtgaccactttattaggaagagaaaaatagcaaaacaactagatatagagaaaataaatcgaatgccataataatgctgaaaatagtggctaagtacaattgacaaattagatcacatgcagtagataatgaaaaggagcattatgtttgctgtgaactttgcagagttcacaggagagagatgtttctgaaaaggtacacataactatttttaaactaaactgaattatattttaaacacactaggtraggcatcaatttaagtaaatattggtcaactacaggtgccagagataatcattcatgctttgtaaatgctaatctgtaaacttcatggtaaagatgtccatctagaaaccataatagacagttgttgtgattttcttaaattacagcaaaagcatatttagtgtatttaatgggttctttgaagatagaaagacttatattatcagtgttttgtaaaaatgggattataaactgctctggttaaaataattaaatttggagaggctgtattaaaaaaaaaaaactatggtaggaagaagttctaaaaagcagctg

SEQ ID NO: 111155 - DNA, 637 bp, Homo sapiens
ctcaatgccatgtctctcacataatattataagaaaaatagaagaacagctaaggacatttttccccccactggtgaccactttattaggaagagaaaaatagcaaaacaactagatatagagaaaataaatcgaatgccataataatgctgaaaatagtggctaagtacaattgacaaattagatcacatgcagtagataatgaaaaggagcattatgtttgctgtgaactttgcagagttcacaggagagagatgtttctgaaaaggtacacataactatttttaaactaaactgaattatattttaaacacactaggtgaggcatcaatttaagtaaatattggtcaactacaggtgccagagataatcattcatgctttgtaaatgctaatctgtaaacttcatggtaaagatgtccatctagaaaccataatagacagttgtygtgattttcttaaattacagcaaaagcatatttagtgtatttaatgggttctttgaagatagaaagacttatattatcagtgttttgtaaaaatgggattataaactgctctggttaaaataattaaatttggagaggctgtattaaaaaaaaaaaactatggtaggaagaagttctaaaaagcagctg

SEQ ID NO: 111156 - DNA, 637 bp, Homo sapiens
ctcaatgccatgtctctcacataatattataagaaaaatagaagaacagctaaggacatttttccccccactggtgaccactttattaggaagagaaaaatagcaaaacaactagatatagagaaaataaatcgaatgccataataatgctgaaaatagtggctaagtacaattgacaaattagatcacatgcagtagataatgaaaaggagcattatgtttgctgtgaactttgcagagttcacaggagagagatgtttctgaaaaggtacacataactatttttaaactaaactgaattatattttaaacacactaggtgaggcatcaatttaagtaaatattggtcaactacaggtgccagagataatcattcatgctttgtaaatgctaatctgtaaacttcatggtaaagatgtccatctagaaaccataatagacagttgttgtgattttcttaaattacagcaaaagcatatttagtgtatttaatgggtyctttgaagatagaaagacttatattatcagtgttttgtaaaaatgggattataaactgctctggttaaaataattaaatttggagaggctgtattaaaaaaaaaaaactatggtaggaagaagttctaaaaagcagctg

SEQ ID NO: 111157 - DNA, 399 bp, Homo sapiens
atataaatctgatttcaaaacattttcctatatcaccctatttatgaattgtggcacttccacacttaagaggcggaatgatgtgcctggattggagatcaggacccaatctgcaattatctagcttattttyccacacacaccccaaccatattcttcttttataaaataagagagtaagattaaagaatatccttaaatctagaaggcttctgaatctccccagttagggattaagtagcaagaaggacatcatgaaatgaaaagtattgtggaaaagggatacattcaaattcatgagttatttcatgactagtattaattcaaactagatactaataaaatgtattcaagggtattcctgactgactcactttaaaaaaatctaatatatggtgc

SEQ ID NO: 111158 - DNA, 399 bp, Homo sapiens
atataaatctgatttcaaaacattttcctatatcaccctatttatgaattgtggcacttccacacttaagaggcggaatgatgtgcctggattggagatcaggacccaatctgcaattatctagcttatttttccacacacaccccaaccatattcttcttttataaaataagagagtaagattaaagaatatccttaaatctagaaggcttctgaatctccccagttwgggattaagtagcaagaaggacatcatgaaatgaaaagtattgtggaaaagggatacattcaaattcatgagttatttcatgactagtattaattcaaactagatactaataaaatgtattcaagggtattcctgactgactcactttaaaaaaatctaatatatggtgc

SEQ ID NO: 111159 - DNA, 445 bp, Homo sapiens
ataaaacattcaggagaatacttggaagataaggttgaggttctcttgaagaaatcccaacaaaaatcatagaaaaggaagaaagaaaaaaaaaactattgaatatgataagaaacatccgaatgtaaagagttccagaaagattttttaaaggagtaaattattgaacaaagaatatacaaaaatctcctggaagcgaagtttctgagttttcagattatggcagcagtggaggtttgtcactaggatttcccctcagtaagaacttgctgttcagctgcaaggagtacagtcagcctccagctgtttccagcctcatcctatacctcagctttcatgccaaggtcttgctcytcccaggcaacaaccaaccagtgactcagaatgacaggggtactaggtcttggccaattatactcaattatacccaatgttagagtcctct

SEQ ID NO: 111160 - DNA, 586 bp, Homo sapiens
tagcattttctttagcatttcttgtaaggccagtctagtggtgacaaatttcttcagcatttgtttttctggaaagggctttatttctccttcatttctgaaggatagctttatggatatagtattattgcckgacagatttttttttcctttcagcactttaaatataacaacccattttcttctggcctgcagtttctgttgagaaatctgctgatagtctaataggggcttcctttatatataacttgaaagttttttcttgcagattttggaatcttctctttgacttttggcagtttgattaacgagtactttgaagaggatcattttgagttgaatctaataggggacttttgagcttcctgaatctatctagatataaatatatctcccaatatttgggaagtttctgtctattatcctgttaaataggctttctgtgtctttctccacctcttctctctctaataatcctataatgggaacatttgttcacttaatggtgtttcataagtctcatacactttctttattcttatttgtttatttatttttctctgactgttattttaaaagatctgta

SEQ ID NO: 111161 - DNA, 620 bp, Homo sapiens
gtaaaacgaggccgcttaccggatttgaaatttgtgagatgttcctagggctggtcggtctgaggacccgaggtcgtaggtggatctttctcaccgagcaaagagcaggaggacaggggattgatctcccaagggaggtcccccgatccaagtcacagcaccaaatttcatgcacatccatgtgaagagaccaccaaacaggctttgtgtgagcaacaaggctgtttatttcacccgggtaaaggtgggctgagtccgaaaagacagcaaagagagataggggtggggccattttataagatttgggtaggtaaaggaaaattacagtcaaaggggggtcgttctctggtgggcagrtgttctctggggtcacaaggtgctcagtaggggagcttttgagccaggatgagccaggagaaggaatttcacaagataatgtcatcagttaaggcaggaattggccattttcacttcttttgtggtagaatgtcatcagttaaggcaggaactggccatctggatgtgtatgtgcaggtcacaggggctatgatggcttagcttggactcagaagcctgacagtatcatctctagatgataaaggtctaaagttgtcttcagt

SEQ ID NO: 111162 - DNA, 621 bp, Homo sapiens
tagctctgagtttagcagttactctcttctacaggcactgaacaagcatcaattcagcatcagccacatagttgcaaaaagagaaaccagatttgtttaaagaaataaatgaacatatacaaagagtgtcaggtagcttccaagatttgggggaatctgcaaaagcagttttgggaaacaagcaggaatcaagagggctctggagtctaaaagacaggaagaycctggcatgatgcttcatctcatagtactcaatggttctgccagcatgcatctcaactattattgtctgccagctagagtgaatttgaactctctcttaatttttgcattttttgttcacaactcaatattttggagagcagtatcaaatttattcaacatatattcttgattatctcttttagtgtcaggcagtgttctagatgctgaaaatatagtaattaacaaaatagattaaaatgcctgtctttatgaagcttatagtattggagaaaagaaatatgataaaaataaatatgataaataagtaaaatatattatataattatatacctggtcctggtttctctgaagtaagtagagggtgtatgtctttatttggcttctatactcatcaaa

SEQ ID NO: 111163 - DNA, 621 bp, Homo sapiens
tagctctgagtttagcagttactctcttctacaggcactgaacaagcatcaattcagcatcagccacatagttgcaaaaagagaaaccagatttgtttaaagaaataaatgaacatatacaaagagtgtcaggtagcttccaagatttgggggaatctgcaaaagcagttttgggaaacaagcaggaatcaagagggctctggagtctaaaagacaggaagaccctggcatgatgcttcatctcatagtactcaatggttctgccagcatgcatctcaactattattgtctgccagctagagtgaatttgaactctctcttaatttttgcattttttgttcacaactcaatattttggagagcagtatcaaatttattcaacatatattcttgattatctcttttagtgtcaggcagtgttctagatgctgaaaatatagtaattaacaaaatagattaaaatgcctgtctttatgaagcttatagtattggagaaaagaaatawgataaaaataaatatgataaataagtaaaatatattatataattatatacctggtcctggtttctctgaagtaagtagagggtgtatgtctttatttggcttctatactcatcaaa

SEQ ID NO: 111164 - DNA, 644 bp, Homo sapiens
acaatactaccttatagtgttctgagaagtgaatgaattaattcatatggagtgcttatgaatagtgtctggcacatagtaattactgtactcaaaaattgttagctattgtattgaattctattctaagtagttactcagaaaactactgtgtttctctttcttctagcaaatttgaattgagcaaccctctggctgttgatgataaagagatgaatgagagaaaattaccatgaggttctataagtctagaacataggagcaagatctgaccagggacagagacttcccaggtggaagaaaaaatgatggatgtaagcaaagtgttcagacttcactatgttgawaatgcaaattttcaaaagcttttaggcagaggaataggaataaggttatacttgtgtatatattattgtgactgcaatatggaaggtgttagaaggtatagcaagatgagggggagggacagttagaaagcatttttagtattccaggaagaagacagagggtctgaactagggtacagttaataaggatttactcaaagagatgccctggagagactgtaagtatgtcaactatgggaatgggtgaggtgaagaaaagaaaataatctagggtaaattctacaggtctgatttagg

SEQ ID NO: 111165 - DNA, 644 bp, Homo sapiens
acaatactaccttatagtgttctgagaagtgaatgaattaattcatatggagtgcttatgaatagtgtctggcacatagtaattactgtactcaaaaattgttagctattgtattgaattctattctaagtagttactcagaaaactactgtgtttctctttcttctagcaaatttgaattgagcaaccctctggctgttgatgataaagagatgaatgagagaaaattaccatgaggttctataagtctagaacataggagcaagatctgaccagggacagagacttcccaggtggaagaaaaaatgatggatgtaagcaaagtgttcagacttcactatgttgaaaatgcaaattttcaaaagcttttaggcagaggaataggaataaggttatacttgtgkatatattattgtgactgcaatatggaaggtgttagaaggtatagcaagatgagggggagggacagttagaaagcatttttagtattccaggaagaagacagagggtctgaactagggtacagttaataaggatttactcaaagagatgccctggagagactgtaagtatgtcaactatgggaatgggtgaggtgaagaaaagaaaataatctagggtaaattctacaggtctgatttagg

SEQ ID NO: 111166 - DNA, 644 bp, Homo sapiens
acaatactaccttatagtgttctgagaagtgaatgaattaattcatatggagtgcttatgaatagtgtctggcacatagtaattactgtactcaaaaattgttagctattgtattgaattctattctaagtagttactcagaaaactactgtgtttctctttcttctagcaaatttgaattgagcaaccctctggctgttgatgataaagagatgaatgagagaaaattaccatgaggttctataagtctagaacataggagcaagatctgaccagggacagagacttcccaggtggaagaaaaaatgatggatgtaagcaaagtgttcagacttcactatgttgaaaatgcaaattttcaaaagcttttaggcagaggaataggaataaggttatacttgtgtatatattaytgtgactgcaatatggaaggtgttagaaggtatagcaagatgagggggagggacagttagaaagcatttttagtattccaggaagaagacagagggtctgaactagggtacagttaataaggatttactcaaagagatgccctggagagactgtaagtatgtcaactatgggaatgggtgaggtgaagaaaagaaaataatctagggtaaattctacaggtctgatttagg

SEQ ID NO: 111167 - DNA, 613 bp, Homo sapiens
tttggaaaattttgtgtttattttcgtttatgctttcagtatgttgtagatagaacagcatatataaaagatgagataacatggaagaaagaggctgaggggagagaaaaggaaaagaatggagattattgtagaaaaaggcaggaaagggatgagaaacaggagaaatgaaaaagttcagagattcttatccagtattaaggagacactaatctgtagattccatgacagaaagcaagttgaaggaggggctttgggttytcctctgttgtcggagctttatatttattctcttgctgtaaactgtacatgttacaaagccagaccagatggtgggggaagaggtccttgtgcttgtatgactgatcaccgtctccttataaaatttttattttccttttgagacagtgtctcactctgttgcaaggctggagcacagtggtgcaattatagctcactgcagccttgaactcctagacaaaacaatcctcctgcctcagcctcccaagtagctagaactacaagctcaagtcaccatacctggctcccactactttcttgactcccaaaggtttctttctcccaaagaacttttccagcactatttaattat

SEQ ID NO: 111168 - DNA, 632 bp, Homo sapiens
gattgcataaaactatgtgcaattatagctcttctgatattttggaactcttctaaatatttatgttcttatagaggtcaagaggtgaaaggcattacatatgttgtcctactgcataatcttatcaaggcagtgttacttctaatactgtcctgtggttggcgaaatgtggaggcgaaccatctgtcatcaataatgctgtcaagaagatttggaaagcatttgatcggtttttggcagtgtactatctgttaaaatattgttggaggcaaacctgggaagttctgatgcatttaaaggagacacaaatgtttcagcacatgggcagcctgatactgggaaggcaaagtgttttatttagaagaggcacagatttcagtgcaagtcaataaagaaaagaagtagtgctgtgtttgtatattcaagcatatatgstaggctccacaatggagcacttttaggcgctctgaaaagatggcattggaaaggagcatctgttgaacatattagggaaaactcctttagtacttaagagaaatctggcccataagggagattagaaagaaggcctgatgaaaaattggcttaaggagtcacagaagtaaggttctgcttaccagccccagagaaag

SEQ ID NO: 111169 - DNA, 571 bp, Homo sapiens
taatgtatcaaattttatggattttctttgggaaaattatttatttattgatggttatagaattacttgaaatcaatataaaaataagcagcaaaaatattttacttttaaattccaaccaaatgagtttaatttgcatgcatccaaagtacccaagactgcattgcaggcagcagctctgcccaacatcaaagacactcaggagatcaaaacaaaatcaagttctgcggaagtgattctcttattctttttcttaataggcatgtttgtgttttctctgttggtattggtcaattcaaggcaacattaaagtctgtgaacaccaccaagatttgaatgactccatcttaaccyaggaggtaatgaaaacatgcgaagtctgacatctgagaaagggtctgtgattgaaatctgaaaacctgtagctgcattgagaatgaaggacctttgtactgtttcattttccctcttgcagaggtgtgcaattgctgtcacaagattggatttatgttggaacatttcccctgccccttcaattttttttttttttgcatgagatctacatgaagat

SEQ ID NO: 111170 - DNA, 541 bp, Homo sapiens
ccaaattcaaatctgggatagaaaatgtgagactatgaagaataaactgctctgtatgatttaatacaaggttatcatcattgtggactgaagtgtctgtcttgaggaagaaaggattttctcaactctctagggccagtgatgacccaacagctagggctacaggtaatagggacatggtcagaggccatggtatgttaagctgattcctgcactatggtgtaggactaggtttagaggaaggttgaaagagatgactatgagggaactcttcttgagggctttgccaatgaactctagtgacagctaatatccaggttcctttttctgttctgcaaaataattctcttctgttatccccaaacctttggtaatgttttgctaactacatagtctagtcttagaastgcttacaaaattaactgtgtccacattgagacttaagcaatgtaagcatatccgtagcagcctggggaaacagtttgaaattgctggaatccacccatattgaagcctagagagcattaagccagacagggag

SEQ ID NO: 111171 - DNA, 633 bp, Homo sapiens
ctgcatttgcctttctctacttctgtttaattcctttcagcccctagacctcctctcactgacctttagactcttccagccctttccacgtggcatcttaattctaccttttgagttcacaacactatctttttttcctctggtctgtgtttggctcctccttcctggcacatttacttacttctgtaccttcatgactatcccttgtaatgtggccctgggattttctcctgctggggagcctcagctggtacagcctagagactatgcctctagcccctccccagattcctgaggcctagattccggagaccaatgggttttaacagagagaaaagacttctcctaccaactattgtgsaacaaaacatttcctgctttatcttattttttaagtgattccagggtcttctataaaagatacatggctcatcatttgggaaaagttatttcttttttaaaataactttactatatgcataaccagcacaaaataaatgacatcaacataatcaagagagtgaatatattaatcacctcaaaagttactgtgcccctttttaatctctcactacctcccttacctgcctcccccatccttgctgtgggtccaggcaatccctggtctgcttc

SEQ ID NO: 111172 - DNA, 623 bp, Homo sapiens
tcacagctgggtttccagggaccacaaaggcagactgaaactttctccattagctgtgagtgtgccctgctgaaccttgtgggcccagatggtgcttatttttaggcaccttcgtctttccatgactaactgggaacwgtaaagtatggagctgggtctaagagccaaggcaaagtctctatttcaggaaagcattacagctggggagaagctttggctcagcagtctcctgggttcctgcccctctgttaaaaggagagacgtctgttcaccttaagcacaaacggggtcatggacttggggctgaggaagccctgagaacatatcagtcccaaatagctacagctggtgcaaaaggagactgggcaaacagctgctgcttgactgttaccccgatgctgccccgatgggatgattctgcactgatgggctttcagcacttagtcctggcctgcctgggccactcatccacccgtgggcaggactccaagcctccaactttcatgactctttgctccaggccttgcccacactgcatcaaggccagcctagcatgaagctctcatgtcctcagaaggcacctggcagagaagctcagtgtgtgcagaaaagaagtacaaggt

SEQ ID NO: 111173 - DNA, 623 bp, Homo sapiens
tcacagctgggtttccagggaccacaaaggcagactgaaactttctccattagctgtgagtgtgccctgctgaaccttgtgggcccagatggtgcttatttttaggcaccttcgtctttccatgactaactgggaactgtaaagtatggagctgggtctaagagccaaggcaaagtctctatttcaggaaagcattacagctggggagaagctttggctcagcagtctcctgggttcctgcccctctgttaaaaggagagacgtctgttcaccttaagcacaaacggggtcatggacttggggctgaggaagccctgagaacatatcagtcccaaatagctacagctggtgcaaaaggagactgggcaaasagctgctgcttgactgttaccccgatgctgccccgatgggatgattctgcactgatgggctttcagcacttagtcctggcctgcctgggccactcatccacccgtgggcaggactccaagcctccaactttcatgactctttgctccaggccttgcccacactgcatcaaggccagcctagcatgaagctctcatgtcctcagaaggcacctggcagagaagctcagtgtgtgcagaaaagaagtacaaggt

SEQ ID NO: 111174 - DNA, 616 bp, Homo sapiens
actctaaaattattcacatggaatcaaaagagactgaacagacaaagcaatcttaagcaaaaaataacaaagccagatgcatcmagctacacaacttctatctatattataaggctatagtaaccaaaacggcatggtacaggcataaaaacagacacatagaccaacagaacagattagagaacctagaagtaaagtaacacatctacatccatctgatcttcaagaaacatgacaatgacaagcaacagagaaaggactccttatctaataaatggtgctgggataactagctagcgatatgcagaagattgaaagtggacacttagatttcactatttacaaaaatcaaatcgagatagattaaaggcttaaatgtaaaacctaaaggtataaaaatactagtagaaaatctagaaaataccattcttgacataggccctgataaagattttttgatgaagactccaaaagcaatagcaacaaaaacaaaaattgagaagtgggacctaataaaactaaagaacttctgcttgacaaaataaacaacaacaacaacaacaaaaaaaactgtcaacagagtaaacaatctacagaataggataaaatgtttgca

SEQ ID NO: 111175 - DNA, 602 bp, Homo sapiens
ctatacataatagaaggaagtgtttggtttttatagaggttttaaataactaatgtctaattttatatctgaggtaagattttatattttactggctacaacttcttgtaaagccaagtatacatttctactaattccaaaattgttatacatttgaatgttcacaatggccttgtaaaattacctatggaaaaaaatctaatgaatggtataatatttamattacaactattccttagataatttacattttccagtaagcctaggtaataattcatgatggcagaaaggattattttagaagtctatcttttcagtttatgtcttgaattaatatttgccagtggagagaactaattgaaactatttgactagtttgagagggaattaaaagagtttacgaaatattattacaaatgctgttatattttcatctatactctgtttatgatcaaataaattaaatactggtaatttgacaatttatgtactttcaatttttgttgtttaagtgtttataatattcttttttctgtaatttttaatctgagtccttatgtctccttttgccatgaggtcaacaaatgttctaattttgaaat

SEQ ID NO: 111176 - DNA, 602 bp, Homo sapiens
ctatacataatagaaggaagtgtttggtttttatagaggttttaaataactaatgtctaattttatatctgaggtaagattttatattttactggctacaacttcttgtaaagccaagtatacatttctactaattccaaaattgttatacatttgaatgttcacaatggccttgtaaaattacctatggaaaaaaatctaatgaatggtataatatttacattacaactattccttagataatttacattttccagtaagcctaggtaataattcatgatggcagaaaggattattttagaagtctatcttttcagtttatgtcttgaattaatatttgccagtggagagaactaattgaaactatttgactagtttgagagggaattaaaagagtttacgaaatattattacaaatgctgttatattttcatctatactctgtttatgatcaaataaattaartactggtaatttgacaatttatgtactttcaatttttgttgtttaagtgtttataatattcttttttctgtaatttttaatctgagtccttatgtctccttttgccatgaggtcaacaaatgttctaattttgaaat

SEQ ID NO: 111177 - DNA, 602 bp, Homo sapiens
ctatacataatagaaggaagtgtttggtttttatagaggttttaaataactaatgtctaattttatatctgaggtaagattttatattttactggctacaacttcttgtaaagccaagtatacatttctactaattccaaaattgttatacatttgaatgttcacaatggccttgtaaaattacctatggaaaaaaatctaatgaatggtataatatttacattacaactattccttagataatttacattttccagtaagcctaggtaataattcatgatggcagaaaggattattttagaagtctatcttttcagtttatgtcttgaattaatatttgccagtggagagaactaattgaaactatttgactagtttgagagggaattaaaagagtttacgaaatattattacaaatgctgttatattttcatctatactctgtttatgatcaaataaattaaatactggtawtttgacaatttatgtactttcaatttttgttgtttaagtgtttataatattcttttttctgtaatttttaatctgagtccttatgtctccttttgccatgaggtcaacaaatgttctaattttgaaat

SEQ ID NO: 111178 - DNA, 634 bp, Homo sapiens
caaatatccatagtgtgtaagcaattcactagaccattccaaatatccatagtgtgtagcaatccactagaccattccaaatatccatagtgtgtaaatacccacccttgggcattcagggaacrttagattgctgttttttgttgttgctgttgttaccttgtttaactctttcacttttttggtaagaatgattctttctaaaaatgccttctaatttgaagcatgacaccagttaatgaattacttcattaatgttttgatttacatgctatttgtttaaaatgctttaaattctgctgtttagttttatttaatttttgatgaaaatcttactatttggttcattcttcaaaaaataatccatcaaatggaaaaaggataatttgcattttagttggagttgtgagttacagataaatatttttataacttttggcaaatatcagtttgtttattctcaacttttgtagctcatctttttaaaatttgaggtacatttattacatgcccagcgctcctccttctagctattacaaacttgaaaataacatagtctctgatacggtttggctctgtgtccacatctagatctcatgcactgctcacatttcaaaatgcaatcatgccttcc

SEQ ID NO: 111179 - DNA, 634 bp, Homo sapiens
caaatatccatagtgtgtaagcaattcactagaccattccaaatatccatagtgtgtagcaatccactagaccattccaaatatccatagtgtgtaaatacccacccttgggcattcagggaacattagattgctgttttttgttgttgctgttgttaccttgtttaactctttcacttttttggtaagaatgattctttctaaaaatgccttctaatttgaagcatgacaccagttaatgaattacttcattaatgttttgatttacatgctatttgtttaaaatgctttaaattctgctgtttagttttatttaatttttgatgaaaatcttactatttgsttcattcttcaaaaaataatccatcaaatggaaaaaggataatttgcattttagttggagttgtgagttacagataaatatttttataacttttggcaaatatcagtttgtttattctcaacttttgtagctcatctttttaaaatttgaggtacatttattacatgcccagcgctcctccttctagctattacaaacttgaaaataacatagtctctgatacggtttggctctgtgtccacatctagatctcatgcactgctcacatttcaaaatgcaatcatgccttcc

SEQ ID NO: 111180 - DNA, 634 bp, Homo sapiens
caaatatccatagtgtgtaagcaattcactagaccattccaaatatccatagtgtgtagcaatccactagaccattccaaatatccatagtgtgtaaatacccacccttgggcattcagggaacattagattgctgttttttgttgttgctgttgttaccttgtttaactctttcacttttttggtaagaatgattctttctaaaaatgccttctaatttgaagcatgacaccagttaatgaattacttcattaatgttttgatttacatgctatttgtttaaaatgctttaaattctgctgtttagttttatttaatttttgatgaaaatcttactatttggttcattctycaaaaaataatccatcaaatggaaaaaggataatttgcattttagttggagttgtgagttacagataaatatttttataacttttggcaaatatcagtttgtttattctcaacttttgtagctcatctttttaaaatttgaggtacatttattacatgcccagcgctcctccttctagctattacaaacttgaaaataacatagtctctgatacggtttggctctgtgtccacatctagatctcatgcactgctcacatttcaaaatgcaatcatgccttcc

SEQ ID NO: 111181 - DNA, 549 bp, Homo sapiens
gaaatttttttttaattaaataacttttgttagggaaactttaacawaactctaagttagaaatctaattttaaaaagaaacatgaaatctcatttgaagacaggaaacttctttctgttttggaaatacaaagtactttttcttctgtggaatttaataagctgatatgaatcagtatcttagcattctacctagaagtggaaagcaaaattatctttgtgaccaaaatggtgacacataattactcactcacaaaaaaaaatcactaacactacagcattttcaaaagcacattttcccagtcatgatatctatcttgaagagtataatttaatgaagaatattctgtcatcctttgaagtttaactgaacatgcaagtaaccaaaaaccaagatttgagtagaaggtaagtaccaaatttcttatgaacttatttttaaatcttctgcttaactcaagtatatttctttgcaattcaatgtgaataggaagtctgtttttttttttttttgtcttgaatgttataatccttatcaaagcataggtg

SEQ ID NO: 111182 - DNA, 549 bp, Homo sapiens
gaaatttttttttaattaaataacttttgttagggaaactttaacataactctaagttagaaatctaattttaaaaagaaacatgaaatctcatttgaagacrggaaacttctttctgttttggaaatacaaagtactttttcttctgtggaatttaataagctgatatgaatcagtatcttagcattctacctagaagtggaaagcaaaattatctttgtgaccaaaatggtgacacataattactcactcacaaaaaaaaatcactaacactacagcattttcaaaagcacattttcccagtcatgatatctatcttgaagagtataatttaatgaagaatattctgtcatcctttgaagtttaactgaacatgcaagtaaccaaaaaccaagatttgagtagaaggtaagtaccaaatttcttatgaacttatttttaaatcttctgcttaactcaagtatatttctttgcaattcaatgtgaataggaagtctgtttttttttttttttgtcttgaatgttataatccttatcaaagcataggtg

SEQ ID NO: 111183 - DNA, 629 bp, Homo sapiens
agatcatgtggtaattttctttctgtgactgactgggttatttcacttaacataatgtccttcaggttcatccatgttgtcacaaatgacaggcttttcttcttttatacggccgaatagtatttcattgtgtatatataccatgttttctttatctattcatctgttgatggacacttaatttgattccatatcttggctattgtgagtattctgcagtgaacatggaagagtgatatatctttgacctattgatgtcattttctttgtatatttaccccatagtgggattcctgggtcatgtggtagttctatttttaattttttgaggaacctccatactgttttctgtaatggctgtactaatttacattcctatcaataatgtgcaaggattcccttttctctacgtgctcaccaacacttatctttcaacttttwtgatgatagccattctaagaggtatgagatggtatctcattgagattttaattttcctgatgattagtgatgagcattttttcatatactttttggctatttttatgtcatgttttgagaaatgtctatcatggtgttttgctttcatcagatttttttgtgatcatattttcttccatcagattatt

SEQ ID NO: 111184 - DNA, 573 bp, Homo sapiens
gaaagaaaaagtctgtatttaataaaaataggtagcaggttattgaatagagtaaggaatagattaatcctattcaaaggattcttgttatcctctcytgtccctctttgtgtcacattgtattgttgttaactaatggtttagatagctacttttgaattcctctgttgcacacagtttctgtcttttttactttgctgaaaagcttaagaaggtgcaatgttggttttgactctattcttctgctttcttacgctggctttgtgagagccaaagtggtgatctcatgatatgagaagcttacgggtcagagccatgtaacccttagcttgcaaaacttggctgtagtgagattctgctttcacggctttcagaaatacttctacagctacagttgttcttgtcttctgcttatgcaaaaagcttagttctaatgacttttgcagtgggtttatttatgctagacttcatcagtagtcataatgaaaaataaaaagttagtatttcagttagtataaatggaatatactcatataattattattatataattataactatataatatatatt

SEQ ID NO: 111185 - DNA, 595 bp, Homo sapiens
cctctctgctgtcattttacaataggatgcagttagctcagtgccataaaaatatctggcttaaagtagagaatttttggtatgtattcccctggtaagtactataagcccaagtaaagcatgaccaascagctgaatatctgtgttttgcttacatattccccaaactgttttccagctccacgattttaagatgaaatgtgcaaacatttattgccacataattttccttctggaagggggtctgtcacagcaggaaccttgctactaaattggagccgttgaaactatttcagtagtcaaatttgttaagagtaaaagcaagagttttaagtgctgtctaatgcctaaaaatgtttttccagtttgaaatgagtgtggtggtagggttagggaaaagttagcatgttttgagatagttacgtctgaaataataacctcagttaacatgtatataatactatgtaccagatacttttgtgtatgttttttacgtatattaagtcatttaattcttacagcagtcacatgctgtattactactctttccatctccattttacagatgaggacactgaggcagtaacttgcccag

SEQ ID NO: 111186 - DNA, 571 bp, Homo sapiens
aagcactaagaaatgcagctctctgaaagagaccctgggggctccattaagttactaggctagttctttagaagaacattcataacatgcaggtactatggaggtgggagtcatatccatctgtagatggttttctctsgggctccttccatttccttcctgcatccagaatattagtaaacgacacagtctaaattgcccattttgatctgtggtatttccacagcagtggcagagccaggctcaaaacctggaaagatgctccagaatctactgcaccatttatcactaacatccaccattatcaggcaggtatgcaccccaggacaacagctcaggtaacaggcatgtttgtggggcaagggaagggggagaaatactgatgggtagctaatattcataagtattcgaaaagcaagacattggtttgggttgctctcaccaactaggctagtagtggcatgaaatgcgatgcgattgtgtcatgggaggagctgggacattgcagtcagaatgttctgggttcaaatcccagctaaactctttgcttataaccctttgcttttggcaa

SEQ ID NO: 111187 - DNA, 560 bp, Homo sapiens
tgtctcttgctgtggtcaggagttccacagttcttcaggtgtctgcctgtagctgtgcaaagggtgaaggcatatgctggctggatatgctatctcctgggggctttcttgagccacaacatcaaatattctgcaatggatgtgaggttttctctayaggaggtgcttcaccctggcccagccctcttgcctagtggcttgtgacccaatggacgaaaggccaaggtgaatacttattgttatggcctgaatgtttgtgtctccctaaattcatatgttgaagcccctgacctccaatgagatagtgtttgcaggtggggcctttgggaggtgtttaggttcagatgaaaccatcagggtggagtctctgtgatgggatcagtatccttataaaaataaggaaaaccggagcactagagtgccctctgtctctctttctctcattcaacaaacatctgttgtttcagccactcagtctatagtattttgttgtagcaaactgtagctgactaagagatcaccttctttacactcctcaagcacaggcctttgctgtggcc

SEQ ID NO: 111188 - DNA, 653 bp, Homo sapiens
cagggagaagggaagcctagatttgaaccaaggtgggttttttctgttttttgttttgtcttgtcttgtcttgtctttagaagccctctatgcctctgattcctctgtaagggaatgacttcaaaggtgtagagatgtggacaaggccaggcacagtttgaagatgttttgggaacacgtgatcaagggtcacattacaggaatgttgctctttttcggggatatgtccattgatgacagagacagagaaaagaactgrgcaaaagatgcatagtagggagatgggaattgaatgatgacaggtttggggaatattgaggcttgtctgtcctcacacataaaagtgaagctcaagcttgtaatgacatatcattaaaagtatagtgctcaggtggaccttcttttaaaccccagctctgtcaattatcaaatgtatcacttggacagctgagcctcagtttcttcaactgtaaaatacaaataattatagtatccaacccaaaggattattgaaagtgaaactgaggcaatgaatgtaaattgcttagcaacatgtctgatatatattaattgttcaataaatgtaattgttattataccatcattcattgtcttggcagggtgtagactcatttttcttgtgtgcctaattt

SEQ ID NO: 111189 - DNA, 653 bp, Homo sapiens
cagggagaagggaagcctagatttgaaccaaggtgggttttttctgttttttgttttgtcttgtcttgtcttgtctttagaagccctctatgcctctgattcctctgtaagggaatgacttcaaaggtgtagagatgtggacaaggccaggcacagtttgaagatgttttgggaacacgtgatcaagggtcacattacaggaatgttgctctttttcggggatatgtccattgatgacagagacagagaaaagaactgagcaaaagatgcatagtagggagatgggaattgaatgatgacaggtttggggaatattgaggyttgtctgtcctcacacataaaagtgaagctcaagcttgtaatgacatatcattaaaagtatagtgctcaggtggaccttcttttaaaccccagctctgtcaattatcaaatgtatcacttggacagctgagcctcagtttcttcaactgtaaaatacaaataattatagtatccaacccaaaggattattgaaagtgaaactgaggcaatgaatgtaaattgcttagcaacatgtctgatatatattaattgttcaataaatgtaattgttattataccatcattcattgtcttggcagggtgtagactcatttttcttgtgtgcctaattt

SEQ ID NO: 111190 - DNA, 653 bp, Homo sapiens
cagggagaagggaagcctagatttgaaccaaggtgggttttttctgttttttgttttgtcttgtcttgtcttgtctttagaagccctctatgcctctgattcctctgtaagggaatgacttcaaaggtgtagagatgtggacaaggccaggcacagtttgaagatgttttgggaacacgtgatcaagggtcacattacaggaatgttgctctttttcggggatatgtccattgatgacagagacagagaaaagaactgagcaaaagatgcatagtagggagatgggaattgaatgatgacaggtttggggaatattgaggcttgtctgtcctcayacataaaagtgaagctcaagcttgtaatgacatatcattaaaagtatagtgctcaggtggaccttcttttaaaccccagctctgtcaattatcaaatgtatcacttggacagctgagcctcagtttcttcaactgtaaaatacaaataattatagtatccaacccaaaggattattgaaagtgaaactgaggcaatgaatgtaaattgcttagcaacatgtctgatatatattaattgttcaataaatgtaattgttattataccatcattcattgtcttggcagggtgtagactcatttttcttgtgtgcctaattt

SEQ ID NO: 111191 - DNA, 653 bp, Homo sapiens
cagggagaagggaagcctagatttgaaccaaggtgggttttttctgttttttgttttgtcttgtcttgtcttgtctttagaagccctctatgcctctgattcctctgtaagggaatgacttcaaaggtgtagagatgtggacaaggccaggcacagtttgaagatgttttgggaacacgtgatcaagggtcacattacaggaatgttgctctttttcggggatatgtccattgatgacagagacagagaaaagaactgagcaaaagatgcatagtagggagatgggaattgaatgatgacaggtttggggaatattgaggcttgtctgtcctcacacataaaagtgaagctcaagcttgtaatgacatatcattaaaagtatagtgctcaggtggaccttcttttaaaccccagctctgtcaattatcaaatgtatcacttggacagctgagcctcagtttcttcaactgtaaaatacaaataattatagtatccaacccaaaggattattgaaagtgaaactgaggcaatgmatgtaaattgcttagcaacatgtctgatatatattaattgttcaataaatgtaattgttattataccatcattcattgtcttggcagggtgtagactcatttttcttgtgtgcctaattt

SEQ ID NO: 111192 - DNA, 636 bp, Homo sapiens
tgattccattaaacctcttttttttaaaatataaattacccagccttggatatgtctttatcagcagcatgaaaaaggactaatacagttagttgccccaaattccacagcccgttagtagaagagacttactccatgaaggtcttatttgaaaagttggaatttgtgttctaccccactgctgcaacaagtaaacatgccatcatcctccatccawcagtctcccttctccctctgttaaactgaataattatgaattttcaaactgagtttgagcctgtcaaggagattttatgcccttggggacaaaacttgtgttctatgtgaccagaactttacctccatttctcagagtaattcaaggtttttgtttgtttgttactcatttttaacaagagagtcctaacgattatagaaatgctaattccatgtccctgaaattgccccgctcctggagtttctctttgggtgtattcttgctggttcccaaaatgttaagcgcatagtaaagagtaaagaaggaaaagaatgcggtgagaagatgaagaagagagagcgagccaagagaccatcaaatgtggatggcagttcttttaagactatgtgctttaggctcttttaagagcttccctgagc

SEQ ID NO: 111193 - DNA, 356 bp, Homo sapiens
tttatagtaatgtctagtacttccactattttctctgttagaaatgatttatgttttgaacagaaaagatcttcacttggctcaagattcaaaagatagaagagggtaaactgaaaagtctccttgcctcggcttcccagccacttgctttctttctctctttttaaaatatcttrttttattttcggctgagcgcagtggctcacgcctgtaatcccagcattttgggattgggaggctgaggagggccagcctggccaacatggcgaaaccctgtctctactaaaaacacaaaaaattagccaggcgtggtggcaggtgcctgttatcccagctgctggggaggctgaggtagg

SEQ ID NO: 111194 - DNA, 580 bp, Homo sapiens
cataagccttcaaatgaaccttggcccaccggcccccaaatctttgctttttaaaattattcacaaattgttttccaatgtgtgtacatttgatgttggtttcttttgataactcatttccaataagaccttattttatattacaacaatgaagatagataaataaatacatcaaaatatttattatgtgtactacatacattttataattaaaatgtgctagattgttacmttgttagctccaatcaaccacctcccagtattcacagttttgtgtagtcccatttcacataggcactagacttggctatgtgatgtgatgtgttttggccaatgggtcattggcaagcttgaaataagaacttcataagtacttgtgagttaaggtttgtcctgttagaagctagtcaccatgctatcaagacacccaagctagctgcatggagatgatgcaggatttttcttgatccctttgccagctggggacctccagccagcaatgaccctgcccaggcctcacttgagcatgctacctgttgcaggaggtggcctgcccacccagcccacctgggctgcacct

SEQ ID NO: 111195 - DNA, 260 bp, Homo sapiens
tttttaccctatctgtcattatctttgcctacctctttttgtctcttcttcattttttttaagagttggagtcttgctctgttgcccaggctgaagtagagtggcatgatcttagctcactgcagccttcaactcctgggctcaagcaatccttcagtcktctgagtagctgggactataggcacatgctaccacacctaactaatttttatttttattttttacagatggggtctcactctgttaacagcccaggctgg

SEQ ID NO: 111196 - DNA, 596 bp, Homo sapiens
acctcggctcatggcaacatccacctcccaggttcaagcaattctcgtgcctcaggctcctgagtagctgggactacaggtgtgcaccatcatgcctggctaattttagtatttttagtagagatagggtttcgctatgttggccaggctagtctcgaactcctgacctcaagtgatctacctgccttgacctcccagagtgctgggattacaggcatgaaccmccatgcccagccccctccttggcatctttaaaagtaaatcctgggcagtgtagcacttttgtcttgtttctgggtatctagcaggcttgcccatggagcagtggtagagggagcctccagaaggtgatgtctgtggcctctgcttaactcagcaggccccgctgccattcctcctcagctctgggcgcctgtctgttggtgcagggccccccagtgatttccccagctgagtctctgcctaaatgcctccctcagacctttccaaagtcacatggctccagcactatgccaagcatggagaattttcccggggaatcagaattttcttggaatatgcacctgggatgtgaggagcaaagtcttgcaatggtc

SEQ ID NO: 111197 - DNA, 592 bp, Homo sapiens
gtaggaaaacatgatttactgaaagtgagggggttggccatttagtgtctatgtacatttttcataaatcttgctattaaaccatttaattagaagtgctactgaatcaatgcttcagagctctgagactttgtgttctcaaagatatccaaaattaaagccttttatatgaattgtcaggcagaaatataaaaacaagcagtcacaatattgactttccttctgattaagagcccataacattagagggaggaagaaaaatagaattatttgggggagctctttgtccattgctcccygggctgtattgtatcatctgtttacttttcctggctctcctactatagacagtgtgctatagtgggaagaacctgtgctttggagccatagagactgggttgctttttactttttccatttagtagctgaatgcccttgggtaaattattttatatctctgagcctcaatatcctcatttatgaaatatagctcatgaacctaccgtataggcttggtgcaagacacaaatggggtaactctgaacctagtgcttggaattcggctaccagttccctccctaggctgtgaact

SEQ ID NO: 111198 - DNA, 625 bp, Homo sapiens
atttattgttgtgtacgctctgtaacaattcaaaaactagagaggcgcaggaaggtagttttcctgtctgtcccacacatatcccaccaccactgatgatatttgggtgtgtatttcttcattcttatgtcaaggcttttgcaaatctatgcaaacactgacttacgtagttaatttttgtatttctcatttggttttctagatgtggtttgttttctaaaatgtcttagtaarttggagaatttcttagaattggaacttgttcagatatatattttcttatttttccttcatggttttatatattttcatttaaatcaaactctgggggccttgcctcagctattagaagacctgaaagactttgtgtagctgtgctcctgatgaactgcagccggctgtcttctcttgctggtcctgagggatgtccaactctaatttgacttcatccacagcttttgtcttctctgagttaaaggtgattggatctaattcggcaagcaggtgttagcgactgctactgtggggcaactgtcctttgcacaagacttatgaaaaattagcttaagaaggactctgttatagcaagaaaaagattctataatttgcagcacaaataatgtct

SEQ ID NO: 111199 - DNA, 625 bp, Homo sapiens
atttattgttgtgtacgctctgtaacaattcaaaaactagagaggcgcaggaaggtagttttcctgtctgtcccacacatatcccaccaccactgatgatatttgggtgtgtatttcttcattcttatgtcaaggcttttgcaaatctatgcaaacactgacttacgtagttaatttttgtatttctcatttggttttctagatgtggtttgttttctaaaatgtcttagtaagttggagaatttcttagaattggaacttgttcagatatatattttcttatttttccttcatggttttatatattttcatttaaatcaaactctgggggccttgcctcagctattagaagacctgaaagactttgtgtagctgtgctcctgatgaactgcagccggctgtcttctcttgctggtcctgagggatgtccaactctaatttgrcttcatccacagcttttgtcttctctgagttaaaggtgattggatctaattcggcaagcaggtgttagcgactgctactgtggggcaactgtcctttgcacaagacttatgaaaaattagcttaagaaggactctgttatagcaagaaaaagattctataatttgcagcacaaataatgtct

SEQ ID NO: 111200 - DNA, 574 bp, Homo sapiens
ttttacttggtggggcgatccaaacctttatatctgaagggtctgggccattattagtgctgattagatttttgtagttttccatcgacycagggcctggtaataataagagatgtcctaagggatcactgtattccaaacattctctttattatctcagttgtggagtagcagtccaatttttccttggtagtcaggatcagtcatcccaaccagcacactaactcccttctttggctgttgattcaaaggcatgaggattccaaagtggccaggtggcagtctcaacttccagctgaatggaatcactgttgtgtcttctggtgaaggcattcttgcctctggcatttagcccagcaggacataaagttctggaaacaggaagcaaaaatttaactagtgggtcactaggggtaatactgagtcgtaccattgtcatttccaccccttaattcctggatccatgaagcctggctatctgagaaagctgatatattagaagctgattcagagcatctacagccttctgaagaaccttgcaccagccctgcagggtattgccaccaaactgaca

SEQ ID NO: 111201 - DNA, 456 bp, Homo sapiens
attctgtgctttcatgccaggaactatttcagtttagttataatatgcacattacatttatttcaatgagaaacaaatactcatataacacatatcccaatacttacatagataaaastgaactctactcaaaagcccatgtcacacacaatttccttggcactgtgaaaaagaagggtagtgcttttgtaaagaacatactatgaatagccaatgtataagcagaaaatatgaaatccccctttgggtttcatattggatgctactctcagagagctgtgttactaaaacactggagtcatttccatgacttgctgggcttctcatgtaatgtgttgtaaggggacagccctcctgattaagaatatgtgtttaatttttattgtataaattaaacggtataaaatctaatatactaattaaaacctttggcttccaaattagacaaacctgggt

SEQ ID NO: 111202 - DNA, 602 bp, Homo sapiens
tgaacaagtacaaaaactttggaaagaaatatggtgatagctggtggagttgaagacacaatccaraaatctcattcctaggcatgtactctagagaaattcttacagatgaatacaaaaaaaatgtacaaaaatgtctttaatagcatcatttgtaaaagttaaaaattagagataccttcaaagtctatcaagaagagaacagattaataagttatagtgtatttaaatgttatacaaaaatgaaataaactaaagctatatcagcaagaatgcatctaacaaataaaatgcagagggagaaaagggtacatttcagaaaaatatacatcatatcataagagttaccaacaaagcaaaagaatatattctgtttcagggaatcatatattaatctaattatgatataaaagaaggcatagaaataaacatcaaattcagtaccttgctgacaggagagacagggaaatggaaggcacagggaaggaggggatatggtcagagaaggctatagaaagaacctaaaactgtatttgcaatctcttctttcttagcttaattaggggtacacatgaatttttatgttatattttttacttttc

SEQ ID NO: 111203 - DNA, 602 bp, Homo sapiens
tgaacaagtacaaaaactttggaaagaaatatggtgatagctggtggagttgaagacacaatccagaaatctcattcctaggcatgtactctagagaaattcttacagatgaatacaaaaaaaatgyacaaaaatgtctttaatagcatcatttgtaaaagttaaaaattagagataccttcaaagtctatcaagaagagaacagattaataagttatagtgtatttaaatgttatacaaaaatgaaataaactaaagctatatcagcaagaatgcatctaacaaataaaatgcagagggagaaaagggtacatttcagaaaaatatacatcatatcataagagttaccaacaaagcaaaagaatatattctgtttcagggaatcatatattaatctaattatgatataaaagaaggcatagaaataaacatcaaattcagtaccttgctgacaggagagacagggaaatggaaggcacagggaaggaggggatatggtcagagaaggctatagaaagaacctaaaactgtatttgcaatctcttctttcttagcttaattaggggtacacatgaatttttatgttatattttttacttttc

SEQ ID NO: 111204 - DNA, 575 bp, Homo sapiens
gacataaaatcatttaaaaggtcaggaaatccaagagctgtttttttttaaataaagaaaacagaccactagctagactaataaaaaagaaaagagagaagctctaaataaacaaaattggaaattacaagggggacattaccactgacactacagaaatacaaacaaccattagagaatattgcaaatacctctatgcacataaactagaaaatctagaagaaatggataaattcctggacacatacacccttccaagactgaaccaggaagaaattgagtcccagagccaataatcagctctgaaattaggcagtaataaatagcccaccaaccaaaaaatgaaataaaaagcccaagaggagatggatttacagctgaaatctaccagatgtrtaaggaagagttggtaccatttctactgaaactgttccaaaaattgagaaaggactcctccttaactcattctatgaagccagaatcatcctgatatcaaaacctggcagagataccacaaaaaagaagactttggtccaatatccttgatgaatatttatgcaaagtgctcaacaaaa

SEQ ID NO: 111205 - DNA, 534 bp, Homo sapiens
gtgaaagcaagtttattaagaaagtagaggaataaaagaatggccactccatagacagagcagcctggggctgctggttgcccatttttatggttatttcttgatggtatgctaaacaaggggtggattattcatgtctcctctttttagaccatatagggtaacttccggacgttgccrtggcatgtgtaaactgtcctggcgctgctgggagtgtatcagtgaggacgaccagaggtcactcttgtcgccattttggttttggtgggttttagccgacttctttactgcgacctgttttatcagcaaggtctttatgacctgtttcttgtgcccacatcctatctcatcctgtaagttagaatgccttaaccttctgggaatgcagcccagtaggtcttactcagccttgttttacctggccccattcaagatggagttgctctggttcacatgcctcggacaaaatcactgtacttgggatatccatcacgttaaagatttgtcttttctctatgctagaccactggaatt

SEQ ID NO: 111206 - DNA, 611 bp, Homo sapiens
agagtagcagcgtatcatccaaacccaaatctttttactgtgttcaaattgaatggtgtaagaactaattttagctccaagtttaaaaaattaaacaaacaaacaaaaactttgggtagtttaagttctctggaggtgggtgtaaaataatgggaatagtaaccataatgttctgaaatcattgtctaataaaaacaatgcaagctctctataagttcagtgtgtttgttttgtttattgctgtacccccagcacctagaacatcgatgttgctcattaaacattagttgtatgaatgttttataaacaaatgaatttcagtggaatgcaatagggctacctgtctataccccttttctagcaactattctcccttaccttcacatagtgggagcaggcacaagcaaattartaatgaccctgacccctgaccataggtgattggttgaagagtatataattcacccaaactgggctgattacaatgccccacttctttcccttcccaccccagtcacagcgagtgggactgaggctctaacttcactaaatctagaccagtaaattccttcgctaggaattgaggtcttggacaaagaaaatatcaagtc

SEQ ID NO: 111207 - DNA, 457 bp, Homo sapiens
agctttctccagttgagcttaaataatttaatgactgcctgttaacatggacaagtttaagattctggtaggtttagaaaaataaatatttccagtaatcaaggaaagggttattcactgtaattgacattaatgtataatttacatactataatgttcttgggttttaataagtcctaataaataaaactaaggatgagaatggttatcccacaagaataaaaataaactatcatttcatttgcttatgatttgggaagttgttctgttttgcttcaaatgacttgttagggtttctgcaactcgaatttaaaaggtacaggggttattcagcaaaaagttcagaaagtttattcgatcrgtaaattttgtttattatgtatcaaagggagtgaatctatgttaaactgttcatttaaaaagatatgagaagaaaaaggagaaagaggagagagga

SEQ ID NO: 111208 - DNA, 381 bp, Homo sapiens
ttgaaatcatactccaggtgagaggatgcagtgagaagaagccagcatcacttccatgattatccagttgcagaagacargctgaacataatcaggaggaaacaccaggcaaacctaacttgagggacggactgtcaactccctggcaggcagtcttcaaaaatataaaagttctgaaggtcaagtaaagacactggaaccattccagactaaaggagaccaaagagacatgacaatgaaatgcaacatgtgattctgaactggatcaataaattatcaaggaatttatcggaaaaacaggtgaaacttgaatgagatgtgaagattcgatggcagtaatgtgtcagtgttaatttcccaatgttgatggttgttttgtgg

SEQ ID NO: 111209 - DNA, 381 bp, Homo sapiens
ttgaaatcatactccaggtgagaggatgcagtgagaagaagccagcatcacttccatgattatccagttgcagaagacaggctgaacataatcaggaggaaacaccaggcaaacctaacttgagggacggactgtcaactccctggcaggcagtcttcaaaaatataaaagttctgaaggtcaagtaaagacactggaaccattccagactaaaggagaccaaagagacatgacaatgaaatgcaacatgtgattytgaactggatcaataaattatcaaggaatttatcggaaaaacaggtgaaacttgaatgagatgtgaagattcgatggcagtaatgtgtcagtgttaatttcccaatgttgatggttgttttgtgg

SEQ ID NO: 111210 - DNA, 521 bp, Homo sapiens
gcatgtaagtagcaacattttcaaaataattcagtcattttcttagttacttctaaaacgtaacaatttatctcaaaatcctatatctcaaattttattataatacatttataaaatttgaactgtttgacatcaaatgtaagaaacagatttttaagtcttaaatatatcaatggagcactaatttttttatttaaagtgtggtcatagtttaaaccttatattaattttttttgcttttaaaaattatttatgtttctttttaatgaatatagttgtatagcttttcttttatattatttatagccatacactttcttcagagttttatgtttttaagtggaccatttcaaatagtttgagtgtggaattatgcttyccaaaacacaaggcatcttattttttttaacccattagctttgtttggttttcaccaaataagtagttgtgtagttaatgtataaccatagtacaaagttttgatgacagtcttattcaacatagcatgacagacgatataa

SEQ ID NO: 111211 - DNA, 585 bp, Homo sapiens
agctcgataaacactgggtatggcacttgtgagagccagggcttaatagcagaaggcaaataaccatataaagcaatatcatttgtcctgggtgagaagtcctaaagatgtgcagaggtggacaatcagacgttgaaatgactaaagaagtcttcatggatgagtggacaaactgaactttaaacacaaagtagtatttgaataagtggaggtggagagtgttctggactgttacattacagaaatggaatcatatatacctagaggctggaaagtttaaggcatctttggagaaaatttagattattggatttaaccatatgaaattgctgttcttataggtaagaaatggtcaaatatcaccaagtgcacaagactcaagactggcatagtagaagacaaaggtggatatatgggtaggtaacagataaaaaaattgagaatgccatggcaaggtacttggagtgaggcatttcatttaaacatcatcaacaacatagmaactaaaacctaaagaatcataaatcttagagaatcttctaagtgtcttaggaaaaacttagtttaacttctgattcctgaatt

SEQ ID NO: 111212 - DNA, 515 bp, Homo sapiens
gcccactctcaccactcctattcaacacattctggaagtcctagccagagcaataaggcaagagaaagaaataataggcatctaaataggaagaaagaaaatcaaactatctctcttcacagacaatatgatttgataagtagaaaaacccataatttctgtctaaaggctcctagaactgataaacaatttcagtaaagtttcaagatacaaagtcaatatgcaaaaatcagtagcctttctgtgcaccaataatgttcaagctgagaggcacatcaataaccataaaaagactaaaatacttaggaatacaactaactatggaagtgaaakatgtctacaaccagaattacaaaacactgctgaaaaaatcagagatgacacagcaaatggaaaaacattttatgctcatggataggatgaatcaatgtaacaaacctgcacgtgtacccccataaccaaaataaaagttgaaagaaaaaaatataaaaccgtatatgttgatgtgatattat

SEQ ID NO: 111213 - DNA, 370 bp, Homo sapiens
tatatgtctgttcatcagggatattgacmtgaagttttcttttttcacttggctctgccaggttctgttatcagaattattctggcctcatagaatgagttagagaggagaccctcctcaatgatttttttgaaatagtttcagtaggattggtaccagctcgtctttatacatgtagtaaaattcggtagtgaatctgtctgctacagggatttttctgattggtaggtttttttgttattcattcagtttcagaactcgttgttgacctgttcagggtttcaatttcttcctggttcgatcttgggaggttgtatgtttccagaaatgtatctatttcttttaggttttctagtttgtgtgcatagag

SEQ ID NO: 111214 - DNA, 607 bp, Homo sapiens
tccttgttacatctttttcataagaatacttagaagtatatttgaaaatcaaatttttccagttggccaatctttttggtagatttgaccaacttacaaatttaaagagattatagggagattattagtggwctggaacagtacttgttttctgctgggttattttaaaaaatttagcaaagatcttaattttagttgacacactaggttagaaaaatcatacagactttgagaatgctggtgtaggaaaggactttgagaagaaaaaatttctgaaccagaagacaggtcttctgaaataatacagacagacaaaaacaaatttataaaaacaaaaaaataaaaaaaagcctataggctttctgggacacccttaagaccaccaagcaaatatttgcattatgggtattccagaaggaaaagagaaggaaaagggtatagaaaacatacttaattaaataatagttgaaaacttcccaagtcttggcagaaaaatgaacatccatgtccaggaagctcaaagaccccaaatagattaaacccaaacaggttctatccaaggcatattaaagtcaaactactgtaagtcaagaacaaataaagaatt

SEQ ID NO: 111215 - DNA, 608 bp, Homo sapiens
tcccagaattccattctttatctccttgttacatctttttcataagaatacttagaagtatatttgaaaatcaaatttttccagttggccaatctttttggtagatttgaccaacttacaaatttaaagagattatagggagattattagtggactggaacagtacttgttttctgctgggttattttaaaaaatttagcaaagatcttaattttagttgacacactaggttagaaaaatcatacagactttgagaatgctggtgtaggaaaggactttgagaagaaaaaatttctgaaccagaagacaggtcttctgaaataatacagacagacaaaaacaaatttataaaaacaaaaaaataaaaaaaagcctataggctttctgggacacccttaagaccaccaagcaaatatttgcattatgggtattccagaaggaaaagagaaggaaaagggtatagaaaacatacttaattaaataatagttgaaaacttcccaagtcttggcagaaaaatgaacatccatgtccaggaagctcaaagaccccaaatagattaaacccaaacaggttctatmcaaggcatattaaagtcaaactactgtaa

SEQ ID NO: 111216 - DNA, 476 bp, Homo sapiens
ctgtaagtccagcactgcatttagtgctatagattcagaaatgcacattagagtctctgttctggattttgtcatagttccctcaaaaactggggcttcattcttttagatgaagtaactatgcagaaatatttggaatggaatagggagaaagagctctggcctgttagctgaacatctaatagctgataaagtaggtattagatatgatcctgggccatattaaaatgtaagtwtttgattgcctgatatggtttattctcaatttactcatggtttcttcaatttgaaaagcaagtatatacttattgtgtgtgtgtgtatgtgtatatatatataagtatatatatatacttattatatatatttatatatataaaattgttgaaatcagaaaaaccttcactttttgcttttttatgatttggttagcagatatttatgttacaaatctgttttcttaaaaaaaaacactg

SEQ ID NO: 111217 - DNA, 592 bp, Homo sapiens
tcctactacatcttcatggaaaattgggggtccacttctcctttcttctacatacacttcaggatgtactttttcctccccatttctgtgacttcttttccttgccccttgtagttggtgtttattttgcctggtctaattatataygcatgtcagaaataggtacttcccacaggatgattagtcctggtctcatatccttactgggaaaaatattgactgtattctctctggtttcattggaagaagaaaatctagtcaaggcagaggcaaggagagaagcttgatttggactgcataacttacgatgtataaatattagaaatggatgaatttttaatggtggcttaagactggatataaagaaattataaggccaataggaaaagaatgattaaggaagacacaaaatttatatttaaagctgttgaagtcagtttaagtagaatgtttcactgttggaatcatgagatgcaatagctacatggtcatcatggtttcatgaaaatttgaggctttggttctttaggacatcttttttctgctgcaaagtgcagacaattgcagacagtgatgaagcagaatgctatac

SEQ ID NO: 111218 - DNA, 592 bp, Homo sapiens
tcctactacatcttcatggaaaattgggggtccacttctcctttcttctacatacacttcaggatgtactttttcctccccatttctgtgacttcttttccttgccccttgtagttggtgtttattttgcctggtctaattatatacgcatgtcagaaataggtacttcccacaggatgattagtcctggtctcatatccttactgggaaaaatmttgactgtattctctctggtttcattggaagaagaaaatctagtcaaggcagaggcaaggagagaagcttgatttggactgcataacttacgatgtataaatattagaaatggatgaatttttaatggtggcttaagactggatataaagaaattataaggccaataggaaaagaatgattaaggaagacacaaaatttatatttaaagctgttgaagtcagtttaagtagaatgtttcactgttggaatcatgagatgcaatagctacatggtcatcatggtttcatgaaaatttgaggctttggttctttaggacatcttttttctgctgcaaagtgcagacaattgcagacagtgatgaagcagaatgctatac

SEQ ID NO: 111219 - DNA, 592 bp, Homo sapiens
tcctactacatcttcatggaaaattgggggtccacttctcctttcttctacatacacttcaggatgtactttttcctccccatttctgtgacttcttttccttgccccttgtagttggtgtttattttgcctggtctaattatatacgcatgtcagaaataggtacttcccacaggatgattagtcctggtctcatatccttactgggaaaaatattgactgtattctctctggtttcattggaagaagaaaatctagtcaaggcagaggcaaggagagaagcttgatttggactgcataacttacgatgtataaatattagaaatggatgaatttttaatggtggcttaagactggatataaagaaattataaggccaataggaaaagaatgattaaggaagacacaaaatttatatttaaagctgttgaagtcagtttaagtagaatgtttcactgttggaatcatgagatgcaatagctacatggtcatcatggtttcatgaaaatttgargctttggttctttaggacatcttttttctgctgcaaagtgcagacaattgcagacagtgatgaagcagaatgctatac

SEQ ID NO: 111220 - DNA, 513 bp, Homo sapiens
caaggtaaaatcaaatcaaagattgccatgtttttcttctatacatattgtttgaccagtgtgtgtgtcaaaatgctctttccctactgtttctccccaccaactcctacccatcctaccagtctcaactcccatgtcacctccttggaatggtacctggccttccctcccacttctccccaggaccaagtgcacctcagcccctatgctttcctgtcaaagcacttactgtgttgttaaaacagatgcatgcagttttacctcattcccgaagtactcagcacatctaagatgtgcctattcccctgtctaaggaaatatgctgattatcattctttcagcactcattctttatagcaaytagtcagggaatactattaaccatttctgagaaattgtgaccctcaaaagaatttaatttatagacagtacaggaaatgtaatgaagtaaaccaaaaattatagatgattatgcagcaaaagattattgctgaggatggtttttactgttag

SEQ ID NO: 111221 - DNA, 604 bp, Homo sapiens
ctagggtaatgattccctagagaattgctctaattgagaaggcagtaatatagcctgacccagcttccaggtgtgatttccttttgttgctataaatctggcctaggtccctatatattttttctttttttttcctttccttttttacttctttcctcttcctattttttttttttaaccttcatgggacatgacctcttagaaatgagccttcctagagactggggacctgaacttctaggaataaaccatcctagcaataagaaagcagctcaaaaaagggaggaaaaaccaacctgaggccaggaactcgtcttccttttaaaatgctttctccaaaagattttacagaaaaaagaagggaaatgtgaaaggaaattaaattttgggaccccaaactcatttagccaaagggaagaagtcaagctgggaactgggtcatgcaaacctgtctccccccttttggtttctaaataggatggctacaagatgaaaagctacacacctcccctrtattttgcccacagggaaattcccagtgagctaaaatttcatcctggcaatgtcaattgacagcttacaggtgcagttacccctggcccac

SEQ ID NO: 111222 - DNA, 604 bp, Homo sapiens
ctagggtaatgattccctagagaattgctctaattgagaaggcagtaatatagcctgacccagcttccaggtgtgatttccttttgttgctataaatctggcctaggtccctatatattttttctttttttttcctttccttttttacttctttcctcttcctattttttttttttaaccttcatgggacatgacctcttagaaatgagccttcctagagactggggacctgaacttctaggaataaaccatcctagcaataagaaagcagctcaaaaaagggaggaaaaaccaacctgaggccaggaactcgtcttccttttaaaatgctttctccaaaagattttacagaaaaaagaagggaaatgtgaaaggaaattaaattttgggaccccaaactcatttagccaaagggaagaagtcaagctgggaactgggtcatgcaaacctgtctccccccttttggtttctaaataggatggctacaagatgaaaagctacacacctcccctatattttgcccacagggaaattcccagtgagctaaaatttcatcmtggcaatgtcaattgacagcttacaggtgcagttacccctggcccac

SEQ ID NO: 111223 - DNA, 609 bp, Homo sapiens
gtttgtctggcagccatttgtctgccactaggggagactctaaaagaataaagcaatgcaaacaaagagctgcagagagagtcttcacagcagtatttgagtctccagatgcactcttgccataagatgcactcttgcacttcccaattacatgaaccaataaatcctttttggaggagttgaatttctgtcacttgcaaccaagtattctgactttgtgcaatcataagatctaggagttaataaggtcagtatcatttgagtcccaaaattacaaatatttgaagaaatacagttcaagataagagtgggataggaaagatatttgaaaaacaattcataatgtagattatttttaaaagctaagacaatgcaacctctcttagaatcaaaggaacaatggcttgagaagagagctgtgaagttaacaattccttgagaatataaaaaacatcaaaagcatgagtagaasacatagctgtaaactataccacagaaaattcatgtttaagaatttcctttaccactaaagaacttatccatgtaacaaaactacctttacccccaaaactattgaaataaattttttaaattaaaaaatataggaat

SEQ ID NO: 111224 - DNA, 579 bp, Homo sapiens
tcttctgaacaaccaataagtaaatgaagaaaatagaaatttagaaatttcttgagataaacaaaaacggaaacacaacattctaaatcctatggggcacagcaaaaaacaaaaagcagttataaggtgacatttttagcaataaatgcatacatcaaaaaggaagaataatctcaactgaacaacctcacattgcatgtcatgatactaaaaaaaaggagacaaactaaaccaaaaattaatacaacgaaagaaataataacgatcagagcataaataaacaaaattcagataataaaaattaaaaaaagtaaatgaaatagttaattttcttttaaaaaaaagataaatgaaatttaaaaaatctttagccaaactaagaaaaaagaaagaagacccaaataaataaaatgaagatggaaaaagagacattacaatagatacaacagaaatataaaggattcataagagaattataaacaattatacagtgacaaatttcatcacctagaaaaaaacggataaatttctggacacatrcaacttacaatgattgaattataaaaacttagaaaatat

SEQ ID NO: 111225 - DNA, 591 bp, Homo sapiens
tttacattcaaggataatattgatatgtgcgatttgggtcttatcatgaagttgttagctggtttctttgcagtttctattgtgtggttgttttatagtgtctccaggctatgtactcacatgtttttgtggttgtaggtattgatcttttatttccatatttagaactccctaaggatctcttgtatggctggtctagtggtaaggaattcccttagtacttacttgtctgaaaaagattttatttctccttcacttttaaagcttagcttggtgaaatataaaattcttggttgaaatatgtcttctctaagaatgataaaaataacccccaatttcccctggcctgtcaggtttctgctgagaagtcctctgctagcctaagaktccattgatatgtgatctgacctttctctccagctgcctttaatattttttctttagcataaccttggacagtctgatgactatatgcactgataatgttcattttgcatggtatctcacaggtgttccttggattgcttatatatggatgactacctctctagcaagaatagtgaagttttcttgaattattccatcaaatat

SEQ ID NO: 111226 - DNA, 605 bp, Homo sapiens
atttatcaacgatctaaaaacatttctacatttcatatgttttaattcaataagccttttccagtagcatactcatcttctttggagctcccaaactctgactaaaaataacatgttcttctaacatgatctgatcatgaccgctaccagttgaaagatctttctaggtttctggtacttataraatcctggctatgctctttaatataggctttaaccattccatttacttctgcctttccatcctaccgaagtcaactgtagatacagctccatcctaccgaagtcaactgtagatacagctccaaacaaacacctcttcccattcacaaatgcatatctaaacaccttatcttcttgtcctgaatatatctccttattttagaaacctcttctttttcaagatacagatattgcctcctctgaattgcagatagagttggacaattcctctaccctttcacagaccctctttgggcttctacaataccacctgctattatgttataattaaagattaaagggaaattagagttcaaatagcttcatctataacagtgggtataaacaaacttctctggatccgtagacaattacagccagta

SEQ ID NO: 111227 - DNA, 465 bp, Homo sapiens
ctccattctttctttccttttcttctggacacaactttactcatatggtattatttgaccatagcctatatatgcatttctttcctctctgtttctctctccctctctttccctttctttctctctctctccctttccctttctttctctctctctccctctctgttggtttgaaaactttatactgacctgcatttgaatgcactaatcctttcttttcctgaaaccaaattcattctcagtgtgtgcctattggcaagtcatatactctttttcttctttgaatggaatgtgggcaagcaatctagcatatggtgaagtatattgtccaaacacagaaagaggttcatatgttgggggagctaaacctaatgacagacgttcacyacacagttaatacgatatgcctttctaaagcttatttgccatatccttttatttttagttgtatttgttttagttttt

SEQ ID NO: 111228 - DNA, 475 bp, Homo sapiens
gaatgtgcgtatatgaagaaaatgcttcttggggaattatatttcaggagtaagcagatcatttgatacctggattttggrcctcctggctaagagtcctggctgagttcaccaccttgaaaccacaatctgggtcacaatactgcatgcctcatgagcaaagggagggtgtatgtaggcaggctgtataagtgtcagagtggagacaaactatctttgtttctagaatctcagagagcatcttgggaagcagagttctttgtttccggaagtcaaaaaaagcaagatccaagttgactatgacctctatggtctattcaggaaggtctgtcagaactacaccatccaccctctagctggcttattcctgtgcatatagaatgtctgtgctgtgtctgatcagaaccattccctcttcactttctaacacattttccaggcaggcaaggatcccagatgagaaccagaatatctg

SEQ ID NO: 111229 - DNA, 475 bp, Homo sapiens
gaatgtgcgtatatgaagaaaatgcttcttggggaattatatttcaggagtaagcagatcatttgatacctggattttgggcctcctggctaagagtcctggctgagttcaccaccttgaaaccacaatctgggtcacaatactgcatgcctcatgagcaaagggagggtgtatgtaggcaggctgtataagtgtcagagtggagacaaactatctttgtttctagaatctcagagagcatcttgggaagcagagttctttgttkccggaagtcaaaaaaagcaagatccaagttgactatgacctctatggtctattcaggaaggtctgtcagaactacaccatccaccctctagctggcttattcctgtgcatatagaatgtctgtgctgtgtctgatcagaaccattccctcttcactttctaacacattttccaggcaggcaaggatcccagatgagaaccagaatatctg

SEQ ID NO: 111230 - DNA, 475 bp, Homo sapiens
gaatgtgcgtatatgaagaaaatgcttcttggggaattatatttcaggagtaagcagatcatttgatacctggattttgggcctcctggctaagagtcctggctgagttcaccaccttgaaaccacaatctgggtcacaatactgcatgcctcatgagcaaagggagggtgtatgtaggcaggctgtataagtgtcagagtggagacaaactatctttgtttctagaatctcagagagcatcttgggaagcagagttctttgtttccggaagtcaaaaaaagcaagatccaagttgwctatgacctctatggtctattcaggaaggtctgtcagaactacaccatccaccctctagctggcttattcctgtgcatatagaatgtctgtgctgtgtctgatcagaaccattccctcttcactttctaacacattttccaggcaggcaaggatcccagatgagaaccagaatatctg

SEQ ID NO: 111231 - DNA, 179 bp, Homo sapiens
agtggttttctgggactgggggtgggagcaggattgagtgcaaaggggatccaggaactttaggaaatttgaagcaaacatcctaaaattggattacggtgcagtataggagaaacacaagtctatgayaatcatcgatcaacgaattgtacacttagaatgagagcattgttatataa

SEQ ID NO: 111232 - DNA, 179 bp, Homo sapiens
agtggttttctgggactgggggtgggagcaggattgagtgcaaaggggatccaggaactttaggaaatttgaagcaaacatcctaaaattggattacggtgcagtataggagaaacacaagtctatgataatcatcgatcaaygaattgtacacttagaatgagagcattgttatataa

SEQ ID NO: 111233 - DNA, 623 bp, Homo sapiens
tactgactggatgcaggctctcatctctcaccaccgccactgctgcctctacctgaacatgctgcccagaagcctgggaattgccccacctatttactatagtctgcatccatgtgcagactatatgcaggattccttgcacaattagggatagaaagatacccttatttcttctccattgctataggatgtttagtctgtcatagtgaagaagggggtataggacaggcacatctagactgscaccacccccctcaatgctggagcatgccacttaggggcctgtggattgccctgccccattcaccatatcttggatctgtgcatttccctcagcagcctgagaatgagcctgcccagccttccagcaccaccagtgcccacacccacccccacacatgccaccaggaaacctgagaactggcccacccatctcatcacagccaatactaacaccagtgtgtgctacctgaagctcaaggattatcccaccactgctattgccattgcccacagcacacttgctgcctatgggactgaggaaccacccacctgcccagcccattgctgctattgctggcacttaagccagccacctggagccacaaaaattagatcctctg

SEQ ID NO: 111234 - DNA, 607 bp, Homo sapiens
taacaaaaacaaagaactcattactaacatacttgctatacttgcccttgaaaaaatactaaagggaatcctttaggcaaaaaaacaaacaaacaaacaaacaaamaaaaaattagatagtacagatagcaactagaatcaacatgaggatataaagggcactggcaaaaataaactgcacaggcaaatataaaagataatattaatgtattttttttgcataatttttctaactgattttatttaaaaactggataaggtaatacttaaatctgcattgattggtgcaaaaatataaagatgtaatttgtatgacaataacagcaaaaagaaggaaggagagtataaagctatatacactatactattgaaattaagttagtataaaatgaaactatcttattataaatgaagatgattactataatccccagggccaccactaagaaaatataattttaaattttagtaaaataaacaagagaattaaaataatataatagaaaatatctccttaacaaaaaagtaggctgtaatggaagaataaagtaacaaaaaaaatgagacatgtcaaaagcaaatagcaaaatggcagatacatattcca

SEQ ID NO: 111235 - DNA, 607 bp, Homo sapiens
taacaaaaacaaagaactcattactaacatacttgctatacttgcccttgaaaaaatactaaagggaatcctttaggcaaaaaaacaaacaaacaaacaaacaaacaaaaaattagatagtacagatagcaactagaatcaacatgaggatataaagggcactggcaaaaataaactgcacaggcaaatataaaagataatattaatgtattttttktgcataatttttctaactgattttatttaaaaactggataaggtaatacttaaatctgcattgattggtgcaaaaatataaagatgtaatttgtatgacaataacagcaaaaagaaggaaggagagtataaagctatatacactatactattgaaattaagttagtataaaatgaaactatcttattataaatgaagatgattactataatccccagggccaccactaagaaaatataattttaaattttagtaaaataaacaagagaattaaaataatataatagaaaatatctccttaacaaaaaagtaggctgtaatggaagaataaagtaacaaaaaaaatgagacatgtcaaaagcaaatagcaaaatggcagatacatattcca

SEQ ID NO: 111236 - DNA, 502 bp, Homo sapiens
ccaatcagaaaatctttgaatccacctaggacttgaaagccaccctgcaacaatctccccacttccagttgtcttgcctttccagactgaacaagtgtaccacttatatgtattgattgatgtctcagaccccccccctaaaacacataaaagaaagcttttgctgtactaccttggktgcatgttctgaggacttcctgaggccatgtcacaggcatgtccttaaccttgggaaaataaacttctaaattgattaagacctgtcttagatacttttggtttacaaaacttgaacgcattttatttaggatcttgtttctactactatgacaaatcactcttggctaggttaacaataatttttatgttgacaaatccagtggatgaattctcagttctcatcttaacctatgaaggtttaatattcctacctctttgaaaaatttctttatttggtttcaagaccattcctctctctcctgtttcttcttctcctaccaaa

SEQ ID NO: 111237 - DNA, 457 bp, Homo sapiens
agtagaaaattttatagagttttccaaagtgattatacaaatctatactcccaccagcaatgtatgttacttccagctgctctacattttttttttcagtagctactttgttaggtccatagaaatattgtaatttcaattttgtatttctctcattaagaagcttgaggatctttctatatatttatyggtctgggttttcttttatcttatttattttactgatttatatgtattctgaatatgagtcctattttggatgtatgtattccaaacattttatttcactctttttcttgcattttcctttttctaacggcgacttttgaactaaagttattacttttaattttgtccaatttatcattctttttctttatgaaatgataaagtgccttttgtgtcctttttaggaaatctatgcagactccaagtttgttaaaatattttttatgtt

SEQ ID NO: 111238 - DNA, 595 bp, Homo sapiens
tgttttgtggtggctggtaacagtcttggttttttagcacccccttaagtacctcctgagggcagacctggtggtaacaattctcttagcatctgcttgtctgaaaaatattttatttctccttcacttatgaagcttastttggctggatatgaaattcttatttggaatttattgtttaagaatgctgaacataggccttcaatctcttctggcttgtagggtttctgctgaaaggtgtgctgttagcccgatgtgcttccctttgtaggtgaccaactgtttctctctagctgcctttaatattctgtcttttgcattgaccttggaatatctgatgactatgtgtcttggggatagtcatcttgtatagtatctcacaggggttctttgcatttctcatatttgaatgttgacatcttttgagatgtttgggatattttcatgtataatatcctcaaagatgttttccaaattgcttgttctctctccttctctttcaaggatgccaataagttgtaggtttgatctctttacctaatcccatatttctcagaggttttaattaagttttttatctgactgaattaactca

SEQ ID NO: 111239 - DNA, 601 bp, Homo sapiens
ccttttgtccttttgtagttgtgattgaggctttttttaaatgcccccaaatcttatctacctctgtaaatattctatatatactgtagaaatgtgtattttgctgtcctaggctgcagtgctgtataaatgtaaattaggtgaagtggtatacttaactaattttttatatgttctgtcagttatagagaaaaatgtgaaaattactatctaaaactgtggatttgattatctctactcgcaaagcacatctgattttggtttatgcataaagagatgcattattgtktgggattgttatagcctcttaaagtgacccctttatcattatgaaacaaacttctttatttctggtaatgttctttgctcttaaaattactttgaagataatatagccattgaaaattcattttatttagtgttttcatagtatattgtttattatctttttacttttaatcatttttgtgtttttttatgttggaagtgaatttcccaaaggatccatatactctggtcttgctttttatccaatctctctgaaggatttcgtttagcatttcttgcatttcttgtagtgtgagtctgatggtgacagatt

SEQ ID NO: 111240 - DNA, 622 bp, Homo sapiens
ttctttgtaggaaaatatttaggttctaaatatcaagggctgcaatcattcgctctgtgctctctctgtcccaagtgcctggcacatagtaacatgctctattgatatttatggattgaatttgaaaatgaatgcagtgttctgaagaggcacatttcctttaggtatcttaatatgcttcatatacacttaatacyatggtgtcctactggctttcctccatctttcctatgaccttatcaatgtatgtcccatatattacagccacacccatcatatttttgcagatagggcttttctttctgaagttttgtcatctgtttgttcataaggtcttcattttctgtaaatttttgtcacctaaaagctgccacagtccttctcattatttatattgcattagcttccttttgtataattatttaacttttgggataattatctctaatttcttaatagactttgaaattgagagcaaatactgtggcccatattcctttattacaatttatattattatttattacatttattttctccagtaagagctcaataaatatttactgtcttgggaagtttcccaaaacagaaaattatttctcaataatatacaatggtgtgg

SEQ ID NO: 111241 - DNA, 528 bp, Homo sapiens
ataaatccatggatttgtttctgggttctgtgttccattaatctatgtgtctgttttcatgccagcaccatgctgttttgattaatatagttttgtagtatattttgagatcacataatgtgatgtctccagctttgttctttttgctcaggattgctttgtctatttgggtttttttttgtggtaccatataatttgtttaattgtttttctatttttgggaagaatgtctggcatttgatagaaattgcattgaatcttagatcactttgggtagtattgccattttaacaatgttagttcctccaatcaatgactatgtattatatttatattttttgtgtttcctcttcaattkctttcatcattgtttcatagctttccttgtacagatcttttaattctttggttaaattgattcctaggtattttatgttctttgtagctactgtaaatgggattacattcttgaattattttacagattgtttgctgttggcatacataaattctactgatttttgtatg

SEQ ID NO: 111242 - DNA, 558 bp, Homo sapiens
aactcacttgcaaagctatctgctcctggaattttcactgtgggaaggtttttaattaaaaattatttttatttaatagataaatatttaatagataaataaaattattaattttaagtaagctacttaagtaatctaatttttcttgaatgagctttggtaaaaatacatttgaaggaatatatctgtttcatctaagttgctgaatttattggcataatgttgtttataagtttctcttattaacatttaatgcctgttggataagtaattatattctgtttttcattccygatattggtagttgatgtcttctctcttttttccattgtctggctggaaatttatcagttttattgattctttctaagaacaatcttttggttttgttgattttctctgcctttttttgtttgtttttggtttcattgatttgtgctcccatttttattatttacttccttctgtttgccttgtgaataatttgttcttctttttctagtttatgccagaactttagattattaatttgagtcctttcttctttactaatataag

SEQ ID NO: 111243 - DNA, 601 bp, Homo sapiens
tttgctcaacttccctttttaatactatcatttcttacttaatattttacattaacctatgtcttatccctcatgcttcctcgagggtctttagaaaactaggcagatttggttaatttttaaaacatctatttacacttagggattgtgaagaagccaggaaataagtgttttggatttctaaaatacacatatgggcatctttttatttattaacagcttttatatgttttcaatattaytccttaaagcagctgtttctttgagttctctttcacacctgcctgtcacttagaatttccatttgttaatttacaaatccaaattggaagcaacaaaagcaaagcacaaggtaattttcctgattttaaattttacttataaatttgagggtcatttagaagctctgtgcatacccagctagggtcacagagaagccactggcttttactctatccctaaatactgtttttgaggtgcaaatactaatataggacttaccagacttataatagttaggtttgtgtggttttcctccattaaattgtaaggccctgaaggaagcatttttctctttatccattattgtacttagtacgat

SEQ ID NO: 111244 - DNA, 601 bp, Homo sapiens
tttgctcaacttccctttttaatactatcatttcttacttaatattttacattaacctatgtcttatccctcatgcttcctcgagggtctttagaaaactaggcagatttggttaatttttaaaacatctatttacacttagggattgtgaagaagccaggaaataagtgttttggatttctaaaatacacatatgggcatctttttatttattaacagcttttatatgttttcaatattattccttaaagcagctgtttctttgagttctctttcacacctgcctgtcacttagaatttccatttgttaatttrcaaatccaaattggaagcaacaaaagcaaagcacaaggtaattttcctgattttaaattttacttataaatttgagggtcatttagaagctctgtgcatacccagctagggtcacagagaagccactggcttttactctatccctaaatactgtttttgaggtgcaaatactaatataggacttaccagacttataatagttaggtttgtgtggttttcctccattaaattgtaaggccctgaaggaagcatttttctctttatccattattgtacttagtacgat

SEQ ID NO: 111245 - DNA, 552 bp, Homo sapiens
tctgccttcccccagtgccagcaaaataggcgccaggtgtcctagcacgttcttcttgcaactaactttagaatcaaagctctcaaaagagcytatgctggttggctgaatcaaagtctatattctaattacaaggagatgggaaatgtaatatttgtaatgtctatgagaagatgaaattaatattatgaaaaggtatcaaaatatggggagagtgctcaaagatttcaagcatctataagtgacttttgttcatcacattctgggaggaactgagataacttaggagaaaatgaagatcataaaacgaatctaattaagagccacaaagatatggatcgatatcatatccatccattcaaagtactaacaaaaagaagcaaaaaacaagaagtaggttgtgaaaaattaaagatataaatgcataaatgaagaatgtaatacattgggtgaaataaatagatgaaaacatctcccagaatatagaacaacaacaacaaaaacaccccaaagaaatggaaaatctgaggggaaaaaaataagaaatacata

SEQ ID NO: 111246 - DNA, 552 bp, Homo sapiens
tctgccttcccccagtgccagcaaaataggcgccaggtgtcctagcacgttcttcttgcaactaactttagaatcaaagctctcaaaagagcctatgctggttggctgaatcaaagtctatattctaattacaaggagatggraaatgtaatatttgtaatgtctatgagaagatgaaattaatattatgaaaaggtatcaaaatatggggagagtgctcaaagatttcaagcatctataagtgacttttgttcatcacattctgggaggaactgagataacttaggagaaaatgaagatcataaaacgaatctaattaagagccacaaagatatggatcgatatcatatccatccattcaaagtactaacaaaaagaagcaaaaaacaagaagtaggttgtgaaaaattaaagatataaatgcataaatgaagaatgtaatacattgggtgaaataaatagatgaaaacatctcccagaatatagaacaacaacaacaaaaacaccccaaagaaatggaaaatctgaggggaaaaaaataagaaatacata

SEQ ID NO: 111247 - DNA, 560 bp, Homo sapiens
cttcatttacactctcagctggtgaacttacttcttacttgactaaagaattgaaagcaatgcaaaaagaatgtccacagatttctacatttacatttgtttacttattatcgtctgtatccattaacttaggtatttctcatagtagtaatgaaggaactgtctttgctccagtcctaagtgaatccttccattggtgtacttgctctgatccactcagttatcccaaggccaatcccccaggaattactccttcccttcagcaacatcatttctttcctctccttggactcaatcctattagtggatatacaggtcatttgttttctattaaaaatcttaattctcatttttcttctagttatttcttcacatttgtgctcatgtttacagcaaaattatttttggaagagttgcctatacttatgatcataaatctctcttattctaaactcatttaaacctactgtagttagttatctgccccctttttaaacaagycttgtcagttttaccagtgaccttcatgttgataaatacaaagatattttttggtcctc

SEQ ID NO: 111248 - DNA, 679 bp, Homo sapiens
ggagctgtggctgaccttgcacttgccatgatcgtaccgtgttagctgtgatgtctttaactttggggctcaagtttccccctctgtgggattgagatgataataatggtttctactgtaagagaagaaaagaaattgctattcaaagtccaactcacttctaaggaaaatggctctgtaaaaacagaaattgactaagcacaaataggcccgggatataggagcggatgccagggaggggcttgtaaaatcaagaggaatttgaactttcctgggactatttgtgggcatggtgaggaagggctcaagaagggaggctggggtggagagaagaccaggctggccactgaggcagccatgagccacgtttggctactgagctcttgaaatgagctcagtcagtgtaaaatatacacagtgttgaaagacattatgaaaaaagaatgttaaaaccatcattcatacttttaaattttgattacatgttgaaattcaaattcccaatattggataaaataaggaaggttaaaatcaataaattaatttttaataccactaccaggaaatattaaattgcatacgtagattgtttttctgttggatggtctrggttacagttattaataaaaggaagagtcaaatgtgccctataatagagtgggtgattttatttttaaag

SEQ ID NO: 111249 - DNA, 477 bp, Homo sapiens
ttatgttgcatgtgagaatatgtgtaatagaaatagagtgttttatgaaacactagtttccaagatgcaaaagcactgcatactataattcttttttttttttttgcatactctacttcttaattctgaagagaagtacattcaacacagctttacacaaattcagcaatttgggcaactcagttatacaactgccatgtaaatccatggggtgaagayaaaatgtttctgtgagatactaagtactaaagtcaaggttaccattttcacacaaaaacaatttctgtagagaaatatctgtggatataaaatggatttcatgacattcagcaacccccttttcctccatccagagagtcaacttgtagtcatcttccaagtggatgttagcaaccatgttgcaatagcaacaaacgttcagcagtgaaaattacagtaaatgtgttgctcaaccacatattcagtcacctgaaaata

SEQ ID NO: 111250 - DNA, 477 bp, Homo sapiens
ttatgttgcatgtgagaatatgtgtaatagaaatagagtgttttatgaaacactagtttccaagatgcaaaagcactgcatactataattcttttttttttttttgcatactctacttcttaattctgaagagaagtacattcaacacagctttacacaaattcagcaatttgggcaactcagttatacaactgccatgtaaatccatggggtgaagataaaatgtttctgtgagatactaagtactaaagtcaaggttaccattttcacacaaaaacaatttctgtagagaaatatctgtggatataaaatggatttcatgacattcagcaacccccttttcctccatccagagagtcaacttgtagycatcttccaagtggatgttagcaaccatgttgcaatagcaacaaacgttcagcagtgaaaattacagtaaatgtgttgctcaaccacatattcagtcacctgaaaata

SEQ ID NO: 111251 - DNA, 607 bp, Homo sapiens
cataagaacctaaaattatgttttgttttkttttttattttagttaggttctgatttcgtcaattgagaaaatggaaactgtgaattaaaaatattcttgtgaagggttgagaataccttagttttctatattcaaaggaaggatatgctatttttaaaagaaaatctgaatcacaaatgttttaatacagtttcaggtaacagttgctttgccatacactcttcttggctgcagctgacttccacactctatattcctcagtaaggacctaagcttcatggggatagggctttttatttgctcatttctctagttctagtgccagagcagtgcctggtgcatggtatattctattattgaatgtgggaatcaataaaatataagaagaaatgtactcttgattttacctctctggtacacaatcatgaacaaatgtttggtgaagtaagaatgatactcataatcagcactaatttctttcctactgtcaaggtgggtgttcatcggcataccaactctttctaattgatgttttgaaaaatctccttgccaaacattagtgacttttgtcctgccatgtttacatacctgagaccaagcacaggc

SEQ ID NO: 111252 - DNA, 504 bp, Homo sapiens
gtttataagagatatggaagcgagaggagtgaagggaggaatgggagggaggagtgtttctaaattccccatcaactggaatgttagtggagatgggctctcagtaaaagtgctctgcctgccacccatggattccagarggtttcaggtatcttccttgcacaagattgagaaagggcgaaacagcacaccagtcacattttgttctggtatttctcacacagatagctttttcagaacttaggattcttgttgatttcaaaagacaggatgctgacttaaacaattcagactagttattctgtcttgccaaaggacgatccacatggcctgagatcattgagggtaaaatgtttgccttctagggaaaattctgcctgaggtttactgtgacagatggaagaaagtgatattgtctttgtttataaagtgctcacttacctgtgttagaagcaaaaccagctcttgtaaacaaattgacaccccaatgccacaggtaattat

SEQ ID NO: 111253 - DNA, 575 bp, Homo sapiens
aataaattcaagctgtttgcatgcagttaggtgatttgcatgcagttaggtgatttgcatttcttccattggatatctgaaaagtgatatatctgctcagatttttgtatttccaagagttccaacacttctggcctctgcaagaagatagcaccasaagagcatggcaataaagtgttactaaatgcacaagtaatgatacttaattctctgttttaaaaaaacatgtgtatttatgtcttccactgtgctttttcatttcataaattgttattattgaataattgaaatgttcagaagtagccagaatgctataatgaaccctcccgcacccatcacccccacacactattaatgcctcacctgtgttctttcatataaacctctgccaactcacctctctttattttgaagtagaactcagaaatcatttcgtttcatccttatatattgcagcatgctctagagttcatttgtaactcaagaaaagagcaataatgtaattccagcaataaaagtctctttaaaaaataccatcttttgaaaaggaaatctctctccattaaaaataattc

SEQ ID NO: 111254 - DNA, 575 bp, Homo sapiens
aataaattcaagctgtttgcatgcagttaggtgatttgcatgcagttaggtgatttgcatttcttccattggatatctgaaaagtgatatatctgctcagatttttgtatttccaagagttccaacacttctggcctctgcaagaagatagcaccacaagagcatggcaataaagtgttactaaatgcacaagtaatgatacttaattctctgttttaaaaaaacatgtgtatttatgtcttccactgtgctttttcatttcataaattgttattattgaataattgaaatgttcagaagtagccagaatgctataatgaaccctcccgcacccatcacccccacacrctattaatgcctcacctgtgttctttcatataaacctctgccaactcacctctctttattttgaagtagaactcagaaatcatttcgtttcatccttatatattgcagcatgctctagagttcatttgtaactcaagaaaagagcaataatgtaattccagcaataaaagtctctttaaaaaataccatcttttgaaaaggaaatctctctccattaaaaataattc

SEQ ID NO: 111255 - DNA, 564 bp, Homo sapiens
tgggttcctccaaaacctgactctaagagggtaatcccaggaagcatggtaggatagtgggagagtgtaataggaaaagccgatgaagcgtgcatggatgagtgagttaatgctgtttgacactgaaggctagttctacagggcaccctctaatagactatatagaaaacacgtcagaattgtctcactgaggaaaattggagtctttaggcaccaactctcttccgaacttggtaagggtcarttctaggcatacgtccctggcactttcgtgctcactgcttttcaggcagagaaaaaggaagcagttaatatacgtggggattgtctacatacaggtgtctcagggtgaaccaaggctataggaaggggtgactacaacttctactctactttccaactggtcttacttctgtccttttaaatctggtcttaacacagtcagaaccacagaatctatggcatctcatgccacttttatgctgaaaatcatccaacatctccccaaatcactccaagtaaaaactctaaataccatccataagaacctccaaaatctgatct

SEQ ID NO: 111256 - DNA, 672 bp, Homo sapiens
caaacagcagtgattatgacactgctgctgagatggcttggaaaacatgctttagagaggagaatgagcttctgaaaatcagaaagcatatctcatatctttgggagtgtgtacacaatgaacataaaaaactcaatagatattgcttctgattaaaatcaacccggaagagagcctttatcaatgaatatttgtaatggcaagaaacaaaacctgtgactaacttacacaggagaaaagagtctgtgacaaaatactaggcagctcacagatttgaaaggaaggctaaactagcagacctcaggaagggcagaaaccagagtagctaggacctcatacayaggagctagtagatgccattgggcactattgccactccaattcctttcatacctggttattcaggcaagatcccagttactaggagacagtctgtgtggtctagcctcattcatgtgtcccctgctgcggttggggtagggcacagcaaagtcacatggactggggaaagagtgtttccctaaggagaggatgaacaggaacaaaaaagtaataattgctcagtaacttttcctatttgatttgatactaatatttcacatcactctacagtttacaggacaatttttacatattgtctaatctcatttcattttacaacttgtgagttag

SEQ ID NO: 111257 - DNA, 546 bp, Homo sapiens
tggggaggaggagggagggcttactggatcttgtgcctaagaagcccaagtgtaggctgggcatggtggctcacgcctgtaatcccagcactttgggaggccgaggtgggtggatcacctgaggtcaggagttcgagaccagactgaccaacctggtgaaaccccatctctactaaaaatacaaaaattagccaggcgtggtggcaggcgcctgtaatcccagctactcaggtggttgaggcaggagaactgcttgaayccaagaggcagaggttgtagtgagctgagatcgctgagatcgctgagatcgctgaggtcgcaccactgcactccagccggggcgacaagagcaaaactccatataaaaaaaaaaaaaaaaagatgttccagtgtagagcagactccaaatatggctggatcctaggataaaaataaaataacataaaattggtcttattgccagggtccatgcagcaagatgactgtaaacttaaagtaagtcagctttcctagtagctgtaatgaagtcatgtgcccattcttgaa

SEQ ID NO: 111258 - DNA, 587 bp, Homo sapiens
gaattcccttgtggcactgtatttcagagtaaaatagcacaaatgcattttaaattcaattgtttaaaatttatacttcatgacagtgctgaaattattctgttgttgtcagcatttgtggctatccttttatgctgaaccagcacctatgaaggcattatacagtggcctttgtttaaaattttatatatgatgatgattttatattctagatatacactaaaggaacataatgaggccaacatatttctgccccctagaatataaagttgcagtatcaacttataagcaaacccacactataaggataaaaaaagatgcaaaaaaagttattgaaagaagttgtttataaaaaaaaactctttagamacataaaaccaaagagtagccaatggtagtacctgcttcaaaatcagtttatgttcatatgcccatcccttgctatatcattatttccttgcttgcatcatcatcaactgtcatatacttgtaacaacccctagaggttaggatatcatgtaaatttaattttctttgtatccttacagcataattatacttaaagaaatttaatagatatgttatag

SEQ ID NO: 111259 - DNA, 539 bp, Homo sapiens
ataaaatgtaaaacatttaaatataaataataattccttaaacaaattgatactttacaacataaatcatgttaatatttctgatatttgagctaaataatattttaaaaactcagaacccttcaagactgataaaaacattaaaagcctttagaagtcttctgtatggcttaattaaaaatgtaayttcaaagggtttctgtgtctaagcaaagagataatcatactccttttccactaagcaaactaatcaagcagctggactttcatggaaaacagatttaggctgaactatgtattacagactttgaagaagtaaataatctcattaaatgtcacctaaataatgattatcatttatgtaaacgctaacattgttatacacattttgtataaaacaaaatataaaataattctacatttataagttttaaagtatttttaatttaaatgtttaaattaaaattttaaatttaaatatttaatttatttaaatatttgaatttataatacgaacacttagatattaaatatattaa

SEQ ID NO: 111260 - DNA, 613 bp, Homo sapiens
accagtaatctttgaaccagatagagtcaataaaaggggcaaaaagagtgaaagggggaaagattggatggggattatcagaaaagcccatttcagtgttagtaatccagtcttctgcctgccaagggagtggttgtctgtcctcttacacaagcctaatgagtgggacttcacagaagtttttgaagagtctgctgtgggtccccttaaaatctaggtggcatattagaggaaattctgaattaggtgtgaccagctatggctatttaactgaggtggaaggacaaatagaaacagttacttttaggaartatttgtactaacactgaagtcaagaaaaagaaagtatgtttcttccagctagccagcatctacttaatattctgaccaacaggattgcctggaagcgctggaggacttcaactgaaaactgaagtaaaagttgccagaacaggaagaaagtatgtgtctcccacagatcacgagaattgcatctagaaaggtcaagactcagaagagcccccaaagacatttatgtgagaatggatcagccattgtgcatctctcacacagaggaccttaactaaatatgacaactattcttcacacataa

SEQ ID NO: 111261 - DNA, 613 bp, Homo sapiens
accagtaatctttgaaccagatagagtcaataaaaggggcaaaaagagtgaaagggggaaagattggatggggattatcagaaaagcccatttcagtgttagtaatccagtcttctgcctgccaagggagtggttgtctgtcctcttacacaagcctaatgagtgggacttcacagaagtttttgaagagtctgctgtgggtccccttaaaatctaggtggcatattagaggaaattctgaattaggtgtgaccagctatggctatttaactgaggtggaaggacaaatagaaacagttacttttaggaagtatttgtactaacactgaagtcaagaaaaagaaagtatgtttcttccagctagccagcatctacttaatattctgaccaacaggattgcctggaagygctggaggacttcaactgaaaactgaagtaaaagttgccagaacaggaagaaagtatgtgtctcccacagatcacgagaattgcatctagaaaggtcaagactcagaagagcccccaaagacatttatgtgagaatggatcagccattgtgcatctctcacacagaggaccttaactaaatatgacaactattcttcacacataa

SEQ ID NO: 111262 - DNA, 533 bp, Homo sapiens
acagaattcctttgcataatttgtgatgaaagtagtttaaacttcagaatgatttactgcaggtctcagggaaccagcatgaagaactacagaacgtcagaaaacacatccattcctgtttcaccaacatttcctgttttctgctacctcatcctggcttaaaagtagctaccaatccaaactttgatggaaaattgaaaggtttgtgtcttttaatgaatatgtttgcatcacttagtctgattataaaaatgtcattttatctattgggcttatggctgatagtttagtttatccactgataggaggctgatgattagaaattgtcaggagaatagggcatcctgggctggtgctcctccttggtgaactgtgggattctatgggcgctggatgtatacactgcctgcaaaaataggccggatcctgagttcacccagaaggcagtaaccctcaccttcttatctctgtgcactgagaagtgctycttaatatttttaggcttaattttccttatctacatgaaaaaggaa

SEQ ID NO: 111263 - DNA, 654 bp, Homo sapiens
tgcccctagaggcaggcctgaagagctcagtcttagctgtgaccctgaagcagccctgtgacttagtccctccaagctgtggtccaaggtcagttctgcccacccagagacctacacaatgatccaggaggagccacactcacctatgcatttagtaacaagcctactatcaaccaactacagatcctgaagcagacccttgtcccagtgccagccctactgaccaaggtcttggaagtagatccattcacccagataccaggcaggatccacatctgcttgagccactggtaacaaacctgccaactgcagagcccagtagtagctacatgacctggctacaaccccacttgacttcttttgtcagatcccaggggtgatggcatcacttgactgtgctcctagaggaaatgccatcagccctgggagcygacaaaagaagatctttacctgccaaaaccagtctataaagactgaaaaatgtacttgcttcttaaatgcacagacactaatgcggagctacacagatcatgaagaatcaggctaccaaacctgttactaccataacaccaccaaaggaaattaataaagctccaatatctcacgccaaagaaaggagatctacaaatcatctgacaaagaattcaaaataat

SEQ ID NO: 111264 - DNA, 610 bp, Homo sapiens
gccaccactgtgccactgaagccctccaggtggatgccagggaattctactgggggttcacagggtgtgaagatgtggaattgttggttctcagaagaggatgcagtctggtggaagctggactctggccatagtgccctactacagctgcttatgtcttgctatgtgatgtggtgcaagtttcccgcttgcagcaatgccctggcaggcctctagatcaccacgctgtagagcccccrcctatgctaatctcagagctgtatagatggaagaggtctcctgtggttaggattgcagtagtctaaggtaagactgtgtacccctaacggctcacactgaccctttccccataatagggagccgttccaggatcccagctggtcctggctgagctagctgctagcttcctctccttctgtgcctcaggtgtttcctgtgacttctctcttaaactctagtgttctttcctagataaattctgttcaattctattcagtgtgtgattatctattaacagttttacttctttctggggaggaagagtgtctgatgtctctagttagcatcttaaaacctctctccaatatgtggttctattgtccacatgtct

SEQ ID NO: 111265 - DNA, 498 bp, Homo sapiens
actctctgctaacttgtataactacacagcaactgatacattattttgggaaagattcctgtttgggtaataaaatgaaactattttgaagcataaatgaattgtattaggttggtacacaagtaattgtggttttcgccattgaaggtaatttcaaaaaaacacaattacttgtggaccaatccgatatatgtaacacattgtatctgtgtgtgattttttttcttttggtgtctgcaaaatgtgctgagtttattgcagccacagtactccataggattgctttgtgtatttcaagtctttacccccatctgggctggatacactgagtgctaaattcacttccttgtcattttattcttctcctgtcagcytcccatccgttgatcaaaaaatatccagaatccccagagtcacaaataagttctacatttggccattacattgatctttcttatttagcatatacttaaaaaccattttctattgatcatagtc

SEQ ID NO: 111266 - DNA, 592 bp, Homo sapiens
atatagtacatatttttcagatgctgagtaraaaggggaaagggccatgtctctgcttccttttgctcaccaaaaagaccaaaacttaaggatgtaaaagatgggattttcttgcatagtgtaagggtgttcttattcaggggtaagaaactcaaggtgtaatacatatgggtgttgcacagaattctattcatgcacacacgcagcaagtgtagatagaatatgctcctaaaatagacttactggtgaaaaaaatgtttctgaagaacaaatcacctctaaaataagctgtatgggtaataatcttgtttttgagtgaggcaatctttacacaagtaactcaggtactcagccatcttcaattttattctggttttatttatcaccagccttgatgaagttcttcataaattctccataaaatccacccagaaaataaattactgggtaatgaataatgtaccaaaaatttcataaggagccataagagagtgcttaccaaaaccgagcaaattccataccaaacctagtccaatagccatcatcagaaaagtcaagtatcccaggtgattttctcatgtgccctgcaaca

SEQ ID NO: 111267 - DNA, 613 bp, Homo sapiens
aatcaaaccattaaaataattacctctaacaaacactttcaataaataagtccagataatatcagagatatttggattttggcaaaaattgtattctttactaaaaattactttagaacctattgacaatgtcagaaaaatctgatttttcaaggaactctaagcagaaacatttttttttwaaaaaaagagagtagtaccagaattaactcacctggatcttatgattctacaattcagatgagatttgtcatatatgcagtaagaagatatgtagaccaaagtattttgcagaaatttaataggacttcttaaggagggctacttggtgttcgacttttcttcctcaagcagctgctcatatgttccatatgaaagagagttgatgacttctaaactgcccccaccattggagagcatcagagaactctcaagacatatcgtcttagtatcagagagatattcgaggaggtgatgaagcaaactcattcataaagtagaagtggtacagtcaaacacattttaaggagctaatctcataggtagtctactgtatacatgagtatacatttctctgcttattgggccagtaataggtttatttgaaaactct

SEQ ID NO: 111268 - DNA, 613 bp, Homo sapiens
aatcaaaccattaaaataattacctctaacaaacactttcaataaataagtccagataatatcagagatatttggattttggcaaaaattgtattctttactaaaaattactttagaacctattgacaatgtcagaaaaatctgatttttcaaggaactctaagcagaaacattttttttttaaaaaaagagagtagtaccagaattaactcacctggatcttatgattctacaattcagatgagatttgtcatatatgcagtaagaagatatgtagaccaaagtattttgcagaaatttaataggacttcttaaggagggctacttggtgttcgacttttcttcctcaagcagctgctcatatgttccatatgaaagagagttgatgacttctaaactgcccccaccattggagagcrtcagagaactctcaagacatatcgtcttagtatcagagagatattcgaggaggtgatgaagcaaactcattcataaagtagaagtggtacagtcaaacacattttaaggagctaatctcataggtagtctactgtatacatgagtatacatttctctgcttattgggccagtaataggtttatttgaaaactct

SEQ ID NO: 111269 - DNA, 613 bp, Homo sapiens
aatcaaaccattaaaataattacctctaacaaacactttcaataaataagtccagataatatcagagatatttggattttggcaaaaattgtattctttactaaaaattactttagaacctattgacaatgtcagaaaaatctgatttttcaaggaactctaagcagaaacattttttttttaaaaaaagagagtagtaccagaattaactcacctggatcttatgattctacaattcagatgagatttgtcatatatgcagtaagaagatatgtagaccaaagtattttgcagaaatttaataggacttcttaaggagggctacttggtgttcgacttttcttcctcaagcagctgctcatatgttccatatgaaagagagttgatgacttctaaactgcccccaccattggagagcatcagagaactctcaagacatatcgtcttagtatcagagagatattcgaggaggtgatgaagcaaactcattcataaagtagaagtggtacagtcaaacacattttaaggagctaatctcrtaggtagtctactgtatacatgagtatacatttctctgcttattgggccagtaataggtttatttgaaaactct

SEQ ID NO: 111270 - DNA, 634 bp, Homo sapiens
ggcaatctcttggagactaagtatattgtggattgagtgtctttacatttaacttcttaactacagtttgatttctattttcaaccttgcatagaatatggtaagaaaatttaagcctgagtaaatttccatgtaaaaaccctttattatataccagcatgtaggcagttgtaggtccaattcctttttgtcaacacaatagcagkttttttttttttttcattttgcctcaaaaacaaaggtcaattgctttttcaatagctatactctatgtttcctatccattagacatgcgtcatggcaatgatttcttaagatattttcctgaggttcaaattttcttttgagtagaaaagaaagtgagatccagctgcttttttcatcgtatatattctcacttgttcaggctgttatttttttcagtttcttttttcctctgaggttatgtatgtttatgctatgtaaaaggctgaagcccctggctcccttagggcaaatcagaattcctatatgagcagcacactgtagtttgtaatgtttcattgttgtactgtattaaatactggtagctgcttctcactagtaccttgctcctgaaattgtctcagtgagatttgaatagcaataagctgtg

SEQ ID NO: 111271 - DNA, 634 bp, Homo sapiens
ggcaatctcttggagactaagtatattgtggattgagtgtctttacatttaacttcttaactacagtttgatttctattttcaaccttgcatagaatatggtaagaaaatttaagcctgagtaaatttccatgtaaaaaccctttattatataccagcatgtaggcagttgtaggtccaattcctttttgtcaacacaatagcaggttttttttttttttcattttgcctcaaaaacaaaggtcaattgctttttcaatagctatactctatgtttcctatccattagacatgcgtcatggcaatgatttcttaagatattttcctgaggttcaaattttcttttgagtagaaaagaaagtgagatccagctgcttttttcatcgtatatattctcacttgttcaggctgttatttttttcagtttcttttttcctctgaggttaygtatgtttatgctatgtaaaaggctgaagcccctggctcccttagggcaaatcagaattcctatatgagcagcacactgtagtttgtaatgtttcattgttgtactgtattaaatactggtagctgcttctcactagtaccttgctcctgaaattgtctcagtgagatttgaatagcaataagctgtg

SEQ ID NO: 111272 - DNA, 583 bp, Homo sapiens
aggctgaggctagactaatcctgaaaccacatctttgctcagctccttgtcctgccccatcctgcttctctccctccctccttcacactcttctcccaggaatgcccctaggagtcacttgcacaaaatctccatctcaggctctgttactaccagagccaagacaatatacataccctgcttgttggatgtatttcttctgcccctccagtctcactctccccttctctctaccctggtctgtgtcccaggagacgactgamctgaatgcacatgtcaacaggctctcttgtccaccggcttctagtggggtttgaccaatgggaggaattagctttagaggggaagggtctgcggcggcacattgaggtcaggtttttatttccctagctccttcctccttgcaggttgtcttgggtggaccatgacctctacatacttctccaagaaaatctctcagcaagaaaagcctgagagattgttcaattaagtctccctgatgacttcagggagagctcagggaactgaggagaatggaagacagatggtcagttgttgagtagagagttacagatgctgtatc

SEQ ID NO: 111273 - DNA, 574 bp, Homo sapiens
ctgctgacaccgacaactggaactgacaggacaggaggcagaagcaaggagagtcctatttgtctttggcgaaatgggcctgaattcttctcttcccaaaaagatgcccaggagacaacagacaagctaatgaactggaaggcagccaaaaggaaaagtaaaaatctcacttgccttctctctagtgctaccctttggacctgccagtcttctctgagggcgtacttactttcctctctccctttgctcctctcagaggtgcctcccttccttgaaacttcttcacctttgcttcaagagcaccacagagcagattcttcaaggcaggtactgccatatctttatgttaattactgtggggtgtcccaactcggtcatgaaattcagctctctatcccaccaaaggtgtttatatcttactattctaaggtatgcaatattgctaggattrtaacaatactctatattttaccagagccttcctcccaaattgctcaaaacacttctcttatgctcttctctttcctctttgtgtctccttgaatcattctctgacacttttaaaatgtgtacc

SEQ ID NO: 111274 - DNA, 454 bp, Homo sapiens
atctgttgagggtctgaacagaataaaaaggtgtaggaaagttgaatttgctctgcctgaatacttgagctcaaatattgatcttytgtctttggtgctcctggttctcaagccatcagaccctggtggggatctacaccatcaatatgggctttcttgggtccccagcttgcagttcacagatcctgggacttctcagcctccataatagcattaaccaatatcctaaaataaatctcttcatctatatctctatataatatatagttatatgttatatatcaataacatatattatatatataatacatctcttcctatatatacatgtatacacatacatgtatacatatacacgtatatatacatattgattctatttctctggagaaaccctgactaatacattcaggtagttttggaagctgaggcttacatatattcggtataagtc

SEQ ID NO: 111275 - DNA, 578 bp, Homo sapiens
ataatcttaacttctttcacttcccctttttatggctggaaaaaagtaaatactatctccaagtaatatgttcaagggaaatgcacatgtatttaccaagaacaaagtggtaaacattgtttctatgggttaccagaaattacttatttcacggcaaccatattgcatcagagttgcctcatttctactaaatgaacaataaaatcgcacttctaagaagaatgtctggagtttgagcaataactgtaaaattaaggagacttcagtgggaccagatgtttgtaattacatttaaactgctgcgaaggcattgaaaaattggctaggtaaggaaataaaacctgaggctgatcaatagtcaggagattacttttcatacagtcctatgtgaactttttggcagatcattatcataaataacattgatcttcaaaaaagcatttagaacatattagatgagtgaaatagtaccttctggtgtttttttttttataaatagtattcargttcaactaaaactctttaccttcatacatacaaggggaatctctcttaactggttaccctaacaaaacatc

SEQ ID NO: 111276 - DNA, 323 bp, Homo sapiens
atgcttacattagattactgaatctttgtgtattttgacgagcatctctccttttccgccaccttccagcccctgggaaccaccattctactctgctttttagattccatatgtaagtgagatcatacttttattctrccttctcgttttcaagggacaaagtgacgttttcttcaaatcaggttaaactattgggtactatgctcactacctgagtgctgggatcagttgtaccccaaacttcagcatcacacaatatacccatgaaacaaatttgcacatggacccccaaatcaaataaaagttgaatttataaaaataaa

SEQ ID NO: 111277 - DNA, 648 bp, Homo sapiens
gtatcaaaatcttcttaacatggtataaatatattaaagagcccagcaaataaatctaataactagaaagaatcatgaaagaatctttttttctagtttcatgcagaaagataattcggctattgaagaaacataatgtctaaaaccaaacagatagaataccaactatttttgatacattgatactatactctagaaaatttgtttatttatgttatttggagagttgaaatgatatttttatcattctataattagaagggcagatgaaatttctaaacagtttaattgagatatagctcacatacattttwtctatttaatctatacaatttaatggtttttagtaagtgcatagaattgggttactgttactaagaaaagaaactatacattagcaatttttcccattttctacaaattctccagccataagcaaccactaatctaatttcaacctctgaagaatgttctattctgaaagtttcctacaaatgaaatcatacaatatggttgtttttatgtctggcttttttcattttcaaatttttaagattcagtcatgttgtagagtgcacccgaacttcattcctttttattgccaaataatattatattgtatggatgtaccacattttgcttttgcat

SEQ ID NO: 111278 - DNA, 569 bp, Homo sapiens
tttggacagcaatgtcaatggttaaaattagtagaacttgcccatttttcaactgaatcatcaatttatattagcagcaatattgtttgggttcccatgtagtaacaaaaataaacttacttatactaaaagtatggataactcttagcttacacacacttaacgccttaaaatatagttacaaacaacagacttcagctgtcataaatgttattagtgcctaatttttaggtccaaaggtaagttatcagatttatctttcccataacagtgaattaggtacttgaacaaatccacatgataagaacaaatagaaaaactggagagtatatacagaaaatatatgttgtaagatatagagcwaccagggtaataaaagtctggatctgtgaggaaaaactaaacaaaacaatacttttatctaagtatttgaggccctaatttacttagcaggcttagaattttagaggaagtttgaacagacttacaaggctagggggacaaaagttggaatttaggatctaccagggactgggagccctgatggacctgacaagtattacagaggt

SEQ ID NO: 111279 - DNA, 577 bp, Homo sapiens
ctgatgtttcctcatgattagattcaggttatttaaatttttgataggaataccaacaaagtggcttttcttatcccacaaagagtcttgcttaatctgagcatagccagcctgcagacaccatggacaggcctctagccgagggaccccgtatgtaaagttctgcatatttctacytaggaggacggagaacctctggtctcttgactctgtaacagtgctaactgttttaggtaactgttcctgatttacgaagtaagcttattagaagagtccctgtcccacctcagctgttattagtatcttgctaagctcccacatgggaggaagtgagcttccaagatcatctggatttgtctttcttcactttttctctcctcttttcttcttccttatttctctcttcttctataaatcgccaaatcctctcccctaacagcgacctagaagaaacaaaatttttatcagattacaattttaggaaggaataagataacagatattccttgattagttgatggagagatgaatggacacgaatacatgagagttgatgctttggcttcgttttatttta

SEQ ID NO: 111280 - DNA, 577 bp, Homo sapiens
ctgatgtttcctcatgattagattcaggttatttaaatttttgataggaataccaacaaagtggcttttcttatcccacaaagagtcttgcttaatctgagcatagccagcctgcagacaccatggacaggcctctagccgagggaccccgtatgtaaagttctgcatatttctacctaggaggacggagaacctctggtctcttgactctgtaacagtgctaactgttttaggtaactgttcctgatttacgaagtaagcttattagaagagtccctgtcccacytcagctgttattagtatcttgctaagctcccacatgggaggaagtgagcttccaagatcatctggatttgtctttcttcactttttctctcctcttttcttcttccttatttctctcttcttctataaatcgccaaatcctctcccctaacagcgacctagaagaaacaaaatttttatcagattacaattttaggaaggaataagataacagatattccttgattagttgatggagagatgaatggacacgaatacatgagagttgatgctttggcttcgttttatttta

SEQ ID NO: 111281 - DNA, 577 bp, Homo sapiens
ctgatgtttcctcatgattagattcaggttatttaaatttttgataggaataccaacaaagtggcttttcttatcccacaaagagtcttgcttaatctgagcatagccagcctgcagacaccatggacaggcctctagccgagggaccccgtatgtaaagttctgcatatttctacctaggaggacggagaacctctggtctcttgactctgtaacagtgctaactgttttaggtaactgttcctgatttacgaagtaagcttattagaagagtccctgtcccacctcagctgttattagtatcttgctaagctcccacatgggaggaagtgagcttccaagatcatctggatttgtctttcttcactttttctctcctcttttcttcttccttatttctctcttcttctataaatcgccaaatcctctcccctaacagcgacytagaagaaacaaaatttttatcagattacaattttaggaaggaataagataacagatattccttgattagttgatggagagatgaatggacacgaatacatgagagttgatgctttggcttcgttttatttta

SEQ ID NO: 111282 - DNA, 577 bp, Homo sapiens
ctgatgtttcctcatgattagattcaggttatttaaatttttgataggaataccaacaaagtggcttttcttatcccacaaagagtcttgcttaatctgagcatagccagcctgcagacaccatggacaggcctctagccgagggaccccgtatgtaaagttctgcatatttctacctaggaggacggagaacctctggtctcttgactctgtaacagtgctaactgttttaggtaactgttcctgatttacgaagtaagcttattagaagagtccctgtcccacctcagctgttattagtatcttgctaagctcccacatgggaggaagtgagcttccaagatcatctggatttgtctttcttcactttttctctcctcttttcttcttccttatttctctcttcttctataaatcgccaaatcctctcccctaacagcgacctagaagaaacaaaatttttatcagattacaattttaggaaggaataagataacagatattccttgattagttgatggagagatgartggacacgaatacatgagagttgatgctttggcttcgttttatttta

SEQ ID NO: 111283 - DNA, 569 bp, Homo sapiens
gaattcttgagggtgtccctagggatggagcagagaggaaggggatcccaggcggcgagcaaggagctgccagccggatggtgcgatgggaggtggggaggacagctctggaagtgtggggggcygtgtgcagccctggggactggggagagtggcagcaggatgcatctctacttcgtggaggggtactgaggtactgtctgggtgtcattctgtccagatccaagtgtttgagtgagaggcagagaacgggcagtcgatattagtaggaggcttggagggcatcactggggagaaggcccagcttggatggggatgaggaagagggggaggtaggctggagggaacttggtgggacacatctcgtgcccagagggccagggcacgagaggctggaggaggcacagtgggcctgcagaactagctggaaggcccgtgtagctcagtggctctgcaggagctcccacagcagaaaaggcccccatggcctgactcgctacgggcctctcggctgtcagtgtgagggacaggtggccggggtcctccaacgccctgcatcttcctggctc

SEQ ID NO: 111284 - DNA, 546 bp, Homo sapiens
taagagtacaagtgaatggattcacttgaggttgatgaacataaatctaacctggaactagtcaatttcaacaaacaattctgttttcttccagccatgttcagctgcacggttgcaggcacagaactgttgaaaggtggctttcatcaggtttgttcgcttgcttcccaaaatgaagcaagcaaaagcaagwgaatggcacatataagagaagttattacaatgaatgaatattgattgtaagctaaataagaagaaaaataaggacacatatgtgagaggtacaggaaacatttatatgaataatgaattgtaaatagttaaatagagatcaaaagattgttaagtttggtggaaagacaggaggcagtggtgagaagaaggaacagaaaaaattgagatgatggagaggctgcaattattggtaatcagaaagtttgtggtatgatcatgagtagtgagtttgtataattttatggagaacaaagtaattggcagagagaagtaaagacactaagagaccaggctatcataaaaatagtccac

SEQ ID NO: 111285 - DNA, 478 bp, Homo sapiens
cattcattcattcattcattcttatctgtatgtctttacttgaaaataaaatccatgasagcaaggaactcgttttccttattcacccctagaacacaatgggtgcatagtaggcatgcaatatgtattcattgaataagtaaactctattttctgtacagttttctacatttaatataaaatcaattctttctgaagtcactgcagcagagttttaacctttggcttcattcttgtggcaatttttttttttgcatcactctcactcttcctaccatcaattagcgtatatttagaattttaaacacttacataaatacatctttgctagaaaagtaaaatggaagcaggaactaaagagaggagaagggctacctgtcaaatttaaataaataaatattatttttagtgcaagaatatctggtagtacttactttcaaataaggacttccaacaagtaaatattttcattgagaat

SEQ ID NO: 111286 - DNA, 411 bp, Homo sapiens
ggcgtccacatctgaagctcgcagcatggatccctggatcaggatggtctgcccctcctccagttcaatcacaacattggttatgaggaacgggggactatcatctttgggcaagacgttgatggggaatttgtgacggatgctgtgatggccatcaaatayccggaagaccacgaagtctttggtggagtcgctgtcatcatgatgatagcgaacaactccagcctggaggtcagccacggtgaagagaaaccctttcccccctgagggagagagcagagatggagcagattgagcaagggagtgcagaagcagcagctgtggggaaagcatcaatacagtagaggctgctaaggaaagtgtgcagcccgtatttccctcacctggaaaaactacagattgttagtgggt

SEQ ID NO: 111287 - DNA, 600 bp, Homo sapiens
acatttctgcagttcccacatctcatttagacatcctgatttgactttttcaggttctagatcttgttccttactttaacggtatttttaaattttcttctacataaaagaatttattaatctaaaattggtaatatgctggagaagtgtctctgcacttgcttaggagaccaaccccttcccacattcagtcacttaaatctttctcaaaggtggaggatctagagaagtggttttcaactaggggtgatgttgtcccactasaggacttttgggaatgtctggaggcatttttaatttcagaagtcggtgtgtgggaaaatgctattgtcatcgagtgggtagaggccaggatactaacatcctaccgtacacaggacaacctcccaaacaaagaattatctgatacaaaatggcaattgtcgtactgctactatcaagaaaccctgatctagagacatgtatttcactagacatatttttaaatatctcaactttatttgctttcatgaaattcataactaataagtaagtaggggctgcgtgataagttttgatctttattatgtgctgtgtatgtattgcaccagatgttgacag

SEQ ID NO: 111288 - DNA, 636 bp, Homo sapiens
gggcaactttgttgaaaatgagttggccataaatgcatgaatttatatctaggttctttattgtgttccattggtctacatatctgtttttatgccaataccatgatgatttacttactatagctttgtagcatattttgaaatcaggtagtgtgatgcttccagctttctttttttcactcaggattgctttgggtattgggggtcttctgtgggtccatataaattttaggattcttttttctatttttgtgaaaaacgtcattggtattttgatagggattgcattgaatcggtaaattgctttgagtagaatagtcattttaacaatactaattcttccaacccataaactggaatgtctttccatttttgcatttccttttccatttatttcttcagtattttatagtttttcttgtagagatctttacttctttgattagattgagtcttaagtattttatattctttgtagctattgtaaatggaattactttcttgacttctggggtatataagtgctactgatttttgtatgttgattttgtatsctgcaactttactgaatttgtttattagttctaatccttttttggtggagtctttaggattttctaagtataagatcatgtc

SEQ ID NO: 111289 - DNA, 604 bp, Homo sapiens
tttgatgctttcacttctgaattctaccaaacatttaaagaaatattattgccaatccttctcaaactctttcaacaaatcgaggaagagggaacacttcctaacttactttatgaggatagcatcatgctgatatcgaagccagacaagcacacgacaagaaaagaaaatccaggccaatatccctgatgaacatagatgcaaaaacactcaacaaaatactagcaaactgaactcaacagtacattaaaaggattattcaccataatcaagtgaaatttatccctgggatgaaaggagagttcagtacacacaaatcaataattgtgaaacaagatattaacagaatgaaggaaaaaaatatggttatctcaagagatgcagaaaaagctcttgacaaaattaaacatcctcccatgataaaagctcttgccaaattagatatacaaggaatgttcttcaacagaataaaggccatatgtggcaagcttagaactaatatcacactcaatggtgaaaattgaaagcctttcttataagattaggaacaagacaaggatgcccgctctcrccatttctattcaacatactactggaagtccta

SEQ ID NO: 111290 - DNA, 586 bp, Homo sapiens
ggcagtttccataatgatatgtaaataattaatttgcataagtttttattaatgcttgtctacttcactggacttcaagatctataagtacccaaattgggctttttaatgtcccattgtggtcccaaattctggcacagtctttataggcattaggtgcccaatatttgtttgttgattgactaaatggactctgcccacaggagagtccttccttgctgtagcagtgacttattttaaagactgagtctttytttaggtcagagttaagaaccatatatataatcaaaggaatattttgtggtctcccaggccatgttttaaatgtaagctgattggctcagatctactacagtcctctttggaacttcaacttgcttctgatttatagaaatatgagaggatgaaagctcagggtcagatgacagaatagattgagtagaatcgatggccagataatttctgtaagagaccaggggtgtggttcagccattccttcaaacttttgaaacttcaattcataacaggctgagaacaatttctgttgttattttttaaaggtttcacttaaaaatgtgaagaaaat

SEQ ID NO: 111291 - DNA, 499 bp, Homo sapiens
caataatagacattggagactccaaaaaatgggagggtaggagggtggtgagggatgacatacttattgggtatacaatgtacactattcagatgatgggtacactaaaatcccagactttgtcactatgcaatatgtaacacaattgcacttatacacctaaatcctcaaaaataaaagtaaataaaaatagaactaccacataagccagtaatctcactactgggtattgatccaaaggaaatgaaatcagtatgtcaaagagatatttgcttggatgtgatgaatttcagaatatatgacttccattttcaggtttttatgcttaatgggaacttgaactctcatatttaytgcagcattatttacaatagccaagatatggaatcaacctaagtgtctaacaatgtattaataaagaaaatgtgatatatggaatactatttatccataaaaataatgaaatcctgtcatttacaacaacatggatgaaactgga

SEQ ID NO: 111292 - DNA, 582 bp, Homo sapiens
taagttttggtggtctactgcacatgaggtgactgtagttaacagcaaagtattgtgtattacaaaatagctaggagaaaggtttttgaatgttcttaccacaaagaaatgcatggtgatagatacagtaactaccctgattggatcactatacaacatatttatgtatagaaatatcaaattttaccccataattatgtacaattaaaaaaataaataagttttgttatgtaaaaaaacrttaagagaatcacacctgattccacctccaggtcctcatattacatgtatggagaccaaaacctcaaaagacattctgcttggaaaccattgtattcagtaaatataccagatatgctagaagctggagaaacattagtgaacaggacagacacattctccaataccatgcagctgtctacctgaattttgcatcctaaatggttgagatcctcaaaaacaaatttagtttctatctgaacacatttacaactcctgaagtacaatgaatctaatgtggtaggctggatcaggcactctcccgccctagatgtttggataatcagaaatatcctgcaaaga

SEQ ID NO: 111293 - DNA, 483 bp, Homo sapiens
gtctgggacatagaaagtgcctgataaatgtttgttgaatgaatgatttaattaacaggataaaggagagaataatcaactgtgtcttttagcatttgggtcccctggtttttgtccatgctgctaggtttctgaagcacagccctccctaaaccttgcttgtgcctacrtcagaacttctgaccttatcccttgttgatgagccaatggcctcaactacatcttcaatgtcaggtcagcatacttctggttctcccagccttacccttcaccccattgctccacccccttcccatgatcctggcactgacaacatgactgctgtggtgatgacataaattaatggtttgattaaatgcagcaactagcaaggatatgaaaggaaaagattttgacctgaaaaacattgcttcaaggttgattttatgagtattcaaagtcatatttaatttccaggtaatggcaatttttataacctgaatt

SEQ ID NO: 111294 - DNA, 548 bp, Homo sapiens
gttgaatgacctgttctatagctaagaagtggggtgtgaactttagtctatctgacttaaaatgtgcactccctctgtatacttgcctccattccatttctcatttcttgaattaattctctcctctccattcccactgccattgccttagtaatcccaacctgaactgctgcagtgatcattatagcctactagctggtttccctctttcagttttaatcatccctsatccaatgatccatacagaggtcaatgaggggtttggctatactcacttctcttattctagatctcaaacttctttctttctttctttcttttgagacaggttttgctctgttacccatgctgcagtgcagtggtacaatcttgggtcactgcaacctctgcctcctggactcatgcaatcctacctcagcctctggagtagctgggactacaggtgcacagccaccatgcctggttaatttttgtattttttgtagagatggggttttgccatgttgtccagactgatctcaaactcctgggctcaagcaacccatctg

SEQ ID NO: 111295 - DNA, 622 bp, Homo sapiens
cctagtcatatagagatatatgtatctttgaacactgtctcctaaatactttgaaatattttttaattgtgtgattcactcactcatctaccactcaattgccattcgggggagtcctcttttttcaaaccccttttttgaggtataatttacataccttaaaattcatcccygtagctgtatagtttaatgattttggggggtaactttttagagttctacattcccccaatccagttttagaacatctcatctcgccaaaatgttcccttttgccattcacagtcgatccttcctcttagccccaagcaactactgatgtgctttctagttctatagatttgtattttctagaaattttatctaaatggaatcatatgatctacagtcttttgtgtcaggcttatttcattttgcataatgtttttgcggttcatccatgttgtaccatgtattggtagttcattctttcaatgctgaataatatttcattgtgtggatatatcccattttgtacatccattcaccagtagatggacatttgggttgttttcagtttagagcgattatgaataatgctcatatgaacatttatgtacaagtttttgtgtagacatgtttt

SEQ ID NO: 111296 - DNA, 622 bp, Homo sapiens
cctagtcatatagagatatatgtatctttgaacactgtctcctaaatactttgaaatattttttaattgtgtgattcactcactcatctaccactcaattgccattcgggggagtcctcttttttcaaaccccttttttgaggtataatttacataccttaaaattcatccccgtagctgtatagtttaatgattttggggggtaactttttagagttctacattcccccaatccagttttagaacatctcatctcgccaaaatgttcccttttgccattcacagtygatccttcctcttagccccaagcaactactgatgtgctttctagttctatagatttgtattttctagaaattttatctaaatggaatcatatgatctacagtcttttgtgtcaggcttatttcattttgcataatgtttttgcggttcatccatgttgtaccatgtattggtagttcattctttcaatgctgaataatatttcattgtgtggatatatcccattttgtacatccattcaccagtagatggacatttgggttgttttcagtttagagcgattatgaataatgctcatatgaacatttatgtacaagtttttgtgtagacatgtttt

SEQ ID NO: 111297 - DNA, 622 bp, Homo sapiens
cctagtcatatagagatatatgtatctttgaacactgtctcctaaatactttgaaatattttttaattgtgtgattcactcactcatctaccactcaattgccattcgggggagtcctcttttttcaaaccccttttttgaggtataatttacataccttaaaattcatccccgtagctgtatagtttaatgattttggggggtaactttttagagttctacattcccccaatccagttttagaacatctcatctcgccaaaatgttcccttttgccattcacagtcgatccttcctcttagccccaagcaactactgatgtgctttctagttctatagatttgtattttctagaaattttatctaaatggaatcatatgatctacagtctttwgtgtcaggcttatttcattttgcataatgtttttgcggttcatccatgttgtaccatgtattggtagttcattctttcaatgctgaataatatttcattgtgtggatatatcccattttgtacatccattcaccagtagatggacatttgggttgttttcagtttagagcgattatgaataatgctcatatgaacatttatgtacaagtttttgtgtagacatgtttt

SEQ ID NO: 111298 - DNA, 604 bp, Homo sapiens
ctttgtgtcaggaatgtggaaaaatttggaattttagttaccagcaatgtttgaatactagtaatgccctattagaacaatggcttagccttgtaatatcactataaatatacaattgagtaattgacttagtcctgtaatttttggttggaatctaactaattgtatagacagtgtttaaatatttaagagaacttaagtttcactgtatttaaaagtcttatttatttatttcttgagactgagttttgctcttcttgctcaggctggagtgcaatggcgtaatctcggctcactgcaacctctgtctcccaggttcaagcaattctcctgcctcagcctcccaagtagctgggattaccggcatgttccaccatgcctggctaattttgtgtttttagtagagacagggtttctccatgtgggtcaggctggtctggaactcccgacctcaggtgatccgcccgcctcagcctcccaaagtactgggattataggcatgagccaccgcgcccgaccttaaaagtctaatttgttagacttamaaaaatcagttaagtatgggaaatgttttctggtcagataagcgaagtgtttaaagagg

SEQ ID NO: 111299 - DNA, 543 bp, Homo sapiens
caatgcttctgactcttaggggaaaaaatccctgcatccagtttctggaaagctgctttcgtttactggaggcactcartaaagcaaagtcagtagaggcagtcatgattcaaagggcagaccacctgggcaaagtgttggggaggtattgggcaggtctcaccacccacattggcttctatggcaatggcccagcaagcagtgatgttgcaccatgagatgacatgtaaattatacaatacaggttcaataagtcagccccaaaattcaacttaaagaggatgtgatatgtattcattgtatgatatactatttatttatcctattctcttcatgggagtataggtagagaatgtgactttagatcagtaagaagaaattttcacattattcttgctttaatagtacattttagtgccatttactgagctacactgtctttggtaatacattcatttattcattcactcattcctcccatatttactgggtccctatggcaggcaagaggtagtcttaggcatagtatatttaaagacaagt

SEQ ID NO: 111300 - DNA, 543 bp, Homo sapiens
caatgcttctgactcttaggggaaaaaatccctgcatccagtttctggaaagctgctttcgtttactggaggcactcaataaagcaaagtcagtagaggcagtcatgattcaaagggcagaccacctgggcaaagtgttggggaggtwttgggcaggtctcaccacccacattggcttctatggcaatggcccagcaagcagtgatgttgcaccatgagatgacatgtaaattatacaatacaggttcaataagtcagccccaaaattcaacttaaagaggatgtgatatgtattcattgtatgatatactatttatttatcctattctcttcatgggagtataggtagagaatgtgactttagatcagtaagaagaaattttcacattattcttgctttaatagtacattttagtgccatttactgagctacactgtctttggtaatacattcatttattcattcactcattcctcccatatttactgggtccctatggcaggcaagaggtagtcttaggcatagtatatttaaagacaagt

SEQ ID NO: 111301 - DNA, 585 bp, Homo sapiens
tgttcagttccctaaaataaatacctctctctctctttcatgtttatgtgtgtatatgtatgtatttatacttgtatatatcctattggttctatttatgtggagaactctgactgatacaattatattctattgagttcttaagtttattgaactgctttgctattgttggatttttagttttttcaaaattatgctacaaaaaataatacatcaataaatatatttatatccttgttcatattgtggattactctatcttagcctagcttcttagaagttgaattataaacattaatagtatgcccacattgttggcatacatatttacttctgccaacaatataatcttcaactcattggttacsattttttaaatgggagccagttcaataaacaaatccaaatcccttaccatgggttacacattcagtgcttactccatgccagactttgtctagctacagggagcttgcaaaaagtgaaaaataaagaaacataaaatttaaaagaaagaaaatgtgagaatgtagccctccaggcagagggaacagaaagtgcaaagggaagttctttaagtaaaaa

SEQ ID NO: 111302 - DNA, 648 bp, Homo sapiens
attttttcctaaaaaataagttttttactttgatttaaagagaaagattatatagcaaagccataaaagctgattgattttgcagcatttcatcttttaaacaatattggggtctgcacatatgggcttcatttgctcctcctgtgacactgcacagccttagtcagtcctratggtggttcagtctttgctgtgtccccgtttccctacagaatttgctccaaaacattagctttcccttggaaacagttatttgattctcacatagtgaactcctggcatggatccaattgttcctaaactctatgtttggcaagttcaattgcccatggataggatagactccctatcaattatcttactgcagctacttcaattatttcccctttccttggtgccaatgtcacccctctcattccctgaaaataacctttcttctcatttgtatgaaaacaacaaagttcttaggtgagttcctcaacacctagaagttagtgtgttttcatctatctttcctccgtcttcttttctccaggagaaaatgtttctcttttattccaaaatggaccctttgcccttggagtcaatgtgacttttaacctaggcatgaacctcttagtagttaaatttgtaatgtgtaaagtggac

SEQ ID NO: 111303 - DNA, 648 bp, Homo sapiens
attttttcctaaaaaataagttttttactttgatttaaagagaaagattatatagcaaagccataaaagctgattgattttgcagcatttcatcttttaaacaatattggggtctgcacatatgggcttcatttgctcctcctgtgacactgcacagccttagtcagtcctgatggtggttcagtctttgctgtgtccccgtttccctacagaatttgctccaaaacattagctttcccttggaaacagttatttgattctcacatagtgaactcctggcatggatccaattgttcctaaactctatgtttggcaagttcaattgcccatggataggatagactccctatcaattatcttactgcagctacttcaattatttcccctttccttggtgccaatgtcacccctctcattccctgaaaataacctttcttctcatttgtatgaaaacaacaaagttcttaggtgagttcctcaacacctagaagttagtgtgttttcatctatctttcctccgtcttcttttctccaggagaaaatgtttctcttttattccaaaatgraccctttgcccttggagtcaatgtgacttttaacctaggcatgaacctcttagtagttaaatttgtaatgtgtaaagtggac

SEQ ID NO: 111304 - DNA, 496 bp, Homo sapiens
tgaaggaatgaatgtactatgatagttgatgaaaagatactagattgtgaaaatagatacttggtcagcctatgtgtgagttgccatatgaatttgagcatacgacaaatgtaatatatgtagaataatctattttttattgtttmcctaacaaactcttccttgtcttatcatatatgtggcctcctctacagagccccagctgcacccatcctataccgacagttagacctctccctctttggtgctaccatagcatcttctcacttctttcatgggactttatcacttgatgattctatatttcttaatttcacccattagattgtgagctccttgagggcagggacgatgtcttactcatgtctatatcttgactcctgtcacatttttggataaataattaatgctcaatccatattgctaaatgattaaaagtacatgtcaaatggtcaaaaaaggaacactgtctgctttatgtcatattatgaaaata

SEQ ID NO: 111305 - DNA, 545 bp, Homo sapiens
atttcctatttctttatttgctcctgtgagggttagggggcttagaggcagtgcctgctgaaacatctagtttccagtttatagggctttaagaaagcacagcttattttgaagtcttgtagtcagaaaaattagaatttaattaaacagtagcaaataataactgaaaaacatcaggcaactctagaatttaacaagaggtgtgtcatagttttggaaacataatttcctctctccactttcccatttttattaaaagacaaattatggtaggtttgctttaggatacttggcttacttgtttgcatacagtgctgcaagaataattatttgttacataggccttttaaatgggctttggtggaatttggttttgtagaagcaatctgagataaaagactttttaaagccaagcccagccatggatttgtaccattaaatacctatgasttgggtgaattcctctcctcttgatgtttcaagataacttagggttcctggcctgttagaaagtgacatgttctgtttaccacagatcacaaacc

SEQ ID NO: 111306 - DNA, 643 bp, Homo sapiens
cagtcttaagttgtagtgtggtgtayggggatcactctctagggtccatatttagtcaatgacaaaatatttgctgactttcaaatggatcggtgatttcttgtttttgtttttgttgttttgagacagagtctggctctgtcacccaagccggagtgcagtggcacgatctcggctcactgcaacctccactgcctggattcaagcaattctcctgcctcagcctccccagtagctgggattacaggcgcccgccaccacgcccagctaattttttttttgtattttagcagagacagggtttcaccatgttggccaggttcgtctcaaactcctgacctcgggtgatccgcccgcctcggcctcccaaagtgctgggattacaggcatgagccactgcacctggccagatcagtgattcttgattttcttggccatgaagaaaatgatgcaatatgctcttcaagggcctttctgcagaatagagaagatgagatgcaaactattctcattgatgaacaccttggttataactatatctctttctcttacattcagaaaattgtattggaatgcaaatggttgtgagagataccactttttattgaaacagctggcacatgaatatacctggttacaatgc

SEQ ID NO: 111307 - DNA, 643 bp, Homo sapiens
cagtcttaagttgtagtgtggtgtacggggatcactctctagggtccatatttagtcaatgacaaaatatttgctgactttcaaatggatcggtgatttcttgtttttgtttttgttgttttgagacagagtctggctctgtcacccaagccggagtgcagtggcacgatctcggctcactgcaacctccactgcctggattcaagcaattctcytgcctcagcctccccagtagctgggattacaggcgcccgccaccacgcccagctaattttttttttgtattttagcagagacagggtttcaccatgttggccaggttcgtctcaaactcctgacctcgggtgatccgcccgcctcggcctcccaaagtgctgggattacaggcatgagccactgcacctggccagatcagtgattcttgattttcttggccatgaagaaaatgatgcaatatgctcttcaagggcctttctgcagaatagagaagatgagatgcaaactattctcattgatgaacaccttggttataactatatctctttctcttacattcagaaaattgtattggaatgcaaatggttgtgagagataccactttttattgaaacagctggcacatgaatatacctggttacaatgc

SEQ ID NO: 111308 - DNA, 511 bp, Homo sapiens
tttagacttgttctgagactcctccccccaaattataaagacagaarccatcagaatcaaccatcctaagaacagtgttgctacagaggatacagtcgtgcactacataaggacatttcagtcaacaatgaaccacatatacaatggtggtcaaataatattataatggagctggagatgatgtgtaataggctataccacctaggtttttgtaagttcatgctataatgcttgcaaaacaacaaaattagtcaatgacacaattctcagaatgtattcccatcattaagtgattcatgactatatttgagacaaaggacgagaagcatttttatattttttataattctattttagaaatttcagcataggcagcatgtgaattaattttctcctaaatactatgttctgacagttacatttgaattgccctaatcaggaatgtgcaccccagatgtgattagttagcatctgaaggatcccatctcagccatctcagaagccctcactc

SEQ ID NO: 111309 - DNA, 589 bp, Homo sapiens
ttgtatgaatataccccgatgatccattaccagttgatgggcatttgagtttattctagattattagctattgcaaatgaaattccttggaacatacatgtgcatgtatagatgttgcsgtatattttcatttatgttggtgagccataaagtgaatgtatgtttattttaatttaaaatgctaaacttttctgaaagctattataaatttttactttctcaccagcaatttatgagcattctggtttgctgcatatcctcaccaatacttgtaattttctatcatttgccagttagcaatactaccaggtgtgaaatagtatctcattgcaagtataatgtgtatttcttcgatgattaaagactgataattacacttaatgtgtgccttggccatctgcgtatcttcttttgtgaagtcacaagtgttttctcagataagtgtattgtgaatattttctcccaatgtgccatttcattttcttaatagtgacttctcaaaagcaggaacttttaatactgataaacctagtttaacatttttattttcttgtagagttcacaatgttggtgtcccacattagaaatc

SEQ ID NO: 111310 - DNA, 589 bp, Homo sapiens
ttgtatgaatataccccgatgatccattaccagttgatgggcatttgagtttattctagattattagctattgcaaatgaaattccttggaacatacatgtgcatgtatagatgttgcggtatattttcatttatgttggtgagccataaagtgaatgtatgtttattttaatttaaaatgctmaacttttctgaaagctattataaatttttactttctcaccagcaatttatgagcattctggtttgctgcatatcctcaccaatacttgtaattttctatcatttgccagttagcaatactaccaggtgtgaaatagtatctcattgcaagtataatgtgtatttcttcgatgattaaagactgataattacacttaatgtgtgccttggccatctgcgtatcttcttttgtgaagtcacaagtgttttctcagataagtgtattgtgaatattttctcccaatgtgccatttcattttcttaatagtgacttctcaaaagcaggaacttttaatactgataaacctagtttaacatttttattttcttgtagagttcacaatgttggtgtcccacattagaaatc

SEQ ID NO: 111311 - DNA, 661 bp, Homo sapiens
gcaaatctaagtgctattggccttaaagaggaggtagagggtgtaacagagaacttctcaaacctagaaaaagatattaatatttaagtacaagaaggttatggaatcccaagtagatataacccaaacaagactaactgaagacacttaataatcaaactcccaaaggtcaaggataaagaaaggatcttaaaagcagcaagagaaaagaaacaacagaaagaagctccaatatgtctgactgccgacttcttagtggaaacctgaaaacaggaccggatagagtgccatgacatacataaagtgctgaaggaaaataacttttatcctagagtagtatattcagcaaaaatatccttcaaacatggaggagaaataaagaytttcccagagaaagaaaagcagggattttatcacaccagacctattctacacggaatgctaaagggagatattcaatcttaaagaaaaggatgttaatgagcaataagaaatcatctgaaggtacaaaattcactggtaatagcaagtaaacagaaaaacacagaccattataatactgtagttatgatgtgtaaactactcatatttcaattagaaagactaagcaatgaacctatcaaaaataataatgaaaacaacttttcaagacatagacagt

SEQ ID NO: 111312 - DNA, 661 bp, Homo sapiens
gcaaatctaagtgctattggccttaaagaggaggtagagggtgtaacagagaacttctcaaacctagaaaaagatattaatatttaagtacaagaaggttatggaatcccaagtagatataacccaaacaagactaactgaagacacttaataatcaaactcccaaaggtcaaggataaagaaaggatcttaaaagcagcaagagaaaagaaacaacagaaagaagctccaatatgtctgactgccgacttcttagtggaaacctgaaaacaggaccggatagagtgccatgacatacataaagtgctgaaggaaaataacttttatcctagagtagtatattcagcaaaaatatccttcaaacatggaggagaaataaagactttcccagagaaagaaaagcagggattttatcacaccagacctattctacamggaatgctaaagggagatattcaatcttaaagaaaaggatgttaatgagcaataagaaatcatctgaaggtacaaaattcactggtaatagcaagtaaacagaaaaacacagaccattataatactgtagttatgatgtgtaaactactcatatttcaattagaaagactaagcaatgaacctatcaaaaataataatgaaaacaacttttcaagacatagacagt

SEQ ID NO: 111313 - DNA, 661 bp, Homo sapiens
gcaaatctaagtgctattggccttaaagaggaggtagagggtgtaacagagaacttctcaaacctagaaaaagatattaatatttaagtacaagaaggttatggaatcccaagtagatataacccaaacaagactaactgaagacacttaataatcaaactcccaaaggtcaaggataaagaaaggatcttaaaagcagcaagagaaaagaaacaacagaaagaagctccaatatgtctgactgccgacttcttagtggaaacctgaaaacaggaccggatagagtgccatgacatacataaagtgctgaaggaaaataacttttatcctagagtagtatattcagcaaaaatatccttcaaacatggaggagaaataaagactttcccagagaaagaaaagcagggattttatcacaccagacctattctacacggaatgctaaagggagatattcaatcttaaagaaaaggatgttaatgagcaataagaaatcatctgaaggtacaaaattcactggtaatagcaagtraacagaaaaacacagaccattataatactgtagttatgatgtgtaaactactcatatttcaattagaaagactaagcaatgaacctatcaaaaataataatgaaaacaacttttcaagacatagacagt

SEQ ID NO: 111314 - DNA, 595 bp, Homo sapiens
tcagggacttaaatgtaacccttaataccttttataaggtagatgttgtgttttaaataagttattttcaagtgatcctttggaacaaactttatgcctttacatttctattttccaagcatatagggggtgagaaaacatgaatattttccccatgggaaagaagtgaacgttttcaaactttataaggaaatgacttttctctttgtagttataatcaggaaaaaaataataaagcccatagcttggggtcatttttaattagaaaaactttttacctgcaaagcaaaaagtctacaaaccagatttttatgctgtgaaaattttttattatgcaatacttctttaaatgttttttaaaaaactaatattttcttatcttataaatgtakgaagattttgagtctaagagaccaaatagatttatgttaaaacttctctgggcctagatgaaattctcagatattttgtaagcaatgaaaaattaattttaaagtgtttttccccaatgtgtaatgcatatttataacctacagaacaaaaaacacaatcatattttggatctttaagacctgacatagcaaaaagataattt

SEQ ID NO: 111315 - DNA, 499 bp, Homo sapiens
taaataattgttttgcattttcaaaggtccttgaatatctcttgattttgctttaaaagactgcatttgaaaattataaatatcataattaaggtaataaatatgacattatggctgggtgtggtagctgatgcctgtaattccagcacttttggaggctgaggttggtggatcacttgaggkcaggagcttgagactaaaccagcccggccaacgtggtgagaccccatatttactaaaaatacaaaaattagctaggtgtggcggtggtcgcctaaaatcccagctactcaggaggctgaggcaggagaattgcttgaacctgggaggcagaggttgcagtgagccaagatttgtgccactgtactcctactccagcctgggtgacagagcaagtctccagctcaaactaaataaataacaaacatgccatttatacgtgtataaattatatttataagcatttctatagtcaaatatctaaatgttgagaaagtaa

SEQ ID NO: 111316 - DNA, 618 bp, Homo sapiens
tagccattttattatgtaagtataacccttcacacactttcactagtcatttgttataacattgactttttcaaaagttctgtggaaatgagttataagactatccattgttgaaggcaatgttcttagttgtattcattgttatcaatttagtcattaaaaaacatttgctttccttatcaatacatatgcttcattttattagtaagtagaatttcataacccatcctgttttccatttctcytgcatactaggaaacacaaagtgaaatttggttctcgagctagttcagtcacataatgttgttggtaaaattatctataacatttggattcttttggatataaatttgcccttgataggctaagctatattatattttctataatcttgtgttctataatattctaaaatatcattctgtaattattttatgagaaacattcttcataaatatgaaatgtatatcataaatcagtttgtttatgatatacatgtttttcatgtaatttaatgatttaattgtaattatcaataaatatgcgaaatctaaacattcattggcaaatatagtagaaactataatgaattggctatagtgtttctcatgttagaca

SEQ ID NO: 111317 - DNA, 618 bp, Homo sapiens
tagccattttattatgtaagtataacccttcacacactttcactagtcatttgttataacattgactttttcaaaagttctgtggaaatgagttataagactatccattgttgaaggcaatgttcttagttgtattcattgttatcaatttagtcattaaaaaacatttgctttccttatcaatacatatgcttcattttattagtaagtagaatttcataacccatcctgttttccatttctcctgcatactaggaaacacaaagtgaaatttggttctcgagctagttcagtcacataatgttgttggtaaaattatctataacatttggattcttttggatataaatttgcccttgataggctaagctatattatattttctataatcttgtgttctataatattctaaaatatcrttctgtaattattttatgagaaacattcttcataaatatgaaatgtatatcataaatcagtttgtttatgatatacatgtttttcatgtaatttaatgatttaattgtaattatcaataaatatgcgaaatctaaacattcattggcaaatatagtagaaactataatgaattggctatagtgtttctcatgttagaca

SEQ ID NO: 111318 - DNA, 623 bp, Homo sapiens
aagaacatgaaaaaacggttaaattagaacagaactccaaatttgcttagtaaaatgttgtagtacttacactaaagtttaaaaaaaggttgaaacaatttttaatatagtgcatcaaatttccttaacctcttttaaatatccagttcctagttggagggagatgttttgaccttcatattgctgccccagaattacacttttgaagtgtgatccatatagcactgctgctccaaaagagttctttaggtatctacgggatgttcaaaaaccaaaattaccaaagttggatatattttaaaaagcacatgttctgaagtacatttcaatatatacttaaaacacataaagtaaaatcctaagcaacagaatttttgcatttgtttttggcatgaaattggttacacacaattgatgttataacaaagttatatttaaataaatgtgcttcttagactgtctcctgtgtatattacttaatccttatctgctatcaaaagaaaaattctaagagtgggtaaagaagtctgaaattaaatmggtttctattcagatttgtgtcaaactactgcaaaatctccatgtcaaagtaaatagaacatactaatggagaaggtgggctt

SEQ ID NO: 111319 - DNA, 518 bp, Homo sapiens
caaagcttccagccattgtttagsaatgagttccatacttcaggtatccagtcccatgtgccaaaaacccatgttctttccatctggttgtacctcaatttagtgggtaagtgaatgatgcaggcggcatgttaatgacctatggcggctgctcattcttctcctctcaagttgggataggtaagtctgcaccacctgagatccaacactgtgacttaggcattattaggagcagtttaacacttgctgaacactctaacagagttttggagccaacaatggggataaggagatgaacatgacatagactgcccaaagctcatgggcctctaaagctgtggttcacatatttttccaccaagtcctttaaacaggcaattaagtaatcttcattaggctacaataaaaaatatttaaaaaaactatttaacttggtttgcaacaatagtctctttttgacaaaactgtagctagataaaactatattagtgattcatcaaaagcaatattttgctccc

SEQ ID NO: 111320 - DNA, 518 bp, Homo sapiens
caaagcttccagccattgtttagcaatgagttccatacttcaggtatccagtcccatgtgccaaaaacccatgttctttccatctggttgtacctcaatttagtgggtaagtgaatgatgcaggcggcatgttaatgacctatggcggctgctcattcttctcctctcaagttgggataggtaagtctgcaccacctgagatccaacactgtgacttaggcattattaggagcagtttaacacttgctgaacactctaacagagttttggagccaacaatggggataaggagatgaacatgacatagactgcccaaagctcatgggcctctaaagctgtggttcacatatttttccaccaagtcctttaaacaggcaattaagtaatcttcattaggctacaataaaaaatatttwaaaaaactatttaacttggtttgcaacaatagtctctttttgacaaaactgtagctagataaaactatattagtgattcatcaaaagcaatattttgctccc

SEQ ID NO: 111321 - DNA, 587 bp, Homo sapiens
aggggcacctgccagatgccagctggagctctcctgtatgaggtgtctgtcaacccctgctgggaagtgtctccctgtcagaaggcaccggggtcagggacccacttgaggagtcagtctgtcccttagcagagctcaagcactgtgctcggagatccactgctctcttcagagccagcaagcaggaacgtttaagtctgctgaagctgcgcccacagccgccccttcccccacgtgccctgtcccagggatatgtgaattttatctataagcccgtgactggggctgcttcctttcttttagagatgccctgcccagagagaaggaatctagagaagcagtctggctacagcagcttaggcactgagccgtggtgggctccrcccaattcaaatttccttgtgtctttgtttacactgtgaggggaaaaccgcctactcaagcctcagtaatgttggacacccttcccctcaccaagctttagtgtcccaagtcgacttcagcctgctgtgctggcagtgagaatttcaagccagtggatcttagcttgcttggctccatgggggtgggatctactgagctagacc

SEQ ID NO: 111322 - DNA, 516 bp, Homo sapiens
aaaatacaaggacattagtaagtgccaccagtatgagaataaatgttacttttaaatacttagcttctgaggttgaaagaaagacattgcagtttcatcagttaatatttacctattaaatgattcatttgtataccctatctctcatgcacagacacccttctaaccacatatcatctgacctattaaatagtttagaatgtggttgatacttttatttctgaaaggctagcaacccaccaacgatcaatattcaaaacaaaactaatcagaattaacatgattttttygcttttataccctaaaaaaggaatcaaataagaagtaatattttagtgagttaataattctaaatgcatcttagtggattcaattaagtctcctgcatctggaagatttttttaccaaaaaaaactgaacataacctagacaaagccagagacaaagagaaagcatcatttttacaaagattttgctgtatttttgttcacttgtaaaatatttctactttgctgt

SEQ ID NO: 111323 - DNA, 539 bp, Homo sapiens
actgaattcatctcttcagcaggattccaggttacttaaactcatatcttaatcctatcttttggtataggacgacatttctcagccacaaagtaaatgatctctgtaattttyagcaaagtcctgaagtggctccaaaatttagcaatggtcttcttgactatcctgcaaaagctttaatttagattgtgatgcctgagccttggaaagtatcttcaccaaggcaagacccaaaagattatctgggtctcttagatcagtgatcctcaaactttaaagcgtgtcttgaatcagggggatcttgctgaaatgcaaatttcggagtctgtagattgggttaagattctgcatgtctaacaagttcccaagtgatactgatgtggctggttagggacttagacttgaagcacaaaggctttaaaaggccttaaacccttatgagggatatgatgcaccacactaaagttcaatatttattgattttaattataaagatcacacatttcttgcaactaatagtatatacagtcatatatata

SEQ ID NO: 111324 - DNA, 584 bp, Homo sapiens
  misc_feature (1)...(584): n = A,T,C or G
caaatgaccacccagtttttgcttgaaacccagggccctggtagcgtaggcatccaaaggaatctcctggtctgtgagttgtgaagactgttgggaaaacatagtatctgggytggaatggaccattcctcatggcacagtccctcatggcttccttccgctaggggaggggattctctgaccccttgcacttcccaggtgaggtgacacaacactctccttctgcttgccctctgtggtctgcaccatctaacctgtcccagtgagatgagccgggtacctcagttggaaatgcagaaatcacccatcttctgcattgatctcactgggagctgcagactgaagctgttcctatttggccatcttgcccaagtcccctgtatttttaaaacaccaactcttactttgttttgatcttttctttttttttttttagtttttagtttttatttaatttatttctgcaatgatctttctttctttttttttcttctactaactggacttagttttttgtttttgttgttgttgttacttcaggtgttattttttatgatttattcnnnnnnnnnnnnnnnnnnnnn

SEQ ID NO: 111325 - DNA, 531 bp, Homo sapiens
tccatggcctgttaggaactgggacacacagcaggaggtgagcggcaggcgggtgagtgagcgaagcttcatctgtatttacagccactccctatcactcgcattcccacttgagctccacctcttgtcagatgagcagcagcattagattctcttaagagtgcgaaacctattgtgaactgygcatatgagggatctaggttgtgcgctccttatgagaatctaattcctgatgatctgtcactgtctcccatcacccccagatgggaccgtgtagttgcaggaaaataagctcttggctcccactgattctacattatggtgaattgtataattatttcattatatattacagtgtaacaataatagaaacaaagtgcacaataaatgtaatgtgctggaatcatctcaaaaccatccccacaccctggtctgtggaaaagttgtcttccacaaaactggtccctggtgccaaaaagattgggggctgctgtcttagggaagacagggtagagccatgctagctgtttg

SEQ ID NO: 111326 - DNA, 601 bp, Homo sapiens
acctccaaccacactggccttttcttatccccccaaactttccaagcttctttctgcctcaggaccatagcataggggctgtttctttagacagaaaggctcttccatagctgatccttcccctcaactccaagaggcctcgctagcatcctgactggggcaaaccctcctctgttctctattacagaactctggttgcctacttcaaagcacctgtccckggttgtaatgcatgcacctgtttatttgtttgtctgtctcttggaataaactgcaagatccaggtagggtaaatctatggttactcaccacacccttgcacttgaaatttaagatgatgtaaaaaaatattaaaggaataaatacaagtttgactttctccttaatttttcttacagaaagcagggatgattgcatagggcataacttccccacacctccctgcttttccacatgcagttgcttctatctgggctgccttttccccttggctgatctccaaattcctactgattctgcttccagaaccaacaccacactttctccttctgtgaagtcttctcttatattctctcttttgtgtcttcacactatcacatag

SEQ ID NO: 111327 - DNA, 650 bp, Homo sapiens
ttattggtaaagagaacttacatgattctgggatctttatgttgcttccattatgggtggactcttttttcttttgaatgataaacttttttataggtatgcttttttttagtttataactcattttctaaaatttttctcttggagaaaagaaggaatttgttaggtatcatatggttaaaaatacacttaaacaaatacttcataggcatcwtttccatgcaataaatatccagtattgagaaggaacatattaaatagatacctggtttagcgtgttaagatatgcatcttttcatgttgtagcttaaatttgagcttgctggttcttttttttctttaagagtagtatttttaaattaaatacatacaaattaaattttaaagaaacagtatcatctttgattaaatcagaatacacattgcatcaatttttaaatgttattaccatgtctggatacttagttaacaacatgttagagcaattcaaaggatcacaggattttactttgtttttgtagtttacaaagactaatgtagcaaagacctttcatgtcaattttgtcataagtgaaagggtagaattattggttacacagatacatgcacctttaatatagactatatatcctgatatttcttggtcttat

SEQ ID NO: 111328 - DNA, 594 bp, Homo sapiens
atgccgcagataattcctgtgcccatttccgattctcttaggactacctgtctcttatctcagccactaccataggaccagatcagctccctacaggtacacctgtcagcacctctcttagctcccaaccttctgcctggtgcttcctccacagggaagcgacggtgttttagtggttaagttgtgggggactcttcagctcacgcacgtgcaaccccactatgcaaccttctcaccaatgggaaatgggagccaatggataaattcttcccttggaaagacagctctgagatacatttcatacagctcctctggccctgctattcaatgaatggactctgtcatcctgagcagtggccaacctgaaaatgcatcttttattgcctctccctctttctccacttggcccccacatccctcactcctgctccatagatcatattctccaataaaaaagaaaacatatacataagctttggctctggcttttctttctggagagccaggcatgcaaaacataatacytgaatgaatggatcaggatgacaaaagtctgtgaatggtgtcacttggtgcatataaagaaccagggca

SEQ ID NO: 111329 - DNA, 555 bp, Homo sapiens
gttcatcagcataggcctgaaaagtgtttgctgaatgtaataacagtgtcactcttatctatggagagaggatgctctcattcactcagacagatgtgaacacactagtcaacttggtaattgtttcagtcactctatttaaacaattttaacacaaagttccttagtgaaccttattaggcagaactctaataaattaagtaaccgttcaatatggagtgaaaatcacatcctcagaatgtgctaaaaatgaatcgactcagtcaattcagtaaattactttttatttgatgtggagcagattatttgattaatagaatctttcacttttccaccatattgtcatttggcgtttttggctgctggagcagagattggctaatgttgcctctggaaaaaggagaatttgttttaaagatacctaaggagctgtcagctsagtagctctggctgtcactgctgactgacttcttctcatccttcccttcccacatattctagagaggaaatcaaattgctccagctcgttttttcccagcagaccataagcaaacc

SEQ ID NO: 111330 - DNA, 500 bp, Homo sapiens
agttctttcaggaaaggcctactttgggagtcccccaaagcagcccctattaaagcactctgtattttctgagacgagataaaacttaaaaataaattatttaacaaacttcttaaagaaacctgtgcagaagactctggagtaattaaaggaagatatcaaaccccaaactgatacaaatcatcggtctcccacagttgagttaaaaaataacatcttagttggaggaactcacttcttcgttttgagagttaaatatgcaaataacttcctgcctagttccttgttttcaaggattaaatttttcctatggctctgaacaacctcacttttcttgtctgataattgtcagtctgccaaatcactcaggaggaaatgtttacaatgcagtgcatatgtttttagtttatcgctttgccatctgttcatggaaaactctcagcaccaaaacatgcatacacattgtcytctagtcttccactacctaagcagtgaacacc

SEQ ID NO: 111331 - DNA, 384 bp, Homo sapiens
aattccagtctaacagttcctttacaaagttgcgtaaagcccccttatatgctagttgtaggaaatatagttattaaaccagactcycaaactataacctgtgaaaattgtagattgcttacttgcattgattcaacttttaattggcaacaccgtattctgctggtgagagcaagagagggcgtgtggatccctgtgtccatggaccgaccgtgggaggcctcgccatccatccatattttgactgaagtattaaaaggtgttttaaatagatccaaaagattcatttttactttaattgcagtgattatgggattaattgcagtcacagctatggctgctgtagcaggagttgcattgcactcttttgttcagtcagtaaac

SEQ ID NO: 111332 - DNA, 622 bp, Homo sapiens
tgaacactttgtttggcataatgctgcactttgacaaaaaaacacatctgcaaaggagagcaggaactgctttctaaggtccaaatctcatattctgatacaycagagccaaacatgagccatatctaacatggagctgtatctgacaaaaggctcttctggttttttattcagtttttaaagtgttttcccccacaaatccagtgcaaatcagcagtcacatttaaattaacctaaaaaggaagaaaaaatttgcagtttgtgagatttgggtgcctagaacagcaacctacagataccagcatacaatatgtggtagattaattgactgtgaaattacagtttaagcaacaaagctttcttaaagcgttagggatgtaaagaagcatgtaaacaaactgattctcattatttgttgaagaaaaacagtttgccttttccccttgcctttctttctttctttctttctctttataaatgtcttacaaacacttgctctgggatgatttcatttgtaaagctttcctaaacaccactccctgaaaagggagatttatttgtagaggtgctgaatgattcctagctcaagctatctgcacagtttctgtggatgttaaaaacg

SEQ ID NO: 111333 - DNA, 381 bp, Homo sapiens
tttacaagtgaagtgttttatttcattccaggtacaacatattaagagttactctacagactagaggatgatgaggatgtaattcattaacaaatggtactactaaatggtactactggactggctctttgaaagtacagagtttttattgcattttatttattttcccaaaatgcttaatactcagttacctcaagaaactcaaggtcagtgagggagaaaagcaggtaagcagacaattacaatgccgtgccattctctacattgtcctctcaacaaaggaactctgtccctccccccaggatggagaagtcctgctttggttggtcaggtctgggggacaatgtttcctaagcaayagagctttaagatataggtaga

SEQ ID NO: 111334 - DNA, 560 bp, Homo sapiens
ctcactttgatagagttcatattgtattgggaaagatgatacagagataagcagtcactcagttgccattttgatgcctattacagaaagaaaattacaggatattatgagacatactatcagaacgtacttactttttttctttttagacagtttcttgctctgttgcccaggctggagtgcagtggtataatcatagctcactgaagccttgaacttctgggcttaagcaatcctcccatctcagccttcygagcagttgggactacagacacatgccacaacacccagataatttattttttgtagatatggggcctcacttcgttgcacaggatggtctcaaactcttggcttcaagtcatccgcccagctcagcctcccaaaatacaggaatgataggcatgagacaccatgcctggctccttcaccttgttttttgttttttttttttaaattacaataaagaagtgacaaggcagcagagcagaaagactggagttaccactcaaatcagtctttctgagaactcagacgttaggatttttaaagatagtttg

SEQ ID NO: 111335 - DNA, 560 bp, Homo sapiens
ctcactttgatagagttcatattgtattgggaaagatgatacagagataagcagtcactcagttgccattttgatgcctattacagaaagaaaattacaggatattatgagacatactatcagaacgtacttactttttttctttttagacagtttcttgctctgttgcccaggctggagtgcagtggtataatcatagctcactgaagccttgaacttctgggcttaagcaatcctcccatctcagccttctgagcagttgggacwacagacacatgccacaacacccagataatttattttttgtagatatggggcctcacttcgttgcacaggatggtctcaaactcttggcttcaagtcatccgcccagctcagcctcccaaaatacaggaatgataggcatgagacaccatgcctggctccttcaccttgttttttgttttttttttttaaattacaataaagaagtgacaaggcagcagagcagaaagactggagttaccactcaaatcagtctttctgagaactcagacgttaggatttttaaagatagtttg

SEQ ID NO: 111336 - DNA, 549 bp, Homo sapiens
ggtatttttttttcatcttctaaatttgcttgggaaattcctccgtgtcttttacaggtttaaaaatcatgtttaacgataatgtagttatcttaggaaaaagaccaacccatttttatcactctttatcattgggccatcacagatgagagctttctatcttatagaatcatttgcacaaagtatatatgaggatatacagcattgtatttgtagcatttcttataatagtaaaaaaatgaaatgatacagtcatctagttaatgccactgagttgtacacttagaatggttaaataacaaattttgttatatgtgttttgccatattttaaaaaaataatagtttaagaaactagtgacttgtatacttaaactgagtggattgtatagtatgcaaattatgtctcaataaagatattttttaaacccatacatttatccatagagaattggtcagattatgccaaacccagtcaatggagtattttacaacctttattaaagaattaggtagatttatatkttttgacatgggaggatgtccagaa

SEQ ID NO: 111337 - DNA, 505 bp, Homo sapiens
ccaggtgttggtagacagagagggctaaataaatgtatagatacatttataaataaaaataaataagaaaaaatttacaaatagatagatggatttatttacttatgatacctttcctggttccccaaaagaatttgaggcaacttagagagttggtacagcaaagtaagagtcacattatccaaagctctcatccaacttttcataggtgagctgcaaatttacttccttgcttcctggaagccagcgcaagcaggataatgacatgatcagtcaaataatttacaatgataatcagagacacttgactattattggtattgayatctgaaaggaatatctccctcggtgctcataaagttgccgttgtgtaatgtggtaaatatcagtctgtcagtaaatataataatgagttttgtggggctctttcttaaaaggattttcagtggtgaccaatgtcatatagataaaacattggttaatagaagtagtgtattttgtataa

SEQ ID NO: 111338 - DNA, 505 bp, Homo sapiens
ccaggtgttggtagacagagagggctaaataaatgtatagatacatttataaataaaaataaataagaaaaaatttacaaatagatagatggatttatttacttatgatacctttcctggttccccaaaagaatttgaggcaacttagagagttggtacagcaaagtaagagtcacattatccaaagctctcatccaacttttcataggtgagctgcaaatttacttccttgcttcctggaagccagcgcaagcaggataatgacatgatcagtcaaataatttacaatgataatcagagacacttgactattattggtattgacatctgaaaggaatatctccctcggtgctcataaagttgccrttgtgtaatgtggtaaatatcagtctgtcagtaaatataataatgagttttgtggggctctttcttaaaaggattttcagtggtgaccaatgtcatatagataaaacattggttaatagaagtagtgtattttgtataa

SEQ ID NO: 111339 - DNA, 413 bp, Homo sapiens
cttgaataatcttcttaccatcctttctgtcttttgctttcctgttcagagcctcctacctgtcaagtcagaacagccctgatgacctcaaccaattgccaacaaacacgaaatcccaaattctcaatttggatggtggggtctttcaygtgcctacaccactggtaatttcattctcattcttctgtgatccagggattatgcttcctacttccctttccttggagatccaaatttcgtcattttttaaatgataaactcaagtaccactttcccccttgatctcctttgcctcatccaagatttcgggatatgatgcctatccctcatattcctttttggtatggtactgccctttctagactatggcttccttttatataaaggctgacattttgagatcttcgggaatt

SEQ ID NO: 111340 - DNA, 567 bp, Homo sapiens
cttttcccagcctgctgggggaaagaaacaactcagcatggaaatacaatacagatgaataattgctgtgattgtattaaagcctgaaatcagtttgggggttcacagaagccttacaaaaggagatgatatctaaactgagacccaaagagtaagaagcagttatagataaaagggatacggaagtgttccaaacagaggactgttcaaaggccatccaggaagagaaagcatttgagattctggaaataattcrccatagctggaatctatagcgcagaggagcaaaacagaggtcaaggtgtgaaagactattcaaccctcatcaaaagcatccatgaccatgacctcctgggaggagctcatgctgctgactacagcagtgttacactttctttcttgtcatagcatcctcacttcatcatcttccccacctccaccacccagaatgccatccacctttctacggtttcctaactctcggtgacatcaactctagtgtagaccacagagcactaactagtttggtaattcataacatcttatgtggaaatttacttattcatt

SEQ ID NO: 111341 - DNA, 475 bp, Homo sapiens
aattcgccaacaaccatggtgaatgcagtgtactgagttcttgtaaccacccggtgggatcttcttgcctgctccccagatagagccgatttctcaggaggggaattataatagggaaagagctttacacacaaagactcaaatcagcctccatgaatatttggaggctagaatttttccaagatagtttggcagggagaggaggtggctagggaatgggtgctgctgattggttggagatgcagtcataggggtgtggaaaatggtccttatgctctgtatccacttctgggtggggtcgcaggactggcttatgggttcaygtcggggctgtccagtagtcagaaagggaaaagactgaaagacatctcaaaaggccaatctgcagttctacaacagtgatgttatctgtgggagtaattgggaaagttgcaagtcttgtgacttctggaataatggctagtaatcctttatg

SEQ ID NO: 111342 - DNA, 539 bp, Homo sapiens
acacagcagtgacaagattaggtaaaagtcaggtggagacatgtttaatgataagtgaagaacttcgtactgtcatttttgttatgtacagtgttactaggaatattggtatctgtattrgaatttatagcattcctgcaaattccttacaatgaccactcactatttaaaaaaaaaaagggggggaaacaagaattaaagagaggtggaaatattgatgaagcaaatcctgaagatataaggaggagaaaagtcagaagatttagattttttataatgatttagattttttataatgattatctctgacagcccaaaaggggggcacacatttgcaatacaattttgtttgcctcctattaaaatgagatttagtcttccttttccactgcataaagttttagaattaaatttgtccatagtaggagtaataaaatggatggatttgctcaggactcagatgcattggctgttaacactcacaacaaaataaattcaagatgacaagtcagatttctaaaagggtacaattctgaaac

SEQ ID NO: 111343 - DNA, 280 bp, Homo sapiens
tatatatacccacatatacactatactatttatattgatttcacctgttttatctgttataaattggtattatctcaaaaggtttgtaaaacctgaacattcttgataaattgaggttttgaggcagaaactccatcgtcactaccttaatgtatgcacctaaggaaactcagagttctaatctagtaatgtcccaaatttaatattacttgtcctttaataagyaaaactacctattgaagacattgtagaaagactatacaaacaaaaagggtattca

SEQ ID NO: 111344 - DNA, 386 bp, Homo sapiens
aagatctacacttgggagtgaaatgcattccttcttgagaatactgaggtcttataaaccacccatagtattgatcccctgccccctgtcatggtggttaaacattaaaaaaaatgactgaatatgtgggaaattctcaaactgcaytcaaacccagtgcctgactcaggtctgttagggaactgaataacctgaaaccatactacagataatccaaaatccataagaaaacttagaaatgactcaccattttgagcatagccactttctccagaaacgacttgaagtaaagaaaaaaccatgccaaaagttgtacctagaattgtcattctgagagagatagagagagagagtagatgtgtgagccagtgtgtatgaaatgaatg

SEQ ID NO: 111345 - DNA, 386 bp, Homo sapiens
aagatctacacttgggagtgaaatgcattccttcttgagaatactgaggtcttataaaccacccatagtattgatcccctgccccctgtcatggtggttaaacattaaaaaaaatgactgaatatgtgggaaattctcaaactgcattcaaacccagtgcctgactcaggtctgttagggaactgaataacctgaaaccatrctacagataatccaaaatccataagaaaacttagaaatgactcaccattttgagcatagccactttctccagaaacgacttgaagtaaagaaaaaaccatgccaaaagttgtacctagaattgtcattctgagagagatagagagagagagtagatgtgtgagccagtgtgtatgaaatgaatg

SEQ ID NO: 111346 - DNA, 386 bp, Homo sapiens
aagatctacacttgggagtgaaatgcattccttcttgagaatactgaggtcttataaaccacccatagtattgatcccctgccccctgtcatggtggttaaacattaaaaaaaatgactgaatatgtgggaaattctcaaactgcattcaaacccagtgcctgactcaggtctgttagggaactgaataacctgaaaccatactacagataatccaaaatccataagaaaasttagaaatgactcaccattttgagcatagccactttctccagaaacgacttgaagtaaagaaaaaaccatgccaaaagttgtacctagaattgtcattctgagagagatagagagagagagtagatgtgtgagccagtgtgtatgaaatgaatg

SEQ ID NO: 111347 - DNA, 584 bp, Homo sapiens
tgaccaggagaccctttgtgtgctggttgccatcccactgcttagaggagttaatgagcctcaaaagaaagattctacaattttcctatttaacaacattgtgccacaaaattattatgggaatgctgcttgctctgcttcagtgtttttctattgcaatgtattgttgccttgtctcgttcagttcttaatgaaatgtggattcacttactgcctatgtccttatgatattttattgatwtgaactctgttttcagatattcttctcctcccttctgtagaattactagaattaccctgttggttcacatgtgaatcagccaaattgaaattttgtaatctcaggtagggcttcttctccatctcccaagcacacgactgggtcagtatcctccattagcttgaagacaagtgctcttggagtagagcttcaagtgaactttagcccacaagaagcaaaattaggaaatgtgtctctttgtagaattagaattagaattcccgttaacaataagaattgtcttgggctgctcattgacttagtgatcaatttaaatgtgattttcccacatattttgcacaaa

SEQ ID NO: 111348 - DNA, 584 bp, Homo sapiens
tgaccaggagaccctttgtgtgctggttgccatcccactgcttagaggagttaatgagcctcaaaagaaagattctacaattttcctatttaacaacattgtgccacaaaattattatgggaatgctgcttgctctgcttcagtgtttttctattgcaatgtattgttgccttgtctcgttcagttcttaatgaaatgtggattcacttactgcctatgtccttatgatattttattgatttgaactctgttttcagatattcttctcctcccttctgtagaattactagaattaccctgttggttcacatgtgaatcagccaaattgaaattttgtaatctcaggtagggcttcttctccatctcccaagcacacgactgggtcagtatcctccattagcttgaagacaagtgctcttggagtagagcttcaagtgaactttagcccacaagaagcaaaattaggaaatgtgtctctttgtagaattagaattagaattcccrttaacaataagaattgtcttgggctgctcattgacttagtgatcaatttaaatgtgattttcccacatattttgcacaaa

SEQ ID NO: 111349 - DNA, 310 bp, Homo sapiens
aggagaatggaaaaaacacatatgaagaaataattgggcttcttgcttgtgcttaggtggtcgacatctggaaagaactttgctttagccctaacaaaaagaagyccgaagataacagtctttcctgttcttcctttgtagtcctaaggcttttattccacaggggagaaggatctggacagggctgcctgacttgacctgacttcattgataccccatcctggtctttgattaccatgtggaaatctgcagaaaagagcctactgggggtgcaaactccccttgtatctctgggtcccaggaggtcctc

SEQ ID NO: 111350 - DNA, 310 bp, Homo sapiens
aggagaatggaaaaaacacatatgaagaaataattgggcttcttgcttgtgcttaggtggtcgacatctggaaagaactttgctttagccctaacaaaaagaagcccgaagataacagtctttsctgttcttcctttgtagtcctaaggcttttattccacaggggagaaggatctggacagggctgcctgacttgacctgacttcattgataccccatcctggtctttgattaccatgtggaaatctgcagaaaagagcctactgggggtgcaaactccccttgtatctctgggtcccaggaggtcctc

SEQ ID NO: 111351 - DNA, 479 bp, Homo sapiens
gaattctttgaggcccagaatgaggtagatccctccagagcctatctgagtttgcagcttccaagtgcgtagggcattagagtctaagagtcctttaaattatgagcttgaggaagtgagcgttcacaatgcaaagccttggagggccagtctgcaggtgaaactttcagtggtggctcctcccagtccctccacttccattcagcaccagaatccttgcaggccctttggcctgtgaggggtaatatgttcttggtggtgtatttaattctagttgacccatggatgaagatgtggcctcttgggggctccagctttgtggcaggggagggtttcctataagatcccttactttggctgggccctggacttcgtcatctcttccctgcactccacagagccatcaacatggaagctcaaggttaccaggttcaagaaattctctcagggtcaaaggkggctgcagtgccgtaatgatc

SEQ ID NO: 111352 - DNA, 384 bp, Homo sapiens
actaggatgctattaacactgacttttcaaaactagagttggaggtatatttaccagtttggaaatccagcaacctaaggggcctaaaaaagagccagggctctatatatttccatcacaggaacctcatcttgtgctgctkcttttctgtgtgtgggtgagctgctattcctagaaccaggcctgaagcatatgctgcattccctccattcctaccacctccttcctatggaatgtagtgagcccaggctcctgtgcaactgacacaagagatcctggtccacagtggtggaatgggaaattcttatgtgtacaatggctggtttttccatccattctcctctcctccagaggaaaaatggtatatgtcagggctaggaattc

SEQ ID NO: 111353 - DNA, 646 bp, Homo sapiens
aacctgtcactctctattttacatatttattacttcctgctttgtatctctgttccctacccttctttatctctttatttcttttcccctttgacatcaatattttttgagcttaggagaaaatgttattttccaatctaacagtgggcactttgaagtagagagaagttatatttgttaatgcaagttacttcaatgrtatcaaaatgcatctatttggagttctaaaaaagtaccactctttaacaatttttggagctcagaaaaatcaaaccaaaacatatcactagtaaaaccaatgataacattgacaacctctgccaaaccaagaacatgtgtgcagtgaagcatttccttttcctattaacataattattagccattgcctagaaatttctcttttttttctaacccaaagaagtaatctgcttccctgtaattttaatttattgattccagcttttcctctggatatgggcataaaatataaaatccctctttcacctgacagttcttctaatatctgaagatgatcacatgacatccaatatgccactgcagagcctatatttttccatcttggccatagatagatgtagatatagatatagatagatcatgagagacttaatcatgtgcttggctg

SEQ ID NO: 111354 - DNA, 531 bp, Homo sapiens
gaactgtggatatcagtttattgctatctattagctagactgtgctcagtctcttgccacatggtcctcgctattgctctgtccacatgatagcttgcttcatcaacacaaagatgacatctcacgtacacaaacaaaaatagagagagagagagaatcacagtcatttaaaatctaatcttgaaagtggcatcttatcacttttgccacattatatttattcaaagcaagttactaaacacagccctcaatcaagtagaggggattacacaggtcataaatacaggaggcagggatgattgaaagtmattttagaagaatgttcaaagtaactaaaagtggaactaccatttgatctggcattcccactgctgggtatatacccagaggaaaataagtcatataaaaaagacacttgcacacgcatgtttataacagcacaattcgcaattgtgaaaatatagcaccagcctaaaggcccatcaaccaataagtcaataaagaaaatgtgatatatataccatggaattc

SEQ ID NO: 111355 - DNA, 582 bp, Homo sapiens
catagaatgacttagagaggagtctctcctcctacgagctattcttcgtacatatggtaaaatttggctttgaatctgtctggtcctgggttttcattggttggtagtctatttatcactgattcaggtttggacctcattatttgtctgttaagggatttatatttttttctggctcggtcttgggaagatgtatgctttcagaaatgcatccattccttctagattatctagtttatgtgcatagatgtgttcataaaattctctgacgtttacttgtatttctgtggggtcagtggtgttatccccgtagtcacttctaattgtgtttattttggatcttctctcttttcttttttattagtctaggtwgcagtctaattattttattttatttttttcaaaaatccaattcttggatttgttaatcttttgaatgtgttttcaagtctcagtctctttcaattcagctctcatttgagttactttttgtcttgtccttgctttggggttggtatcttcttggttctctagttatattagttgcaatgttaggtttttaaatttaaattttagctttat

SEQ ID NO: 111356 - DNA, 675 bp, Homo sapiens
ggatagcattaggagaaatacctaatgtagatgacaggttgatgggtcctgcacaccaccatggcatgtatatacctatataacacacctgcacgttcctcacatgtatcccagaacttaaaatataataataagtargtaaataaattaaattaaattaaaaccacaccaactatactcttggacaacagtggaataaaaaataaaaataataccaagaatgtctctcaaaatgacaaaattacatggaaattaaacaacttgatcctgaatgactgttgggtaaacaataaaattaaggcagaaataaaaaaaaaaaattgaaataaatgaaaacagacacacaacataccccaatctctgagacgcaccaaattcagtgttaagaggaaagtttatagtgctaagcagctacctcaaaaagtaagaaatatctcaaattaatgatctaacatcacacctagaaggaccgggaaaacaagaacaaaataacccaaaagctagcagaagaaatgaaataaatgaaagcaaaactgaatgaaatcaagactcaaatatccatacgaagaatcaatgaaagcaaatgttgattccttgaaagcttaaacaagaccaaaagactgctagctagatgaacaaagagaaaaagagaagatccaaataagcactatcaga

SEQ ID NO: 111357 - DNA, 675 bp, Homo sapiens
ggatagcattaggagaaatacctaatgtagatgacaggttgatgggtcctgcacaccaccatggcatgtatatacctatataacacacctgcacgttcctcacatgtatcccagaacttaaaatataataataagtaggtaaataaattaaattaaattaaaaccacaccaactatactcttggacaacagtggaataaaaaataaaaataataccaagaatgtctctcaaaatgacaaaattacatggaaattaaacaacttgatcctgaatgactgttgggtaaacaataaaattaaggcagaartaaaaaaaaaaaattgaaataaatgaaaacagacacacaacataccccaatctctgagacgcaccaaattcagtgttaagaggaaagtttatagtgctaagcagctacctcaaaaagtaagaaatatctcaaattaatgatctaacatcacacctagaaggaccgggaaaacaagaacaaaataacccaaaagctagcagaagaaatgaaataaatgaaagcaaaactgaatgaaatcaagactcaaatatccatacgaagaatcaatgaaagcaaatgttgattccttgaaagcttaaacaagaccaaaagactgctagctagatgaacaaagagaaaaagagaagatccaaataagcactatcaga

SEQ ID NO: 111358 - DNA, 525 bp, Homo sapiens
aaattcttactgaaacttgtagtgataataatcgatacttaagcaccaggcagtttaagttctttaaagaatgttgtagattaattgcaaaaacagcttcaattcttcaatatcccctaccctctccaggtatccatacctatttatccaccaaggggtgaaatttatttctctgtctcttgaatctagactgaacttgtattttactttggtcaatagaatgtggtaaagttgataacgtatcagttctgagcctaggcctcaagaggccttgtgtatcttcactctctatcttgaaacccttccattatgggattaagctttgactacctgctgaagaatgaaatccaygtggaggagagtccagctgtccctcttaagatcttcccaggttagtttataccagctgtaccgaaacatgcaatagaattgcctgtctgatccacaattgactgaagatgcaaaagtgagcccagctaagaccaatggaaacacctagatatcccatagactcaaacgataaga

SEQ ID NO: 111359 - DNA, 598 bp, Homo sapiens
atacctccagcaaactttagtttttataaaaaggtttctacttaatgcatttcttttaagcaatatttgtatgaacaatctattaagcatactttggaaaatttctacaaatggaaatcatgastacaaattttcaaaatactgctctaaagtcacaagagctagatacagattatgccaacttctgtaataaactttctccaaacatttcctaaagatatcactgatatcaatctttacagaaactgaaaatttgagtttttaagaaaggtattttataaaactgtacaaatgaaacaaaataaatttccactgcatcattaaatattattcaatattacaatctactttaaagaaaacaccgaaaattcctcaatttaggaattaataaactgtgctataaattcactctcagaaacaatactttcaaacttgcagaagctgaggatcctaaacaccatctaactagactggttcagtgctaagtaaaaggcaaccagctgatgatagttatcagcatttagtagtgtaactgtaacagtagataactgaagtgcgatcactgtcgctagtaaggcctgcaatcattagctcatca

SEQ ID NO: 111360 - DNA, 626 bp, Homo sapiens
ctttgtggaaggtatttatacactagttttcagatggggcaaagagcattctcagaaatgtaaataattacattcattctcacagctagtaggtggcagagacaagattcaaacttcacaataattccctgcaagactcaagtaagagaagattggtggttcagaactgagaccacaactgctcagtttctagactgatgctgcttggaaaaatcctgttgcacttgaacttgcctggctaagttcagatgttttaaagaagcttatsaaaccagacattaattaggaccccaaaatctggtcagacgctagcaggaaagtgggagatatattttagggattcctgggattcagacttcacaggccttgctcagtcatcacatttattaatatttgcccaaatcctgggatgggaatgagagaatgaggaacacactgattagcaactttcaatctctgctgacctaacattgtgtaataaattggtcaaaagcttagtctttggaatagagcaatcacaagtaaattctcagttctgttttttcctggctgggtgacactgaggccaggcacttaacctctctgaggcttcatttccttaatgctgaaatgaacatgggggtgta

SEQ ID NO: 111361 - DNA, 554 bp, Homo sapiens
acatactggatgaaaatgttaaatgatacaactgtttggggaaaatgtctcacaatttgatatgataccagataaacacctaaactatggcataataattctaatcctagcttcaaaagaaatgaaatcatatgtccaaaaaaggatttgtatcagagtattggcagcagttttattcataatagctaaaaactggaaatarcacaaatgttcaattggaaaatgggaaaataaattgtggtgtattcataaaacagtttactattgatatatgctctaacatgggtgaatcttaaaaatatcaattcatctctactaaaaaatacaaaaattagccgggcatggtggtgtgcgcctgtagtcccagctactcgggaggctgaggcagaggaatcacttgaacccgggaggcggaggttgcagtgagccgagattgcgccactgcactccagtctgggcaacagagtgagactcttatctcaaaaaaaaaaaaaaaaaaaaaaaaaaaattcaggcaaaagaaggcagacaaaaaacagttcaaactgtatcat

SEQ ID NO: 111362 - DNA, 568 bp, Homo sapiens
ctgtagcttttagatttatttatattggcagatgtagctcagttcattcatttttactgttgtgcagtattccatcatgtgaatagtcagggtttctcagacagacaaaacaaatgaggatacgcgtgcgcrcgcacacacacacacacacacacacacacacacacatatatatatatagacatatgaggaagagatttattatgggaactggcttgcatgagaagtcccaggatatgctgtctgcaagctagagaatcaggaaagctggtggtgtaattcagtctatgtccaaagacccaagaaacagaggaaccattgttataaccaggagttctgatgtctgaggacaagagaagattgatatcaattgctcaggacgatggagtttacccttcctccacctcttttgttctatttgggtgggtctgcaatggatgggtgagggtagatcttctttacttagtatattgatttaaatggtaatttcttctagaaataccctctcagacacaccccgcatgcatcccttagcccaggcaaattgacacataaaattaaccatcac

SEQ ID NO: 111363 - DNA, 568 bp, Homo sapiens
ctgtagcttttagatttatttatattggcagatgtagctcagttcattcatttttactgttgtgcagtattccatcatgtgaatagtcagggtttctcagacagacaaaacaaatgaggatacgcgtgcgcgcrcacacacacacacacacacacacacacacacacatatatatatatagacatatgaggaagagatttattatgggaactggcttgcatgagaagtcccaggatatgctgtctgcaagctagagaatcaggaaagctggtggtgtaattcagtctatgtccaaagacccaagaaacagaggaaccattgttataaccaggagttctgatgtctgaggacaagagaagattgatatcaattgctcaggacgatggagtttacccttcctccacctcttttgttctatttgggtgggtctgcaatggatgggtgagggtagatcttctttacttagtatattgatttaaatggtaatttcttctagaaataccctctcagacacaccccgcatgcatcccttagcccaggcaaattgacacataaaattaaccatcac

SEQ ID NO: 111364 - DNA, 652 bp, Homo sapiens
gttgcacaaacgaattgaatggtggtgaatgtggaggattttattgagtggtggaagtggctctcagcaggatggggagctggaaaggggatggartggtaaggtggtcctcgcctggaattcagctgcccctgtctgaactcttctccaaggtcctgccatcaaaccatccttctgaagtcaaattgcttctctccaacatctggctgctgcttctcttctttcctctccttctctgctgctctgctactgtgctgctccactggtggggcctggggtttttatggttacaggatggggggcagggtgggccaggatggttttggaaaaggccacatttgggtgggaaaacaggaatgcatgttctcactttggaccatgggtccaggcttgaggggaccgccctcttgtacccaatatttccctgcttccagtccatatcactattccatctgcccttccagtgtcttgcattttccttcataattaaaatatctttgtgtttatatattaggaactatttcttttctttttgtcttcccagagtacaaatttgattctcatcagtgaatgccattttgtttttttacttttaaagttaaaatgtcataattttaacacttagaaaatcttctttgtgttactaaattat

SEQ ID NO: 111365 - DNA, 557 bp, Homo sapiens
taattagctgacagtttataatattaaccccaactcttctaaaacttctcttcatttatcataaataatatctacctatcaccataatatctttgacatttcccctctggttgttggttgctrtaaacattccataatataatttagatatgatgttaatgaactgctgtgaaatttcatgaaccccaaaatataggaaatcatgaagtccagataaacgctgaaataaacacgaaactattcataagatgaaagccaagagaaaattaacaaggatgatgacaagagcatcaaaggagaataatttgtatacccaggcattaaaaaattggtgaagctggccaacattcttacaaatgagatcatctttgcaaaaatgttataaaaattcaaatgggatatgaaggttgccatactacacattttgtagaaaaaaaatttcccataaaaatccaacacaaaatttatcctttgttgcaatcataacctacattttgttaaacatgagataaaataacattttatcatgactgagtttccttttttaaagatcaaat

SEQ ID NO: 111366 - DNA, 436 bp, Homo sapiens
cttaacactatttgtacaaacaagaaaaaagaaaactaataaaaamtctatgccttatcttcatccctcaacttcttaactttatgttgtttctatttatatcttattgtaccatatcttgaaaagttgctatagttatttttgatctgttcatcatcaattctttctacttaggataagagtagtttatacaacacagttacagtgttataatattcagtgtttttctgtgtacttaccattactagtgagttttgaaacttcaaatgatttcttactgcacattaatgtccttatctttctgatcgaactgctccctatagtgtttcttatagaacagatctggtattgagatccctcagcttttgtttgttgagtaattttttatttctccttcatatttgaaggatattttcactggatatactattttagg

SEQ ID NO: 111367 - DNA, 467 bp, Homo sapiens
gatcaattctgctattaaaggactctgatgcattcttcagtatgcctattgcagttttcagctccagaattattgcttggttctttttaaatatttcaatctctttgttaaatttatctgatagaattctgaattccttctctgtgttatcttgaatttatttgagtttcctcaacacagctattttgaattctctgtctgaaaggtcacatgtctctstttctccaggttttgactttggtgccttttttagttcacttggtaaggtcatgatttcctggcatgatgctgatgctagtggatgttcttcggtgtctgggcattaaagagttaggtatacattgcagtcttcactgtctgggcttatttgtagtcatcttttttgggaaagcttttcagatgtttgaaaggagttggatgttatgatctaagctgtatctgctttaggagacatgctaagcctagta

SEQ ID NO: 111368 - DNA, 533 bp, Homo sapiens
gcatagtgtggcagtcctgcattacttgacagccacagctcctggcagatggcacatcttctttgctgcttcaggactaagggtgatwatagcgtggagctataataatcacactactcacacctctataaataggaccttcatttaagtttcttccccaaagcccttttgggtgtggcttctgtttccttccaggaacatgaatgatacagcaggaatgttaaagaataatcacccatgtagatagatcctccttcagtccatttccagttctcagatattctagccctgtctctttcacattagaggtatttatatatattttgttattcatgatgaaaatcttggaaaaatctattctgggggctccagagcctccgaaaaatgctatcacacagactcaatcccttctttaagcttgtttttacctataatttggtttcatgagcccacactattattgctgtgcatagcagtgttttcaggtgatactgtaaaaactaaatcaaaaggtttatacttcaaggtattgg

SEQ ID NO: 111369 - DNA, 533 bp, Homo sapiens
gcatagtgtggcagtcctgcattacttgacagccacagctcctggcagatggcacatcttctttgctgcttcaggactaagggtgattatagcgtggagctataataatcacactactcacacctctataaataggaccttcatttaagtttcttccccaaagcccttttgggtgtggcttctgtttccttccaggaacatgaatgatacagcaggaatgttaaagaataatcacccatgtagatagrtcctccttcagtccatttccagttctcagatattctagccctgtctctttcacattagaggtatttatatatattttgttattcatgatgaaaatcttggaaaaatctattctgggggctccagagcctccgaaaaatgctatcacacagactcaatcccttctttaagcttgtttttacctataatttggtttcatgagcccacactattattgctgtgcatagcagtgttttcaggtgatactgtaaaaactaaatcaaaaggtttatacttcaaggtattgg

SEQ ID NO: 111370 - DNA, 573 bp, Homo sapiens
tgaatatactcttgccctctgtgttccatactccccattatttaataatgaaaacactccaaaacagtatactaagcacttggggaagtgagttacaacttttatctcattgagtaaccakcatacattgtgtcaaaacaccatggtgtgttattatcataactgtcaacaaaattgagaaagacttggtcccacttgaatgacctgattacagaaggggtccatggtacatggtagtcaccctctccctaagcctgtgtcaaatagcagcctataattaaatgaagattaaatttaatctattatttcaaaaagcatacgttacttaaatattagtaactcagttttaaaaaggcacactactgagaaaatccagccttaaaggccttttccctaaggtggaaaaaaaaaagaaaaagaaaaaaaaaaaaaggcggcatgctgatacacatgctgtaaaatctaagtgccccaatcatctgtcatttgcttgcttctgcttgcccctaaccagctggctctggcttaaagatatccccttaatgcaattcattgaaaaaatacaaagcaaga

SEQ ID NO: 111371 - DNA, 530 bp, Homo sapiens
ctatttgcaaattttaatgactttaccttcatcctttttgttaacaggtataaagatttgacacgattaaacatctctcttgccttcctttcctcattcatttgttcattctttcctaaaaagaaatcgacgtactgtttttgcaaaaccaaaaaagtagaaggaaggaaataataaagataagagcaaaattcaacagaatagaaaataggcaaacaaatagagaatgtcaactggttctttagaaaatattaacaaaattaataarcccacaggaagactgatgaaaaaaacagagaaacacaaatgaggtgacatctatatacatcctatgacattaagaggataagagggatattataatcaactttatgttaatatatttgacaacttagaacaatggacaattttcttgaaaaagacaactttctaaagttatcacaagaaaaactgaaaatgtaaatgttcctgtatttgttaaataagtcaaatccataattagaaatcttcccacaaaggaaagcccagac

SEQ ID NO: 111372 - DNA, 530 bp, Homo sapiens
ctatttgcaaattttaatgactttaccttcatcctttttgttaacaggtataaagatttgacacgattaaacatctctcttgccttcctttcctcattcatttgttcattctttcctaaaaagaaatcgacgtactgtttttgcaaaaccaaaaaagtagaaggaaggaaataataaagataagagcaaaattcaacagaatagaaaataggcaaacaaatagagaatgtcaactggttctttagaaaatattaacaaaattaataagcccacaggaagactgatgaaaaaaacagagaaacacaaatgargtgacatctatatacatcctatgacattaagaggataagagggatattataatcaactttatgttaatatatttgacaacttagaacaatggacaattttcttgaaaaagacaactttctaaagttatcacaagaaaaactgaaaatgtaaatgttcctgtatttgttaaataagtcaaatccataattagaaatcttcccacaaaggaaagcccagac

SEQ ID NO: 111373 - DNA, 524 bp, Homo sapiens
gagctatgattgtgccactgcactccagccagggtaacaaagcaagacctctgtctctaaaacaaaacaaaaacaaaaacaaaaacaaaaacaaaaacaaaaacaaaaaatatgactctctacctctccttacctagttctcccataggcactatctaagtcagcacaggtgttggccttgacaagattagcattgcattggtagaatgctccaaaatggcctcattaaagcatcattacatcatacttgctgaagtaatcaatgattctcatggaacaagagcacaggaggtgagagagcactgtttcctaatgcagacggccttcaggatcacttcctggctgaatgacctagagaaggggacgcragtacacccgtttcattttctcatctctgaagtcgggggagaacacctgccagccgtgccgtttattgtgggggtgaaaccagtgttcctgaagctcatggcctggcacagaagggtgctcctgggtgtcatttctccctcttcatgtcacctctt

SEQ ID NO: 111374 - DNA, 592 bp, Homo sapiens
tgctatcacaacatgtttcatggtagttttgaacatctttttctaaaatccaaacctctctctccctttgtcttgtctgtctgctaatttagacaagctgcgtcgtatatttttgtcattctggatatttgtcgcttgtgtcatctattccagcagtggtggcaatggggccaagtttggtgtctattaacttgctttatcagccaccatgggaagttggggacgtgcctgcattccaccttgccagtgcatgctatggaggagaaaatgtgagtggttctatgcacatctatccacattgcctgaagtgcaattcaacttagatgatctcccagaagggtctgcagggcactatcttttcacatggtggcaacccttgtttttgcaattcgagaacagaacaaatcaacctgccctctggcccaaacctccagtggacaactctctctacaggaatctgcaggcactaccatcccagggcctggtataaagacaaaggttattggtagtggagttgaacggaactggatgcaacacatttcagttcaactgatctcttaccctctstgagtctcacttttcttgtctgtaa

SEQ ID NO: 111375 - DNA, 559 bp, Homo sapiens
tctggccacttactcacgcatttagaaaaaaaaagttttatattaaatatatgtgagcaacatattatgccagaaaaagagtgcatgatgatgaataaggcacaattcctaccctcaagaacacacagccaaatgcagagacagaggaggatgctggaaaacagtggtgtgactgatgggtgccggaggaakggtgtggacatggagggaggcactgcaatgtttgtgcatgggaaagaaaaaaagaaacagggaagagaaaaataaagacgaacaagctctcacctacaaatccaacaaaggtggtagatgcattccactcctgttgttataaggatacctctagaaataattttatgaaataagcaattggaattcatgtgatattatttgaaaaaaaagtttaaaaatattttaaccaaatccacactgaaggctgttagaatgtgtcactgatgcataaaaagcataaatgttatttcttcacatcttccttcatctgactatagattcatctaagtgcaatggcaaaataatatagataaacatctatttactg

SEQ ID NO: 111376 - DNA, 559 bp, Homo sapiens
tctggccacttactcacgcatttagaaaaaaaaagttttatattaaatatatgtgagcaacatattatgccagaaaaagagtgcatgatgatgaataaggcacaattcctaccctcaagaacacacagccaaatgcagagacagaggaggatgctggaaaacagtggtgtgactgatgggtgccggaggaagggtgtggacatggagggaggcactgcaatgtttgtgcatgggaaagaaaaaaagaaacagggaagagaaaaataaagacgaacragctctcacctacaaatccaacaaaggtggtagatgcattccactcctgttgttataaggatacctctagaaataattttatgaaataagcaattggaattcatgtgatattatttgaaaaaaaagtttaaaaatattttaaccaaatccacactgaaggctgttagaatgtgtcactgatgcataaaaagcataaatgttatttcttcacatcttccttcatctgactatagattcatctaagtgcaatggcaaaataatatagataaacatctatttactg

SEQ ID NO: 111377 - DNA, 581 bp, Homo sapiens
tctgaattccctcaagacaacttcctccatttgctttatgatcccggtggtgtgccggagccagtgcacactggcttatgcgagcttattgttaaatttgcaggaattttgtgagccgcttgtttgatactggccatgttaggagcaatcacacatggaaattgtcaaattctactaatcaaggttttaaatttatttttccctcttcctggagtgctggttgtttaacatttaccatcatatctccgtttctaaccaactcatctttgcttctagtgcaactttgtgggttctttcccttggaatctgggagtaagcatgatctgtgatcatttctatatctctctggaaagtctctaattttgtcgtaaattaccagccctttctgctaatgagcgagtaagcaaatgactttacattgatacagtgaacctcctcagtctctgtataagttttctattgctgctgtaacaaattaccacaaacatagcaacttaacacaaatttattgtcttaaagtttctgkagattaggagtcctcatgagggcttaatgaggttctctgcttagggacttacaaa

SEQ ID NO: 111378 - DNA, 570 bp, Homo sapiens
gcaactgtttggttgagattgtgatagtctacaactgttctctcatttatccattttctacagatatataatggtatattcaaaagagatatgacagggaccaccaccattacatcctttggatctttaaaggtggcactaacctctcccatccacccaagatgtgatattaatttttttttatcctgtctttgtggggcagcagtcatagagactcccacttgctcttctccactatgacagctttaatcttacatataartggtgatccaacatcaagccttctccaaatgccaagtatatgaacctgaattatacattcaagggctgaggaaattacaccagtgtaataataggtagctggactttgaccaagattctactttttccttggcctccattctaacacggaaaccataatgatggttttgttctcaatgtattaatatgaactcagactctatttccaatagtcttcaaaatatctgagtatttcttttttaccaatatatagtcagctataggaaaagaaagggggcttgttgctgtgtatatttgttatgacatcat

SEQ ID NO: 111379 - DNA, 570 bp, Homo sapiens
gcaactgtttggttgagattgtgatagtctacaactgttctctcatttatccattttctacagatatataatggtatattcaaaagagatatgacagggaccaccaccattacatcctttggatctttaaaggtggcactaacctctcccatccacccaagatgtgatattaatttttttttatcctgtctttgtggggcagcagtcatagagactcccacttgctcttctccactatgacagctttaatcttacatataaatggtgatccaacatcaagccttctccaaatgccaagtatatgaacctgaattatacattcaagggctgaggaaattacaccagtgtaataataggtagctggactttgaccaagattctactttttccttggcctccattctaacacggaaaccataatgatggttttgttctcratgtattaatatgaactcagactctatttccaatagtcttcaaaatatctgagtatttcttttttaccaatatatagtcagctataggaaaagaaagggggcttgttgctgtgtatatttgttatgacatcat

SEQ ID NO: 111380 - DNA, 511 bp, Homo sapiens
gcacaaacctccagccagccttctcaagctgccaggatatcctctttgaaacaatgtgctgcctttcaagaagggcagcacgttgattaactactatatctgaggtgaaccttggcttaaggtgccagctagagccataaagaaagcagtcacctagtagttaaaaaaaaaaccctctaaacaaatatatctaataagtacccaaataagtaagacagagaatactggaataaataactaatactttaatgaaaatacatagacatacattcacaagaaacaacagcttacaaggaaccataatatcmtcaaatgggcagggcaaggaacaagtaattgatcctaatgaaacagcaaatatgagctctctcaccaaaaatttagaataaaaattttcaagaaactcagtcttctctaagataacaaagaaaagcaattcaataatttattagagaaatttggcaagaagatttaaatactaaaaaaaaaaaactcagaaatcttggaactg

SEQ ID NO: 111381 - DNA, 511 bp, Homo sapiens
gcacaaacctccagccagccttctcaagctgccaggatatcctctttgaaacaatgtgctgcctttcaagaagggcagcacgttgattaactactatatctgaggtgaaccttggcttaaggtgccagctagagccataaagaaagcagtcacctagtagttaaaaaaaaaaccctctaaacaaatatatctaataagtacccaaataagtaagacagagaatactggaataaataactaatactttaatgaaaatacatagacatacattcacaagaaacaacagcttacaaggaaccataatatcatcaaatgggcagggcaaggaacaagtaattgatcctaatgaaacagcaaatatgagctcwctcaccaaaaatttagaataaaaattttcaagaaactcagtcttctctaagataacaaagaaaagcaattcaataatttattagagaaatttggcaagaagatttaaatactaaaaaaaaaaaactcagaaatcttggaactg

SEQ ID NO: 111382 - DNA, 555 bp, Homo sapiens
gggcctttgatctggagttggatcatttggatgattccatgaatggtagagactagaagcaagcccgaccttgcaaggagggaatggtcaccgccatgcccagcattcaggcaggctgcttggtggacagagtgcagtcgtgaagactggctacgcagctgacctttgggaaatccagacagagagcctggggagatggggrggaggtgcctggaccacagtggtgggcacatctagtgctctctcaagtcatctacatgggcctctgctgcgggtagcatgtttctcgctatatttcaaatgtctctgatccatgacactcgcgtcctaatggatcctgctgtcagcaatggatgagcattgagctaatagatgtcaaacagcatttacatttctgaaatggcttcatctgctccctctcccaggactctccaaagtgaaatttgaaatgtggacagacgggtcagctctggacagctccacttccagaattctcgtgggcaagaaacaattatttattttttcctaaacagacagacagtgctgagcttattc

SEQ ID NO: 111383 - DNA, 521 bp, Homo sapiens
agtgtcagatggctctggggttagagagaggtgtgtgtagccctggtagatgggsttactgccttaaagaacagtcaaaggtgggggaggcacagctgccaacactaaacctttaggggcttagatagctgagggagtttgataaaggccaggggtccctgcacctttcagctagccctgcctaggagttgcccaatcagcagaggctgagcttgcctttctcatcttcccagaagaccagatgtgaaggggagagggctgggcatggccatataggcaaagaatgtgcaagtctcctttgagcccacgagttcgagaccagcctgggcaacatagtaaaacccccctctctacaaaaaaatatgaaaattagctgggcatggtggtgcctacctgtagtcccagatacttgtgaggctgaggtgggaggatcacctgagcccagggaggtagaggctgcaatggagcgccactgcactccaacctgggtgatagcgtaagactctgtctcaaaacaaaca

SEQ ID NO: 111384 - DNA, 521 bp, Homo sapiens
agtgtcagatggctctggggttagagagaggtgtgtgtagccctggtagatggggttactgccttaaagaacagtcaaaggtgggggaggcacagctgccaacactaaacctttaggggcttagatagctgagggagtttgataaaggccaggggtccctgcacctttcagcyagccctgcctaggagttgcccaatcagcagaggctgagcttgcctttctcatcttcccagaagaccagatgtgaaggggagagggctgggcatggccatataggcaaagaatgtgcaagtctcctttgagcccacgagttcgagaccagcctgggcaacatagtaaaacccccctctctacaaaaaaatatgaaaattagctgggcatggtggtgcctacctgtagtcccagatacttgtgaggctgaggtgggaggatcacctgagcccagggaggtagaggctgcaatggagcgccactgcactccaacctgggtgatagcgtaagactctgtctcaaaacaaaca

SEQ ID NO: 111385 - DNA, 631 bp, Homo sapiens
ctctgtaaatgtcagttaggtcaattagttgatagcacagtccaggacttctttgtcgctgtgcccttactctttcaattatagagagcagaactttgaaatgtctaggtatatttattatttctcttttcagttctatcagtttgagctttatgtattttaaagttctgtcattgggtgcatacacatttagatkatatagtcgttcttgtatattgaaaacttcatctttttattcctaacaatagttatttgttaagaattttttgtatggtaatatagccaaggaggttccatttaattaatgttgtatgggataactttttccatccttttactttgaaactatctacagctttgtatttaaagtgagtttcttgtagacagtatatagttgggtcttgctatttttatctaaagtaactatctgtattttaattagtgtattaaatccatttgcatttaatgtaattaatgaaacagttaaattaaaatctgtacttgctagttgtttttatttgttctgtatattcttggtctccttttgctcatttccgacatttcttttttaaactgacatataagaattgtacatacttatggggtacatagtgatatttgataatgataa

SEQ ID NO: 111386 - DNA, 613 bp, Homo sapiens
ctcaaacgtatgattacaaaataatcagaccaattttatgtgcatgtgtataatttcatagcatcatttctttagagacacagtttgtagttaataaacagtgatcattctaggtaaggcattgcmatgaattaccagaattcttcagtataattcttcattaaaattctgatgatcatataaattgaatggtatattaccacaatctcagtcaaaaaatgctctaaattcttaatacgcattttctgctcactaccaccaaacatattattcatttaccactgccaaagattctatcagacttttctccagttagtattctttctgacgtgctagctacatatttgagaatttgatccatgtttcttttcctttttatgatttctatttgctcaaaatacttaaagagtctgggtagtttggaacctttctatattcctatattaactgttttgtcttaccttctttgaagaatatgacaaaaatagttggtaagtttcatttttggaatatgaaaaccgaaaactacccttgccatgtaaagaaattgaggaggctgtttcctcacaacattgttcagctttatttgtttcagtgggtgtaaattttagag

SEQ ID NO: 111387 - DNA, 588 bp, Homo sapiens
gtgagagctgagaggttagacaactgtgataagatgagagggttaaaagttggattttcaaatttcagagacagcaaagttctggtaaagacaaagccaagggttaggtggctagaaatgagagtggctgtagtgaaatggtataggaagttatgaggcaacaagaaatacttggcagtccacatgatattgaagtcacccaggattttggcaggatkggggcgaaaactatgcttataatctgtgtgcattttgcaaatttttgttcatctcccaaatcttacattttcatggagactcagatttaagaagaattataatgaacacctgaaacctgatttaggcttacaaattgttattcaacaacaaaagtgaagaaacaaccaaagaaaagtaagtagaaaaggacctaagttataaacgcaatcatcactcccccctcccctttttacttctacagttgttcttggtcattactgctaatttataaagtggtcagtaagtcttgacctgctgtgtgaccactaattatgtacctagctttggctaagtctttaactaattatactctaaaatgaataatagcta

SEQ ID NO: 111388 - DNA, 590 bp, Homo sapiens
aaatctgtatataagtgtacctgcgcagttcaaaccatgttgttcaaagtcaaatgtatatggaagtgaagtttaggtgcttgggatacaaggagtaaggacccaggcaccttacagccatagaccagccttccttatgatatggctttcttcctaatggtcaagatcatggcacctgtttttcaaggagccacatggaggaagggagaaaagaaggagcagcattgagaggagtcttggtatttccattgattcatatgtakaggagtgaactgtgtcaagacaataagtgaaatttcataatctattaacagaaccattgtgggctattagaagctggaactcgtagacctgccctcctaacgcttgtgtcgtagtggacaagacagacaataaactgagacaaataaatctgtaatttcagcatgtgacaagtgctgtgaagaaaaatcaagcaggctaaggagattagaaagggatagaaatttactacttagaatgaagtttgaagaaaggaaaagccccggataatgatctgttaaactagaggaagttttgtctcccatacgtgaaatctggagttaagtgtt

SEQ ID NO: 111389 - DNA, 602 bp, Homo sapiens
ataaatagtttatgttaacatgtttgtaatgcaattaaacattataatttcaaagaaaaattaatatcgcacagcaatacatttcataagactatctgaaaaattctccaatcatttctgtaaaattaactaaatcaaatagagtgaattgatagttacttattttttatcagcactcaccatcataaacaaagataagaacactaaaaatcttcctactgaacctaaaaaggcacttgtgtttgctacaactagtgcaaatgaatatatatatatatatatatrtatatatatatatatgtagtttaagaacttgccaatataattgtttaagaaacataaactcatttcctgcattgatacaacccaaaggataatggaaactaatgaggcattagactacttaaaaattaaagtaaaaaaataacatcacttaaatattgcatagtgttgcaaaagggaatgacaaaacaaaagatactggcctattttctttaatatttaaacagatcgagtatatgaatgttttggataaaaatataaataaatgtgagaaaagaatgaagatgtgaaatagaattagaaagtgaattaaaatttta

SEQ ID NO: 111390 - DNA, 366 bp, Homo sapiens
agggacccaatgtggagacccacgagcctgtgtccagccttgtactctcaagcacagggcaggcttcctgaacattgaagagaatatgcgggagaacaaaacagaaactgaaagaatatgcaargtatcgttctcagatgttattccatgatagatggtaggggcatgagtgagtgaaagaggctgagaagatctggacagggagtctggaatggtcaggctgtgatttaagagggacatgagaaggaaggaggattttaaggctggaaatctaagggtcagtggtccaagtcactcagagacagaatcacagcacagcccttgctgatggcaaataaaggaggacaagaggactggaaagaattc

SEQ ID NO: 111391 - DNA, 611 bp, Homo sapiens
gaggaatatgagtctttttaaattattaggcccagagaaacattaaaatgggacagtaatcacgttctatcctccccttgagctatgtactcatctcatagaaactgcttgctattgccacaaatagccacaaattaacctaataatgccccaccagacactataacccaaaccctatgatgcaggacaggtaagccccaaacttagggcttagcctaggagagttcttggctttgcctaggaacgaattcaagggcaagccagtggggttagacagcagtcttttattgaacggtactgctccttcaagagaaggacaaactcataggsagcacacccagagtcagcaatgtatgggctcttggcaactgcatttgtattcgcttatacccactttcaattacatgcaaattaaggggtggcccaatgcaaattaagggacaggcatatttagaactgtcttggaaggaggcagtaacttcctgccatggaaagggttggtaacttctgggtcattgtcatggcatttgtaaattgtcatggtgctggtgggagtgtcttctgctaatgagcaaagaggacagctggggatcactttcatcgccatctgc

SEQ ID NO: 111392 - DNA, 599 bp, Homo sapiens
gaccagcgtcatatattttgggctcacaatatctaatgtcttcattttgtgtttggcacaattttgtcaattcttacttccaaatatttctttgaactctgattctgattctctctgccctacaggggctcaccccagctcccaacccatcattctattacgtggttcagactctactggattccagccagcataccacttaccattcccaaggacttctttaaaacagccttgtcatcatttttataatgacaaggcaacataagaccattatataaaaattggaaaatgcagagaagaaacataattttttttaagtgtatattgtctcacagccattacaacccttactcccattgttatcctcttaacaatgtcctycccttactccatggtggaggcctgatccacccacctgatagctaaggtttctggtaaatccccacagctttactcatgcaattgaaccttctactccactagtgtagccagtgccacccagggaagccagccttatggccatctcaattacatctccacgtattgggacccctgctccccaacctggggtgctttccctctcagctccattcctaaaa

SEQ ID NO: 111393 - DNA, 374 bp, Homo sapiens
tattgtcttataggtccctcaggctctctgttttctctttcagtctatttttttctctgtcattcagattgggtgatttatattatkctgtcttccaggtcattggttctttcctctgtcacctcccttctgctattgagcttatccactggagttttaaacaattttcattagtatattttttagtcctaaaatttctatttggttgttctttatatcttctaattgttttttcttaagacttttctatttctgtgttaaaacttttatttttttatttaaatgtgctataattgcttactgaaacaattttatggtgaatgctttaaataattgtcagataattctaatgtctctgtcatcttagcatttga

SEQ ID NO: 111394 - DNA, 616 bp, Homo sapiens
ctaagaacaaagtgcttatcacctccaaatagaaaaactaccccaaagaggagctgcagaaagtgctctgaagagcctacagaaaagcctgggaacccaatagtagtttgcccctagggacaaagcatgggttattcaagttcttagcctcttatagagacctcagccttgggtctgcctgacatcccaggcctcagtcccctacccttgaaggagcattgtgaagtgggcggcaaagtcccaggtcgtttcttgggtcatggtttcaagggtggagctttcctttatttatttattttaaggcagtctcrttctgtcacccaggctggagtgcagtggcaccatcaatcttggctcactgcaacctctgcctcctgggctcaaacgaatctcatgcttcagccccctgagttagttgggattacaggcatgcaccaccatgcctaggtaatttttgtatttttagtagagatggggtttcaccatgttggccaggctggtcttgaactcctggcctcaagggacccacccacctcagcctcccaaagtgctgggattacaggcatgagacaaaagcccgtccggagctttcctttagatgcagagactgaactgc

SEQ ID NO: 111395 - DNA, 434 bp, Homo sapiens
gaatcaggagaagttatggacattttgtttacgggagtcattcatatatgctaattgcccatcttctaagtagagaagtatttgagaaaactactggaaacaaaactaaaggagtgacttagataattggggagaggaaggatccaactcatgaaggaagaggaaggagagagtagcagagtgagtgagggttttaggtgtgctcaggtgtgtcaaagtcccttgtaccaatcttggaagatgccaaagtttgaaaagacagacaatactgtcaaagattagagaaagtcattagtaggctagacagtcacacaaagggtaagaacataggttattaaagatgagagctasaggcatcctttcagctctggaaaaagtattactcttaaaaatgagaatagaaattcttggcttccgctaagtgaaacaattct

SEQ ID NO: 111396 - DNA, 629 bp, Homo sapiens
ttcagtggatatgagctgaacaaatagacctctggcagggaactccattgattatcttagtcaggagtcaaaatgcaatcaggtaaattggccaatggaaatttgtgtatgtgtgcaccaaaaacatgtacatgcatgttcgcagtagcattatttgttacagccccaaactcaaaatatctcaaatctgtcttaacagtctgatggataagttgtggtawatttacccaatggaatattacacagcagagactaagcaaactgaaaccacagcaacaacatggatcgtctcacagacataatgtggagcacaagtagctggacacgaaaggagtgaaatactctaggatttcatttatatttaacctcaaaaacaggcaaagctaatctctggtgttcaaagccacttctggaggatgactgagaagacgacacagggaactgttctgggatgttggtgttatttcatttcttgatctgatggtggtttcatgagtaagtttactcaaaacaaactcattaggctaggtgcaatggctcacgccagtaatcccagcaatttgggaggctgagacaggacgatgacttgagaccaggggtttgagaccagcctggccaacataatgaga

SEQ ID NO: 111397 - DNA, 561 bp, Homo sapiens
cagcaggaggtgagtggcaggagagtgagcattaccgtctgaactctgcctcctgtcagatcagaggtggcattcgattcttacaggagtgtgaaccctattgtgaattgcgtgtgcaagggatctagtttgtgctctgcttatgagaatctaactaatgcctgatgatctgaggtggaccaatttcatccccaaaccatcccctacaccctgctatccatggaagacaattcttccatgaaaccgatcttggtccctggtgccaaaaaggttggggactgctggtagactaaattatgatgaatttgaatttaagttgaaaacaaagttatagatcaagggctggcaagctttctctgtaaagggccagakagtaaatattttcagttttgtagacaatatgatttgtcacaactactcaaccttgtcctgttgtacaaaacaaaaaaaagtcataatagtatgtaaataaatggatatgtgtttgtctcactaaaattttatttataagaccagatggtggggtaaatttggcctataggttatagtttatcaacctgt

SEQ ID NO: 111398 - DNA, 534 bp, Homo sapiens
atatatacatatatgcctactgagaggtaattcttcacgagtctctcacgttcaygtatggcttgagagtagaggtgctgactgcgttagctccaaaccaactttacaaggatgcttgcctagtgaacaaccttggaatagagagacagcattttcctccagagcaaagcactggcatgcttactacccagtataaaagattctgattcttttaaggttagggttcttctcctttaacaaagcccagggcatgtgtgcaggtatcacctggtcttctttgccctgcaggattggaaattaatataagaaaatattgacattctgcctattgttatttctgtgagtaatatttattgctgactcaggagtcttgcatcttttatcagtacaatggactgaatgtttatgccctgcataaattcatatgttgaaatcctaaccctcaagataatggtattaggaggtaggatccatgggaggtgtaatggttaattttagatgttaacttgactggattaagcgacacctggatag

SEQ ID NO: 111399 - DNA, 534 bp, Homo sapiens
atatatacatatatgcctactgagaggtaattcttcacgagtctctcacgttcacgtatggcttgagagtagaggtgctgactgcgttagctccaaaccaactttacaaggatgcttgcctagtgaacaaccttggaatagagagacagcattttcctccagagcaaagcactggcatgcttactacccagtataaaagattctgattcttttaaggttagggttcttctcctttaacamagcccagggcatgtgtgcaggtatcacctggtcttctttgccctgcaggattggaaattaatataagaaaatattgacattctgcctattgttatttctgtgagtaatatttattgctgactcaggagtcttgcatcttttatcagtacaatggactgaatgtttatgccctgcataaattcatatgttgaaatcctaaccctcaagataatggtattaggaggtaggatccatgggaggtgtaatggttaattttagatgttaacttgactggattaagcgacacctggatag

SEQ ID NO: 111400 - DNA, 574 bp, Homo sapiens
accacaccccaaaggggtaaattttactgaatataaattataattcagttttaaaaactggctgatgaagaattttctgctaatgaaactagcagtgatcactgcaccaagcttgggtatatatctgcaggctaccttttaatggtgctctgttggatctcaaacaaggtaggctaagttagtggtatcaaaacttcacctccttcccccaactctagcatagctttcaatccaacttcccgtgggtagcctgcacatctattacattgtaattgacttgtggttccttaattgacaacttaggatcttaagatcttccgtttctcatcttattagtcccctgtgtgagctctttttttctgggcaaaaaatggtccccttgctgtgttaagtacatcttgtccttttgcaatgctctttccattattgaccttcctgctttcttcctccagaaatgagtaccctaacgccaaactttctcttcccctgccactgccccccaaaattctcacttgccctttacytacattccacatctgagctcaaagtactcgctcctgagtgaaatcccaaa

SEQ ID NO: 111401 - DNA, 575 bp, Homo sapiens
gcaatgcatttttcttgcaggtaacagtgtcctccctccctagaaggcagtttggaccatctgttttaatttaaatgtaccccttggaaaggttttactgccattccaatgagcttctcaatatgtactttccaatcacatttagtaactctaaaggaatttggtaagtacagttttctgtatctgaaggtggccacatgtgaatgttacaacatgtgcattgagaagcaagagagctgagagtaagtgcctcctgttcacctagaaaatgattcaccaaagccctaaggaggcagaaccctgggcaaagataatccccatatcagagtaaatcaacagatgatgcaartgaggcacccatttatagcatttatttaaattttcatttaaattgctggttaaatggaattcatttaaagtcctgtagtcaacacttgagcaaattggttttaaaactatatattaattgtaacacattgcaatttaatacatacttctaagataatcgcttattgctttaggagtacaaaaatgtatccaaatagtttagtgtggttgataagacacagaaagca

SEQ ID NO: 111402 - DNA, 523 bp, Homo sapiens
aaactgccaacacaaaacttaaactgattgccacatctcatatctcatggtttagctttcctattccatttaaattgaaaacggtcttttcattaaaaaaaaaattggcaactttttgaaagtgctcagttctttgcacagtgaatagaattcccytaacctcttaattcatgccatgaaaatagacatgggttttattgtcactaagattcaggaatgaattctttaaaaaaaaaaaaaaccctgttaaggagttatatgatccagaaaaatttaaattgcctcaagtacagaaatgtaattcagttgttgtctaaattactcaaatatcagttaataagaaaagtatatgaaagctagaaagttacttaagagtagtcataaaatttttagtctaagttctccactccttagcatatcacaccaacagataagtttgtcagattggccgatttaggtagaaagcaaatgtaaaatacctcactcataaaggatgcttgatacatttttgttcttataccta

SEQ ID NO: 111403 - DNA, 610 bp, Homo sapiens
tgtaccacactttgtttaccctttcacccttagaggaatatctgtgttctttctagtttgaggatattacaargaaagttactatgaacattcctttctaggtttctgtgggaacatgtgttttctttcctctagggtaaaagcattatactgagggaaagaatatacacacaaaaagtgcttgattctctttgtttgaaatactatagcagtcaaaatttatcttagtgacagaaagtagaggagtggttacaggggatggaagttgggtttggtgttgattgcaaagggcatgaggatgctttttgagattatggaaatgtcctatatcttgattatggtggtggttacacagctgtgcacactgtcaaaactcaatgaaatctacacttaaatgtgttcattttaatatatgtaatctctacctcagtaaaattgtttcaaaaatgttttgtgcatgagtctaataatttttccttgcattgtttatatatattttaggaaattctccacatacattttgtgcttctcaaataaacaatttaaaaagagaaagaataagttgggtgttggtagccactagtgcagtgtcatgatgttgcttgtaggt

SEQ ID NO: 111404 - DNA, 610 bp, Homo sapiens
tgtaccacactttgtttaccctttcacccttagaggaatatctgtgttctttctagtttgaggatattacaaagaaagttactatgaacattcctttctaggtttctgtgggaacatgtgttttctttcctctagggtaaaagcattatactgagggaaagaatatacacacaaaaagtgcttgattctctttgtttgaaatactatagcagtcaaaatttatcttagtgacagaaagtagaggagtggttacaggggatggaagttgggtttggtgttgattgcaaagggcatgaggatgctttttgagattatggaaatgtcctatatcttgattatggtggtggttacacagctrtgcacactgtcaaaactcaatgaaatctacacttaaatgtgttcattttaatatatgtaatctctacctcagtaaaattgtttcaaaaatgttttgtgcatgagtctaataatttttccttgcattgtttatatatattttaggaaattctccacatacattttgtgcttctcaaataaacaatttaaaaagagaaagaataagttgggtgttggtagccactagtgcagtgtcatgatgttgcttgtaggt

SEQ ID NO: 111405 - DNA, 610 bp, Homo sapiens
tgtaccacactttgtttaccctttcacccttagaggaatatctgtgttctttctagtttgaggatattacaaagaaagttactatgaacattcctttctaggtttctgtgggaacatgtgttttctttcctctagggtaaaagcattatactgagggaaagaatatacacacaaaaagtgcttgattctctttgtttgaaatactatagcagtcaaaatttatcttagtgacagaaagtagaggagtggttacaggggatggaagttgggtttggtgttgattgcaaagggcatgaggatgctttttgagattatggaaatgtcctatatcttgattatggtggtggttacacagctgtgcacactgtcaaaactcaatgaaatctacacttaaatgtgttcattttaatatatgtaatctctacstcagtaaaattgtttcaaaaatgttttgtgcatgagtctaataatttttccttgcattgtttatatatattttaggaaattctccacatacattttgtgcttctcaaataaacaatttaaaaagagaaagaataagttgggtgttggtagccactagtgcagtgtcatgatgttgcttgtaggt

SEQ ID NO: 111406 - DNA, 610 bp, Homo sapiens
tgtaccacactttgtttaccctttcacccttagaggaatatctgtgttctttctagtttgaggatattacaaagaaagttactatgaacattcctttctaggtttctgtgggaacatgtgttttctttcctctagggtaaaagcattatactgagggaaagaatatacacacaaaaagtgcttgattctctttgtttgaaatactatagcagtcaaaatttatcttagtgacagaaagtagaggagtggttacaggggatggaagttgggtttggtgttgattgcaaagggcatgaggatgctttttgagattatggaaatgtcctatatcttgattatggtggtggttacacagctgtgcacactgtcaaaactcaatgaaatctacacttaaatgtgttcattttaatatatgtaatctctacctcagtaaaattgtttcaaaaatgttttgtgcatgagtctaataatttttccttgcattgtttatatatattttaggaaattctccacatacattttgtgyttctcaaataaacaatttaaaaagagaaagaataagttgggtgttggtagccactagtgcagtgtcatgatgttgcttgtaggt

SEQ ID NO: 111407 - DNA, 584 bp, Homo sapiens
gcaaaagagccagatggtgaactgaaaatctgcatgagtgctgacttttaatgaaaacacttacatgcttttcatggccacaattagtatagcttctctgctttcctcccttgatgttaggatcttgttagactgacctcttatgtcaataaaaccagcttcaagttcacatgcaaacacattcatagcaagcaacctcccctgttagttagaaaggttaatcaaggtaaagcccttggtagatgcaggatattcatttttaaattgaaaagtcctcttgatattaaagtttgaagggaaaaatatttgctaaccctataaaattgaattaccatcaagcaagggaagtggttttgcatatttcatacatgaaaaggaaatatttggtattcattcaattttttcacttataagtcctgtytcagagacattgcacatatatgaaaaggaaaaaaaagcattaaattaatgcaataccattccaatagtttggctcattttttttcctggagccctttttttttttttttttttttttttactgctgtgaaaaaaataagaatatgtaggacatagaacagcag

SEQ ID NO: 111408 - DNA, 657 bp, Homo sapiens
ttgcaattttatctagaaaacaggacttgcagtattttaagtgtatcatgctgcttttaaagaatgtgatacttcacacttcaaataagaaaagataaaatatccagacagaagatttggtacccatcattgcaaccagatgcatggtttttttgttttttgttttttgttttgttttgttttgtttttaatgggcaaaggatgggaatttgcctgtatgtggttttgctccattcctcacaggcctgatctaagcaggagctctcactgacttcaaagggaacactacacctttgactccagaacaaattcctgtatgcaattccaagggctcagagcaaaacaaaaatgggttggtacctttcagcatcatcatgatttatgtaaaattcccaaatacatgttctcctagggcttggtatcttgaagaaaaattttatttatccctagatgaggtctggatttcacrgctagtatttttctgagatgacagatttaagtaatgtcattttcataagcacagggaggacttcattaaaggcttgctggtgttagctttattttagtctcgaaaaaatatgactaaataagacaatccaaaagcattctgctgagtgaaagaaggcttacacaaaaatgtacatgttgaatgaattc

SEQ ID NO: 111409 - DNA, 597 bp, Homo sapiens
atattaatcctcaatgactctgtacgatgcccattcttgcacagagattttatttcatggaaatacatatttatatatttttatacatttatattttttcatgaaaatatattttaatgtcttaaaattatcagatattggtattctgtggttcataaaaatttattggtgccactagcttttatcacagcttagaaaatttgaaaacctgtttaggcctttatcattttggcacttactgtttactatttatagtatcttcccactatgtcccataatcagcagttttgtcaactatcttttatgaatgaagccccractagctctccgacaaaataacttacataattttgtcctcattgccaaaagatatggtctaatttcccagagcatttcttatactattcagaatctagctccaattaactgctaagtcacatctctctctattcagctatatgcattttgcattgcagacatttaaaacgtattgaaaagtttctcaaatgtaactctgttttgttttgctttgttttgttttgagatgggatgtcactctgtcacccaggttggagtacggtggtttactatcatggc

SEQ ID NO: 111410 - DNA, 639 bp, Homo sapiens
caatggcaagtgtaaacacaacatggtgactatattttcctaacaaaaattcaggatatatggtatcatacatcatctgttaggagtcagaacatttaaacttaatactgttctagcaaacccaagatctacactgggatgttacaatgcaattatatttacattcaactttcctttaatagagcaagcccagtaacttaatcttcacaaattcttacttcctaaagatagcttgtcacagcaggcatccatggcggattgataaatgtctatcaaaagctttagtccttgtatgatttagtaggatgtttcctgaagcataaggccaaatactatttctaaatttaaaatatcctacatatgatgtttacgcaagtgtgcttactaccacattttctctccatgaataatgcatgtcctatgcaacttgagtcccaaataagaaaaatgctatacatctaataatccatattaaatacaagaataaaagcgcttttctggataatttaatccttraaataaaaggagttactggattacttctatacagaaaagaaaataaagtcgaataattttctccttttctctcttatattttttattgccgttaatttccataactgttcaaataaatgaatt

SEQ ID NO: 111411 - DNA, 577 bp, Homo sapiens
gagacactgtacgctgtgagtgaggggatgtaggaagatgacctgggctgcaagtctagactgttttggctgctagataacaaaatactataaactgagtagcttgtaaacaacagagatttatttcttacagttgtggagactggggagttcaagattaaggcactggcagatttagtatctggtgagggcccactgcctggtgcataracagagactcccagctgcattctcacatggtagaaggggaaatgaggactctcttcggcctcttttataaagacagtaatcaagtcattcaggcaccaccctcatcatataatcaccatccaaatgtcccacctcctaatatcatcacctaaggggttaggctttcaatgtatgacttttgaggggacaccaatattcagatcatccaatgaatcacagcaggactcatacctgtaattagcttccagatcatatacctgagcttagaagagtgatctttaaggattattggtgtaggtgtctttcaaccacatcaggtaaactggtgaagaaggcatgagagcacatcttgcttctcctctcccac

SEQ ID NO: 111412 - DNA, 612 bp, Homo sapiens
attaatatagtttgctcactcttctacgcttttcagggtgttcctaaagctgtgtatccattagttgaaacataatttgatcaggttaatggagggaacacctgrttcgaaacacagtcttattcattccattgcagtcaagttaaaccaacctgattagttttgtatctggaaggcaacattttgttagtccaactggaaaaagttggatacttggaaaacattttccaacttacaaaaaaaatgtgatcttaaaaacccttgctatatagatgctataaagattgaagaagaacatcacaattaagatatataaaaatgaacttccaaagaactttggagaagagttaaagttgattttggaataaatagaaaagtttaacataaaatattttatgagtaaagtttaacataaaatattttatgagtaaagttgtacagaattctttttaaaaaataagctaagggtgaatttacataatgtgggagtgtcattttacattacattaagtaatttctttccttttacctgaagttgtttcccaaatacccaagtattctcctacaagctggccttttgcagagggtccgttattttcttgttgaggtggc

SEQ ID NO: 111413 - DNA, 612 bp, Homo sapiens
attaatatagtttgctcactcttctacgcttttcagggtgttcctaaagctgtgtatccattagttgaaacataatttgatcaggttaatggagggaacacctgattcgaaacacagtcttattcattccattgcagtcaagttaaaccaacctgattagttttgtatctggaaggcaacattttgttagtccaactggaaaaagttggatacttggaaaacattttccaacttacaaaaaaaatgtgatcttaaaaacccttgctatatagatgctataaagattgaagaagaacatcacaattaagatatataaaaatgaacttccaaagaactttggagaagagttaaagttgattttggaataaatagaaaagtttaacataaaatattttmtgagtaaagtttaacataaaatattttatgagtaaagttgtacagaattctttttaaaaaataagctaagggtgaatttacataatgtgggagtgtcattttacattacattaagtaatttctttccttttacctgaagttgtttcccaaatacccaagtattctcctacaagctggccttttgcagagggtccgttattttcttgttgaggtggc

SEQ ID NO: 111414 - DNA, 612 bp, Homo sapiens
attaatatagtttgctcactcttctacgcttttcagggtgttcctaaagctgtgtatccattagttgaaacataatttgatcaggttaatggagggaacacctgattcgaaacacagtcttattcattccattgcagtcaagttaaaccaacctgattagttttgtatctggaaggcaacattttgttagtccaactggaaaaagttggatacttggaaaacattttccaacttacaaaaaaaatgtgatcttaaaaacccttgctatatagatgctataaagattgaagaagaacatcacaattaagatatataaaaatgaacttccaaagaactttggagaagagttaaagttgattttggaataaatagaaaagtttaacataaaatattttatgagtaaagtttaacataaaatattttmtgagtaaagttgtacagaattctttttaaaaaataagctaagggtgaatttacataatgtgggagtgtcattttacattacattaagtaatttctttccttttacctgaagttgtttcccaaatacccaagtattctcctacaagctggccttttgcagagggtccgttattttcttgttgaggtggc

SEQ ID NO: 111415 - DNA, 600 bp, Homo sapiens
ttctatgtaatggtaataatcatgccttttcttgggttgttctgtgtcttaaatgatatgatgactattaaaatgttctaactcagcatttgccatagtaggtgcacaacaattgttagctcttttcacttttgttttgtcagattgatgaaaaaagagggggtaagcataggagctcaatacagcctcactaagtagctttgatcagaaagcgggccaggcctgatagaggtgggctggatatgaatgggttaaaggagttaagaggctgcccagctggactggttctcaatcaagggcctgcataaaaagccagcaggaacagaagtgggggctggccatgctgagagtgccttgggaggaggccagcagctgagaagttgctcatctcttggttcagcctgttgttaaaccatggagtagggggttgtggggtagtaaactggatggcctgttaaarccctgagagaaagagagtgagagagagagcagtgttttatattgagcctgacaaataaaagaccaacctgaaccatctggttctgtaacatatgggaaacacagatttctattgtagatgaccaaaatattagtctattg

SEQ ID NO: 111416 - DNA, 508 bp, Homo sapiens
accctctttcagatacttaaccaatcttgcccttgttattatggcgtgctttgagaagagatgaggagcaggcctggcctggtggaaaccctgtcagatatgttcattagtgccctttttcatttcccccacattaggttcagcctgcaagcccaatagtccctactcctttccctggcccacagccaagaagaaagcctaatggctggagggacaaggtgtttgggttctgataccactagcaaagcttgattgctctgtgtagtcactgcagtcagactggtgtgtatttcctcatcaaagaggaactctgatgctttacaccgtaatttgtataattaatcttctgagtttttttgaaattgcatttttgttgytgttgctgttgttaataaatgccacagtgttatcaatccacatttagtaccaagaggaaataacaatgcacatgaaagtgaaattgcaaacctagctccaccaaaggtgtcactcatgaatgatgggtaaa

SEQ ID NO: 111417 - DNA, 440 bp, Homo sapiens
gaattccagatccatatgcttagcatactgatggcatcattactgaaatctatcacaggcatttccaactcaacttgttcaaactatctgtcccccttgctcccattgtccctgtctcccaccctgtttttattgtcattttagttaatgattctgttctccagtttgttatccaagaaataaatatgtgaattatcttgtttcctctctctcactcttcctaagggttccactcaatcaaatggttattaagctcttccagtgcactttgtaarcttcgctcaattttgtttatcccctttgctggtgacgtactccacatcctcgttatctctcttgtggacttttgccatagctttcctctgcactccttcctgtcagggctgccctcctctacatcagtctctacactgttgccagtttctaaaattcatactggg

SEQ ID NO: 111418 - DNA, 557 bp, Homo sapiens
aaatgccacttcctttcaaatttccaaggaattatcagaacatgtaagattaccgcattattaaccctatgccaarcaattctagacaatacaaatatgcttaattactaaatatgacctgtgcttattttttatgtgaaatatcatgctccctcagaatgttacaatattgactcagattgctgttacaaatcatctatcttaactaaaaattagtgctgtcaaaaatgagtaatagattgagaaagaataaattttgtgtaattcaaccaattcatactggttgtaaagacttaatacacatgaaattaattatttgagaatacttatcatcagatcacagtttataaagccaatattctcatgtattggactaacaaccacgtgtacaacttatatggttagcctgttctcagtttatggattcagaaatgttttcttcaggtacaaatgagaaatttgtcatgactacatttctggtctattgggttccataaggcatcatataaatttaaaacttttgacttatctctatgtcttcttttgctctcctttct

SEQ ID NO: 111419 - DNA, 557 bp, Homo sapiens
aaatgccacttcctttcaaatttccaaggaattatcagaacatgtaagattaccgcattattaaccctatgccaaacaattctagacaatacaaatatgcttaattactaaatatgacctgtgcttattttttatgtgaaatatcatgctccctcagaatgttacaatattgactcagattgctgttacaaatcatctrtcttaactaaaaattagtgctgtcaaaaatgagtaatagattgagaaagaataaattttgtgtaattcaaccaattcatactggttgtaaagacttaatacacatgaaattaattatttgagaatacttatcatcagatcacagtttataaagccaatattctcatgtattggactaacaaccacgtgtacaacttatatggttagcctgttctcagtttatggattcagaaatgttttcttcaggtacaaatgagaaatttgtcatgactacatttctggtctattgggttccataaggcatcatataaatttaaaacttttgacttatctctatgtcttcttttgctctcctttct

SEQ ID NO: 111420 - DNA, 557 bp, Homo sapiens
aaatgccacttcctttcaaatttccaaggaattatcagaacatgtaagattaccgcattattaaccctatgccaaacaattctagacaatacaaatatgcttaattactaaatatgacctgtgcttattttttatgtgaaatatcatgctccctcagaatgttacaatattgactcagattgctgttacaaatcatctatcttaactaaaaattagtgctgtcaaaaatgagtaatagattgagaaagaataaattttgtgtaattcaaccaattcatactggttgtaaagacttaatacacatgaaattaattatttgagaatacttatcatcagatcacagtttataaagccaatattctcatgtattggactaacaaccacgtgtacaacttatayggttagcctgttctcagtttatggattcagaaatgttttcttcaggtacaaatgagaaatttgtcatgactacatttctggtctattgggttccataaggcatcatataaatttaaaacttttgacttatctctatgtcttcttttgctctcctttct

SEQ ID NO: 111421 - DNA, 538 bp, Homo sapiens
agtcatcatctcacaccagtcagaatggcaattattaaaaagtcaaaaaacaacagttgctggcaagggtgcagagaaaaaggaacacttttatactgctggtgggaatgtaaattagttcaactcttgtggaagacagtgaggcaattcctcaaagacctggaaccagaaataccacttgactcagcgttcccattactgggtatatacccaaaggaatgcatatgattttattacaaagatacatgcatatgtatgttcactgccgcactrttcataatggcaaaacatggatgttcatcaatgataggctgcctaaagaaaatgtagtacatatacaccatggaataccgtgtagccataaacaggaagaagatcatgtcattttcagggatatggatgcagctggaagcccttaccctcagcaaattaatgttggaacagaaaaccaaacaccacattttctcatttataaatgggagctgaacgatgagaagacacagacatatgacaaggaacaacacacactgggacctga

SEQ ID NO: 111422 - DNA, 563 bp, Homo sapiens
tccccgtgtcccatggttttgtacatgcctaatcctgtcacccatagcagtcagcaataaatgtaagacagattaatccaacgaaaatagcagttaacatcccatagtgtcaaaccagttctcagccaaaagggactttactgagagccctcatttttaaatgtacttcaaggcatttttgttcattcagaacattccactgtaagttacctttagtaagggttcgtcatttctggaagactttgctgcttcccagkcatcatgtataagcaggaaagaacttaaggatcccatttttatctgaaatattggctttactctccaattctcttgattaacttagccagtggtttttttcctacctaagcatgcaagaaaaataaagcaaagggtgtaacacaaaaatctctgtaaattttccaagccaaattttataacccctgccatataactgcttaactagttcctttctgccccagtcagatataagaggcctctaagtatatccaagccagtaaattcccagatcaaatccatttctgtcacagtttccaaacccagtt

SEQ ID NO: 111423 - DNA, 565 bp, Homo sapiens
ggttgtacatatctaagaatttgtctgtatactttagattttttaattttttggcaggtacttgtttgtaatagcctcttataaacctttgtatttttgtgtatcagttgttatgtatccttttcatctcttatttcatttatttcmgtcatctctttttgtagctattctagctgaagctttttcaatttctgtatttaaaaaaacaatttttctcttgttgatctttaaatattttccaaattttttttaactttatattttcggtgtttcctgagctcttttataaaaagatgtgctctgaattctctgtcagaaatgttatatatgtttatttctcctactgcattaggtgagttctgttgttttttagcggtgttgtgtttcctttcatctgtacattgctatttccatgtttaaagagatatccacatgttctagcttttataggtgtattcttgtgttgttcaacctttactatttattattggaatctaattccttgccaccagttgctttttgtttgggcaaggacttaatatttgccaccagaatttaatactgc

SEQ ID NO: 111424 - DNA, 565 bp, Homo sapiens
ggttgtacatatctaagaatttgtctgtatactttagattttttaattttttggcaggtacttgtttgtaatagcctcttataaacctttgtatttttgtgtatcagttgttatgtatccttttcatctcttatttcatttatttccgtcatctctttttgtagstattctagctgaagctttttcaatttctgtatttaaaaaaacaatttttctcttgttgatctttaaatattttccaaattttttttaactttatattttcggtgtttcctgagctcttttataaaaagatgtgctctgaattctctgtcagaaatgttatatatgtttatttctcctactgcattaggtgagttctgttgttttttagcggtgttgtgtttcctttcatctgtacattgctatttccatgtttaaagagatatccacatgttctagcttttataggtgtattcttgtgttgttcaacctttactatttattattggaatctaattccttgccaccagttgctttttgtttgggcaaggacttaatatttgccaccagaatttaatactgc

SEQ ID NO: 111425 - DNA, 609 bp, Homo sapiens
  misc_feature (1)...(609): n = A,T,C or G
nnnnnnnnnnnnnnnnnnnnnnnnnnnnnnnnntttactggtaatttcgagagcattaagtgattcttcttgggggytgtatgactctttcatctccgaacatttaaatcatgcttatttaaaaatctctttagtaaagttatggtggttcacagctgtaatctcaaccctttgggatgctgaaatgagaggattgtttgagcccaggagtttgaaatcagcatggacagcacaacgagagctcatcactacaaaaaataaaaaattagttgggcgtggtgacatgcacctgtggtcccagctactcagggggctgaggtgagagaaccacttgaggttagtaagttgaggctgaagtgagccgtgatcacaccactgcactccaacctggatgactgagcaaggccttaaaaaataaatataaaaatcgaaaatcaaaatctcactctggtcgtttcctctatctagaatccttgagtgcagatcttccaattgtgtatgactgcttaatgcctcatgtagttttcttgaggaaatcttcaatgggtgttgctttctgcaacatccctcatgttctgtattgtaagagcatcccttcacattttttca

SEQ ID NO: 111426 - DNA, 564 bp, Homo sapiens
aatcaccagctctgataaggtaaaccatcacttttattctataagatgtacaactctgtgatctcggacgataatttaattatggggtgagggcaagtcaacattggatatggctgcaattattggtagggcaacacatttacaytgttgagaactagtgtaccttttaagttagaatgctggtgaagagtttcaatccttgaaagacaatttcagcatttcatcctttttatcttattgcaacggacggtgtacattttgcatgtcttaaatgcttcttctttccataggtttgccccttctgcaagtcaatctaggcactgcatcttaaatggtttttcttccttcttctttaaggaagtttaataatataccttcctagctcaacttttttctctggctctccaacgcccttggcggaatatctgactccaaattacctctctagagaaatctacctctgtattcaacttcttcctgccagacaaaacttggagtgttgggaactaacctgtcattactactctactgctttctttccatgtcttccttttcccttcatct

SEQ ID NO: 111427 - DNA, 579 bp, Homo sapiens
gaacattaggcaagtgaccaccagtggaactgtgaactcagtgggcaactctaagctcacctttgtcaaaacctctatatgcccccactttcaaaaacgttattttcaaaagaaagtcctgcctcctactcactcgaactttaccaagattcagtgcccaagggtacaatttttagaataataacaaatgagaaatttgaaattttatgcctcacyagtgttcaatttattgtcccttggatccaaatatagctttatgatactgaatcaggatcctgtaagcattccccctgtgccagctagttgaatgttaagcttcatcaatagaggacactgcagtgatagtgacgtggttgatgtaggaaggcacatccctttcaaggacccactctttaggtactcagtaatgtttatcattaatgttggagtttaagaatatgtatattaatgactatacttatgaatagtaaataatatacttaaagaatgtaagaggaaaacttctaatagcacatttgttttatcttttaagaagtatctcattctgcaaggaaattaattccgaaaactcctacataa

SEQ ID NO: 111428 - DNA, 611 bp, Homo sapiens
aagctgcatctgcggggcatcatgcacattgcaggtgctcttaaatgtggtggaaagaatgaagtaatgaattgcttttgggcaactgtggtttgacccagaatacatccaaattcagctctggaggtccagagccgtgccyttgactgacaacaggccatcaatccttcactcccctgtggaggggatgacatggaggagagtaacttttggggacaggaaaatgcctgaaatgtgggtgctgcttcaggcctggggaaggtggggtgtgctgagagcaacatcttctagtcaaggtcatcagcaacaaggcaagactcattcagctgaggctgaggtgagaggattgcttgaggtcaggagttcaagaccagcttgggcaacataatgagaccccatctctacaaagaattaaaaaattagtgggatgtggtagcgtgcacctgtagaaccagctactccagaggctgaggtgggaggtttgcttgagcccaggggttcaaggctgcagtgaggtgtgattgcaccattgcattccagcctgggcaacagggcgaggccctaaactccccctctccctggactgggaaacaaaggtttttcacaaaatt

SEQ ID NO: 111429 - DNA, 514 bp, Homo sapiens
aggtgggttcctgactttggggctaatatcccagggcgaaaacaagtataagaatcaatttactgctgaaaaggaaggttgcactggattcacccagatcaacaccaagattagtattgagatcttggccaagcgctgtggctcaagcctgtaatcccagcactttgggaggccgaggcaggcagatcacctgaggtcagaagttcgagaccagcctggccatcatagtgaaaccccgtctctaacaaaaatacaaaaaattagccgggggtggtggcacgcgcctgcagtcccagctactcgggaggctgaggcaggagaatggcgtgaacccgggaggcggaggctgcagtgagccgagatcsagccactgcactccagcctgggcgacagagcgagactccgtctcaaaaaaaaaaaaaaaaaaaaaatacaaaaattagccggggcttggtggcacaagcctgtaatcccagctactcctaaggctgaggcagaagaattgcttgaattc

SEQ ID NO: 111430 - DNA, 523 bp, Homo sapiens
atacagacttatccaatgatcattcctctgactcctggatgaataaatgaaatggaaatactgargatctgataaaaccctaacattgatctgtgacttgtggacaagaacaattacagtaggaaaagatatttttatcacactacaatacccactacagagcatccattgcagaagagggactaaacaattagatgaacaggatgattcatcaaacagatgttaattggcatttgtccttgattaccccagcacttgcacaatagattcataaacagattatccatgatgtcaaggatggaagctatccatgacttagctattgacactaaaaacattctcttcaatatatcagcaaaagagaccaatgccgagtccctgatattattatgatcactcaaggagacaaaaactctagtttgtggcaagttgattacatgggacccctttcatcctaaaaaggaaagcactttttcaggattaaaaaagaaaagggggttgtctcttccagccagagtgcctt

SEQ ID NO: 111431 - DNA, 523 bp, Homo sapiens
atacagacttatccaatgatcattcctctgactcctggatgaataaatgaaatggaaatactgaggatctgataaaaccctaacattgatctgtgacttgtggacaagaacaattacagtaggaaaagatatttttatcacactacaatacccactacagagcatccattgcagaagagggactaaacaattagatgaacaggatgattcatcaaacagatgttaattggcatttgtccttgattaccccagcacttgcacaatagattcataaacagattatccatgatgtcaargatggaagctatccatgacttagctattgacactaaaaacattctcttcaatatatcagcaaaagagaccaatgccgagtccctgatattattatgatcactcaaggagacaaaaactctagtttgtggcaagttgattacatgggacccctttcatcctaaaaaggaaagcactttttcaggattaaaaaagaaaagggggttgtctcttccagccagagtgcctt

SEQ ID NO: 111432 - DNA, 523 bp, Homo sapiens
atacagacttatccaatgatcattcctctgactcctggatgaataaatgaaatggaaatactgaggatctgataaaaccctaacattgatctgtgacttgtggacaagaacaattacagtaggaaaagatatttttatcacactacaatacccactacagagcatccattgcagaagagggactaaacaattagatgaacaggatgattcatcaaacagatgttaattggcatttgtccttgattaccccagcacttgcacaatagattcataaacagattatccatgatgtcaaggatggaagctatccatgacttagctattgacactaaaaacattctcttcaatatatcagcaaaagagaccaatgccgagtccctgatattattatgatcactcaaggagacaaaaactctagtttgtggcaagttgattacatgggacccctttcatcctaaaaaggaaagcactttttcargattaaaaaagaaaagggggttgtctcttccagccagagtgcctt

SEQ ID NO: 111433 - DNA, 543 bp, Homo sapiens
gaacaatacacactggggcctattggagggtggatggtgggaggagggagaagatcaggaaaaataactaagggtactaagcttaatacctgggtgatgaaataatttgtacaacaaactcccatgacacaagtttacctatgtaacaaatctgcacttgtacccctgaacgtaaaagttaaaaaaaaaaacaaaaaccttttgtaaaataggagaggtcattattattattggaagggtgaacaagagagagtagaactgtttttactgttatttcatgcaacagatttatacagactgacggtcaaacaccaggaagaattattgtgtcagcttcatgtaaatgtagtcttgctgactgaaataaaataaatataattagggccatcacctgtatgattagaatctccagcaattacaactcacaatgaagcaaagaaactcctgtgctataggaacaatattattctcaaatgarctctccagattgactggttacaataaacaaattcccaaaattctaacctctcaatcacaatttgc

SEQ ID NO: 111434 - DNA, 621 bp, Homo sapiens
taataaatagtagtatattcattaatgggatcccatatctggcagttaagataaatattctagaatagatgaataatagtcaatctggattttcaaaatataaagtagaataaaacaagtaaagtgcattttacatataatatgacattatttgtgaattttacaaaacacataagtttgtataatgttcctgtatataaatgttggtagaaaagtattaaaaaatgtaccagttatttacattccttatactagtggttgtctctgggaattaagggcagagagcacaggagattttgattttgtctataatgttttgttctctacccctcaaaacagcaaaaggaatctttagctratgatttgtctttacattactttttgagcgagtattctttaggtttttttttttaatttaaaaaatggaaaaattgtttcacatttgatgcaagggccagcctcaaattacagccctcttcatcctatcaattgaatgttccaatggatcgatattttatctggaagcatcagttcgcactaactgtcaatcacattcattagaaatactgcatggagaaggcacatctctgaattggcaccctggaccatacctggtttgtt

SEQ ID NO: 111435 - DNA, 598 bp, Homo sapiens
atagtgattgccttcacttcgaggaattgggaggcgcaagagttggtaatctggtggcttttgggttgctgggtattttttttttaactcatgcaagtacgttaagtatatattgattttatattatataatatatactacatataatgtattgttgatatattcatacatgtatgtaagtgttatcagttgttgcagtcaagatgtctaaattaacctctgccctggacgatgacctaagggtacggagaaacagagaagactctcggcgtcaaggaccaaagagggagggtgagaggaaatatgtgggatcccctacccccgtatcttttcccagaagccaatctggaatggatgtgtatttgtagggggcggtgataagataaactggggcgctcgaatacctgagtgccatccmgactgcatttggagatctaagccgccaaaggctgggaggtggggaggaggacaaaggagggggtgggattgcgaaaccatcgcccttatccttctctgcgtcgtaagcgccaggaacccagcccctaagggagccttccctgactgcagcgcctgacgcctgggtttgagcccctacgtg

SEQ ID NO: 111436 - DNA, 510 bp, Homo sapiens
tagttttgaatatttttcttatttaaagccaaccaattgaccagaactaatgacagtcccaaaatatacctgctcttacatgcctttgtgatttaagacaattacttttcctttgtgtgtgcgcgcgtgtgtrtgtgtagctctatggattgctatgtagacagacagatactttatcccttaaattgtgttgtccttttgtatcctccactgtctggtaagctagtttagtgcttaatagcagtatggtctctatgtgttgttataaatcattcactggaatctctaatgttaaaatatcagggccatttggcataagacactggtataatccaaaatagggaaagcttatattttatgactattatgactggctttgagcagtgaaaaaataaatttaattagtattacaaaaatgcaacccctgtggtttaccctgaattgtacatatgacaaaacatctcaggcaattaacctggatgtggcagatacagggcatgccatatgaca

SEQ ID NO: 111437 - DNA, 510 bp, Homo sapiens
tagttttgaatatttttcttatttaaagccaaccaattgaccagaactaatgacagtcccaaaatatacctgctcttacatgcctttgtgatttaagacaattacttttcctttgtgtgtgcgcgcgtgtgtgtgtgtagctctatggattgctatgtagacagacagatactttatcccttaaattgtgttgtccttttgtatcctccactgtctggtaagctagtttagtgcttaatagcagtatggtctctatgtgttgttataaatcattcactggaatctctaatgttaaaatatcagggccatttggcayaagacactggtataatccaaaatagggaaagcttatattttatgactattatgactggctttgagcagtgaaaaaataaatttaattagtattacaaaaatgcaacccctgtggtttaccctgaattgtacatatgacaaaacatctcaggcaattaacctggatgtggcagatacagggcatgccatatgaca

SEQ ID NO: 111438 - DNA, 510 bp, Homo sapiens
tagttttgaatatttttcttatttaaagccaaccaattgaccagaactaatgacagtcccaaaatatacctgctcttacatgcctttgtgatttaagacaattacttttcctttgtgtgtgcgcgcgtgtgtgtgtgtagctctatggattgctatgtagacagacagatactttatcccttaaattgtgttgtccttttgtatcctccactgtctggtaagctagtttagtgcttaatagcagtatggtctctatgtgttgttataaatcattcactggaatctctaatgttaaaatatcagggccatttggcataagacactggtataatccaaaatagggaaagcttatattttatgactattatgactggctttgagcagtgaaaaaataaatttaattagtattacaaaaatgcaacccctgtggtttaccytgaattgtacatatgacaaaacatctcaggcaattaacctggatgtggcagatacagggcatgccatatgaca

SEQ ID NO: 111439 - DNA, 652 bp, Homo sapiens
tttataaaaggaaaaaaaaacaaatttggattttatcaaaattgagttgggagggtgataactaggacatattgactcgtgggcagtagacttttcactgtatgtgctagtatttatccaygtaaaatagttgaataaacatctatacaaatgtctatacagagagctaacctgagaccagacacacaatgtcctcctttaaaaggtgctaaaaacctatatattttaaagttgatttagataatttaagaaagtaaactattgctatttatattaatcacacctataataactaatatttttcactgcacaaacagcatatcccaacacaaaaaggattatcctcccaaataggttgagatacaaagtgcaattgtattgggaagtgatcaacaacctattggaaaaaacctcttatcttgaagcatggtttttgcaccagacttttaacttttacttggaaagagtactttgagggaaacgtgtagcacttttaaatacatgcccttatggaaactaaaaatgtgcatgagaattcatattttgaaaactacacaattacctcttgaccctctttgagtgttaaatattcccttaatatgtgccatataccgttttaggttctgtaaatgtggaaataacagcagtaaac

SEQ ID NO: 111440 - DNA, 407 bp, Homo sapiens
acctctcttagattgtttcttttttcttaaggttttgttgaccacttcaggttctcctgaattcactakatgtattgattttatttctgtaattaaggttacaatatttcccattcttcattagaaaagaagagtttgacaatgcccatccacttcaaacagtgctactcatactttttgattgataagcccctaataacacagtatggtaaatctgagtttccagggaacatagagcacaaatggagaaagtctgcatcagaaattttatatatatatatatataaaatatatatatatttttattatactttaatttctagggtacatgtgcaccatgtgcaggtttgttacatatgtatacatgtgccatgttgtgtgctgcaactgcatgagaaaactgaatt

SEQ ID NO: 111441 - DNA, 407 bp, Homo sapiens
acctctcttagattgtttcttttttcttaaggttttgttgaccacttcaggttctcctgaattcactatatktattgattttatttctgtaattaaggttacaatatttcccattcttcattagaaaagaagagtttgacaatgcccatccacttcaaacagtgctactcatactttttgattgataagcccctaataacacagtatggtaaatctgagtttccagggaacatagagcacaaatggagaaagtctgcatcagaaattttatatatatatatatataaaatatatatatatttttattatactttaatttctagggtacatgtgcaccatgtgcaggtttgttacatatgtatacatgtgccatgttgtgtgctgcaactgcatgagaaaactgaatt

SEQ ID NO: 111442 - DNA, 431 bp, Homo sapiens
gagcacaaatggagaaagtctgcatcagaaattttatatatatatatatataaaatatatatatatttttattatactttaatttctagggtacatgtgcaccatgtgcaggtttgttacatatgtatacatgtgccatgttgtgtgctgcaactgcatgagaaaactgaattttatttttaatttaatttgtggcaccatctataacattatttttttaagtatttgaatcatataaataaaaataaattacaagaaactgtaccattttgtccttcaattttgtatatccctttgcacaccaagtgtgggaggcatagacttagactatcttctttcacttgcctcatgattctaagaaaaagcagargttaggcaaacatactctgtttggcctgggtttttcttccagcaagtatttcttccagtag

SEQ ID NO: 111443 - DNA, 579 bp, Homo sapiens
tatgcaaaacatagaaattggcagtccaaggttatcctttaatttggaggcgcttgcattaaagagaaaaacataaaataataaaaacatatatcatgaattttctttttcatcactactaaatcaaacaacaatcttctttattttctgcaatagttcttaataggtttttaccctggcagggaatgtaactgcttgttccctaaaatagaaatcaggttgcctcgcctgaaaagttaaaattaggaatgcattacaggttccaataataatatattgtaaaagatccattactcaacaaagraacctatttgccaaattagagttccattggttccaattatagtacagatatgatccttgccaagccatgcattcaatttccaataacgataaaagaatatgttagagttaagttcaaagagaattcttgcagactgaattttaaaatgcatcttttcattctgctgatgcacactcatttgtttaatacttttcacttaattgccatcattctcagacaaaaatatttagtttttgttatcacacaataaataaaatgtgaagatatagacaaaa

SEQ ID NO: 111444 - DNA, 566 bp, Homo sapiens
atttttttcatactggatcttcaaaatctattctattgttttcccatgctgagaaaaatggctgcctgcagtctctaagcttattcttgccctaacaattctcttcagctttggatctctgtggggttgctctaggttccacaagtcacacaagcagcatcttcactcagaagccaagcagcatgaaaatttgatccactggatgatcaaattcattctgggcccaatgttacattttattaacacactaaatgttgtcatgatatgcttcctgacaggagtttttaaagtgttagaagaactattaaccaaaacctctgctccaccccagctttacctgaagattaagtatggttagtcaaaacctgacagaaacaaccatcatcatatccaaaccaagtgaaaaattttatttcagtaaaaagtggtgggttttatcttattcataactgtcttagtccattcagggtgctatagcaaaataccataaactgggttatttawaaattacagaaatgtatttctgcagttctcaaggctgagaagtccaagattaagatgctagc

SEQ ID NO: 111445 - DNA, 566 bp, Homo sapiens
atttttttcatactggatcttcaaaatctattctattgttttcccatgctgagaaaaatggctgcctgcagtctctaagcttattcttgccctaacaattctcttcagctttggatctctgtggggttgctctaggttccacaagtcacacaagcagcatcttcactcagaagccaagcagcatgaaaatttgatccactggatgatcaaattcattctgggcccaatgttacattttattaacacactaaatgttgtcatgatatgcttcctgacaggagtttttaaagtgttagaagaactattaaccaaaacctctgctccaccccagctttacctgaagattaagtatggttagtcaaaacctgacagaaacaaccatcatcatatccaaaccaagtgaaaaattttatttcagtaaaaagtggtgggttttatcttattcataactgtcttagtccattcagggtgctatagcaaaataccataaactgggttatttatwaattacagaaatgtatttctgcagttctcaaggctgagaagtccaagattaagatgctagc

SEQ ID NO: 111446 - DNA, 561 bp, Homo sapiens
ctgccttctcattctaacctcacatggtagaagggtccagctagctgtctggggtttgttttaaaagggcactaatccgattgatgagcactctaccctcataacctaatcaccttccaacgagatgaatttgagataaaaattccagaaattatgtagtgtttctaaaacccatatgccaaggtctttgctggattacagacagattgggtcctcagctawgtttgctttcccaaagtggccactgagtatagacactccaggcacaattaacactatacatactttaaaatgcccgaacttcccgagaacttctaaaggaatgctgtggtctgaatgtttgtgtccccttcaaattcatatggtggtgaaactcatctgaaatgattagtagcccagctcaagggtctttttgtgcttctgaatatatggtgatatagttcggatatttgtcaccaccaaaatctcacagggaaatataatccctagtgttggaggtggggtctggtgggaggagattggatcatgaggatggatttctcatgaattgtttagagtcac

SEQ ID NO: 111447 - DNA, 562 bp, Homo sapiens
agcatttccaatattaacaaatatgtaaggaattcaagaacaaacattatatgggccaggcgtggtgcctcatgcctgtaatcccagcactttgggaggccgaggcaggtggatcatgaggtcaggagttcgagaccagcctggcaacatggtgaaaccggtctgtactaaaaatacaaaaattagcygggcatagtggtgcacacctataatcctagctactcagtaggctgaggcaggagaatcgcttgaacctgggaggtggaggttgcagtaagccgagatcatgccactgcattccagcctgggcaacagagcaagactccatctcacaaaaaaagaagaagaagaagaagaagaagaagaacaaacattataaatgatatatttcataaaaactttatggtgaaaattataaaaatttacaagtataattttacaataaaatgttataattattaagttataattatttaaaggtctcaaataaaactttaaaaaatgaagagctacaaaatggagagatgaactaaaatggctaggagaactcaacatcacaaat

SEQ ID NO: 111448 - DNA, 562 bp, Homo sapiens
agcatttccaatattaacaaatatgtaaggaattcaagaacaaacattatatgggccaggcgtggtgcctcatgcctgtaatcccagcactttgggaggccgaggcaggtggatcatgaggtcaggagttcgagaccagcctggcaacatggtgaaaccggtctgtactaaaaatacaaaaattagctgggcatrgtggtgcacacctataatcctagctactcagtaggctgaggcaggagaatcgcttgaacctgggaggtggaggttgcagtaagccgagatcatgccactgcattccagcctgggcaacagagcaagactccatctcacaaaaaaagaagaagaagaagaagaagaagaagaacaaacattataaatgatatatttcataaaaactttatggtgaaaattataaaaatttacaagtataattttacaataaaatgttataattattaagttataattatttaaaggtctcaaataaaactttaaaaaatgaagagctacaaaatggagagatgaactaaaatggctaggagaactcaacatcacaaat

SEQ ID NO: 111449 - DNA, 562 bp, Homo sapiens
agcatttccaatattaacaaatatgtaaggaattcaagaacaaacattatatgggccaggcgtggtgcctcatgcctgtaatcccagcactttgggaggccgaggcaggtggatcatgaggtcaggagttcgagaccagcctggcaacatggtgaaaccggtctgtactaaaaatacaaaaattagctgggcatagtggtgcacacctataatcctagctactcagtaggctgaggcaggagaatcgcttgaacctgggaggtggaggttgcagtaagccgagatcatgccactgcattccagcctgggcaacagagcaagactccatctcacaaaaaaagaagaagaagaagaagaagaagaagaacaaacattataaatgatatatttcataaaaactttatggtgaaaattataaaaatttacaagtataattttacaataaaaygttataattattaagttataattatttaaaggtctcaaataaaactttaaaaaatgaagagctacaaaatggagagatgaactaaaatggctaggagaactcaacatcacaaat

SEQ ID NO: 111450 - DNA, 587 bp, Homo sapiens
aataatgtagatttttttaatgttgaaattttaaaaggaggtgttgagtcaaagaaagaagccaataacatccatatgtatttctgttaattaaaatacacatttacaagatcatgatgcaatacacatggaacacatcagaatggttgcctaatggtcagggaaatgtgatgagaacagagaagtggtagggaaggtaatgaaaaatarctaagtaaaacaacaggaagccttccctggaacaatgctggtggcatgctatgcaccaacaatgtttaattcagccttctgcaacactgtctcccatctatttctctatatatgaagaaaatgaccaatggtgacaaggaaatgaagctaataaacatgaggctcactttgtgattaagcgaaagggctactgtagaccaggtggaaggccttattgaggagatgtcatttagctgacacttgaaggataagaagggatgaccctgagacaatgggggtacccagcaagacagtggtatgggaagatgtttggcccttgaagagctgtgatgagaatgggatggaggagggaaggcagggccaaatcttccacagga

SEQ ID NO: 111451 - DNA, 587 bp, Homo sapiens
aataatgtagatttttttaatgttgaaattttaaaaggaggtgttgagtcaaagaaagaagccaataacatccatatgtatttctgttaattaaaatacacatttacaagatcatgatgcaatacacatggaacacatcagaatggttgcctaatggtcagggaaatgtgatgagaacagagaagtggtagggaaggtaatgaaaaataactaagtaaaacaacaggaagccttccctggaacaatgctggtggcatgctatgcaccaasaatgtttaattcagccttctgcaacactgtctcccatctatttctctatatatgaagaaaatgaccaatggtgacaaggaaatgaagctaataaacatgaggctcactttgtgattaagcgaaagggctactgtagaccaggtggaaggccttattgaggagatgtcatttagctgacacttgaaggataagaagggatgaccctgagacaatgggggtacccagcaagacagtggtatgggaagatgtttggcccttgaagagctgtgatgagaatgggatggaggagggaaggcagggccaaatcttccacagga

SEQ ID NO: 111452 - DNA, 574 bp, Homo sapiens
agcagtgagcaagactctgtgggtgtgggtcctgccaagccaggcatgggatgtaatctcctggtgtgccatttgctaacaccattggaaaagcgtagtatttggtcagragtgtcctgattttccaggtacagtctgtcatggcttcccttggccaggaaagggaaatcccctgaccccttgagcttcccaggtgaggagatggcccaccctgtttttgttcctctgagggctgcacccactgtccaaccagtcccaatgagatgaaccaggtgcctcggttggaaatgcagaaatcacccatcttctgcattgatcacactgggagctgtagaccagagcgatttggccatcttggaacagaatcctggaattttcaacatttttcatttggcttatctttcctttggtactaaaagaagttcaaaagtcatggtaataatatgttttaaaaaatctacaggtgattatttactgatgttaattaatgtttataataaaacaaaggaaagaatacacatcagttcctacagtgtactctcatttatgtgtgcatacatatatacatgtgcaa

SEQ ID NO: 111453 - DNA, 536 bp, Homo sapiens
aagaccatggctcctgagacagctgtatggaagaacagccctagcctgagacattctatgactgaaaacatccattctcaattttctctgcaacctcccagcatcaactatatttttttctctgctcaagggaaacaaaagcctctcgattggttctgatctctctcttcaaaaacttccacaagaccctaaattttactcttcctattatatactcttcctcaatgcacagccataattaaagaaaaactactctatgaattgctctcagttttcaaatttgaagaaaaattaatgacaaagaggaaaacaaggtgtttgggaacaagggcagtaagaaaagttttatttaagatttcaaaaaagctcaagwatatcctatcaaaactttaatacatttgaaattggagaagataaaaaagcgagttattctgatgtgaaaatgctttgaggaaatgagcaaaaattattcatacaagaggaaacccaagtgaccactaaacatgtgaaaagatgctaaactccactggtaataa

SEQ ID NO: 111454 - DNA, 607 bp, Homo sapiens
tctcagttttcaaatttgaagaaaaattaatgacaaagaggaaaacaaggtgtttgggaacaagggcagtaagaaaagttttatttaagatttcaaaaaagctcaagtatatcctatcaaaactttaatacatttgaaattggagaagataaaaaagcgagttattctgatgtgaaaatgctttgaggaaatgagcaaaaattattcatacaagaggaaacccaagtgaccactaaacatgtgaaaagatgctaaactccactggtaataaggaaaacataaattgaaacgatattgaagtaccatttcacaccctttcatgtgaaagcacttttatatatgattatgccaggaattagtgagaatgtggaagataggaatttatatgctgctggtggaaatttacattgctataaagtttttggggaactatttggtgacatctataaaatggaagttttgcatatttgatgatgcaataattccatttccaagtatactcctgagagcccctcacacatgtacatgtgrcactctgtataggaatgtttacagtggtggtgttgaagcgtcattgttaaaagtctaacaaccacagcagaaataa

SEQ ID NO: 111455 - DNA, 459 bp, Homo sapiens
aaaaatctatccatggctccctataatcctcagaacaaagtttaaactccttacctttttaacttccccatcttttgcatcttcaaagtaccagcagacaaaactaatatttagcaatgtgcttttgttgtttctaagcttttgcaacttgccagcctctctgttaggaaccctttgtctcccctcttgtttatatcttctctctttcctctagccattgccaacacacacacacacacacacacacacactctctctctcacacacacacacacacacacacacacwctctctctctctctctctctctctccctctctctttgtcattttgctttggtaattccaaaacattcctgtggtcttctcttaaatatactttccatcattcccactaggaagatctatatcaatgagatattcctcattatgcacccatagtgggtggggaaagagataa

SEQ ID NO: 111456 - DNA, 592 bp, Homo sapiens
tcagtattgtgaattttagtttttatcatagtactgaaaatataataggtattcactaaatgtaaactgttgctattattataaaacctagagctagatttttgtagatggtagatggggtagtcttgagggttcaccagaaaaggaagtttcatttgagtggaaagtaaattgcttgacacttgaaggccagaggagtagcacgtgggaccctgcaggtgacagaactcatatgagcagatcatattaatattcagggactggtattgactatagcattaagcaccatggctttgggagcctagttgaaatttccagaggccaggtttaccgtaagaaagtgttttcaagtgaaccataaggatttgttcaatcagaaatggtagaataaaattcacaggtgtagagacttytttttaccaagaactacccagcacccttggacagccataggaagaggcggggtcacaaaaaatggacagcaattggatttcctatgagttgtgcaggtctgagctagatttggaaaaattaaaacatcagcataaataaattattgcaaatatcacacattagtggggttgacaattca

SEQ ID NO: 111457 - DNA, 599 bp, Homo sapiens
aaatgggagtaaaatgtctcattcatatttataattatgcctcctttctcattctcagtgttcttttgtgttctctctctctctctctccttgaccataattgccawttcattatttacctgttattttctttaagaaactaatttttggttttactactcaggagtcaggtctcctgttttctaattttttaaattttaatattcaacttcttggttgtacttttattttgtcagcattcgccccactcccagattttacccaggatatggcacagaattctaagatctgctgtcttctctcctttaaacacttaagatagacaaagcacacctgaatgcagggaataaatgtcatcagaaagtagctagtgagacacttattaggatgtatctcctgctctgtcctctcagtgaactttcttgccattgaagaattaggcattccaatttattgtttttagaccagtccactggacaatgagcccaactactgaaccaaagtacttgactactggtctaatgagaattcaggaataaatttatttctcaagtacttgtgaggtggcccaagcctaatcatgaatgagagcagagata

SEQ ID NO: 111458 - DNA, 599 bp, Homo sapiens
aaatgggagtaaaatgtctcattcatatttataattatgcctcctttctcattctcagtgttcttttgtgttctctctctctctctctccttgaccataattgccaattcattatttacctgttattttctttaagaaactaatttttggttttactactcaggagtcaggtctcctgttttctaattttttaaattttaatattcaayttcttggttgtacttttattttgtcagcattcgccccactcccagattttacccaggatatggcacagaattctaagatctgctgtcttctctcctttaaacacttaagatagacaaagcacacctgaatgcagggaataaatgtcatcagaaagtagctagtgagacacttattaggatgtatctcctgctctgtcctctcagtgaactttcttgccattgaagaattaggcattccaatttattgtttttagaccagtccactggacaatgagcccaactactgaaccaaagtacttgactactggtctaatgagaattcaggaataaatttatttctcaagtacttgtgaggtggcccaagcctaatcatgaatgagagcagagata

SEQ ID NO: 111459 - DNA, 599 bp, Homo sapiens
aaatgggagtaaaatgtctcattcatatttataattatgcctcctttctcattctcagtgttcttttgtgttctctctctctctctctccttgaccataattgccaattcattatttacctgttattttctttaagaaactaatttttggttttactactcaggagtcaggtctcctgttttctaattttttaaattttaatattcaacttcttggttgtacttttattttgtcagcattcrccccactcccagattttacccaggatatggcacagaattctaagatctgctgtcttctctcctttaaacacttaagatagacaaagcacacctgaatgcagggaataaatgtcatcagaaagtagctagtgagacacttattaggatgtatctcctgctctgtcctctcagtgaactttcttgccattgaagaattaggcattccaatttattgtttttagaccagtccactggacaatgagcccaactactgaaccaaagtacttgactactggtctaatgagaattcaggaataaatttatttctcaagtacttgtgaggtggcccaagcctaatcatgaatgagagcagagata

SEQ ID NO: 111460 - DNA, 575 bp, Homo sapiens
ctgaggggacagactaggccgccttgggagccaggggcacaccagagcaccgtcctacggaactgccccctgggctcggggacggccacggcagtgggaggctgaatggggaccttcatccagattaaaagtcaacacaatgctggatctgaaatagttcaggtcggccaggcgcaggcaggagctgacagcactggccctggctcagcctgcctgtagggagctcaccttccagtgaaggaggcaataataagccaaacccatcagacaccatgcaccctgtgaagagcaatgcccaccccgaaggggccgggsccgagtgtaaacctggaaaccagctgggcagggaaagcctccctgagatgaaaacacccgtataaagacctgcaaaaggtaacggagccacgtgagtgttcagggaagaatgtgccagatgggcggagagcacagcccctgcaaaggcccgggacagggagcgagtccaggaagagttgagaagtggcagggcaggtggccagggccccgagtgccccttgaggactttgtctttgactgagtgaggagggagccacggg

SEQ ID NO: 111461 - DNA, 530 bp, Homo sapiens
cttgtcaggtggcaaagcataaacactgattcgaaatgtcctcctttgtgatggtttaaacctaggaagaagaaatataagagtgtgtcctcataagagcttatgggccctaggctcttgaacctaatgctgatcatcattttaaagtgcttagactttgaaagcatcagctgaaattttttacaatgccgctgccacttatttaatactgttgaatgaaaaacaacatgccaaacagatgggmtaacctttttattccacacatttgtccctcttcccctactagtacagcttgacagaatggatgtttttgttacctggttcctttccagtatattttctgactgccaattttttcatttcaaacaagccttatttagatagtttaatagtgaataaaccaacataggacttttgtaattgagtagtttcctgtttacagagtttataaaatgtaacctagcagaaaaaatggaatgtgaaaaagtagacttttttgtgtgtgaagacctaaagtgaatctgcaaata

SEQ ID NO: 111462 - DNA, 568 bp, Homo sapiens
tggctgaatagtactccattgtgtataggtagcacattttctttatccattcatctgttgatggacacttaggctgcttctgaatcttgactattgtgaacagtgtggtaataaatatggaagtgcatatatctcttcaatatacagattttcttactttggagtatatacctacaagtgggattgctagatcatatggtagtcctgttagttttttgaggatcctttaaactgttctccatagtgtctgtgctactttacattcccactaacagtgtacaagggttcccttttctccacatcccagccagcattcattattgcctgattttggataaaagccatttgaactggggtgagataatatctcattgtaggtttcayttgcatttatatgatgatcaatgatgctgagcatgttttcatatgcctgtttgccatatgtgagtgtacttttgataaatggtcattcagatatttgcccatttttaaatcagattattagttttttttttcctattcagttgtttgagttccttgtatacatattctggttattaatcttttg

SEQ ID NO: 111463 - DNA, 558 bp, Homo sapiens
aatcttgttttattgtggacgggttgtagtgaggccctgaatttcctagcagctattttaaataactatccrttattagatatgtttagattgctggttatatgggagaaaatggatatagaaaggatgagcgttagagttagaataccatattacccatagatgtttgatgcacaaagcattgcatcagttatttatttgctggtaatttattctaataaaggatttattggtagtttgaagaactggaagagaacaaggctcatttcattgaagactcccagaatgaaataatttgcaaaacttatttaaaagtccaattgatgtagtctccagagcacctggtcagattgaaaaataaacagatttgtttggaaaaatcaacagtgcagttaaatatgtgttgacccttattttaaaaatgtaagtaggagcagatgaaggggaatacaattaaatttgttaaggagttactaagaaagagtaaggtcatggttgataaccttagttgaagataccccactgaatatgataaatcatgttgagccagttttggga

SEQ ID NO: 111464 - DNA, 564 bp, Homo sapiens
cttctgcatgtcacttctactcatatttcattggcccaaggagtcacctgtctgtagctaacttcagtaacagcaaaaatacattttttcaatatacccagaaagggagtaagattgcatattggtaggtggtcataaggcttacatcagcaatcatctatgtatttactttttatcattattattattttcattgttatctctatcaatatgtctctccaagaataaaaaatcatgtattttcaaaattattcmaagaatcactctctttcagaacactgattggtaaggaacacagcttggattatgctcttctctgtaatcactcagaataactcccactttgctctacccctcccacactttacttacagttctctcatctacttggtctttgaatgttttgctctatcccttgactttagatcatctgatttagaagtcatctagtctctcctcttaggtctttgcacaccaactcagtttttggccttgcctttgttctacttcagcacccatcctgttctctgtttccactaccacctcttctcagcacccccaatc

SEQ ID NO: 111465 - DNA, 585 bp, Homo sapiens
ctgtgcacaattaccacctcccacattcactagcttataactttgggcaagttactcractactgtttccttatttatcagctagggataatgaagatgcctatctctcattgcattgttagtaaaatgcatataacattgtctggcatatcacaagtattacatatttatgttttgggaaatttgatggaactgttgctgggaatgtaaatcaggttcaaccattgtggaaagcagtatggcaattcctcaaagagctaaaaacagaactaccattagacccagaaatcccattactgggtatatacccaaaagaatgtaagtcgttctatcataaaggcacatgcacgtgtatgttcactgcagcactattcacaacaacaaagacatggaatcaacctaactgcccatcaatggtagactaaagaacatgtggtacatatacaccatgaaatactatgcagccataaaaaatgagatcatgtcctttgcaggaacatggatggagctagaggccattatctttagcaaactaacgcagtcagagaaaaccaaatgccacatatcctcacttacaggtgggag

SEQ ID NO: 111466 - DNA, 579 bp, Homo sapiens
ccatggcactgccaaataatcctactgcacttccctagtccattctctctcctacttttctaaatgtctaacktataccttctcctgtagcttcaaatttcaaaatttttaatacctccactctactaactcactgctggtgatcttgctcgctatttcactgagaaaataagaatcagaagggaattgctcaagttcccactgccacatctaccagcctacctgaatctttacctatctccttgctttctcctgtttactctggatgaactcttcatgctcccatccaaggcaaatcctgctccttgtcctctaggctcagtgccttgtacctactcaagaacgttatttcagcatatttcctaatctctctcacatcctcaattctgctgctgaatcatttaaattcttcatagagaaacattttatttctttcgtcataatcacaagcaaatcatcttgacctctacctttccagccagccactgaccagtttctttgtgttcatttatagtaaaatttcttaaatgagttataatctgcactctccaattctctttccccatgctatactctaat

SEQ ID NO: 111467 - DNA, 579 bp, Homo sapiens
ccatggcactgccaaataatcctactgcacttccctagtccattctctctcctacttttctaaatgtctaacttataccttctcctgtagcttcaaatttcaaaatttttaatacctccactctactaactcactgctggtgatcttgctcgctatttcactgagaaaataagaaycagaagggaattgctcaagttcccactgccacatctaccagcctacctgaatctttacctatctccttgctttctcctgtttactctggatgaactcttcatgctcccatccaaggcaaatcctgctccttgtcctctaggctcagtgccttgtacctactcaagaacgttatttcagcatatttcctaatctctctcacatcctcaattctgctgctgaatcatttaaattcttcatagagaaacattttatttctttcgtcataatcacaagcaaatcatcttgacctctacctttccagccagccactgaccagtttctttgtgttcatttatagtaaaatttcttaaatgagttataatctgcactctccaattctctttccccatgctatactctaat

SEQ ID NO: 111468 - DNA, 491 bp, Homo sapiens
ccttccctttattcttctgctgtatgagactttgtgaaccaagaactcacatggacaaggcagagctgggtgtgagcccctcttttggggtgattgccaatggggataaatgagccaaaaggaacctagaacactgttctatctacattttcttagctaccactcatcatagycattatcatcacattatattcattgcagctaaccctgggactgccacagtaagcttacttttcaaatggactctggtggtcatttctttttaaaaaatatttaataaatttacttaagacagagagctgattccacagggcccattttgtattctcaaacatggaagcctataattggaaatggatcagagttaagtcaggaaattctctgtattatcttttaaaataataatagtgagttggaatgattggcttcctattttctttaaaaagaaaatcatgggcttttccttttaaaaacaaagtcatcaggtttca

SEQ ID NO: 111469 - DNA, 648 bp, Homo sapiens
atatcctgtatcaattcttctttttttatttctttaagttggactttacctttctctggtgcctccttgattagcttaataatagaccttctgaattctttttctggcaattcagagatttcatcttggtttggatcaatagctgatgagctagtgtgatcttttgggggtattaaagaaccttgttttatcatattaccagaatcgtttttctggttctttctcatttgggtagactatgtcagagggaagatccgggactcaaggactgctgttcagaatcttttgtcccacgggtgctctttaaatgcagtcctctacctttttccctagggatggggcttcctgagagccatactgatgtgattgttacttctcttctggatctggccacccagcagagccactgggttctgaactggtaatggggagtgtctgcaaagagtcctgtgatgtgagccgtcttcaggtctctcattcatgataccagcacctactctggtggaggtagcagtggagtgaagtggactctgtgagggtcctcattgattttttgtttagtacactggttttgtgttggtwgtcctctagccaggagttggagctttgaagagggcatcagctgccgttgtatagggaagatacaag

SEQ ID NO: 111470 - DNA, 580 bp, Homo sapiens
aaacacacattttttttcttatatcactgcacaggttaataccaaaagtaatatggaaaaatgagaaaataagcatgtaaaaattaccagaaaaatttaggggtcagacttaccagrtattagaagcctctatactagactaacagtttatggaaatgcaatagaaaatccagaaacagatccaaatatacaagtaaatacgctatatgataaaggtgacatatctaatcactattcactattgcatcatttcataggcagcaacccctcccacctttttatttttttttttgagacaggatattgctctgtcacctaggctggagtgcaatggtataatcatagctctctctaatcccaaattcctgggctcaggcaatccttttgtctcagcctcccaagtagctaggactacaggtatgccaccagacttggttaatttttaaaattattttagagatggggtctcgctatgttgcctcggctggtctccaactccttgcctcaagtcatcctatcgcagctttctgagttgctgcaattacaggcataagccactgcacctggtcccaaagacagc

SEQ ID NO: 111471 - DNA, 580 bp, Homo sapiens
aaacacacattttttttcttatatcactgcacaggttaataccaaaagtaatatggaaaaatgagaaaataagcatgtaaaaattaccagaaaaatttaggggtcagacttaccagatattagaagcctctatactagactaacagtttatggaaatgcaatagaaaatccagaaacagatccaaatatacaagtaaataygctatatgataaaggtgacatatctaatcactattcactattgcatcatttcataggcagcaacccctcccacctttttatttttttttttgagacaggatattgctctgtcacctaggctggagtgcaatggtataatcatagctctctctaatcccaaattcctgggctcaggcaatccttttgtctcagcctcccaagtagctaggactacaggtatgccaccagacttggttaatttttaaaattattttagagatggggtctcgctatgttgcctcggctggtctccaactccttgcctcaagtcatcctatcgcagctttctgagttgctgcaattacaggcataagccactgcacctggtcccaaagacagc

SEQ ID NO: 111472 - DNA, 596 bp, Homo sapiens
tggttattactaaaaattcacaaattaatagatgttggggaggttgtagagaaaagggaaagcttatacattgctggtgggaatgtaaataagttcagtcattgtggaaagcagtgtggcaatttctcgaagaacttaaaacagaattaccatttgagccagtaatcccacattgggtctatacccaaaggaatataaattgttctatcacaaagacacctgaaaactcatgttcatcactgcactattcacaatagcaaaaacgtggattcaatataaatrcccatcaacagtagattgaataaagaaattgtggtgcatatagaccatgggatactacacagccaaaaaaaacaaaatcatatcgttttccagcaacatggatgcaactggaggccagtatcctaagagaactaacaagaacagttaatcaaatacctcatgttcactcttataagtgggagctaaacattgagtacatacggacacaaagaaggaagcaacagacactgggcctactagagggtggagggtatgagaagtgtgagaaatgaaaagctacctattgcattttatgcttcttacctgggtgacaa

SEQ ID NO: 111473 - DNA, 596 bp, Homo sapiens
tggttattactaaaaattcacaaattaatagatgttggggaggttgtagagaaaagggaaagcttatacattgctggtgggaatgtaaataagttcagtcattgtggaaagcagtgtggcaatttctcgaagaacttaaaacagaattaccatttgagccagtaatcccacattgggtctatacccaaaggaatataaattgttctatcacaaagacacctgaaaactcatgttcatcactgcactattcacaatagcaaaaacgtggattcaatataaatacccatcaacagtagattgaataaagaaattgtggtgcatatagaccatgggatactacacagccaaaaaaaacaaaatcrtatcgttttccagcaacatggatgcaactggaggccagtatcctaagagaactaacaagaacagttaatcaaatacctcatgttcactcttataagtgggagctaaacattgagtacatacggacacaaagaaggaagcaacagacactgggcctactagagggtggagggtatgagaagtgtgagaaatgaaaagctacctattgcattttatgcttcttacctgggtgacaa

SEQ ID NO: 111474 - DNA, 579 bp, Homo sapiens
tacatttcctatcttaaccacccaactaataaacataatcatatgatattccattagatttaagattagtatcatattgttttctggcttgcatttacaagttgtatgtttattgyattttccttgatgcataactgtcatcctatgagggttggtattcaatataattaaaaattgcttaaaaatctttaataatattttctgtcattttcttgacacctttttccttctttctttctttccttctttcttctttttcttttctttttttctcttatgtgtcttaaaacttctgtaattaacaataactattaagacatgagcatttatgcttcacttcttgttttagatcctattaagtaaattcaatttttgtctttttcttgaatcccctcctcttttgaagtatacagaggggattaatgtttaatatctccaatctctctctctctctctctctctctctctctctctctctgtgtatgtttgtgtttgtgtgtatgtgtattatattaaagactggtgtcattccacttcttgattgttcttacaggacatttcccctctttattcttctca

SEQ ID NO: 111475 - DNA, 579 bp, Homo sapiens
tacatttcctatcttaaccacccaactaataaacataatcatatgatattccattagatttaagattagtatcatattgttttctggcttgcatttacaagttgtatgtttattgcattttccttgatgcataactgtcatcctatgagggttggtattcaatataattaaaaattgcttwaaaatctttaataatattttctgtcattttcttgacacctttttccttctttctttctttccttctttcttctttttcttttctttttttctcttatgtgtcttaaaacttctgtaattaacaataactattaagacatgagcatttatgcttcacttcttgttttagatcctattaagtaaattcaatttttgtctttttcttgaatcccctcctcttttgaagtatacagaggggattaatgtttaatatctccaatctctctctctctctctctctctctctctctctctctctgtgtatgtttgtgtttgtgtgtatgtgtattatattaaagactggtgtcattccacttcttgattgttcttacaggacatttcccctctttattcttctca

SEQ ID NO: 111476 - DNA, 593 bp, Homo sapiens
aattgagactatcaataaagatatagaatttttttwaaaaacgggccaaatagaaattctagacttgaaaagtacaataagtgatgtgtgaaattcataggagggtctcagaagccgatgtaagctagcagaagaaagaattaagtaaacttgaagatagataaagtctggagaaatttacaaaaattaagagtacccagatacacatgggatattttcaatatgccaacacatgtataatgtgagtctcaaaagtagaggagagaaagaaaggagcataaagaataattgaagaaataatggcaccctttacaaatttgatgaaagttttatctatgaatctaagaagctcaacaaacttcaaggaggataatctcaaagaaatccacatgtacacacactatagtcaaactgtcaaaacctggaaaggaaaaaaaatcttgaaagcagtgagaaaaaaacaacttattacctacaaaaaaattccccaataagttaacatttgacttataatcaaaaacaactggaagccaaaaggcagtcacatgacatattcaaagtgctgaaagaaaaagaccctcaaccaagaatcc

SEQ ID NO: 111477 - DNA, 593 bp, Homo sapiens
aattgagactatcaataaagatatagaatttttttaaaaaacgggccaaatagaaattctagacttgaaaagtayaataagtgatgtgtgaaattcataggagggtctcagaagccgatgtaagctagcagaagaaagaattaagtaaacttgaagatagataaagtctggagaaatttacaaaaattaagagtacccagatacacatgggatattttcaatatgccaacacatgtataatgtgagtctcaaaagtagaggagagaaagaaaggagcataaagaataattgaagaaataatggcaccctttacaaatttgatgaaagttttatctatgaatctaagaagctcaacaaacttcaaggaggataatctcaaagaaatccacatgtacacacactatagtcaaactgtcaaaacctggaaaggaaaaaaaatcttgaaagcagtgagaaaaaaacaacttattacctacaaaaaaattccccaataagttaacatttgacttataatcaaaaacaactggaagccaaaaggcagtcacatgacatattcaaagtgctgaaagaaaaagaccctcaaccaagaatcc

SEQ ID NO: 111478 - DNA, 593 bp, Homo sapiens
aattgagactatcaataaagatatagaatttttttaaaaaacgggccaaatagaaattctagacttgaaaagtacaataagtgatgtgtgaaattcataggagggtctcagaagccgatgtaagctagcagaagaaagaattaagtaaacttgaagatagataaagtctggagaaatttacaaaaattaagagtacccagatacacatgggatattttcaatatgccaacacatgtataatgtgagtctcaaaagtagaggagagaaagaaaggagcataaagaataattgaagaaataatggcaccctttacaaatttgatgaaagttttatctatgaatctaagaagctcaacaaacttcaaggaggataatctcaaagaaatccacatgtacacacactatagtcaaactgtcaaaacctggaaaggaaaaaaaatcttgaaagcagtgagaaaaaaacaacttattacctacaaaaaaattccccaataagttaacatttgacttataatcaaaaacaactggaagccaaaaggcagtsacatgacatattcaaagtgctgaaagaaaaagaccctcaaccaagaatcc

SEQ ID NO: 111479 - DNA, 564 bp, Homo sapiens
tatcttgcatctttttgttgtgagtggcttctctgcaggttccaacctgctcacagatcctccgtcttgatttttcctctggccgtggaactaccagttctcctccttgcccacctccagcattgtcctacttttcttcccttctcattcaggcccctttgagggtcctcttactctcactgtgtcccccttctcacctgctttcacttatcaactctcgatttggcttcagtcctatcattccactaaatcctctgccaatgtcagcatcaaaagcattcatcttgccaaacccgttgcttattttcctgcctttatctttttggactgttctgctgcattttctttcttcttcacactctgtgcctttggcatttatgaacctctcctctcagtccccttcccggctgttgttgggtaacttcttcctgcttctttggtcgtcttcctgagctgttactcccttgcgtctcctctgtcgytctgagcttcttcctcagtacatgctctccttaacaaataccatttgctcttatagtcttagattcccatcctgattaatgg

SEQ ID NO: 111480 - DNA, 600 bp, Homo sapiens
ctatattatactgaacatgagttcatactgatgtctccaactctaatccattgccacacagatcatcctaaccacctttacttgcttttctgtaaattccmactccaatagtgaaatacttggctcccaccatccatttacttagccgttcaatctcagaatacatgtatagcagtatcagaattgttaaaccttactcctatggtaaacagctttatcaactaaagcacactgcttctgtgtactttcttttgctttcagtattacagacttcattaatctctaaagttacttaggtcggcacctttttccccaaccccctcagggaagttgtttcatacatttataatatgattagattgctttgtcacattctgcattccatactgggattcccagatggaatcctgcgaaataattttttaagttgaaaactaaggttcgatttttatgttattattctacaggttttgacaaatgtataatttcacacatccaatgttataatattatacagaatagtttactcccctaaaaaaaaaaatcccatgtgcttcacctatcaatccttctcctttcccctaaatccctggcaactcc

SEQ ID NO: 111481 - DNA, 600 bp, Homo sapiens
ctatattatactgaacatgagttcatactgatgtctccaactctaatccattgccacacagatcatcctaaccacctttacttgcttttctgtaaattccaactccaatagtgaaatacttggctcccaccatccatttacttagccgttcaatctcagaatacatgtatagcagtatcagaattgttaaaccttactcctatggtaaacagctttatcaactaaagcacactgcttctgtgtactttcttttgctttcagtattacagacttcattaatctctaaagttacttaggtcggcacctttttccccaaccccctcagggaagttgtttcatacatttataatatgattagattgctttgtcacattctgcattccatactgggattcccagatggaatcctgcgaaataattttttaagttkaaaactaaggttcgatttttatgttattattctacaggttttgacaaatgtataatttcacacatccaatgttataatattatacagaatagtttactcccctaaaaaaaaaaatcccatgtgcttcacctatcaatccttctcctttcccctaaatccctggcaactcc

SEQ ID NO: 111482 - DNA, 590 bp, Homo sapiens
cccattgccagttaaagaagagaccaactggcaacagtctattattaaaattctctcctgatttctctaaaacagggattttttttgtgtgtgttaataaatttaatttataaatattgccccattgccagatgatgctatttcatttgctaatttgaagrgtgcaacagcaagggatgatttatcaatgcaagtaccactctgatgtgtaactgctgttctcaactccatgagtaccttcttatgcagatgagagagttctgctgaattgaagatacagtttaatttaaaaaaaagttgtttaagctttacctgtagtcataaacttcagactgaaattaaatatatgttttcttagtatttttcttcataatgatctctatcccagtgtgattataagaaaaatagttaacaaccaggttgcccccctaactgcttacacacattatctcatttattcctgacaatagctctataaagtagatgtaattatctccatttgcagatgagaaaagcgagtctgagaaaggtgtggcaagttggttgtttttgtttttgtttaaagagacagagtttcactttaaaaacag

SEQ ID NO: 111483 - DNA, 590 bp, Homo sapiens
cccattgccagttaaagaagagaccaactggcaacagtctattattaaaattctctcctgatttctctaaaacagggattttttttgtgtgtgttaataaatttaatttataaatattgccccattgccagatgatgctatttcatttgctaatttgaagagtgcaacagcaagggatgatttatcaatgcaagtaccactctgatgtgtaactgctgttctcaactccatgagtaccttcttatgcagatgagagagttctgctgaatygaagatacagtttaatttaaaaaaaagttgtttaagctttacctgtagtcataaacttcagactgaaattaaatatatgttttcttagtatttttcttcataatgatctctatcccagtgtgattataagaaaaatagttaacaaccaggttgcccccctaactgcttacacacattatctcatttattcctgacaatagctctataaagtagatgtaattatctccatttgcagatgagaaaagcgagtctgagaaaggtgtggcaagttggttgtttttgtttttgtttaaagagacagagtttcactttaaaaacag

SEQ ID NO: 111484 - DNA, 591 bp, Homo sapiens
atcacagtctaaagccaccatggacatctcacgaaaaactggaaaacataaagtaattatgagactttggagaaagtttgaatttatgtaaaatttaaatgaagtgttttgattggctcaaatcaaagtagggctgtttgtaaagaggctttacaaacttgggaggctgaggcaggagaaactcttgaacccgggaggctgagattgcagtgagccgaaatcatgcyatcgcattccagcctgggttacagagcgagactctgcctaaaaacaacaacaacaacaaactatcaattacttatcatgaaaatgaaaatgagtcactgaaaaacgaaaataatatatctgtatgtgtgtgtgtatatatgtgtgcgtttatgtattctttttgtttttcagtgattgttcttcattttaatcatatttatatatttatatatatatttcactctgtttatgtatatgtttgtgcataactaaaattcagttgctaacaatgggtagggggggtagaggagattaggattaggagatattagcaatgtctgtaacattatgttccttaaagaaaagcaaatatgaagcataatt

SEQ ID NO: 111485 - DNA, 596 bp, Homo sapiens
taagcttaacatcatagctttaagtgcctttaataaagtacccatggtgtcaggcatggagaaaaagtgaactatttataaagtagaggcattgtctggacaatttaattcattcctcaagatacttgacttgaaaaatatttaaagagcctctttcatttattttatttacaaaaaatgctctctttatagacagctagayagatgttgatatagatatataaaatgtatagtcatctctaaccagggaattggttacaggactcctatggataacaaaatttatgaatgttcaagtttttacgtaaaccttaaatcatctctagattacttgtagcactaaatacaatgtaaatgctatgtaaatttattttaaaacatttggttttttatattttttattgttgtttgatatttcattttttataaatatttttcatctgtggttaaatttgtgagtgtaaaacctgcaaatacagaaagcagactgtgtacataaatggatgattacaatggcaaactcactgtttattgatataatgatataatgaaatatatcaattataatgaaataaacaacagataaggagataatt

SEQ ID NO: 111486 - DNA, 558 bp, Homo sapiens
aataaatgtttggatgggagataaaattatagatcgatagatagatagataatctgacagtagccctttagcatcatttaggatggattaatttatcacaacttctagcatagaatataaatatccaagaaacagaaaatcttccaattttggaagaagataaaataataattctgaacaaaaagggttggttggtcaaggatagcctgagtacaagccctaagacataaaagtcagaaagatactrgtaggacatgagcccacagggaaaggcatttgaaagggggataaagggtaaataaagatataccttccaccgcctgtcaatatgtagctgttgcactttagtcaggcagtatgaaaataccgtcaaaagcttcagaaagcaggatttttccagatctcctctctctttctgagttgggataccccttttatatttaaaccataagtatcgagctctcatcatcttactcattgtttcagattcaactcgtcttcaaatagactataacttgaatgactcagacctgaaaatggaagagatttccactcaaa

SEQ ID NO: 111487 - DNA, 540 bp, Homo sapiens
tatattaatagctctcatctgatctgaccagtgtccttttaagaggaggaggttaggacattcagagagacaccaaggatgcaggtgcagggagggactgtgaagaggaaacaagaggcagccatctgcaagccaaggagggaagcctcaagtagaaattttatttcacatgtccatggcatggctatataayttttacaataaaaaatcacaaattaagaaagaatcaaatcagacatgaggcaagagttcctgctattaacatttctactcaactagaagttgtacttgatgtaggacttctggcctgtgagaaagtacatatctgttgtttaaaccactaaatctatggtattttttcatggcaatcctagccaaccaggaaaagtcaagtatagcatatgttcatgaaaatgtttatggttccatgtggatttcagagtaggtttttctaattatgtgaagaatgtcagtggtagttaaatgggaatagcatatgatctacaaattactttgggcaatatgggcatttttatgttg

SEQ ID NO: 111488 - DNA, 540 bp, Homo sapiens
tatattaatagctctcatctgatctgaccagtgtccttttaagaggaggaggttaggacattcagagagacaccaaggatgcaggtgcagggagggactgtgaagaggaaacaagaggcagccatctgcaagccaaggagggaagcctcaagtagaaattttatttcacatgtccatggcatggctatataatttttacaataaaaaatcacaaattaagaaagaatcaaatcagacatgaggcaagagttcctgctattaacatttctactcaactagaagttgtacttgatgtaggacttctggcctgtgagaaagtacatatctgttgtttaaaccactaaatctatggtattttttcatggcaatcctagccaaccaggaaaagtcaartatagcatatgttcatgaaaatgtttatggttccatgtggatttcagagtaggtttttctaattatgtgaagaatgtcagtggtagttaaatgggaatagcatatgatctacaaattactttgggcaatatgggcatttttatgttg

SEQ ID NO: 111489 - DNA, 597 bp, Homo sapiens
ctctctctgtctctctctctctctctctctgctctctcagccctggactgagttgacatcattggcttccctggttctgaggcttttagaattggactgagctatacaaccagctcccctggttctccagcttacagatgtccyggtgtggggctgctcaaccttcataatcatgtgagccaattcccctaataagtccctgctcttccagctatctatatttttaaaatttttaattcattaattatttttcttttttgaggcagagtttcactcttgttgcccaggctggagtgcaatggcacgatcttggctcactgcaacctctgcctccagggttcaagcaattctcatgcctcagcctcctgagtagctgggattataggggcctgccaccacgcttggctaatttttttttgtatttttagtagagatgggtttcaccatgttggccaggctggtcttgaactcctgacctcaggtgatccacccgcctcgccctctaaagtgctgggactaccggtgtgagccaccgtgcccggccctatctgtataatctttctacctgttctgtctaagaaccttgactagtacaga

SEQ ID NO: 111490 - DNA, 597 bp, Homo sapiens
ctctctctgtctctctctctctctctctctgctctctcagccctggactgagttgacatcattggcttccctggttctgaggcttttagaattggactgagctatacaaccagctcccctggttctccagcttacagatgtcccggtgtggggctgctcaaccttcataatcatgtgagccaattcccctaataagtccctgctcttccagctatctatatttttaaaatttttaattmattaattatttttcttttttgaggcagagtttcactcttgttgcccaggctggagtgcaatggcacgatcttggctcactgcaacctctgcctccagggttcaagcaattctcatgcctcagcctcctgagtagctgggattataggggcctgccaccacgcttggctaatttttttttgtatttttagtagagatgggtttcaccatgttggccaggctggtcttgaactcctgacctcaggtgatccacccgcctcgccctctaaagtgctgggactaccggtgtgagccaccgtgcccggccctatctgtataatctttctacctgttctgtctaagaaccttgactagtacaga

SEQ ID NO: 111491 - DNA, 556 bp, Homo sapiens
actcccaggtccaaacttgtgttgctgccatttaaattttcttactgttaatcacatcaatcctgtgtgacagatccagaattttcttaaaatagatgttctaagcaagtaataagcctctcatcaagggccatttgggactcttcagtttggctcctctctcatccacatatcgtgtgtttttctaaaagttctgtatcatattgatttttttctgatatttattatgcagaatcattcaatcagatctatcggctgagctttaaaactcycaaccaattcacttaattagtacacgtgacaaacttttattaagacctttctttttgccagacatcatagtggatgctggggtatggaaaccaatgaaacaaaatatctactgtctagaagcttaatgtttagtaaacagcagaaaaaccaagtgagcgaagtatctatgcactgggatacttcttcagggacaagactaatttggctacccttcttatatgttttatgtttcaatagtttcgttttaattttaaaaattaagatgtaatttaaacactgtaaa

SEQ ID NO: 111492 - DNA, 556 bp, Homo sapiens
actcccaggtccaaacttgtgttgctgccatttaaattttcttactgttaatcacatcaatcctgtgtgacagatccagaattttcttaaaatagatgttctaagcaagtaataagcctctcatcaagggccatttgggactcttcagtttggctcctctctcatccacatatcgtgtgtttttctaaaagttctgtatcatattgatttttttctgatatttattatgcagaatcattcaatcagatctatcggctgagctttaaaactctsaaccaattcacttaattagtacacgtgacaaacttttattaagacctttctttttgccagacatcatagtggatgctggggtatggaaaccaatgaaacaaaatatctactgtctagaagcttaatgtttagtaaacagcagaaaaaccaagtgagcgaagtatctatgcactgggatacttcttcagggacaagactaatttggctacccttcttatatgttttatgtttcaatagtttcgttttaattttaaaaattaagatgtaatttaaacactgtaaa

SEQ ID NO: 111493 - DNA, 479 bp, Homo sapiens
tgtaagaattcttaatatgtctggatactagaccyttattagatgtttgatttataaatgctttcccccattcagtgggttgtttttcattttcttaatagtcctttgatgtataagaatctcaaaatttaggacagcagagtaaaatggaagatacaaaataactgaattttatatagatgagaacaaattctgtgtatggtcttatactatatatataagaagcagatgattattttttcttacctcttgaacattgaaccttaggatctccttcatataagtaggcaataatgtcaataaagtataaaaagtccagttgtaagaaaagtgtgcaactacgatagcccaaagtggcagggattttaaaatgggtacccacggcactgacttctgtgaagaaagctgaagaaaacaggaataattaggataaactacggctatgttaatgcttacatctgtaccgtatcagctaaaac

SEQ ID NO: 111494 - DNA, 606 bp, Homo sapiens
catagtaagaagagtaattctagacaccaaggactggtcagtccatcccatttaggtatgggggactgaggtacatagattcagagtgggtgaggctagggtaagaatgatacctgggccctgaggagggaataagttccctttatcttagaggtgaaacaaaatagaactttcacaaaggccaaagagtaatccctaaaactgcaggctgttgctagggtttctctgggtatrgcctgcaaaacccacagacttttggaaagtcttgtttggagcaaagtgccatctctgtcatagcacagtagtaatgaataaaggatgaaggacaaagccaaagggcagtttttatagggttctgcacactccagggtaatgcagagaaagcaaccaagagttttgactatcccctgaccacccccccaccacctccccgcaggagttgatagtactgagtgggctgcaagactgaaattggcttggtttcaagagggaggaggaggcagctctatgcagatttcttgtgaacagagagattggacatctctctgcaactactggcacagcttgcctgctgaccaagtggatgaagtcaaagcaaaacctgat

SEQ ID NO: 111495 - DNA, 606 bp, Homo sapiens
agaatgaaattgtttgagtttaaatatttttgctcaaattcttgttttgktttttaaagatactttaatcagttattattgatatactgtcacagtaattaccagacaacaggcatccagctattaataaccccatatttaagaaccaaggcaaaggagaagaaacggttttgagaattttttggtatttgatttaacaaagcctacatttaataaggtatgaatgatagttaagggattgccaagtatagtcttagaaaacagtggcgcactttcagcctttttgtatgtacataggatgttagatgctgttaaaaataaaagtagaatgtaacacatgaggatagagcaggcttaaatttttttttttgcatgaagctcatgcaatgacattaattgctcatgtaatattagggtagttctagccgatgaaatagtgttaaacttcaaagtcccaacctggtccaaattagaggctccaggaaggaataccatatgcatcttgatggcagtttcaggtgttggaatgagatcccgaatcatttgattctatcagtcatgatgcttggatttaacttaatatcagctttccatcctgtatgggaa

SEQ ID NO: 111496 - DNA, 599 bp, Homo sapiens
actacaatgagaatcttttttttctaacttcagcttatttagtaggttaaaatatgatatctcaggccaggcatggtggctaacacctgtaatcccagcactttaggaagccaaggcagtggatcgcctgagctcaggagtttgagaccagcctgggaaacatggcaaaaccatgtctccacaaaaaataccaaaaaattagctgggcatggttgtcgcgcctgtagtcccaaatgctcaagaggctgaggtgcgaggatcaattgaggctgagagttcaaggctgcagtgagctgtgatcacgccactgcactccagcccaaacgacagagtgacaccctatctcaattattttttaaaaataataatacataaataacatcacacacacacacacacacacacacacacacacacayaacattttattacttgttaaattgggtttttaaaattttttcaaagaatagcaaacattacatcttctttcttttttgtgtgtaaattggtgaactttttattagtatcttttgctgtctgagtcactttaattccttattcaaaatcatctagagccacatctatagtatctctttagt

SEQ ID NO: 111497 - DNA, 580 bp, Homo sapiens
tgttttcagaaatagaacttgctaaagccagtgttcccatacctgtataggtcaactaactggggaattgttgaatcatcaggactatactactatgaaaataacggatgtccatgaaaatgttcaggctctgctctttttgtggtgggactgagagctttttggtaggagtgcatttcagtaactaggaaacatataagaaggaaagagatctttgatgccatgtcataattaggctctatttgataatctgtggcatggctagtcgatatattaattttaattctaatgataaaaccagattattttagccacatggttacctgaaatagcctagaaatccttgaaaaaacatgccattccacagcatccaaaactgaccttaggaaaaattgcggtttaatgttggttccttcaccttaaaatagggatagctgttaatactgtggttcagaatgagtttttccattgattctatgtgatggcatatgattwgtagttcttattttccagctgaagtacctgattcaagtaaaatgagttagagttacccaaactaaggatccaatacagaagtata

SEQ ID NO: 111498 - DNA, 584 bp, Homo sapiens
tcaaatttggacctaggggctgggcgtggtggttctctcctataatcccagcactttgaggggctgaggcaggaggattgcttgagcccaggagctccagaccagcctgggaaacttagtgagaccytgtctctttaaaaagaaaaactggatctagcaaactaagcatttccatagcagcagtgtgaccagagcaggtgcctaacttttacaaagtttgatttcttgtctataatagaaaggaagtaatacctgcatcaccagctgcatttcttagctgtttctctttctttgccatcgctgtggctttgaaggctgctatctgactggccttggaagaaataaaagaaagagaatcagagatggtcttgccgatgactgtagcaggcgcgagtgggcagtggggaataattgcaggaagcagggagggaagggaattaaaatcagacgggaagcctctgtatgagatgaacttatatgatatctgaaggtcaggatcttacatgggaaaggaacaggagcagaaaaatgagtgtctcctacgtgatggggctctgggtgtgatttatgagggagaccaaatg

SEQ ID NO: 111499 - DNA, 584 bp, Homo sapiens
tcaaatttggacctaggggctgggcgtggtggttctctcctataatcccagcactttgaggggctgaggcaggaggattgcttgagcccaggagctccagaccagcctgggaaacttagtgagaccctgtctctttaaaaagaaaaactggatctagcaaactaagcatttccatagcagcagtgtgaccagagcaggtgcctaacttttacaaagtttgatttcttgtctataatagaaaggaagtaatacctgcatcaccagctgcatttcttagctgtttctctttctttgccatcgctgtggctttgaaggctgctatctgactggccttggaagaaataaaagaaagagaatcagagatggtcttgccgatgactgtagcaggcgcgagtgggcagtggggaataattgcaggaagcagggagggaagggaattaaaatcagacgggaagcctctgtatgagatgaacttatatgatatctgaaggtcaggatcttacatgggaaaggaacaggagcagaaaaatgagtgtctcytacgtgatggggctctgggtgtgatttatgagggagaccaaatg

SEQ ID NO: 111500 - DNA, 576 bp, Homo sapiens
tcctgctgtgcactacaagcactgcctttgggggttatgcagggtgaggtgacaacttttggcagtgccaaaaatgcttaactgctgaggttaagctagaagctctgggtgaatgttgcctcaaaayggctgctggcacccaagccaaattagccaaggaatcaattaccctcaggtggctgccacagagatatcaccaccaaagctgctgagagaaaaacctctggtcaagccagacttctgatgatacaaaggaacagaatacacatctatctcctgggtcattgtttcccttcctcaattttcagcctgcgggacacaggcagtttcagctggccccaagttagcagcccttccagcacctgggcatcatttcctctattcagataccttatctggaaataatgaaagtttaatacgaggcaatcagaccccagggatttccaaatgatacctgatggaaagaggtcttctggggtcacagacacaatcactgcttccttcagacctgtgattgctcactgctggggatgattgggatttgcaagttgattaaagctggagatttagtgtctg

SEQ ID NO: 111501 - DNA, 551 bp, Homo sapiens
gaattctcccttatggcctccataaggaacacaagcctgctgacatcttgtctgtagatcattggtacccacccagaacagtaagataataaatttacattgtttttaagccaaattcataatagtttgttatagcagcaattgaaaattaatagtgtggggttttaaattatctttctyatgacatagcttaaaattctctgagcaaacaggaacctttgggagacccaagggagaataatttgcaaggagtctgagacacattgacactgatttttcttatttcttgaaagcagatgggattaaccaactatgactttgattcttaacaaatgccaaagtctctgggcccattccaggagatgagctgtattttgcaatcaagcaggagaatctacaagtctcctgtaaaactcacttgtgttaaaaagcatgcttgcttgcttctgggatatgtatagatttctgtttagaggaaagcgtatccatctgcattcgaaagaagatagaaagaagcatggctccttagtttctgccctacatgagacaat

SEQ ID NO: 111502 - DNA, 541 bp, Homo sapiens
caatgaagggatattcttggtcagccaatctggcttcccctggttctgctaagaaaaaggacttcacataggaaggttatgtcttgttttctcttataagagccagcttggactaaacacttccctttctttcaggactttaccaaagggtacaagaatgagctaacacactccaagactgtgacatttttctacgtgagtcaaggctgaacttccatgttattgtctcctgtatacagagcaggaagctaagactcaaagagattaaatagcaattccgatcagtaaaaagcagagcacagacatgaatgagtttatcctatttcaaaattattattcttttttaaatttcatctttatwacttttttatttctaactacagaagtaagtacataagcatgacggaaaaattggaatatacagaaatgtattttatatttcttttcagtctctctttcagaacacacaaaaacacatgtagtatttcatcaggatcggtcataacatgttctttccacttctctacaaaggtacagaatt

SEQ ID NO: 111503 - DNA, 596 bp, Homo sapiens
aaccttctttatgatagaccatatatcaagccacaaagcaagtctcaacaaatctttaaaaaattaaagtcatattaagtatcttctcagaccacaatggaataaaactggaaatcaataccaagagaaactttggacactatacaaatgcatagaaattaaacaacatgctcctgaataatgattgggtcaatgaagaaattaagataaaatgaaaaattttcttgaaacaagtgaaaatagaaatacatccccaaacctgcaatatacagcaaaagcagtgctaaaaggttgtttacagtattaaatgcctacatcaaaaaagtagaaagattacaaattaacaatataacaatgtacctcaagtaactaaaaaagcaagaacaaactaaacccaaaatttgaagaaaaaaataaacaaagataagattggaacaaaatagagactagaaaaatacaaacgagaaacaawattaataaacattgttagactaatcaaaaaaaggagagagaagacccaaataaatgaaatcagaaatgaaaaagtacacattacaactgataacacagaaatacaaaagatcatcagagactac

SEQ ID NO: 111504 - DNA, 569 bp, Homo sapiens
aacatttttctcacttctcctggtctgccatagtcttcactatcattgcttctcagttctcctgccctgtccctagtttttctcatgaatactcatgaaggcctgtggaaaagaactggttgtggggagaggagtgggtgggtcccctttcatttggggatctcaggctaaacctgtacatatatggtcttaaaatttgctgaaaagttagcaagtttcttcttaccttcatctaaagtggtttcttgatatatattttttcccattctgtaggttatctgtttactctgctgacagtttcttttgctgtacagagctctttagttaaattgggcccatttgtcaatttttgatttcattgcaattgcttttgaggtcttagtcacaaactctttccaaggtcaacatccagatatgtgatccccatattttctagaattcgtgcagtttgatatcttacatktaaatatttaatccatcttgcattaatttttgtatatggtgaaaggcatccaatttcattctgcatatagctatccatatagtctaacaccatttattgattaggc

SEQ ID NO: 111505 - DNA, 648 bp, Homo sapiens
gagggcagaattccgatttcttgtctcaatttcatttgtttgggttattttgctctagactctgggagagttttggaggccagggctggctggtttgtgggataccctggtttaagcctcgtgcttcttctgcattcctccctcttggcagtacggctcatgggagaagcccacctctgaagcccatagagaaatgcagagtgtctctacggaacccactgtagtaactgaaatgttataatggtgggcatttacagaggctctgttatcagtgaggcactttacatatgcatattcagcctttacagtamccctgtgagatacgtattattattgctgttttgaggatgagaatactgagatgcaaaaagattaaagtatctgtagccagtgagtatctgagctggggttagaacccagttctgttccttggaaagattcttactcttctcatataccctaataagggcctggggaaggaaaggatctgagttttcaaaaaagcttgaaaatttgcctaacatgaatcttgggaaattatttctaggggcttcttaccagattagctctgtttttctttcgcagaggcccttcagtgttggctctttggtagaatgagcatagaaatgtatttttttcctacaaata

SEQ ID NO: 111506 - DNA, 508 bp, Homo sapiens
tattataattggaaatttttgtaaacttatatgcccccccmaaaaaaagtgtagtgaacgaaaagtttttgctgtctatactaaaaacctcaccttccaagaggaatttagtctatagctgagctatacccaaaagatttcttttttagatggtgagaacaagctgctatcaagtacactataaaatggaaggatttagatgattctggcaccaagggtttaactaatgtttatggcaggagggaatgactgtatttcttatatcatattcagttatgtataataaagtctattttggatctagctaccctctgaccatgtttttctgttgttgctgctcctgtccatgcaaatatgctctatggcattatatagagagaagaacaaaatctggcatttcatgctagatttagaagctgcctgttcccctgttgcagtgctctgagggggtgtttgaactctgaaaccctgaagactgattccctcaaacagactctctctgtatctc

SEQ ID NO: 111507 - DNA, 508 bp, Homo sapiens
tattataattggaaatttttgtaaacttatatgccccccccmaaaaaagtgtagtgaacgaaaagtttttgctgtctatactaaaaacctcaccttccaagaggaatttagtctatagctgagctatacccaaaagatttcttttttagatggtgagaacaagctgctatcaagtacactataaaatggaaggatttagatgattctggcaccaagggtttaactaatgtttatggcaggagggaatgactgtatttcttatatcatattcagttatgtataataaagtctattttggatctagctaccctctgaccatgtttttctgttgttgctgctcctgtccatgcaaatatgctctatggcattatatagagagaagaacaaaatctggcatttcatgctagatttagaagctgcctgttcccctgttgcagtgctctgagggggtgtttgaactctgaaaccctgaagactgattccctcaaacagactctctctgtatctc

SEQ ID NO: 111508 - DNA, 508 bp, Homo sapiens
tattataattggaaatttttgtaaacttatatgccccccccaaaaaaagtgtagtgaacgaaaagtttttgctgtctatactaaaaacctcaccttccaagaggaatttagtctatagctgagctatacccaaawgatttcttttttagatggtgagaacaagctgctatcaagtacactataaaatggaaggatttagatgattctggcaccaagggtttaactaatgtttatggcaggagggaatgactgtatttcttatatcatattcagttatgtataataaagtctattttggatctagctaccctctgaccatgtttttctgttgttgctgctcctgtccatgcaaatatgctctatggcattatatagagagaagaacaaaatctggcatttcatgctagatttagaagctgcctgttcccctgttgcagtgctctgagggggtgtttgaactctgaaaccctgaagactgattccctcaaacagactctctctgtatctc

SEQ ID NO: 111509 - DNA, 508 bp, Homo sapiens
tattataattggaaatttttgtaaacttatatgccccccccaaaaaaagtgtagtgaacgaaaagtttttgctgtctatactaaaaacctcaccttccaagaggaatttagtctatagctgagctatacccaaaagatttcttttttagatggtgagaacaagctgctatcaagtacactataaaatggaaggatttagatgattctggcaccaagggtttaactaatgtttatggcaggagggaatgactgtatttcttatatcatattcagttatgtataataaagtctattttggatctagctaccctctgaccatgtttttctgttgttgctgctcctgtccatgcaaatatgctctatggcattatatagagagaagaacaaaatctggcatttcatgctagatttagaagctgcctgttcccctgttgyagtgctctgagggggtgtttgaactctgaaaccctgaagactgattccctcaaacagactctctctgtatctc

SEQ ID NO: 111510 - DNA, 619 bp, Homo sapiens
gatacttgaattttttttgtatatatttgtaggtctgaaggactagtgggcttcattgtaggaaactgtgtgaggacccaactgcttcattgagggaccatcagtggtcagtatttatgtctttgttgggtgctgttgagtttttccagaaaagactattctaaccacttacttgagcatattggtttaacaaagggtgttcttgcaatggagtgaaattaagaaggttgaggcattggattaaacagtaactttccagaatggtacctctcccccacttttcctctgtgccaggtgtgctcaaatctggatgctcttgaattcaatttccatgaaatgaactgctgggaagargccaatatgtaaacacttccctcaaggactttcagttttctgtttgtgccacacctggccttccttggtttctagtatcaaaatgtatgagcctttccaagttcttgctgcacgatgcaggttgcttctccttgtatcacccacgttccaatagtttgtggataactctgttccctgatagcttcctttctttctctttgtgcttatgggttcaactttactctaatttgaatgcaatttctggaaccagcacagaaaaaattgc

SEQ ID NO: 111511 - DNA, 626 bp, Homo sapiens
cttgagtttcccacatctgagctttgcatctgtggcgacttatttgcctgagaaaccatttttctcctgtctgctaatttgaatagtatgaggacggcctcttcctccaaggagcctcttcagattgccccagggctcaatggtttccttttattttgaattttctaacttacctatggatcacacacctggcttctgtgaataattggggttttagtctaaataattcctctgcaaggaagcttcccttgactaatctatctaggacaagttgtctcccaacctatttgctaccacgttatcctgtttcaaccacagcacctgctacactctaacacttccatgttcacagttatctcyccagttcacctccctgctggagaatgtcacctctaagaggaaggggaaattgtgttagtgatgttgtctgcatatgtagtaaaaattgatactcagtacatatttactgaaaaaagtaaatgaacaataacacttagtggctgtatctccttaggcaccatttttatcactttgtgtacacttactaatttaatattcacaaaaaccctatgatgtatattgtactatggacatcatttacagctgtgataactaaattgcacagc

SEQ ID NO: 111512 - DNA, 601 bp, Homo sapiens
ggggcagtaacatgcttagagtggtcatctcctaggataacaatgccttcttctggatacctcttgaaggacctgcctgaagccgtttcacagttaacttaaaaaaaaaaagtacagagtacactctaaaatcacaataaaaagtatggcatagtaaatatatgagccagtaatagtcatttattatcatcrtcaagtagtctctgctgcacataattgtatgtgctagacttttttttttttttttgagacagagtttagttattgttgtccaggctggagtgcagtggtgcaatcttggctcactgcagtctctacctcctgggttcaagcaattctcctgcctcagcctcctgagtagctgggattacaggcgcacgccaccatgcacggctaatttttgtatttttaggagagatggggttttaccatgttggttaggctggtctcaaactcctgatcttgtgatcctcccacctcggcctcccaaagtgttgggattacagatgtgagtcaacgcacccagcccatatgtgctagacttttaagagactgccagtgcagtaggtttgcttacactagcttcaccacaaacacatga

SEQ ID NO: 111513 - DNA, 601 bp, Homo sapiens
ggggcagtaacatgcttagagtggtcatctcctaggataacaatgccttcttctggatacctcttgaaggacctgcctgaagccgtttcacagttaacttaaaaaaaaaaagtacagagtacactctaaaatcacaataaaaagtatggcatagtaaatatatgagccagtaatagtcatttattatcatcatcaagtagtctctgctgcacataattgtatgtgctagacttttttttttttttttgagacagagtttagttattgttgtccaggctggagtgcagtggygcaatcttggctcactgcagtctctacctcctgggttcaagcaattctcctgcctcagcctcctgagtagctgggattacaggcgcacgccaccatgcacggctaatttttgtatttttaggagagatggggttttaccatgttggttaggctggtctcaaactcctgatcttgtgatcctcccacctcggcctcccaaagtgttgggattacagatgtgagtcaacgcacccagcccatatgtgctagacttttaagagactgccagtgcagtaggtttgcttacactagcttcaccacaaacacatga

SEQ ID NO: 111514 - DNA, 601 bp, Homo sapiens
ggggcagtaacatgcttagagtggtcatctcctaggataacaatgccttcttctggatacctcttgaaggacctgcctgaagccgtttcacagttaacttaaaaaaaaaaagtacagagtacactctaaaatcacaataaaaagtatggcatagtaaatatatgagccagtaatagtcatttattatcatcatcaagtagtctctgctgcacataattgtatgtgctagacttttttttttttttttgagacagagtttagttattgttgtccaggctggagtgcagtggtgcaatcttggctcactgcagtctctacctcctgggttcaagcaattctcctgcctcagcctcctgagtagctgggattacaggcgcacgccaccatgcacggctaatttttgtatttttaggagagatggggttttaccatgttggttaggctggtctcaaactcctgatcttgtgatcctcccacctcggcctcccaaagtgttgggattacagatgtgagtcaacgcacccagcccatatgtgctagacttttaagrgactgccagtgcagtaggtttgcttacactagcttcaccacaaacacatga

SEQ ID NO: 111515 - DNA, 577 bp, Homo sapiens
tcttcaagaagtgataagtataaagcatttctactgaatgggtattgtgttaaacatctgcagtatcaccagaacctggggatatttaattaaaaacgcacacacacaagataataaggagggaagggcgactccccttgtatgggggtttctaattcctgatagtaggtttcttttgctgtattgctgctaattaaatattccatagaaagtcttgcattgatcttgaaaggtacagttaaacacattttaaaatttatgtatggctttgtgtgtatgtgagtgtatgtttaataascttaaatagtttaggcattaaagcagtcataaatacaacactagagctagttcagttcctcggaaagcaaggttatactggggagaaaaacttgttttgagataagaagaaagaaaataaaaaatataaaaaaaagcattatgaaaacggtgttatgaagctaaactgggaagcttaaataatcattcctgaacaaaggaatctgcatcacaagaagcctgccagaagttgagtgctcatttgaagagaattcttaaaggctatttctgccaaggaaag

SEQ ID NO: 111516 - DNA, 577 bp, Homo sapiens
tcttcaagaagtgataagtataaagcatttctactgaatgggtattgtgttaaacatctgcagtatcaccagaacctggggatatttaattaaaaacgcacacacacaagataataaggagggaagggcgactccccttgtatgggggtttctaattcctgatagtaggtttcttttgctgtattgctgctaattaaatattccatagaaagtcttgcattgatcttgaaaggtacagttaaacacattttaaaatttatgtatggctttgtgtgtatgtgagtgtatgtttaataagcttaaatagtttaggcattaaagcagtcataaatacaacactagagctagttcagttcctcggaaagcaaggttatactggggagaaaaacttgttttgagataagaagaaagaaaataaaaaatawaaaaaaaagcattatgaaaacggtgttatgaagctaaactgggaagcttaaataatcattcctgaacaaaggaatctgcatcacaagaagcctgccagaagttgagtgctcatttgaagagaattcttaaaggctatttctgccaaggaaag

SEQ ID NO: 111517 - DNA, 577 bp, Homo sapiens
tcttcaagaagtgataagtataaagcatttctactgaatgggtattgtgttaaacatctgcagtatcaccagaacctggggatatttaattaaaaacgcacacacacaagataataaggagggaagggcgactccccttgtatgggggtttctaattcctgatagtaggtttcttttgctgtattgctgctaattaaatattccatagaaagtcttgcattgatcttgaaaggtacagttaaacacattttaaaatttatgtatggctttgtgtgtatgtgagtgtatgtttaataagcttaaatagtttaggcattaaagcagtcataaatacaacactagagctagttcagttcctcggaaagcaaggttatactggggagaaaaacttgttttgagataagaagaaagaaaataaaaaatataaaaaaaagcattatgaaaacggtgttatgaagctaaactgggaagcttaaataatcattcctgaacaaaggaakctgcatcacaagaagcctgccagaagttgagtgctcatttgaagagaattcttaaaggctatttctgccaaggaaag

SEQ ID NO: 111518 - DNA, 564 bp, Homo sapiens
ggactaaacactctggattgtgtcatagtacaattctgaaaggtaaagagaagaaagcagatgagctagggtcctttggaacttgaggaattacttggtggtaaattccctaggattcctttcttttcaccttctgtatcccagacttaagtctgaagaaatcagcaacctgcaaatatcaatgattacagacaaataaaagctccaacaaaagcttgctttmtacagtcaaaggatgaagaaagggggagactagtaatatagaaaacttttggacaatagcaactctactctaacaaacaccacatagtaaaactgtctatacccctaccccacctgtaaagggctcatgaggatctagacttccatcctcaccagggtaaactgaggtctcaccagggtaaactgaggtgccccaatcactcatctgggttgtattagagaagtctgagttggggcttttatcctcagtggatgttaataagccctcatctttttataacgtcagtggagcccaaatggggaaactaaattccccccactgccagcagtaatgaggtatcc

SEQ ID NO: 111519 - DNA, 574 bp, Homo sapiens
aagcaatttatagaaaaacacattcatgtttacctggggagaagtgactcaggttacagcttccagattccagccttagtgccttaaatttaattaatggagcatattgcttggtattaagctgcatcaagataggctgtaatgagatgtgctattgacagtgacttttctatttcagcagaacagttcagatgaaagcacttgtttgaaaggaaatgcacttggtctgaatccccttctactccctttccttggaaccagatgtctgtattctcaagatccattttcattttctgtgtcccttccctttgtcttcattgccaaacaactttataagtgggtacagtccatcagtctaagagggaaagatctcagtctggattctgttattattttgaggagtcccctctgatgtcttaaactccattttttaacaacccttccagcctttgcactcycacactccacaaaataataatagctgatacctattggacatattttcaaccagaataaaattgagacctttatgtttagcatcttttaagcttgtaagacaccttgataggatata

SEQ ID NO: 111520 - DNA, 618 bp, Homo sapiens
gctcaagaaacaggcttaagtttaaatccctgttctgtcatgaaaccttgaaacaattatatcacttttttagaccttagatctttcatctgaaaagtgggataatattagttattattttttaaatgagaaagttgatacagaatccacagtgtttaacaagcagaatgagctaaataatggtgaactacattacatataataataaataataattagctcactttaatttgccaagcactgtgaaatctgtggttattgacctgattatggatgtggcctaagcttcccaaatcccagcccagtgcttttctaccacctgtgtttcctctaacatcacagaggcaacttgactctggttcctgtgtgtgaatgggagctcaactcttaccaggtccatccacattctcagagtttccataaagagatcagaacrtttctgttggagatggtggactggccacaaggcttacctcctctctttcctcagaatcccttaaaattatatatatactgaaccaaaaaagatataaatctgtagtaacaaagagaatacgttcatcagtagataagaaatgataacacaattgcaataattggtcaaatagataccagttt

SEQ ID NO: 111521 - DNA, 618 bp, Homo sapiens
agttaatttaaatgaaaattttaaaaggctaagaataaatagggtcttattgaaaaaaataaaataaagtcagaggatttaatctaccataattcaagatttactataaagttatagtaattaagatagtgtagtatgagtaaaagaattaaacaaatagatcaayggaacagagcagtgactccaaaagtgtgtgtgcatttgtgcatgtatgtgtgtgtgtgtgtgtgtgtgtgaactagttttttaaaaggcaccaaaacaattccatgggcaaaggaacgtcttttcgataagttatatgtaagtaactgcacatctacatgagaaaaaataatcattcactcctaccttataccatatacaaaaattaattcaatataggtcataagcttaaatgtgaaagttaagactataaatctctagtagaaaacatagaagaggatctttaaggtcttggggcacaaattaatcccttaagacacaaatgctctacccattaaaggaaaaaaaccaatttcttataaatttaggccttttgttcatcaaaggacagcaccaaaatcagccatggagtgaaagccgttatttgtaatatatatgtcagacaaaaagcct

SEQ ID NO: 111522 - DNA, 579 bp, Homo sapiens
ggctctgggctcaatggactccccctctcttttctttgaaatatccaaatcgyggccatccctgcaggaaaaacaccagcctgcatctctgcagccacttcctcgacacctgaattttgatgggtcacttttacatgtggttccaagcaccaagtgagcgtttggcttccattaagggcaatttgtacatgtttttctcttttaccccaatgagtgttcttcacccatgtcacctcctcaatcccctgggcgtgtgctggcatcactggaggtctttcatctcggctgtgaggacaggacagcagccctcatgacacctgcagaggtatccagggaagcctctcctctgctccagcactgggcaagccttgagtctccacattctgcagaaaagtccattttggtcactgagggagctggaaggggaagatgaaagagatgttggttctggcagggtgcccagcacatgcagagactacagggaaaaggcctctccttaggaatgagagggacacccaaggctctgcatttgtggccacctggcatagctcactggggccaagaagaaaaaaacaccag

SEQ ID NO: 111523 - DNA, 579 bp, Homo sapiens
ggctctgggctcaatggactccccctctcttttctttgaaatatccaaatcgcggccatccctgcaggaaaaacaccagcctgcatctctgcagccacttcctcgacacctgaattttgatgggtcacttttacatgtggttccaagcaccaagtgrgcgtttggcttccattaagggcaatttgtacatgtttttctcttttaccccaatgagtgttcttcacccatgtcacctcctcaatcccctgggcgtgtgctggcatcactggaggtctttcatctcggctgtgaggacaggacagcagccctcatgacacctgcagaggtatccagggaagcctctcctctgctccagcactgggcaagccttgagtctccacattctgcagaaaagtccattttggtcactgagggagctggaaggggaagatgaaagagatgttggttctggcagggtgcccagcacatgcagagactacagggaaaaggcctctccttaggaatgagagggacacccaaggctctgcatttgtggccacctggcatagctcactggggccaagaagaaaaaaacaccag

SEQ ID NO: 111524 - DNA, 570 bp, Homo sapiens
gatatggaaattatcctccatttacatgaggagtctgaggcttaagtgagtttccccaaagcacacaactagcctcttacagctgagccaggattaatttctaacagaaggatttatctaagctgggagatttaaaattttactttagcagcagaatcctttaccaaatgaaaacttatgaaaaatcaaatacacctaacaagatgaaagcaaagctgtcctggctaaatagggagaagtggatggtgaggaagagaaagggcttcacagaagagaggcggcaagctgctgatttgggccactggtccagtccagtcccctctgcttccagatgagggagggagacccatagackgggttgaaacgactcacctgaggtgagccctgagactgaagtatggctcttccatgctccacaagggcgctttcaaatcattcaccatagatttacctgtgaggacgctgacattgacttggttgaacattatggatgttcaaccaagcatgttcaaccatatgcttacctgcatgtggtaagcatgattcaaggagctgatgaaacaacagtaa

SEQ ID NO: 111525 - DNA, 644 bp, Homo sapiens
tttctctggtgtaggtaggaagatttgagggagagcagtgaggaagtctacctcttctccatcccctgcaccttcacaagacatcaactcaggatccagatgcttagagggagtctaaggctctaaatatgtatttgtggaatttggcaatattcaatttttcccctatatccaactggatcatcaatcttaaaaattagcaacgacgggcccagatttagaaggaagtgttcttcaatcccatttttattgtttggacatggctttattgaggtgcctctttgggtgttataatttgggtttaaagaacagagatttcagggggtctcagtgtttaaaatacatagacctacaaagggaggtcacttagatgccttggccatgaccagcttttccracaggtttggtccaggactatgtcaagattcggtcagattttgagtagccctgctcaattagttatggatgataatttggatagctcagaaatttaaataccatgcataaatttttggctacttgcccaggtcttcgactttaaattattataatagtatgtagacgaagctatttccagcggtagaagggctgatacttttgttaggcaccaaaaactttcctgggaaaacaggcgacaagagttc

SEQ ID NO: 111526 - DNA, 560 bp, Homo sapiens
acatagacctacaaagggaggtcacttagatgccttggccatgaccagcttttccgacaggtttggtccaggactatgtcaagattcggtcagattttgagtagccctgctcaattagttatggatgataatttggatagctcagaaatttaaataccatgcataaatttttggctacttgcccaggtcttcgactttaaattattataatagtatgtagacgaagctatttccagyggtagaagggctgatacttttgttaggcaccaaaaactttcctgggaaaacaggcgacaagagttcaaatgggataataggggacaagagtttggattggcttttgtttattctggagagtaattcacttttaccagagcatttcttggcagctgattctgttaggtgagaaagtggaccagcatgatgatattggatgtccatagaagaaaagaaagggtgagggttgaaggcatgaggcgaaaaggactgctggaaaggataaaagaaaggtgcagggattctgaaaataaacttgatgaagttgactaccacattttgct

SEQ ID NO: 111527 - DNA, 395 bp, Homo sapiens
cggtgtgatcttagctcaccacaacctccacctccygagttcaaacgagtctcctgcttcagcctcccgagtagctgggattacaggcatatgacaccatgcctggctaattttgtatttttagtagagatggggtttctccatgttggtcaggctggttttgaactcctgacctcaggtgatcctcccggttggcctcccaaaatgctgtgattacaggcgtgacgaccacgcccagccaggaaataggcgttgttgtatcaaattcttttaataagagggcaaatgaaaattctaactccttaaagtagacactgtcagttacttccgcacatttatttcctgcctccctctctccattcttcctggctgtcagagtcctgagttgcttggat

SEQ ID NO: 111528 - DNA, 617 bp, Homo sapiens
aaagttccattcaaccagcacgttgctttttccttatggcctgctacaatgcatgactgcttcaccagttttctatttaatgtttatcaacaaattataccctctgtaaatttccatgttcatgtttggtcatctcccaatttgtaaatatggtatatttcaaatattcattcataaattcagttaatacccaaaatgcattatttctggtaacaatattataattatgtatatagaatcaagccaatgccaaaacttttgaacaatattatttggctatatggagccaaaccattataacatgtttactctgggaaatacatttatctttcttttttctttattaatatactttaagttctagggtacatgtgcacaacgtgcaggtttgttacatatgtatacattaggagatttatctttctaaaatgttaacatatttctaaaactatagtgacttggatgtaagcaatgtataagtagtaagaaaatacatayatttaaaatatatatatattatcattagcagcagctcctcccaaacctgatgctactccatccagtttgtttttaacaaaacaatttcaaatttcttatcatactgggagtccccaaga

SEQ ID NO: 111529 - DNA, 601 bp, Homo sapiens
ggtttacatgataaatgatatgctaaagaaataaggacaaaaatcattctgtagctgtgtattagtgagagttaattttctctgtaagatcagaggaagaaaacagtggatcttcaaagttaacatcccttcytttttaattttctctttagattatcctcgatacttggataatgtccatatatggtgagtttgttaaataatatgctttcctcatctctggaaaaactacataatgaatctttattctgatactgctgtcattaggtgtattatctttcttgtgcttaacctatagatgcacacttttccaccccttttgttttgttttcttgtggattctcctttacatatattttgaataggtaatgcagtcataaatatggtgaatgattgcttaggatactaatcatttcctcctccacgtgattgagagtagaactacatttctcctcccaacaggtgctgattttggccatgtaactttattttatgttatggtgagtagattaaatctctgaaattttaggctttgtcatgtcacttgctttaatcaaataaatatttactggtgtgacacaagcaaacacctgaagcttac

SEQ ID NO: 111530 - DNA, 666 bp, Homo sapiens
cctgactattctcaactcctgtccttaagtgatcctcccaccttggcctcccaaactgttgagattaccggtgtgagccatcataaacagaaataatttatttacttatttattttattttatttattttcttttttagagacaagttctttctatgttgcccaggcttccttcaaactcctgggctcaagccatcctcctgcctcagcctcagtacctgggaccacatgcacatgccaccatgcctggctaaagacattttataaggagattcttagaaactttcagggaagtaaaayacaaaaatgaaaacaggatgctaacactgagtgtgaaatcaattttatttcatgcagatgacaccactctttgaattacaggaagagcacaaggatgtacataaatataactaatgttctccagagacctgaagaagaacaattaaacagatcaaagcaggaaaatcataaacatgggcaccagatgcaaaagtggcactatgacatgtggaattcagaaacgagctcaaggagaattattggagtgcactttataaaggagacaattatgcaaaataaaataaaatatggaaaaggaaaagaaaaataagtgaagaaactaaggggaaagctggtattggaaaataacactaggctgactgtacgg

SEQ ID NO: 111531 - DNA, 666 bp, Homo sapiens
cctgactattctcaactcctgtccttaagtgatcctcccaccttggcctcccaaactgttgagattaccggtgtgagccatcataaacagaaataatttatttacttatttattttattttatttattttcttttttagagacaagttctttctatgttgcccaggcttccttcaaactcctgggctcaagccatcctcctgcctcagcctcagtacctgggaccacatgcacatgccaccatgcctggctaaagacattttataaggagattcttagaaactttcagggaagtaaaatacaaaaatgaaaacaggatgctaacactgagtgtgaaatcaattttatttcatgcagatgacaccactctttgaattacaggaagagcacaaggatgtacataaatataactaatgttctccagagacctgaagaagaacaattaaacagatcaaagcagsaaaatcataaacatgggcaccagatgcaaaagtggcactatgacatgtggaattcagaaacgagctcaaggagaattattggagtgcactttataaaggagacaattatgcaaaataaaataaaatatggaaaaggaaaagaaaaataagtgaagaaactaaggggaaagctggtattggaaaataacactaggctgactgtacgg

SEQ ID NO: 111532 - DNA, 600 bp, Homo sapiens
atgccaaaaaaaatgttttattttaaagaatgagcctattagcccttgcctgagatcttttcacagctattcatccagtcattataggttgttagccttgccaaataatacttaagaaatatgaaatttgatagaggatataatcttctaaagcaacaatttgttttctttcaaccaaagaaaactgggtgtggtttattcttcattcattcattcattcaatgaacacttatctactatatgccagtcactattctaggaattggaaaccaaayagaaaatacctccagctcttacagagctacattctagtagagggaaacagagagtagataataaacataataaatcatttaattagaaagtgagtgctcaaggggttggggtcattaagggaggccccactgagaaagtgacatttgaacataagacttgaggaaggatagaggttctaagccatgcagatatacagcataaaagcatttcaggcagagagaatagcattgcaaatgttcatgttaggaatagcaaggagggctttccatctgtggtggagatgtaggagatgaaagcagagataaatatggtggaggatagagc

SEQ ID NO: 111533 - DNA, 652 bp, Homo sapiens
agaaaaagctctcagcagagagggaagaggtttgcctgctgatgggctgagttcaggatttttacagactgggaaggacagggagtgtgcagacgggtccgtgggccattttggataaaggacgattcagaaagagaaatgtaaatgtaaagaaccaattggaggcagaagtgaagacttggcttgaaaccaatcaggggatggagtgacatttcattctatgcaaatgaagactcacctggcagccaatcacagaaagataggtatatgtaaaacaggtggaaggtaagagccaatagggaggaagtgcacacaatgggayaaagacatgctgaggggagagaaacatgcccaaaacaggagtgaagtttgttcatctgggctcacagagtgggtgtttgcatttatggatgtgggcttttgcttatatggtgcctgtagtttgattttcaggctgttgttggtttggaggagttctaatgaggacccgccctaactgcctgcctaactggtttctttcttcttcctctctcattagcattttctttatttaaatctttgaaaaatttgttgccaacaaaattaccatatattttaataaaataatcagtatgcaatgatttgtctgtttgttattatgtttgtattgctt

SEQ ID NO: 111534 - DNA, 592 bp, Homo sapiens
attagaactacaaaatgagcatatttgtgtctctgggaaatataaagaatattcatcaaactctgattttaaaactggctttttgttcacttttttctttaaagaagaacttatttattaatagctttttattttaataggaaagacactattataccaataccaaacatttaacattgaaatgctgtaacttgtgtgctttagagaaaacatgaagagaatttctaagagctaaatagcactttcccatgtgcttcatgcatcaaagggtaccctggaaaatacattttgcatgtgcaggcatgctccagagaagatttgaagagayacgtgataatgcatgctgcttatttccaagctgaatctcaatgctttactaaaaattgaaaataaaaaggaaatgtaatatttttccacatctccagtaaaagaagtatgtttacagatttaaatgcaactttaaaatcattgtttatattaacacatgttaatcatgaaatataaatttctttaaaaggacgtagtagttcataatagcaatgtgaatgcacaaataactagaaaaaccacctctctcggctgaaaaataaaa

SEQ ID NO: 111535 - DNA, 499 bp, Homo sapiens
ccgtccctggtgccaaaaaggttggggattactgatataaagaaccaaacacacacacacacacacacacacacacacacacacacacacacacaccaggaaaactggggaaatcttaatatgattggtgaattctgtyaatgtcaatatcctcattgtgatactgtattattgttctacaagatgttactattggggtaactgggtaaagggcacctggatcctctcatattatttcttacaactgtatgtaactctataattatctcaaaaaaaaagtttaagcacaaaaactaataaaaacataaaagattaatagttttaaaaatgttaacaggtatggatcttgctagataggcacttaataatcacagtgtaaaagaaggacagaggagactagagagagaaaaaatgagttgcttgcttcagtcagagaaacatatgagagaacttctcatttccatattgtttttttgaaagagaaaggtagctggtgcta

SEQ ID NO: 111536 - DNA, 591 bp, Homo sapiens
tgtattctttttaacttctggactctggtatgttttggctgctctgctgctgatgcacgggagctaattaaaatctgaagaatttttagtagcattgcttgctaggggtataaagctccattttctccatcccaaaagtgtttagaccttgagaagttcattggttgtgcctgggtttgcttggtgggtcctgggtctctagtatatgtcagatgacaaaatatgttgtgcttttcatggctcctgaaaatgtccccttctgcccctctccccctgaattttatttcttttcatagttattgtttctctcacttactgcaccttggtctcacaatttgaaacattttccagtacatatggctttaaatgtcaggccttccatggaattacatctgcctgtcagcaacacagcggtaagtcttgcctccttttctggcaggacctggggactactttttttttttttttttaactgtacttyagcttggtcacacataaatatttatcccgttctctgacacttactttgaaggcttgcctggacaaagaatggagtggcaggtgtttgctgcttcatgctttgaggctaaa

SEQ ID NO: 111537 - DNA, 583 bp, Homo sapiens
ctgtgagatgaatgcacatatcacaaagaagtttctcagaatgcttctgtctagttcttatgtgagggtatttcctttcacacaatagtcctcaaacctctcacaaatatccctttgcagattctaaaaaaagactgtttmgaaactgctcaatgaaaagaaggtttaaattctgtgagagaatgcacacatcaaaaagaaatttcccagaaagctactctctagtttttatgttaaaatattgcctttttcaccataagcctcaaatggttaaaaaatacctgtttgcagtttcttcaaaagactttttccaagcagcttagtcaaagcaaatattgaaagctgtgagatgaatgcactcatcccaaagaagtttctcagaaggctttgatttagtttttatgtgaagatatatcctttttcaccataggcctgtaattgctccaaatatccctttgctgattctacaaaaagactgtttccaaagtgctccatgtaaagtaagattcatctctgtgagatatttcacacatcacaaagcagttggtcagaatgcttctggctagtttttatgtgaagatac

SEQ ID NO: 111538 - DNA, 594 bp, Homo sapiens
aatttgcagcttgatgatgcaatagaaaagaaaaatccattttctgaggagaaatttaagcctgctgctgaaatttgcataagtaataaggagccaaatgttaattgccaagataatggggaaaatctttccagggcatgtcagaggtattcatggcagcccctcccattacaagctgggaagcctaggaagaaaaaaatggtttcattggctgggcccagggtcttgctgctttgtgcagtttcagggcttggtgccctgtgtcccagcaatggttaaaaggagctcagccccttgcttcagagggtgcaagtccaaagccttggtgacttacatgtagtgttggacctgcggataaacagaagtcaagaattaaggtttgctaacctctacgtggatttcagaggatgtatggaagtgcctggatgtccaggcagaggtgtgttgcaggggtggagccctcatggagaacatctgctaacgcagagcagaagggaaatgtgggatgtgagccmccacacagagtccccactgggcaatgcccagtggagctgtgagaagagggccaccattctccagatctcagaatggtat

SEQ ID NO: 111539 - DNA, 612 bp, Homo sapiens
tattaaacaaacactaattaccttggtaaaggcaatgattgcttataaacacttgtgtgtaataactatatatatatatatatatatatatatccgttaagccttgttatatactgttaaagatgctaagcgtttaatcctcattataacactacaaaaaaggtatcatcacctgcattttactaattaagaaaactgatccagggaagagccataagttcttaaatgtcacaacatactaagccagaatttttaagcctaaataatttgattctagagactacactctgacctaaaagagaacaagacccaatactacagaaattctgayatttctccttaagttcaattggattttccagctggggagacatgtcagaaataagggcacaaggctgggagtgggggctcatgcttgcaatcccggcacttcgggaggctgaagtggggggatctcttgacagtaggagttgagaccagcctgggtaacatagtgagaccttgtcgctacaaaaaaaattttttaaaaagttatccaggtatcatggcgcctgcctgtagtcccagctacttggaaggctgaggcaggaggactgcttgagcccaggagac

SEQ ID NO: 111540 - DNA, 496 bp, Homo sapiens
agaacaagacccaatactacagaaattctgatatttctccttaagttcaattggattttccagctggggagacatgtcagaaataagggcacaaggctgggagtgggggctcatgcttgcaatcccggcacttcgggaggctgaagtggggggatctcttgacastaggagttgagaccagcctgggtaacatagtgagaccttgtcgctacaaaaaaaattttttaaaaagttatccaggtatcatggcgcctgcctgtagtcccagctacttggaaggctgaggcaggaggactgcttgagcccaggagactgaggctgcagcgagttacagttgcaccactgcactctagctggggtggcagagtaagaccttgtcttggggaaaaataaataaatatatgagggaaaaggaaaggccacctcactaaaacttatgtggcatacctaacaatttggtcatttttaatataatgaaaaaattcaaaattattat

SEQ ID NO: 111541 - DNA, 530 bp, Homo sapiens
agctttctcccacttcatcccagwgtctgcatcctctgtctgattattctcaatgctttccttctgaagatctgcttggagtgtgccagccttctttatgatctgttctctcagtgggagatactcttcctgattgcgtctagttggtcatcttgtctcccccttaaaaccctttttttgaattttgaagtttcccataaggacacactcagcattatagtttaattgtatagtatgagtgcttagctaaaaatcactcacaaatccactctcaaaatgaccagttgggtctgtctttatatctacatatttatacatctatgcatttataatcctatatattaatataacttcatatatatccatctatttatctatatctattatttatctattaatctatctatattactatatatatgtctctaacctccagctctatctctagctctatttttatattagcttatttttcccagggcacaattatgtggggaaatacatcaagtcaaaataatgataataaatca

SEQ ID NO: 111542 - DNA, 612 bp, Homo sapiens
gtagccacatctgtctatgaaaggctgcagacagttcattcataatagcacggagaaagatagactaggtgggtgcagataaaagtaagtggatctatgtgctctgagggtatttgaaaatgatcttctatttcttttcacaataaaacaagaaactaggtcagcagctaaaagtgagaaaaagaaatggggtgttaggtgttcctgtaaagacaaggtatgaaaaatccatccaggraaatgggaaaatgtaaaaactaaggaaatgttgtaggattgctaggctactgagagaccaattaaggtaagtaaccaggaatttgaaatgagactgcatgattttattctgtgttgttccttcagttgcattaggcaattcaagtgacttccaaggcggtaggtcggacttagccagggtggggtgtttctaggccaatattaaaaagggtgagagaagcaaggggtttgattgtgtatgcaaaggagtgaccaaaatagactgaaaactggactaaaagtaagaaaagaaaatgagggtatgcatgggatgagacaaagaaaattcaataggaatgattttactataaatcctaatagcagtttggagttgtg

SEQ ID NO: 111543 - DNA, 540 bp, Homo sapiens
ttctccttgaaagacatttagaagataaggctaccaaatgtgagaaacaggcttggagtttagagatttaaggtgtattaatgtgattatggaggctatgcagggtagaccagtaggctggagacccagggaaaagtcaatgttgaagttcaagtttgaaggcagtatgctggcagaattccttcctgcttgaggaaggtcagtcttttgttctattcaggccttcaactgatgggatgagccccacccactttatgaagggcaatgtgctttactcaatctaccaatcccaatgttaatctcactcaaaaacgtttgaccaaatatctgggcaaaatggctcaggcaggttcacacataaaattaaacatcacaagtycatcccttgtgaacctggcatttatatgcatctccttaagccacacttagtctctaaatagagataataacaaggtcataattccacctaacatgatagaaccatcctgcatacaactgaaaacccactaaccccttccccagaagagaaggtaaagtctt

SEQ ID NO: 111544 - DNA, 546 bp, Homo sapiens
aaatcagataacacatttggattttaatatgaaccttaatgctttaacaagggtagaaatgaatatagggattcaaaggctgagatagattgaaggggaagaaaacctgactgggaagaggtgttaggatctctttaatcttcccctgcgtgggagttgactgmccattcagaagccagggcagaagtgaaggcttatttcttcttgctttcttgagaaaaacataattgatggaatccatcaaccaatactctacaacatgggagtgatatacctctttgtaaacagatatccattgagcaaatttttcccaacttcaatcaggagcaggttaggcttctcttaggtatttttttttttccacccaaaatttagaggttccctcagctatgacctgtgtttatgaataaacccatggtggtccttctgctgataaatgaagggcaacaccaatgagcctctgcctgaataccattctgtgtgtcaccactgggtcataatataccataaataacacttgctgtttgagaagctggattgaagaat

SEQ ID NO: 111545 - DNA, 612 bp, Homo sapiens
ataagttgaggaaccagtagacttaagtgaatcctggtgtttcctctttagccatgtgtccaaggactcaaggctccactttgagactctcctccttcaactgcaaaatgaggataatacctgcctccaaagtttattatgagcatcaagtaagtgtgtgcatatagacattgcccagcacaatgcagtggttgccttagtgctcmcaagattttgaggcacatgtgctaatgatttaggaacattgttatgaacttgaattagatgcaaatcatggttccaccacttattagataagtgaattcagaaagtgacttcctgagtctcagtttccttatttattacatgaggattatagtgtttactgctcagaatggttgggacaatgaggttggatgactcttagcacatgacctgtcatacgtgatgtgtccaattattattattattgctttttgctaccattgttactataattacccaaattatcatttcttcactaagccatgtttgcctccagtttattaatcttatggcatatatatatgtgtatatatacatagtacttaaaaataataatacaatcatgttattttaaaacatctgtgccag

SEQ ID NO: 111546 - DNA, 563 bp, Homo sapiens
ggaccactccctctaatctggaagaatgtaacactgagaaagtgtgaagtatcaagcaattagtccctcagtaggtgatgtgaaaataagccacaggatcatttgatgattatgtcccacatccaagagtgtatgattggaattggcatttggygcaatccccatcactcccctggctatcagaaagggcagccctgtgtccacctcttccaccatcagtgttaacctgcatagaagagccaccactgaagctcttggtaatttgggtgctcctttcaccagtgcatttacgatggactggatgaattacatgtcctctggaccttcctagaaaagaaaataatcttctagggcatcttctagactcatgtaatatgtccattccagcattcccagctctatgagcctttttgctcattcctttttttgtcttacaaggaaaatcaggtactcacacttcgccaagcattggccgttgttgtctcagggcttctcaaggccatgccaccagtgaatttgcccattccctatggtcttttacagggcattaaagccaatgtcct

SEQ ID NO: 111547 - DNA, 580 bp, Homo sapiens
ttttagcttgagagcagggtaaagccttagactgtcagatttttcacattgacaaaaagaccaataaagtttgcattgcaaattaattaggcttgaagattgatagttacagtctacaggaaataactttagacttttgagtccaagtgtatacacaaaattcttataaataatttcaaaaaacatataaatgaacatagataactggtgggatataagacatggtgtgggtataatctgaaaactgagtccctactcaaaaacaatgggtgtggatttattttacattaaatatcttaatgtaaattctcagccttcagtttcatcataaaaactttaaaattttrgtactgcttaaaaatgaaatgtctgagtaaataacctttatgataagataaaaaaaatctacttttcacaaatactgttaaacatcagttcacaatcgcttttcaaccaagaattattagccaataccaaagcataaataaatatcagaaataaaattttaacaaaggaaaaaatgctatatacagattgcaatttttataaaataaatatgtatgagttatgaccatctgtc

SEQ ID NO: 111548 - DNA, 659 bp, Homo sapiens
  misc_feature (1)...(659): n = A,T,C or G
gatttaataagtaacttactgatttttaaaaatacctctttttatcacagagtattttagttgaataatggaaaaatttgaggatagatatgttgatgctgtttgatataaatataarttaaacgagttagtataaaaagaaattataagaaattgagtctaattatcactaagaaagttgaagtttctcggtttccacttttcagccttttgtgctatcattagactattgtcaatgagtcattataagcaaagtgaagtagactgcaggtgttgctaatgatcacttatatattttcacagtgttccaaagctgtactttattacttattccagatttagctatttttattttaattggtacttttagagatttggttcccaaccagctggcatcgtccagcaggtgaagcagagaaatagcacttttgttatggtaaaagtgaaagcaaattgactattatctatcaatcacaatctgaaatagggcactgctcctatgttgactcatattttcataagataatgactgagggtattgtcctctgagaggacttttacttttaccacacanagatatattgaacacccacaaaatagcattagaagagaataagagaccctagcatagtttgatattccttgattntgatgttnta

SEQ ID NO: 111549 - DNA, 572 bp, Homo sapiens
atccctgaggaagcaacccatgcaggcatctgaaggaatagattctaggtggaggaaatcataagtgtagggcaggaaacttgcctgttttaggatccacaggttaatacagggttgttgatgtgaagagaccagaaaagcccatcggaggagattatggttcttagtgtccctcttgcaagggtactctttaagttgattaaccaaacatggacataaggccacacagatgctgttcaatatatataaatgaacagtttcctttacttgaaaatcttattttttacttaattttcgccagggaacaattcaaactgttctaatctctactgggtggagagcaggaggaggagaggatcaggaaaaataattaataggtactaggcttaatagctgagtgatgaaataatctgtataacaagcccccatgacaaaagtttacctatataacaaacctgcacttacayccctgaacttaaaagcaaagtaaaaaaaagaagaaagtctactgacattattcattctataaatatttcacaaatagctactgactgcccactacgtgagaagca

SEQ ID NO: 111550 - DNA, 539 bp, Homo sapiens
tcatttttccttttatcagcatctttttccgtctggttttacactcctatacctggagatctgggtgagatttacttacccaaagttaacaatggaattttcaatctaggaaaatatggttgcaagaaattaccacaccaaaactgtgctcatttcccaaaaagatcttcagcggatttacccacaaacggccttccctcttagccttcccaggccgctcttgtcctgaagtgkggatctggagttcccggggctgcatccggcatcctcagggccggatctcgggccccctccccagttttcttgaactagactggtccctagcagactggaatatcctcaaggcctcgtttggcttgggtttgttttccatatacgaaagataaaagaaatgggcaatctgtctctggaggtggggtgggctgctttgaagggagggcggcttcaagtgagggaaggtttcaatggttgagggcaaaagacaacaacaacacacatgcaacctcttagccgagccaaacagcaaagccccaaagagg

SEQ ID NO: 111551 - DNA, 631 bp, Homo sapiens
atctgtcttttattgcagagatgtttctactgttgcctcattaatactctcttcttaaggaagctaccccacatgcagcttctgtttggcctgactggtcttttaaataatagttaatcagtgaacaataggcacctgacctgagggcaaccaatatatagactaagcaatatttatgaactgcatagtttaattcaaatatgtgctttgagataaacagactgtttcacagagaaataaatcatcggttaacaatgagaattaaattgaagtcatgatatggatgggcctasagagattaggatgggtcatacacaggctgaaattacaggggaatagaagaggccagtggaaagtagtgtaaggtacattcagagacagaatagggcatagtacccactaagtgcctactattgtcctactgaggacttgggtaaaagctgaggttaaatcccagctttaccactaattagctgagggaacttaggtaagttgcttaaattctcaaaagctgtttctcatttataaatgtggataatagaacataatagaatataaatcacaggaattgtgaatattgcatgagataaaacatataaaatgcttagcctagggactaatacataacaaa

SEQ ID NO: 111552 - DNA, 518 bp, Homo sapiens
cagacccatacagctttgctgctgctaacaggccaactatggttgcaatgggtggttattactgcagaaagctatttatttgcacttgtagataagaaaagtggtttgaacaattcgaggctgtggaaatacttgccaaaaagagagaagactcttataggggttgagttaattacagagtggactggttggtattggatttctaaccagccttgggggaatacccttgtagtgaggagcactgcagaactgttgcatgggcaagtcccatggcatttccctattttggggacccagaattcaatgtaaatgtgaaatccttaatttttaaagatctagatgctctgccttccggttgtgtctgcttctcatatattagatattaaactctaaaaacagcaaatttttttttgtgctattcattaaatggctccaccctgaagccagtgattcaattaagaaacaagctaagctgaaaaarccaactatcaaactaaatcagtctccaaaatacaact

SEQ ID NO: 111553 - DNA, 639 bp, Homo sapiens
aggcccagctgtaaaattcttctctttgtagtctttctctttatttatgagaccagctgacacttagggaaaatagaaaagaacctacattgaaatattgggggctggttcccccgataacatgtatagcctgcaacctgagcagggccttcagcctggtccagcaaatcatttcggtattcttttttttttttttttttgagacagagtcttgctctgtcatacaggctggagtgcagtggcgtgatttcggctcactgcatctccgcctcctgggttcaagcgattatcttgcctcagcttcccaagtagctgggattacaggtgcccgccaccacgcttggctaatttttgtatttttagtagagacatggtttcaccatgttggccaggctggtctggaacacctgacctcgtgatccacctgcctcggcctcccaaaatgctgggattacaggcatgagccaccgtgcccagcytcatttctgtattcttggtccccttcattgtctcttcccaaagaaccactattcctaactttcatcattatcctcaagccccttcactctactgcttccttgcctcccacctggtttatctgcttccttcctgttaggaacaattgaggttatcagacat

SEQ ID NO: 111554 - DNA, 485 bp, Homo sapiens
ctttctgccttctttgtcctctggccatcctctgccctgctctggctgaccccagggcttttatggacctcagagggaagaaagtttgtgccaattggcccacgggaagccatgggtgggcctggaagagataccacaagtccccactctggtccgtgggactgtcagtccagcccccagccttcaggtcctccctggcccaaaggtggggccttactggggatctgcccccttctgccttggaatcaatctgcctcccactgccattcatggtccctgggttcagccccaaaccccgctccaagatcagagcaggtgcctggactggaggtaggccagacagacaccagacacccccatgactgcagggttcaggggtccttcctggggctcccaagcatgcaggctrtagaaacacccagctcctgtacctggaagggcagccacagtggcacctgggaaggcagatcttacctgctcccggc

SEQ ID NO: 111555 - DNA, 650 bp, Homo sapiens
tttattatggttcattggttggttggattactggtggttagagattgagcggygtggataatggaacacaaagaacctaggcaggaaactgcaatttgcaattagagagattactgggtccagaatctcctcagggtgtgttcatagtaaggatgttcactataaaggctgtactttttttcatgtgacatgcattgaaatctacagcaaccttacagatagcatggatttatttcccaatgccccaactgtaatcatgcaaagcattaacttgagttctctcttcttggaagactataggtatcataaaaagcttttaaactggaaaggctttgggagattatctacatatttctttattttacaggtgagacaatcaagagtgttttcattttgttagctgtgtattgagataatgatatcccgagaaatgaagtgaatttacttgtaactctgtatccttccagtctacttaaagtccactatagaaagctttcagttttcagatataatggaggaggaagggtttgtatttaattacatattcttattatgttaattacatattcttattatgggaacctttcttataatcccatagcatgccagctgctagaatacattaactttccaaagtatgtagtttataa

SEQ ID NO: 111556 - DNA, 510 bp, Homo sapiens
ttaaattacttaaggaatatagcaagaacaaaataaaagtaaactctcatcaaattaataattcagtgtagatggaaatgctgctttcatttcacagaaatgtaggaattatcttatgcttaagactgtacaattgtactaatttagatatacaatatgtatattaaagcttggcaaatgcttctcaaatctgtccactgctctgctttcctgtcacttccatcctatcttctctctcccaatccrtcctgaggaaggatcattgcaatgatcttgtgatgggttttctacatttttttccttctttatatccatttcccatggtgctacaggagtgatccatctaatgcagatgttatcgtgttatattactctctctcaaggttactcctctactgactaccaggtccttcataagcaccaactccacctttccctgtgatatggtttggctgtgtccccacccaaatctcatcttgaattgtaactcccacaattcctgcgtgtcat

SEQ ID NO: 111557 - DNA, 612 bp, Homo sapiens
catagtacttattatatgtttggcactattctaaagaattcatgcatattaactcattcagttcttacaataattctattattaaacttatgctcattttacagataagaaaattgaaatgcagtgaggttaagtaagttgctcaaaattagtagtgccaggattcaaactctgctactgatatggacaggaggctggaaaatactgggtagaagagggtggagtccctggcaagggttccaccctaaagctgggccccacrgccctaaatgagaactttacttccctgttttcccacctgaatgttgccttttggcccagcatgcccccatcctgtgccgataagaactccagaccccaaactcagctcatacacacacggaagagagaagcatctgaacatcaagaagagaagaagctgctggacatcagaaactgtgaaaggagaggagtttggctgagctccaggggaagactgcctgcacattctatccccttttcagttccccatcctgctgtcagccacatttaccactcaataaaatcttcacattcaccatccttcaagtccgtgtgacctcattcctcttgggcactggacaaggacccagt

SEQ ID NO: 111558 - DNA, 644 bp, Homo sapiens
tacaagtaaacagccagatgaagttatacatagggtaagatctggaagagtcacaagcacagaagcttctatcctggtggtgttggggcgcaccaccttcccagcatgtagatgagttcttatttaccttcctgtaggaatgtacatgttcagctatctagaacctctctgaacccagtcttttggggtttttatgaaagtttcactacataagcatgattattaaatcactggctattggcrataactttcagcccctctcttcttcctggaggctgagggtgagctgaaagtcccagccttctagtcctgcttggtcttttcaatgaccagcctccatcctaaagttacctaggggctcccagccaccagtcaactctttagcatacaaaaagacatcattttggagtttctaaggattttaaaacttatattccaggaagcagggccaaagatcaaatatatatttcacaataccataggactctgctctcatgaatgagtgtcattattgcaggagtgtttgttattgtgagagtgggcttgttataaagcaagttcagacccctcttacatccactctcacatgtgcatgttgtcttgccctttcaccctctgccatgagatgacacagcaagaaagcc

SEQ ID NO: 111559 - DNA, 312 bp, Homo sapiens
ctggaaaagatcctgtcacaaccaacaagcagccaccggaacttttcagtgtcgctgcaatgggtgggtctttctctggcctccctgaggtcttcacttccccttcctgccacaggtaatgcttttttttytctctctctcttatcttttttttattactcagggcaaccatgttgcccagagaccacatgttgaaactcctagtcagaggttggattaaagatggcagggcccatctgagggtaaatttaagccttgccatttgatattgggtgctaagcaaagtgacaaatgtctatgtcttgtcaaatg

SEQ ID NO: 111560 - DNA, 609 bp, Homo sapiens
gggatgaaactttctaattgatatttgggtgacctttgccattttaaaattatagtcccctctacaaactgtcttgaatttccctgtctcaaagcacctgtgaggttactttcaataaagttaaaaagccagaaatattggccatttggcctggstaaagtcaagtaataagaatgtttaaaaggactttattaaagagtgttatggttaaaagtcagcttaattaaaagtagatattcaggctctaacagcctgagactccttggaaaaaacaggaggcaccagagaccctttcctggacctgtttttccaaggactccatctgaaagccaataatccaattaagaaaattaataactggcaaatgaaaaattttacaactactgtagtaatcttctgtctgtctaggtagttttatatacgtattgtgtgtgtaatgtttatatgtgaaagagttttaactaattggtttaataataataagtgcttaaatcaaatattttgtcagaaatgtaaaaagtataatgccttttatttagttcatgtaactttagtattctttggtaagtaaagacagtttaaaagattattggtaaaattaaaatgtct

SEQ ID NO: 111561 - DNA, 344 bp, Homo sapiens
acagaaaatgaagcatacatatatagcccttgtatttmagtttgcagttccattaaatacacatttggagaaaaagaaaaagtatataaaagaaagccaatggatcgcagagtactgaatatcagggcatgtgccattatgtccaaagcctgattctcctcctgaagacagtgtgatcaggaaaaagtttcataaaatcagttgaagaaaagaaggtaaagagagcagtttactcagtgagggttaacatgacaagcataagctggcctgtgtgtggacacccttctccaggaagtcctagcacctggaggaacacacaggaaacaaacggataactgtcggtg

SEQ ID NO: 111562 - DNA, 625 bp, Homo sapiens
caaatactctttagaaaccctcttaacagagaagagcccgagggtgtagagattttatttgtgatagcaacctgagctatgagccctaacatctctccttttatttcatcttttatgactgtcccacagcttaaaatgatgaagtaacatttggaccaatttccaattgaagattaagcctttagatcaattatatatctgcttccacaattaaggtattaaacccaattatcactgttatctctgcagcctgaatagaggaaggaaaagcatgtggaagctggatagagtgaaagaacttgtgctttggggcgagagagtctgtgtcccatcctggatcattccctgaccayatggccttaggtaagcagcttcacacttccaacttcagtgtccttatcagctagatgaaaatatgccgatttcctaacattctgatgaaaatgaaatgagaaaacctacgtaaagaacaatgcacagtactggagataggataagtgctcaataaatttaagttctattcccccttctttacatttttctcaccctagtccctgcaaaaagagagagacatgagaaccaggaatatttcttgatcaacgacataatccaaaggtccccaatc

SEQ ID NO: 111563 - DNA, 639 bp, Homo sapiens
cctagctcccagaagacatttctagatgcactctggaccagaagcaaattcgctaccctgaaggaaaggacccagtcctggtgacattcatcatctgctaaatgaagagcccttgggtcctgataaccagtgatacttaggtactatgttgagggctttgggtgagcctctgaggattgctggcttcaggtgagactcagcacattcccagctgtggtggctatagagtgagactccttctgcttgagaaaagcagagtaaaaagtaaagaggactttgtcttgcacctccagtacccactcggccacaggggaatagagcaacaagcagrctcttggagtccctgattccaggacttggctcttggatggcatttctggacctttcctggccagaggagagcccaccaccctgaaaggtgaatcccaggcaaggcagcatttaccacaagctgactgaagagcccttaggccttaatggaatatcaacagtagtctggcagtactcctcatgggcctgtggtggtagtggccattgggtgaggctcctctgcttttgtaaaggagagaaaagagagaaacaatttcatcctgtaatttgagtgtcagctcagccatagtacaatagaacaccaagtag

SEQ ID NO: 111564 - DNA, 248 bp, Homo sapiens
tctgtaagatctgagaaggggcagatgcagcatttgagcctaggcagtgtggctccaaagcacttgcycttacccaccacaatttgcagagaaaatagttacagatatagggtgcatgtatatttgacaatgggaaaatctgatatcctcttctgattgcatcagttttctctatgcaacaggaaccaaggccattagccaggagtagggaatagggagagtgctggagatgaagaaggatggagaag

SEQ ID NO: 111565 - DNA, 526 bp, Homo sapiens
tgtgtgggagactggaattttattattactcaaatcagtctcctcaaccattggagagcagagtttttaaggataacttgggggtrgggggaagccagtgagccaggagtgctgattggtcaggggtgaaatcatagggagttgaagttatcttcttgtgctgagtcagttcctggggagggggccacaagatcagatgagtcagtttattaatctgggtggtgccagctgctccatcacatgcagagtctgcaaagtatctcaagcactgatcttaggagcagtttagggagggtcagaatcttgcagcctccagctgcatgactcctaaaccattatttctaatcttgtcattaatgttagtcctaaaaaggcaatctagtccccaggcaagaaggaggtctgctttgagaaagggctgttaccatctttgtttaaactataaactataaaactaagtttctccaaaagttagttcagcctatgcccaggaatgaacaaagacaggttggtggttagaagcaaa

SEQ ID NO: 111566 - DNA, 582 bp, Homo sapiens
ttacaccctatcccatcagcataacaattctctcctcatggtatacagtgagggagatcattattgttgtaagaccaacaggtttatatgcccattgtgtagtcacagacccattacactgaggcagcagartttgcagcagagaaagagtttgattgcagggtactgagtaacgagattctcaaatccatctccccaaggacttctgtgctggggttaataaagggatcatggagagcaaggggctagagagttggggtgattgattggtaggggtaagaggaataaaatcatcaggatatggaaactgcattcttcagtgagtcagtttcttgtggggtccttcagaccacctggtgtcagtgaggttcttcagaccaactgagctggtagtttcattggtatgcaggacctgaaggaatatctcaaagggaaaacttaacctatcacactgttttgttatccatgaggagttaagggggactattaatataattttgaaatgtgatataattccaggacaatagacaccaaacaactatgaggaagcaggttagagagtgagctgacttaactgtaaat

SEQ ID NO: 111567 - DNA, 570 bp, Homo sapiens
tcctcttagtatcttagagcctattatacataggttgggcttctttacaaattgaacaatctttcacaaccaccttctgattttacaccctatcccatcagcataacaattctctcctcatggtatacagtgagggagatcattattgttgtaagaccaacaggtttatatgcccattgtgtagtcacagacccattacactgaggcagcagaatttgcagcagagaaagagtttgattgcagggtactgagtaacgagattctcaaatccatctccccaaggacttctgtgctggggttaataaagggatcatggagagcaaggggctagagagttggggtgattgattggtaggggtaagaggaataaaatcatcaggatatggaaactgcattcttcagtgagtcagtttcttgtggggtccttcagaccacctggtgtcagtgaggttcttcagaccaactgagctggtagtttcattggtatgcaggacctgaaggaatatctcaaagggaaaacttaacytatcacactgttttgttatccatgaggagttaagggggactatt

SEQ ID NO: 111568 - DNA, 570 bp, Homo sapiens
aaaatgtatgcaaatactaatgaaaagagagctagagtgaatatattaatatcggacaaagtagacttcataaaaaattaccagagataaagaagaaaattgcgtaatgaaaaaaaagttaattcactgagaaaacataagagttctaaatgtgtatatataccaaaaacagcttcaaaatacatgaaacaaaaattaatacaaccaaaaggagaaatggacaaatccataagtataggaagtttcaacagtcctttctcagtaattgataaaggattaggraggaaactgacaaaaatatagtagacttgaacacaaccaatgaactttatctgattgacatttatagaacacaagaactaaaaccacatttttttcaactctatatgaatgttcaccaaaatagaccatatcctggaccacagtgaagaataaaaaaaccaacaacttaacaaatgtaaaaaactttaaattatacagcgtatgttatctgatcataaaatagataaaattaaaatcaataacgtaaagatatatgggaattttacaaatatttggaaattaaacaac

SEQ ID NO: 111569 - DNA, 477 bp, Homo sapiens
atgaggtagacattgcgaaaggcagcayagagacagagtttgaatttcctcatggacatttttgtgctgctggctcaaaccaaacctcaaatccgctttacccttagattatccagggatgggaaccaatacattcctttattgttttagcttgtttgtgttggatttctttcaactgcacccaaaatccttataactgatgcactatattttcagcctatttaatcatataagcattttggcagtctgcttcattaatttttctccttgcctaattctttaccctgtttcagtttaaattgtttcttggctgggtgtggtggctcacgcctgtaatcccagcactttgtgaggcagaggtgggtggatcacgaggtcaggagtttgagaccagcctggccaacacggcaaaaccctgtctctactaaaaatacaaaaaaaaaaaaaaattagcctggcataatggcaggtgcctgt

SEQ ID NO: 111570 - DNA, 503 bp, Homo sapiens
tatgttgctcttcactagaagacccgatctaaatttattggaacaaatgaggaaatgtattccagtgattcagtgattcaggtcttcataggttgatgggaggtgaagggacctggagttagaaggaggaactcaagctcccattgagaagaggttgctgtctttggtttggagcaggcagaaggagcagaagaggagaaaatgtgttttaaaatcgtcartcagcaaagtgtcaatgcaggaaggggtacccttctaagcaatggccagccacttattgttagataattaatggaaggtctccccctcccccacatggcctatgagaaggcatggaggaagtctgcatagtttttcaggaataacctcagtgaacacagaagtgcccctacattgaagggagtctggaacccgaggactttgttcttcagaaaagagagaaccaagattggattaagttccacagtcattaaaatcaatttatatttatatgctaagcatat

SEQ ID NO: 111571 - DNA, 495 bp, Homo sapiens
atctggaggcataactggggaagtgatcacttccaaactcactcagattgttggcagaattcatttccttgcagttttaggactgagggccccagcttcttgaaggatgtcagctggagtccatctttacttcctaaagttggtgtatagttcctagaggctacttatagttcctagaagctacccgtcatccctagtggcaactcatggttcctggatatctttcccaccatgggctttcccaacgtggtgaattagttcatcaagccagcaaggagtttytagagtgtgagtctgctggcaagatggagtcttatataacttaaagtaactaaggaagtagcatctcataatctttaccatctgttgttggttagtagaaaggcacatagttcctgcccacactcaaggggaggtgactacacagaggtatgaataccaggaggtagggatcttgggtggccttcttagagactgtttgccacagtatgtaaa

SEQ ID NO: 111572 - DNA, 592 bp, Homo sapiens
gctcctgaataaattacctataccagagatttctatcatgtggaaagctttttaaaaatgcaagctcctgaaactgactttgcaaaaattataactgaggatattatgacagtgaaagaagtcagacctaaccaactccatcttgctttaagctgtccttgttcattcctgggtgtccaccaaattaaccttgggaaggaagttagtttatagtttgactctgaaacaaaagtgttaatagtccttttccaaaaagacccccgttttgcctgcggaccagtctgcctttgtaagactaacaaattagctacaagattggaaactacggtttaggggccaggcagcaagggtctgaacctccccagattgctcctggggataacatcactattgtaaaacctaagatcagtgcttgwgatattttgcagaccctgtgctcagtggatcagctgacaccacccaaactgataatctggctcaaccaattctgtgatcccacccaggaacagaagacagcaagaaaaactcacttcaaccccactataattccatttgccacctaaccaatcagcactccccacttccggagccc

SEQ ID NO: 111573 - DNA, 538 bp, Homo sapiens
tgcaagtaagagagatctgttttccatggtttagacatgtaagtttatyataaattacaaagtctgaggatagcagctgctgtcactagcacagcagctcaaagatttcagggacactgtctctgtgtggccttttactcattatccctagcatccaaatatcatgtccacattgtaggcatgaaggagagaatggaaaagccaaaaaagcacagcatctgtagcagaaaaacaactgttttcagaaaccaaacactgtagtttatgcattattggccaaaattttatcacatgacctcctctaggtcaagagagatttgggaatgtaggttgttgttgttttcagctaggcatattgatgccctaaaaaaaattaatgagtaaagcaggatgggcaatggatacagggtaatcaaacagcacgctctgacctagcactgtacatgtcctgagactggaatgaatgacagccagggtttcttacggacatcttcattcttaattactccctctaccaagctatttgaaaaatatcaag

SEQ ID NO: 111574 - DNA, 554 bp, Homo sapiens
gtttgcttatggtctgctgggaaaaaacgagctggagcaatttgatttcctctctagaatatgtgggaagggaaggatgagaagaagtcagtcagcagtgacagccagagctactcagctgacagctccttaggtatctttaaaacaaattctcctttttccagaggcaacattagccaatctctgctccagcagccaaaaacrccaaatgacaatatggtggaaaagtgaaagattctattaatcaaataaactgctccacatcaaataaaaagtaatttactgaattgactgagtcgattcatttttagcacattctgaggatgtgattttcactccatattgaacggttacttaatttattagagttctgcctaataaggttcactaaggaactttgtgttaaaattgtttaaatagagtgactgaaacaattaccaagttgactagtgtgttcacatctgtctgagtgaatgagagcatcctctctccatagataagagtgacactgttattacattcaggcaaacacttttcaggcaggagcctgttgt

SEQ ID NO: 111575 - DNA, 662 bp, Homo sapiens
tggtaagaagcttattagggggagcccattaagaatacagaattccaagccaaacctgagatccactgaatcagaatctacaagagttagataattggtattttttattgaaagtctcaagtaagtcttgagttcaagcaagaataagaaatactgtttaagccaataaggaggaagtccaataagaatacatcagtccaaggtccccttagcccagcattcaaggtctgacagtagcctactatctatctgcacttatctgaaagggaaaggcagttgtggtataatagaatgagcattggagtcagagccatacctcaaaaattcwgtctctgagtttatctagtttgtgacttggaataaattacttaaacccactgaattttcattttgttgtctatattatgataataataattcttacctcaaactattgttttgagaattgaattttataacattaaagcaatatttattaagtacttagtatccatcaaattctatgctaggtgctctttcttctggtatcttatgtgccaaattcatcatagtcattcaataattatggatggaataaatgaaatataatagttgaataaacagtagtcagtataagctgcataaaaataacattaagctatcatatgacactttatggtatt

SEQ ID NO: 111576 - DNA, 619 bp, Homo sapiens
atatagtaagcaggtaactggaatggcaaattaaatagtatatatgaaagcaccttaaaagagtatgtggcaatgagctgtgtattgttattctttgcttcaacactttgactttgcagatgaaaaatctgaagcctagaaagttcatgtgatttggatagtgggatttaacttactttatggagattttatgaaggctaagataatacacattcaacaaatgttaccaattattattattgttgtaattctgcttctgctgttgatgctgctggtggtggttgaagactatgtgggaakgctctctctactacgccttccttttccaattgccatgtaattttcacttgaagagcagttgttgacctcattttatcacaagttctggaaaggtaaatttgatagaatacagtatggaaaaataggtctgaaggaagatgatgcaatttttaaaaagaggaaagaaacactttgatttaatgaaagttattatctcaacaacagtgagaattgtcatttagaattttcaaatgagatattcatttgaatattcatcaaactctgttacttttacggtcccaactattccaggccctaaattaggcatacagttagaatt

SEQ ID NO: 111577 - DNA, 563 bp, Homo sapiens
agagttcttacctattctcattactccagctcctgtctctgcttctggtttcccctccacctgcaatggcctttcatctattgtcctgttgaatgccctttgtgttagtccattttgcactgctctaagggaatactggaagctggataatttataaagaaaataagtttgtttggcttatggttctgcaggctgtacaagaagtgtggcaccagcatctgcttctggtgagggctttgggaagctttcaatcatagcagaaggtgaagggggagctggtgtgtcacatgatgagagagggagcaagagagagagggaagggattccaggctctttttaataatctccatggtttagtaatatccatggctagcatttaatacatatttgcagaaggaatagatkaaaagtacttaatgctttaaataaagaatttgtgtccatattctaaaataatcatctcatgattttttctacagtttgcaagattcctgtaggtatttttttttttgtgcagttggctttcattagtataggtcattgacaagataaacattcaatgc

SEQ ID NO: 111578 - DNA, 590 bp, Homo sapiens
cctgtttctgggcccatcctgggagccataacctgtccagagtcttaggcttcctgcctgctccctgggccagcaccttcagagtccttctcagttttggtctctgagttccagcatcattttactagctgccttaaaacatgaagactttaagacctgcctgttttatacacatggtgagtatcatcatccatatawccttaagatgatccagaagaatggaaactaagtctaagagaccagcagagtattgggaggcaagggtcaaaatttgaagacttgatgttgaaatgttctgatttattctcctagtggccatttagtgtttcttttggtggttacacaaaaccatatgagacttgcttaatttagctaccttccattaagatgattccatacatactgagatgataccaaggccaaggaattattttagttactttcacaatacactaattaatcattttgcctggaaaaagctccttattctaaagcataatcatacaatagctttttcagcaaaatttaatgaaaacttttgtctagaggctttggtacccatgggtacccatatctattaaggatcagtt

SEQ ID NO: 111579 - DNA, 590 bp, Homo sapiens
cctgtttctgggcccatcctgggagccataacctgtccagagtcttaggcttcctgcctgctccctgggccagcaccttcagagtccttctcagttttggtctctgagttccagcatcattttactagctgccttaaaacatgaagactttaagacctgcctgttttatacacatggtgagtatcatcatccatatatccttaagrtgatccagaagaatggaaactaagtctaagagaccagcagagtattgggaggcaagggtcaaaatttgaagacttgatgttgaaatgttctgatttattctcctagtggccatttagtgtttcttttggtggttacacaaaaccatatgagacttgcttaatttagctaccttccattaagatgattccatacatactgagatgataccaaggccaaggaattattttagttactttcacaatacactaattaatcattttgcctggaaaaagctccttattctaaagcataatcatacaatagctttttcagcaaaatttaatgaaaacttttgtctagaggctttggtacccatgggtacccatatctattaaggatcagtt

SEQ ID NO: 111580 - DNA, 405 bp, Homo sapiens
agtaacagagcggtaattttttttttttttttaagagatggggtcttgttctgtcacccaggctggagtgcagtggcacactcatagctcacagcatcctaaaactcctaggctcaagcgacaggaacacaggaatatagaagataggaatasatagcaacataagacaggaatacaggcacacaccactacgcccaactaattgttttatttgttgtaaagacggggtctccctatgttgcccagtctggtctcaaactcctagcctcaagtgatcctcttcctttggtcctcaaagaggtagggttacaggcacgcgccactggcccagcctagagttataatttgagcccagatggtcaggccgcaaagcctctgtccctagctaccacacaacactgcctt

SEQ ID NO: 111581 - DNA, 405 bp, Homo sapiens
agtaacagagcggtaattttttttttttttttaagagatggggtcttgttctgtcacccaggctggagtgcagtggcacactcatagctcacagcatcctaaaactcctaggctcaagcgacaggaacacaggaatatagaagataggaatacatagcaacataagacaggaatacaggcacacaccactacgcccaactaattgttttatttgttgtaaagacggggtctccctatgttgcccagtctggtctcaaactcctagcctcaagtgatcctcttcctttggtcctcaaagaggtagggttacaggcacgmgccactggcccagcctagagttataatttgagcccagatggtcaggccgcaaagcctctgtccctagctaccacacaacactgcctt

SEQ ID NO: 111582 - DNA, 578 bp, Homo sapiens
cactggactccagcttgggaggtaaactctgtctcaaaaaaatttgtttaaaaagcctctgtctcaaaaawttttttaagaacgtgtagatgacccacagaatgagagaacatacttaaaatcacacatctgataaaggacttgtatccacaacatataaagaactgttactcaataataaaagacatataacactatttttaaatgggcaaaccatcttaacagacatttttccacaagatgatgtacaaaagaccaaataaacacattaagagatgggcaacatcattagccatcagggatatacaaatgaaaaacacaatgagatcgacttcatacacctttgattggtgtacaaagacaggcaagtgctggtgacgacgtgaagaaactggatccttcatacactgctggtgtgaatgtaaaatggtgcagctgctttaggaagcagtctggcagttactaaaaacttaaagagtttccatttgaaccagcaattccattcccaggtatgtacccaagagaaatgaaaacatatgttcacacaaaaacctgtacatgaatatccatagcagtat

SEQ ID NO: 111583 - DNA, 578 bp, Homo sapiens
cactggactccagcttgggaggtaaactctgtctcaaaaaaatttgtttaaaaagcctctgtctcaaaaaattttttaagaacgtgtagatgacccacagaatgagagaacatacttaaaatcacacatctgataaaggacttgtatccacaacatataaagaactgttactcaataataaaagacatataacactatttttaaatgggcaaaccatcttaacagacatttttccacaagatgatgtacaaaagaccaaataaacacattaagagatgggcaacatcattagccatcagggatatacaaatgaaaaacacaatgagatcgacttcatacacctttgattggtgtacaaagacaggcaagtgctggtgaygacgtgaagaaactggatccttcatacactgctggtgtgaatgtaaaatggtgcagctgctttaggaagcagtctggcagttactaaaaacttaaagagtttccatttgaaccagcaattccattcccaggtatgtacccaagagaaatgaaaacatatgttcacacaaaaacctgtacatgaatatccatagcagtat

SEQ ID NO: 111584 - DNA, 629 bp, Homo sapiens
tgggcaacagaacaagactgtctctaaaaataataataatttcatcatgggttgcaaaatgatatttgactatttctgttatttcttgtacatataagttggcattcttatgagctcctactagaaaggtaggataaatcttaattcttttcaaaatgaggatttattttaaagctgccttgaatttttttttttctggctttgtctttttgaagtatgatggactcatgttcatttaggtccaaccaggtgtctcctttccaagtttcagaatcccattctttaccaktcagtttcctaactttcacatgagaagtgtggagggactgtaaattcacctgttgtttgtaattcagcaagtcacacaactaagtttggtatacgagtttcagcagtactaactttgtagctacaaaaagtaagagctgcttttagactgggcgtgaaagctgtggtgctcagactgtggcctgaggtgagagttaatggacttgaatttgtcattttctttttgtaagcacttgtgaatttaaaataatcccatccacatgtattttgtgtcatggttactgccacagcagtcaactacagcagccacttgggcattcaaggcacgtgcctgacttagc

SEQ ID NO: 111585 - DNA, 455 bp, Homo sapiens
gaatactcagaactgaagcttaacaaaattaatcaccatgtaggtttaaatttctcaccaattttcatctggattttaaagtcagtgaaaccatttcacaaggaaatgacatattgtcacctgttccagcatcattttactgtttgctrtagctctgaactgctttccagtagaactagttcaagataaagagatgacacaaagcagcaattcactaagggagtagactcctgttttgaatatagctagaatcatcaatttacagtgaacaatgatgacttcagttgaattatgaatatttcactttatgcagttaatgctctagagtaattaaatgaaattatctttcagtggtttttctgaaaaactgaattaattttcatgtgaacaaaaggaagtactggcttccatttgacattccaagtgacagtgcagactcagcttgctcctttata

SEQ ID NO: 111586 - DNA, 485 bp, Homo sapiens
acttttaaagtcaactttctggatgtattaaagaactgttccaatttcacctctcttggtgtttcaatgagaaaacacactctgaaaggccgaaaatacccttttcgtccctcctggaagcctgttctgattattaaccaacactgtgtctcagagggcatgaagtctatttccatattgacatttcttggcccattgattctgtgtgacaggcttgacaaatgttcactcaatggccattactgtctaacttgctccccaactgagatccaccaagatgtctgatgtgaccaaagactaccacrtgctcaaattcttttgattaagtctttcaacagaaaaaaaaaattagttcagttgaaattagaagcagtacctgggattgctatatgaccagaatggcactcttacagagggatctcccctgaccaggttacagaatgtattcattctgacatgcaccaaatcatatctgcagcataata

SEQ ID NO: 111587 - DNA, 603 bp, Homo sapiens
tcactggcaagactgcaggaccagaataaagccttggaagggcagctgccacctttacaagaaaactggtatggaagatattctacaggtaaacataaaacccagcatgagatgtgtgtatctggaccaaggagcattattaatagrtttatctcactgtctccatgatctcagaaagtttctaaattcctgaaatgtaaaggaatttaggctatctttgaaaactcaaatctttcaatgaggattgaacatcaattgaaagtattctgggttcattagaatgggagtataaactgtacaaaggacttttcactattccatatgagaaggataaatcattttgtttcagctcagtttgtaatgctttcaatgtttatacctagttttgccagaccattaaaattatatagatactagtgataaatgatagcaatcgcgtttcagttagattctaaatttaaatcattctctccagtatagtttaatgcaccagactttgtggttttgaaagcaacactttaagagtgagttaattctaacatgaattttgaaaccaccctaaacagtattgatttattgcagtacagaggagtggatgagtca

SEQ ID NO: 111588 - DNA, 487 bp, Homo sapiens
gattaaaataagctatattaaagaccccaaaaccacttccctcgcagctttcctctgaatgtctttcacatgaaatgggcctgagtcactctaagactcaccttagggtgatcaaagtagcacctttgcaaaacaaagaggtagagactccctcggctggccgtgtggactttgcattcaatcagaatttggaagaaaagacttcatattcactggcaagactgcaggaccagaataaagccttggaagggcagctgccacctttacaagaaaactggtatggaagatattctacaggtaaacataaaacccagcatgagatgtgtgtatctggaccaaggagcattattaatagatttatctsactgtctccatgatctcagaaagtttctaaattcctgaaatgtaaaggaatttaggctatctttgaaaactcaaatctttcaatgaggattgaacatcaattgaaagtattctgggttcatta

SEQ ID NO: 111589 - DNA, 603 bp, Homo sapiens
tcactggcaagactgcaggaccagaataaagccttggaagggcagctgccacctttacaagaaaactggtatggaagatattctacaggtaaacataaaacccagcatgagatgtgtgtatctggaccaaggagcattattaatagatttatctcactgtctccatgatctcagaaagtttctaaattcctgaaatgtaaaggaatttaggctatctttgaaaactcaaatctttcaatgaggattgaacatcarttgaaagtattctgggttcattagaatgggagtataaactgtacaaaggacttttcactattccatatgagaaggataaatcattttgtttcagctcagtttgtaatgctttcaatgtttatacctagttttgccagaccattaaaattatatagatactagtgataaatgatagcaatcgcgtttcagttagattctaaatttaaatcattctctccagtatagtttaatgcaccagactttgtggttttgaaagcaacactttaagagtgagttaattctaacatgaattttgaaaccaccctaaacagtattgatttattgcagtacagaggagtggatgagtca

SEQ ID NO: 111590 - DNA, 623 bp, Homo sapiens
gttttcagtaaagacacagaaggtgattttacagtattatattatttgtgctccaatgaacttactcaaatgttcctgttatccttcaacattttccctaaaaattttcttccaaaaataaaattcaagcattaccccaccagtgtaaagttgggaaccttctaaatctacttccagttcataatacattgggaggcttattaaggaaaagtaagactcagggtcaagatggaacacctcaaatcacagattactaggactggagaggaatttaagaagcttctatttcaacctcccttcctcagggactgagataaccacggcacttacatgggatcttcaagaaagattgattgaccagctgattttaatgcatacttatttagcttaattggtaaatgtcttcatagctrtttgaaaaaggacttatttttcaatcagtgtgttttgcaacataccacacatacacacacataagtcaaccaccactcataccccaaaagaaacaagaacccccagtacatattacaggccttcttcaacctaagggttgtagaagtttgccatctactgactttttgctgaagtattttgttctccatgaaatattgctaataattata

SEQ ID NO: 111591 - DNA, 582 bp, Homo sapiens
gaattctttggtgtctggagattgaagacttaggtattgtagttttcattgtctgggcttgtttgtacctatcttttttgggaaggtgaatctcatgtcaaattttaatcctcaatattggaggaggggcctggtgggagatgactgaatcatgggggcagatttctcccttgctgttctwgtgatagtgagcgagttctcatgagatctggttgtttaaacatgtgtggcacattccccctctctctcttcctatttctctggccatataagatgtgtctgattcccctttgccttctgccatgattgaaagtttcctgagatcttctcagccatgcttcatgtataaccagtggaactgtgagtcaattaaaccctttttctttatgaattacccagtttcaggtagttctttatagcaatgagagaacatgcgaatacagaaggctttccttccagatatttgaaaagacctgggtgttgtgatccaagctgtatttgctgtagggggcaccccaagcccagtaatactgtggttcttgcagacttgtagaggtactgccttgatggtcttatggtctt

SEQ ID NO: 111592 - DNA, 288 bp, Homo sapiens
gtttaattattttaactcagtgaacaagtgtgagtgtatttagtgttacagggataaattctgtatyagacaaagcactctaggcgcaattactcgtgagaggtagacagacataactgaatttaatattgaagaaaatgaaaataatatgaaagaggcaaaagtcagttgttgagactagttacagggagatgtgattcactccaccaggaagaattagaacttctaagatgttatttaagaataacagtatttctataagtagaggttgtaagagaaacttgaata

SEQ ID NO: 111593 - DNA, 524 bp, Homo sapiens
acaggttatatattcatttatatttttcgtttgatgttatgttcattatattattccatgtctgtatgcagttttagtttattcattgktagaatacactatgccactgtataaactttattcattatactgataatagccatttgatttgtttctaatgtagggttattatgaataatgctgctatgaatattcttattggtatcttatgttatatatacatatgcattcttaatatgtatttagtagtagttatatgattggtcacaaaatatgtatattcaactttagttcatagttaaaaatagtttccaacttttataaacagtttataacagtttacactcatgccaatagcctataagagttctagttgctccatgtcctttccaacatgtctgcatcttattttaatcattctggttgttgtttatttttattatttttttttaatttttttttattatactttaagttttagggtacatgtgcacattgtgcaggttagttacatatgtatacat

SEQ ID NO: 111594 - DNA, 451 bp, Homo sapiens
ttttcacattgttatttcattttaaattttattattaatcacttattagttatttataaataacagaactattttctttattatctcaaccttcattctatcttttcttatttctttattaactrttgttattaacaattagtcaagtctgattcttgatggaatttcatttttttttacttcaaggtttagagggtttatttctaaaacacataatagctggacaacacttaaccattttgtcaaagggaattatatgcttaatacattcaagaatttcattcttaaaaaacgttttaaattatgatcatgttatatttatattttctcagttttctagaattataatgaataatttattaatattttccattttactatccatataattaatttctgaattttttatgactgttttgtatcatttctaagaatgccaaaacctagaaag

SEQ ID NO: 111595 - DNA, 565 bp, Homo sapiens
aaggagagtatagctggaaggggaaatacttaggacaaactcttgaagtactcaaactttatataatacagaaattttctcttctacctttctttcagcctcatctgtgttttctttgcaggttaaatctttatccagccacaaaatgttgaccttcctgaaggatcaattttaagtcatcttgtgtttttattttatgctttttcctggatagtctaaccagtgcccatgggctcatacatcacctacatacaaattaaggggtttaygtaactagcccagagtttctcagcctcagcactattgacagtttgtttctagagggaagcatagggatctgtgctgcgtattacaggatgtttagcagaatccttgatttctccctactagatgccagtagtaacttctggttataacaactaaaaatgtctgtaggtgttttcaaatgattcttgaggggtaaaatcaccactaatctagcctatggcttctgttgagctttaggcccatatgtatgactgcctaattgacatctcctcttgggtgtcttaaggaatttcaaatt

SEQ ID NO: 111596 - DNA, 557 bp, Homo sapiens
agatgatgtttaaacagagttttagagggaaaataggatttgtccaggcagaaaagagagggaagccagaagtcccaggcagaggggacagttggacaaagtcatgtaatcatgaaacagcatggcacctgcagaaaactagaatagttcaatattgcttgagtttaaagttgttgggatacataagggtattgtctaatgggactgtcacaaagttctttcatagaaatttgccagcctcacaacctatcggtgtaggagaaaatgattgtgtatgwgagctgataagttctgagtttggcttgatctttttttttttttcctgtagtactgctattttatgtgataagaaaatccaatggggggaaaaatctatgaaactacagttcacagaaccagttcaagaacatgtctctctaaactttaagatgctctgtggaccttgtaaatatcaaatgaattcatatatatgacactgctttgaaagcagctcaatgctcattagatggaggctatatgataccatcatcactcgagagttaaatcaatcagattac

SEQ ID NO: 111597 - DNA, 557 bp, Homo sapiens
agatgatgtttaaacagagttttagagggaaaataggatttgtccaggcagaaaagagagggaagccagaagtcccaggcagaggggacagttggacaaagtcatgtaatcatgaaacagcatggcacctgcagaaaactagaatagttcaatattgcttgagtttaaagttgttgggatacataagggtattgtctaatgggactgtcacaaagttctttcatagaaatttgccagcctcacaacctatcggtgtaggagaaaatgattgtgtatgagagctgataagttctgagtttggcttgatctttttttttttttcctgtagtactgctattttatgtgataagaaaatccaatgggggkaaaaatctatgaaactacagttcacagaaccagttcaagaacatgtctctctaaactttaagatgctctgtggaccttgtaaatatcaaatgaattcatatatatgacactgctttgaaagcagctcaatgctcattagatggaggctatatgataccatcatcactcgagagttaaatcaatcagattac

SEQ ID NO: 111598 - DNA, 595 bp, Homo sapiens
agcctgaccaacatggagaaaccacgtctgtactaaaaatacaaaattagccaggcgtggtggcccatgcctgtaatcccagctactcaggaggctgaggcaggagaattgcttgagcctgggaggcagatgttttggtgagccgagatcccaccattgcactccagcctgggcaacaagagcaaaactctgtctcaaaaacaaacaaacaaacaaacaaaaaaccagttgtcactaaaagagctcaggtagtatgtcctatgttttatttagaagttaccactaaattttggaatagccatcattcctaaggtaattttctaccttcctttaagctaaagtattagcaaatggaaaagagtagcaaaaataactcattctgtatctttctatgctttccattctgttccttgtgattggcaastgttgttggagactaatactcactgaactttagaatgattccgaatacctgtaatttgtattaatatccgctggaacatttccctgtgttacctttttcttaaaaataaaataattgattagaagatttagatactatattaacatagatttcattctgattaaaattagg

SEQ ID NO: 111599 - DNA, 461 bp, Homo sapiens
ctgttattattcccattttacagatgaggaaactgaaactttgaatggttaacaactagttagctagttatcagctaatcagtagtggaacctggagtacacccaggcagttggctccaaagcctcttgtccatcatgactctaccgcctcttgtctgagatgacrctccttaatttgagctctccaaagagaccctaaaacaaagacatggatgtaagcagtttattagagtgacggccccagaaacacaaacaagagagagatgaggcagggaacatgtgcactgatgagcaggttgtagacttgggcaactagggctcaaccttactagggatcgtctgaggaactatgaaaagcaagccttagaactgccctactgagggagacagagaagctggggtatttctccaccaactcctttcctttattagttgatggttgtcttgctaggcatgaattc

SEQ ID NO: 111600 - DNA, 543 bp, Homo sapiens
cccatctacttgcactccctcacaagggaagctgaggcagtaagattgcttgagcccaggatttcaaggctgcagtgaaccacgatcatgccactgcactccaggctgggtgacacagagatactcaggctcaaaaaaaaaaaaaaaaaaaagtagaagctgaggatttttagtccttctcttccargaaggctccttcaccctacccttccctcagaggacagctctgtaagcggtgaggagccagagaaatgaacaactctctccttttgaccctaagaagacctgaagagagactcttctctgaacataaagaatgttggccgtttcctctgccttcctttccacctcccaaaacaaggggaaagaagactgtagtctctgcttaccaggcactctatcataaacaatctatagcaatttctgattccttctgctaaagaactattgttgagggttggagaacagacaaaggttcttagccaaaagagtcatctctgttctgccataatctaaatatttcttcttcaagtttctactaat

SEQ ID NO: 111601 - DNA, 514 bp, Homo sapiens
cttcaccatgaaaaagtctaaaagatgtaaacagctccattcacatgagcataactctacagaaaagtttacaatgcagatgttcaatatatacaacaaaaaggaagttatatataaatagataatatcatatttacatataatatacatatgtattgagttcacccttgaatgacacaggtttgaactgtgcagattcactcatatgagaactttcttctgtctctgccacccctgagacagcaggaccaacctctcctcttcttctttaacctacttaatgtgaagacatgaggatgaagattttatgatgctccactttcacttaaggaatagtagatgtattttctcttccttacgattttcttaataacattttcttttccctagcttactttactgtaagaatacagtatataatacatataacatataaaacatgtgttaatcaacagtttatgttaytggtaatgcttccagtcaacagtgggttattagtggttaagttttgggg

SEQ ID NO: 111602 - DNA, 621 bp, Homo sapiens
attcattaattaatgaatgaaccagtaagagagcacagttagttcaaaaacaatttcaaaggatcgcacaataatgctgaaatgaatttaccatcacacacaatttgcatttttgttagtgttctacatcttacagaattatgaagtagctcaaaaacagtgaaagatagcaataaacctgaatggtccactagaaagaatctcatactatttttttcctgtttccaattttttcccacaattttcataaaataggatataaggaaatattgaaagtgagggtagaaaaaatgtagggcttcaagactaatttttgcaaygtactgtagtaagaaagatactgaaatgggagttggggaaggaacaactagataattgtatgattttgagatttaattcaactttcagtctgaatttcttaactacaaggggagtttcaacagaaccttagttgtgctcaaatttttcttttaaactaaattatgtgtgtgtgtgtgtgtgtgtgtgtgtgtgtgtgtatatatatatataaatgacagcttcctatgaattctaatataaagagagctcttctgtttgaagtggtggaagagaacctagggtacccttccttctttacct

SEQ ID NO: 111603 - DNA, 603 bp, Homo sapiens
ttgttgttgttgttgttcctttgaatgctgttttggagaagtctgggcccagaataattctagagaattccttattcttggtaattaatgccagtgcttgtctagaaggtatctkcatgccagcttttatattaatttttcttttgatttgcttatttagttttgtcttatttcagtgaaatcttttaatatgacactgatgatattttttcttctatttttgggttttcatctttaagaatgccagttaactttttggtgaatcacctttgtctgctgtaatatctattttttctcttgaattggattactatataagtcctttccctcttgcatgttaaatggctatctttagctttttctctttgtcaacagtctgtcatccatgcttacttactggtgtttgtttaaaaataattaaaaaatttatctgtagttgtattgttattggcctccgtttattttcttatcaagaaaatctttatttttatctcattttgctcgctgttttgcttggtatttctttatcttatctttaaacatttatttcttaaattcctgacattatttagttcatctatagcttaaagcacctctaggaaa

SEQ ID NO: 111604 - DNA, 489 bp, Homo sapiens
ttctcaggtcaatggagttatgttccaaggggcggttatggctacctctgctgctttgtacaagtcatcagggatgtgggggaaagttgtcagtgacaggctcacccagctcccacacagccagaaaggtcagtctcacttccaccatgcctcaccaatagcactgagtttatatccaggcagctagtgcacaaggctgagatcttgtcccaggctacaagcctccctactgagaaaacaagcagggcttycaggcttcacccctgtctacttgctgcagcttctatgcttatatctgcacttcctgtttgccatcctcatctcaccaatgattctgcccaggaaagtttgtgctaggttaaaattattacaaagttcagcggggagtttccttctccctatagtccttcttcaattccactagcagccctccccaaggaaccctgtgagataaggtcagaaatggcttccctggggaccaagagtgcc

SEQ ID NO: 111605 - DNA, 617 bp, Homo sapiens
ttcttggtttctttgaagaatttgttgcctttctactaagacagcaaagaaacattttgttactgaccgcctaaaaccactcaatctcaggtgaatgcatcacttaccaagmtgttggaatgctatttgtgttttgttgcacaattttttggttgtttatttggttggctttttggaaggcaaatttggaaaggggacctacacagaagtgctgacccacccacattcccttattatcattacagacaagaagaaactagcagagctaagaatggagtgaagaaaggcagtgtgataagcaccagcaaagagttgagggctgtttctctctaaattattatttgattattttaaaagtatggaagttctctagtcactgaagaaaggaggggaaagtgcacttatttttatatagagttacttaactacctcctaaacacatacgtggcaattgtttttgcttgtgcaaagtattttaattagcaagaattcatatattgagattataattagagagctcaatttatatatttgctatcctgctcaagcctgacatggaaaaaaaaaaaacaagttcactccaaaatatatagcttcaaaataataaatactggaaa

SEQ ID NO: 111606 - DNA, 596 bp, Homo sapiens
aaacattatgctaagtgagacgtaaaacacagactacgtgattccatctatatgaagaacctggaacaggcaaattaatagagacaaaaagtagaatagaggttttcaggactggcaggaggtggaaatgggcggggttaatgtctaatgggcacagagttcctgtctgggatgatagaatgtttcagaaatggatagcggtgatgattgcacagcattgtgaatgtagctaatggcattgaattctttaccagaaaacaaaagcaaaaacagaaacacattgtttaagctttccagtcggacaggtgacgtgcttggtgtgagctggggtctgagaccaggctgcccttgccagagtggcttcaaaacccttcttggttgtacttaggcctgattgctctggaragccccatacatgaaagccagctctggttctgtctcttctcactccagtcctccctacccccaacatcccccatctgggcattatgagaaaagcaagatgactatgagttttctgattatttatatgaccaaataatctcagggactgttactaactaacccatgggattcccactaccttcatgagtttc

SEQ ID NO: 111607 - DNA, 550 bp, Homo sapiens
ccctgttctcctggtaaagacctgtgttgccaccagatgttctactcgccgctctactggggcatggctggtgaaaccacgtgtcctgtgttctctgcaaaacttagaagatgctgattcaccttttggcttctcacaggctttctttgctaaccacccagtttccctccagatttattcagatttagtctgtcacttggcaacagcacttggaggtttcttttttttaactggacatttacaaacatctcgggcattttggttggacaacacctatgtgctaggttctctttctgggctgtccaaggaggcatgttgttccttcaataaaaaagctccttatgcattctacctcactaggccaccagccatgtttagatttctgtgacacttgaaataaacacagcttatcctcaaaactaaatttcccarctatttacacaaatgacctccttgcactaaccttcatgtccgcctctttctttttcctctcctgtttccttgtctactactatttgaaataagagaagaagccacaataacttcggat

SEQ ID NO: 111608 - DNA, 516 bp, Homo sapiens
tagaactcaattgtcaatttctacaaaaaaaaaaaagtctacttggatttggttgaatctataagtcagtttgaaagaattctgtcttctaactcatggacacaatgtatttctccatttctttaggcgatctttaatttctctctgtgatgttttgtaagtttcagtctttctcatcgtttctcagagtgattaagtagtttgcatttttatgctaaatttttatgtaaatggtatttatgctacatttttatataagtggtattgtgcctttaatttaaatttctaaccatttgttgcaactatagaaatacaactgatatttagatattgttsctttatcctgcaaagttgacaaactcattcagtgattctagtggctctttgtagattccatcatgttctctacatagacaataacgtctcttgtgaataaaaacagttttaccttctccttcttcccaatttggatggcttttctttctttcctatttttttttccttcttgcattggcc

SEQ ID NO: 111609 - DNA, 560 bp, Homo sapiens
ttagtgatagttttaagtaagtgtgactgtgacccctttgatctgactcctcacaatactgtagccactacagcacaagcagagttatagaaaaaggaggcaacaattaggagtactcctggatatcttaggaatttactatcaaaatatgatttcagaaacagttattttttccccttttcacagaaaaacctcaaaatttgaaaacacagctagcatrtattataataaagtataaatatcttttcagattttaactctaatagattattctaggtagtgataattatgttcctcctaagagtaatttttcattgttttgtaaagcactgtatagtggtgattatctaaaattcttctatttgttctctagcattttgagtagtacagttaacccttgaacaatgcaggggttaggggtgctgatgcagttgaaaatccacatatagcttttgacttccccgagacttaactataatactaatagcttattgttgactgggagtcttatttataacataaacagtggatttaaaaatatcttgtctatggctgggtag

SEQ ID NO: 111610 - DNA, 570 bp, Homo sapiens
ctagacacatttgtaggttayttacaagaaggtgttagaaaataagtatagtagacacatttgtaggttatttacaagataaatggagtagaatcatcaaaagactttcatgtgttttgtttatagattgggaatgtaaaacataataagtaacctggaattagacatcaattaactatttaggaggaaaggaataggtataaaggatagtgagtttcagtttttgcacagttcaatttgacgtggttgtattagtctgttctcacactgctaataaaaacatacctgagactgggtaatttacaaaggaaagaggtttaattgagtcacagttccacatggctggggaggcctcacaatcatggtggaaggtgaagaaggagaaaacgaacgtcgtatatggcagcaggcaagagagggcatgtgcacatgtccagggaaactcccctttgtaaaacaatcagacctcatgagacttattcactatcacaagaaaagcatgggaaaaaccggcccccatgatttaattacctcccatcaggtccttcccacaacatattgggattatta

SEQ ID NO: 111611 - DNA, 433 bp, Homo sapiens
gattttctgaaatacaatcacatccaaacagcaggatttctaaacagaaggtgccttataactatgttctaaaattaaacctcatttaaactacattcattctaaatggaaaatgtactgtagttgttttcaacattaaagtcaaattcaaatcattgttatcctaagagctaagtagcttaaataacttctgccgtgtaatgaagattagygtgtatttcatattaggtttgcagagtaatttgggggaaaatgttttctttttgcacttgtttcccatagaataggaaaaaaaaatcattatttgaggaagattgcttatccgtaagatgtgatacttgtatcaagtttcaatctagaagaagactaaacaatatatgacatgttattgatcaaactgcttctcagagaaaggaaccattttgggaactgg

SEQ ID NO: 111612 - DNA, 484 bp, Homo sapiens
cagccttgatctcccaggctcaaagggtcgtatggcctcaatttcatgagtagatagagctacaggtgccaaccaccatgcccagccaatttatttatttatttatttatttatatttttattttttgtagagatgaggtttcatcatgttgtccagcctggtctccaactcccrggcttaagtgatcagcccacctcggcctcccaatgctgggattacagatgtgagccactgtacctggctaaaactgtgacctttttgagaatgaaatattttaattgtcttcttaataactatacccagacaacagatataaactgagattgacccaggaaaactagacatatggtcatcctatctaaaatttatcattgtcctcaccaagaagcctgccctctgagttctacattgttcctaattacaacacagtactcctagtatccgtgatatttaattttctaggtacaatgttttgtcttttgc

SEQ ID NO: 111613 - DNA, 630 bp, Homo sapiens
taaaaaatgaataaattatattggattataaccattgattaaacatgcaaaacatttaatcacttgtgccttattctgtgacgcagttcaaaattttactcatcttgcagctataattagagcaaaggacagatggtaaaggtttaaaatgatgtttttattaaaattacrtaggctgccaaatgatttcgcaccatcacatgtgtttgttcattagctgcttcattgagacagggttaatgaaatttgaagttggatgcatagaataataagtgactctggtgtctacatatacaatgtctgtttactgttaaaggggacagaaaagaagactgtgaccaactcttccaaatagttttagtttaatcatatctaaatatgataaaatcttctaagaagtcttagatgaattaataaagtagataaacaatctgggcatatggaggattttgatactaggtacggcttttctgtgtgaatataggtatatctcaaataaaagtaaacactaagagattttattatgagataggccagatgcagtggcttatacctataatcccagcactttgggaagccagggcagaaagattgcttgagcccaggagtacaagactagcctggacaaca

SEQ ID NO: 111614 - DNA, 525 bp, Homo sapiens
ggtttatgaaacataaaatgatcaaaaatccttgggaaagaaggggtcttagagaagtattattacaagaaaataaaatttcaatcaagtttgtggccctgaaaaggctaacccagccttgtgctgtcagccctttgctttttttttttttttttttttctcttcaragtcagggtctcgctgtctcactctgtcacccaggctggagtgcagtagtgcaatcagagcttactccaactcttggactcaagtgatcctcctgcctcagcctccagagtagctggaactacaggggcatgccactgtgccagactaaagccctttgcatttatgtttgttatgcttgtcatcccaatgattataaccaagtgctacacttggctagaacatgaaaacgctattttagagatgcataagcagaagttggtcatttgttgagacaaaggattttttcttcattatcatacaatagcaaaaatggacttgtttcaaattttgaaagaaaaaactgtattcttcctctga

SEQ ID NO: 111615 - DNA, 606 bp, Homo sapiens
aaagttgagaagaagcacatagtatggttggtgcataggagatacgtgagaaaggagagagatacagaaaactaggttgaggacaaattgggcaaggctacaagtaccaaactgaggtgtttggtggtttttctttttttttaatttagttggtaatgagcagttacttattgttttttgagaaagtttataacattcgtgggctaagttttaggaacataaatctagtggcagtatttacatggttacttggtaggcaagattctaaagtgattcccagtgacccatgatcttgtacgatcccctccattttgaatgttggaggagactatgaatatgatggcatattatatgattcacttatgttaaatggmaaagttggctttaagaatgggacgttatccttggcagacctcacttcagacatgctctttacaaagatggggtttctttctggagaaagaaattagaagtactgtattcaacatgcaaaaaattatttgttactgcttttaatatggagggggaacaaacagaaaaaatggcaagtggcttctagtagctgataacaagccctggctaaaagccagtaagaatatggaaccg

SEQ ID NO: 111616 - DNA, 606 bp, Homo sapiens
aaagttgagaagaagcacatagtatggttggtgcataggagatacgtgagaaaggagagagatacagaaaactaggttgaggacaaattgggcaaggctacaagtaccaaactgaggtgtttggtggtttttctttttttttaatttagttggtaatgagcagttacttattgttttttgagaaagtttataacattcgtgggctaagttttaggaacataaatctagtggcagtatttacatggttacttggtaggcaagattctaaagtgattcccagtgacccatgatcttgtacgatcccctccattttgaatgttggaggagactatgaatatgatggcatattatatgattcacttatgttaaatggaaaagttggctttaagaatgggacgttatccttggcagacctcacttcagacatgctctttacaaagatggggtttctttctggagaaagaaattagaagtactrtattcaacatgcaaaaaattatttgttactgcttttaatatggagggggaacaaacagaaaaaatggcaagtggcttctagtagctgataacaagccctggctaaaagccagtaagaatatggaaccg

SEQ ID NO: 111617 - DNA, 568 bp, Homo sapiens
ttgtgcctacctgaataatccagaataatcttcccattttaaggtcaaatcactagtaaactgacaaagtcagcaaagtcctttttaccaaagcacataacatacttgtgaatgcaatgacagaagggatagatcacaggtgatattttcaattctacctaccacatctatcagcactaccacttaaacttgataacgtatccaccaaagtaaattcctgtccacttaagaaagttactttaatgacctggtgctccactgctaacttgatgatctctctccagatacagcaacagagaaggaagcgtctctcccccagcgttctgttctgtttcttcatcatagttccaagctgcttaaacctaggttcacagtactcatttataatattgtgctctttarctgcacgtctctttttagttttcacacattcagagccatttcaccacaggcacagccacagtgtctgagcctgaaagagtggccagtatctctcacaacaaacctatactcctgaattttctagctgatacctaggacccaagcccaactatggttttctctccca

SEQ ID NO: 111618 - DNA, 607 bp, Homo sapiens
gagcttcaaaatgacccatggctgattctacaagagtgctttcaacctgctgaatcaaaagaaaagttttactctgtgagctgaatgcaaatgtcataaaacagtttcacagatatcttctttctattttttatcaggggatagtctttttttttaccataggtttcagtgggctcctaaatgtctcttcacagtttctacaataaaagagtttccattgtgctgcataaaaagtgatgtttaactctgtgaactgcatccacacatcacaaagcagtttcacagaaagcttctttttagtttttaatagygggatatttggattttctgtaaaatcctcagtgttcaccaaaatgtcccttcacagttctacataaagagtgtctccaaccttctaaatgaaaagaaaagtttcactgttgtagctgaattcacacatcacaaagcattttcacagatatcttcattcaagtatttatcatgaaatattaagtttttcactgtaggcctcagtagtctccaaaacgtttccttgaatatcctagaaatagagtgttaccaacctgctgaataaaaaggaacatttaactctatgagctgaatccac

SEQ ID NO: 111619 - DNA, 546 bp, Homo sapiens
aaaataaaaattagaaagaagctacatgtaatactactttgtaacgtgtggattcatctcacaaagttaaacctttcttttgattcagcagtttggaaacactcgttttgtagaatctgcgaagggacttttggagcccattgaggcctatagtgaaaaaattaatagccctagttaaaaaactagaaagatgctatctctgaaaccacttagtgatgtgtggatttatctcacagatttaaacctttcttttgattcagyaggttggaaacactctttttgttcaatctgcaatggcacatttcagtgcccaatgttgcctatagtgataaaaaggcactctttttgtagaaactgtgaaggaacatttgggacctcactgagttcttacaggaaaagcagagtattcctcaatgaaaactggaaagaatctatctgtgaaactgctttgtgatgtgtggtttcagctcacagaattaaaactttttttttattattcagctagttgaagcaatcattttgtagatttatttcagagcccactta

SEQ ID NO: 111620 - DNA, 546 bp, Homo sapiens
aaaataaaaattagaaagaagctacatgtaatactactttgtaacgtgtggattcatctcacaaagttaaacctttcttttgattcagcagtttggaaacactcgttttgtagaatctgcgaagggacttttggagcccattgaggcctatagtgaaaaaattaatagccctagttaaaaaactagaaagatgctatctctgaaaccacttagtgatgtgtggatttatctcacagatttaaacctttcttttgattcagtaggttggaaacactctttttgttcaatctgcaatggcacatttcagtgcccaatgttgcctatagtgataaaaaggcactctttttgtagaaactgtgaaggaacatttgggacctcactgagttcttacakgaaaagcagagtattcctcaatgaaaactggaaagaatctatctgtgaaactgctttgtgatgtgtggtttcagctcacagaattaaaactttttttttattattcagctagttgaagcaatcattttgtagatttatttcagagcccactta

SEQ ID NO: 111621 - DNA, 435 bp, Homo sapiens
gctcacagagttaaaccttcctcttgagtcagcaggttacaaacactcttgttgtagaaaaaatgtgaagaaaagtttcatagcccactgaagcctatcatggaaaaccaagtatctcacgataaaaactagaaagaagctacctgtgaaactactttgtgatgtgttgattcagctcacagggttaaacccttctttttattcagcaggctggaaacactctttttgtacaactgtgagggtgcattttgatgcccatggatgcccatgatgaaaaacaaaatatcctgcaataaaaactgcaaagaarctatctgtgatgtgtgcattcagctcacagagttaaacctttcttttgattcagcagtttggaaacatcatttgtagaatctacgaagacacattttggagcccactgaggcttatggtgaaaaa

SEQ ID NO: 111622 - DNA, 485 bp, Homo sapiens
tcacaaagcagtttcacagatagcttttttttagtttttattgcagaatatttgagtttttactataggcctcagtggcctcggatatgtcccctcgcatttcctacagaaagagtgtttccaaatggtgaatcaaaaraaaggtttagctttgttaggtgaatgcacatatcacaaagctgtgtcacacatagctttttagtagtttttatcatgagatatttcgtttttccctataggcctcagtttgctcctaaatatcccttcacagattttacaaaatgagtttttccaacatatggaatcaaaagaaaggtttaaccctgtgagttgaatcaacacatcacatggcactttcacaggtaacttctttctaatttttatcacagaatattcgggttttcactataggtatctctgtactttgaaatgtcccttcaccttaggttctttctagttttttttttttttttttttttttaata

SEQ ID NO: 111623 - DNA, 591 bp, Homo sapiens
ctttagttaaaggtcctggaagaggtgtatgagcccaaatgtgagccctaacatgagtgatgtaaaaagggtgaattctactcctaactgctgtttgcaattggggaaataaagtcatcagttgttcatctgtatgaaatcgtaactgagcattttcaattaattgtgtggaatgaaccacatataaagaatgagaaatcacattaataggagtatcaaaagcagtcagtacctcaattacagctacaagctctgctttttgagctgaagtatagggtgtgtgaaaattttacctttcgtgccagaataagaaactttaccattactagacccacctgtgaagacatttctaacactttctattggtttaaatttagttattttagggagaatccaattagctaatttcaaaaattgaaacagtttagttttaggaaaatgataattgagaatacccacaaaatcagttgaatgggttaaccaagtaagtctatttataaaagyttgccatatttgtgccttcattagaggggcaattatttttccaggatcatatccatgtaatttaacaatctgagttttcccatttcc

SEQ ID NO: 111624 - DNA, 648 bp, Homo sapiens
cccgtcaaacacagccacatacctggggacagatcaaaaatctgtcatgggtggtggaagaaaatctgaggaaagcggaacaaccagtcacagtgagtaatttaatgatagctatgatagcagtgatcacccttttcatgagtattccttcaacaagggctgacacagagaacaattatacttgttgggcatatttatgaatcttggctggcaataatgactggatgtaatcagtgtctgacagttacacaggctttctgatctcagtatttaacataataaatttgctactataattaaggcataatgccctcagaaacctatttgtaaacagaattgcacctggaaagaagtaatgaatgtacttgtttaagaagattgcattgcagaacatgcagaggtgttgmacagagattcctatggaatcattgattggtcccctaaggggatgttcatctggaattgcacctctcagtctgcatgccatggccatatgttcagcttctctgaaaaaaatggttagatggtagaaatggtaacaaatatggcaagagttcctattatctagaaacatggcagtatagtggcacctcaatctcaaataatatggcctgctgcaggagctaaacataaggatttgtggacact

SEQ ID NO: 111625 - DNA, 635 bp, Homo sapiens
cgtgttcctccctgagtctttctcaccttggccagtggtgctttttcttccaggatgctggacactgaggagtcctcctgggcattgttgcttccctcatactccctgtcaacacatcttatgtgcagtcacactatcttccaagggactctcaggacttccccttctttccatatctatgggaaccatgcttgccagctacgctcccgcttagccttctgggatagtctcctaactgctctgctcaaatccatctttgcccccatccgatctattctccatcagccagagtgaactttctaacagtaatctgtgcactcttttgcttaaatctttcttttttactttacttttcttttgagatggagtttcgctcttgttgcccaggctggagtgcagtggtaygatctctgctcactgcaacttccacctcctgggttcaagcaattctcctgcctcagccttccgagtagctgggattacaggtgtgcaccaccatgctcagctaattttgtatttttagttgatgcagggtttctccatgttggtcaggctggtctcaaactcccaacctcagatgatccgcctgccttggcctcccaaagtgatggaattataggcgtgagccaccgtgc

SEQ ID NO: 111626 - DNA, 521 bp, Homo sapiens
cccataaaattgcccagtatgattcagtctcctacttttacagatgaggagactgaggctcagagcagggaagagaccagcccatgaacaagttccaagtgagacgcaaactcggactaaaatccaggtttcccaaagcccagttgtgttaggccattcttgcattgctataaagaaatacctgagaccagttaattttaaaagaaaagaggtttaattggctcacggttctgtggctgtacaggaagcaaaacacaggcatctccttctgaggactactcaggaagcttccagtcatgatggaaggtgaagggagagcaarcatctcacgtggcaggagcaggagcgagagagagatgtgggaggtgccacacactttaaaatgattagatcttgcaagaactcactcattattttaaggcagtaccagaaggatagtcctaaaccatccatgagaaatctacctccataattcagtcacctccgccaggccccacctctaacattggggattacaattc

SEQ ID NO: 111627 - DNA, 268 bp, Homo sapiens
cccaaagtgctgagattacaggcgtaarccaccctgcccagctcaaatttttattgttggcaaaaaattcaaattttaaaagtggtgccaatcttttctattggccaggtgagttggcttataatcccagctctttggaaggataaggcaggaggatcacttgaggccagaagtttgacaccagcctgagtaacatagtaagaccccgtctctaccaaaaagataaaaaataaaagttttaattagccagatgtggtggtgtatgcct

SEQ ID NO: 111628 - DNA, 268 bp, Homo sapiens
cccaaagtgctgagattacaggcgtaagccaccctgcccagctcaaatttttattgttggcaaaaaattcaaattttaaaagtggtgccaatcttttytattggccaggtgagttggcttataatcccagctctttggaaggataaggcaggaggatcacttgaggccagaagtttgacaccagcctgagtaacatagtaagaccccgtctctaccaaaaagataaaaaataaaagttttaattagccagatgtggtggtgtatgcct

SEQ ID NO: 111629 - DNA, 603 bp, Homo sapiens
aaccataaccttcagcttctcacgctcccttcctgtatggctgatatagtttggccccgtgtccccacccaaatctcatctagaattgtaattcccataatccccatgtgtggagggcggggtctggtaggaggtgattggatcatgggggtggttttccccatgctgttcttatgacaggagtgactcttcacgagatctgatggttttataagcatatggcatytcctcagcttggacttctctctcctgctgccatgtgaagaaggtccttgctttcccttcaccttccaccatgattgtaagtttcctgaggcctccccagccttttggaactgtgagtcaatcaaacctctttcctttataaattacacagtctcaggtacttctttatagcagtgcgagaatggactaatacgatggctttcttattgaattgaagctcaaaactaatatttcaggagccacattttgatctataaacctgtattattcttatttctaaaaaattttttagacagactttcattctgtcacccagtggggcaatcatattggggtatcatagctcattgcagcctcaacctcctgggctcaactgtt

SEQ ID NO: 111630 - DNA, 619 bp, Homo sapiens
acaactgtaatgaagccaggggctatcagtcataattaatagagctgaatgaaagagaggtggaatatttttcaatttatctaccgacaaggaaggaatcacagcacattccccctccctggggaaataactgcagaaaataggggtgttttatgtggtcagacttacatacattttccctgttacagtcaattcccatttcaagaataagtagacagatgtgtagagcttgtttcataraaatagaccccagtattttgttaagtaacactgactaactgatgaattattccaaatagtaaccatctacacttgacaggactgtctctctaggacaccaagggacgcatactgacacctgcattcttcatcaatatatttaattgctcaattctgctttgcataaaggggattcttctcttctgcaccagtgtgtggttgagaaagctgtctgggagaaaaaaaaaaaaaaaagaggcactcaggtttgaatatgtaactgagctctccacaacaaacagcacaatataatgagacccaagagagcctcctagtgctgttccatccaggccccaattcctcaataataaatttccttccccaaaaaatagtattgaac

SEQ ID NO: 111631 - DNA, 543 bp, Homo sapiens
atactcatgaaaaggtattattgtgaggatacaatgaaatagtagataggaaggtgctattaagtagccaaagctgttcgtacctgtgtttagtattaaagaattaggtggacaacattacattgtggtgataccaaaagtctggagccagacttccacacttcgaaaatcctggctctggcatatgccactggcgttagccctatactggtgacttaatgtgtctgtccctcagttttctcccatgtgataggataataatagtatacccactcaccattgtcttacagttgtgacaaaatctaaacaagttgatatgggtaaagcatttggaccagtgtcccacacatagtaagcatcacagaaatattagttactatattagtgacatttttcacattctcagaatktctacccttgtttctcccagtaatgctttgtacttgggcagctctgtgcatttgcttcttaatctcaagctgctgaaccctcttgaggtgtgaaggagaaacgagctgtagagcatgtcctgtgtgtggcact

SEQ ID NO: 111632 - DNA, 543 bp, Homo sapiens
atactcatgaaaaggtattattgtgaggatacaatgaaatagtagataggaaggtgctattaagtagccaaagctgttcgtacctgtgtttagtattaaagaattaggtggacaacattacattgtggtgataccaaaagtctggagccagacttccacacttcgaaaatcctggctctggcatatgccactggcgttagccctatactggtgacttaatgtgtctgtccctcagttttctcccatgtgataggataataatagtatacccactcaccattgtcttacagttgtgacaaaatctaaacaagttgatatgggtaaagcatttggaccagtgtcccacacatagtaagcatcacagaaatattagttactatattagtgacatttttcacattctcagaatttctacccttgtttcycccagtaatgctttgtacttgggcagctctgtgcatttgcttcttaatctcaagctgctgaaccctcttgaggtgtgaaggagaaacgagctgtagagcatgtcctgtgtgtggcact

SEQ ID NO: 111633 - DNA, 543 bp, Homo sapiens
atactcatgaaaaggtattattgtgaggatacaatgaaatagtagataggaaggtgctattaagtagccaaagctgttcgtacctgtgtttagtattaaagaattaggtggacaacattacattgtggtgataccaaaagtctggagccagacttccacacttcgaaaatcctggctctggcatatgccactggcgttagccctatactggtgacttaatgtgtctgtccctcagttttctcccatgtgataggataataatagtatacccactcaccattgtcttacagttgtgacaaaatctaaacaagttgatatgggtaaagcatttggaccagtgtcccacacatagtaagcatcacagaaatattagttactatattagtgacatttttcacattctcagaatttctacccttgtttctcccagtartgctttgtacttgggcagctctgtgcatttgcttcttaatctcaagctgctgaaccctcttgaggtgtgaaggagaaacgagctgtagagcatgtcctgtgtgtggcact

SEQ ID NO: 111634 - DNA, 558 bp, Homo sapiens
agtaccacagtcatccaaaatagttatacagattgagcatctctaatcctaaaatccaaaacctaaaatgctcaaaaatcccaaactttttttttgagacggagtctcgctctgtcgcccaggctggagtgcaatggcgygatccaggctcactgcaacctccgccttccgggttcacgccgttctcctgcctcagcctccagactagctgggactacaggcgcccgccaccacaccgggctaattttttgtattttgtttagtagagacagggtttcaccatgttagtcaggatggtctcaatctcctgacctcgtgatccgcccgccttggcctcccaaagtgctgggattacaggcgtgagccaccacacccggcctatcccaaactttttgagtgtcaatatgataccacaaatggaaaattccacacctgaatgtgacaggtcacaatcaaaacacagacacacaatacaaagattatcagtatccctgaaagaaaaataaaattatcttcatgctatatgaacaaggtgtatatgaaacataaatgaatttt

SEQ ID NO: 111635 - DNA, 558 bp, Homo sapiens
agtaccacagtcatccaaaatagttatacagattgagcatctctaatcctaaaatccaaaacctaaaatgctcaaaaatcccaaactttttttttgagacggagtctcgctctgtcgcccaggctggagtgcaatggcgcgatccaggctcactgcaacctccgccttccgggttcacgccgttctcctgcctcagcctccagactagctgggactacaggcgcccgccaccacaccgggctaattttttgtattttgtttagtagagacagggtttcaccatgttagtcaggatggtctcaatctcctgacctcgtgatccgcccgccttggmctcccaaagtgctgggattacaggcgtgagccaccacacccggcctatcccaaactttttgagtgtcaatatgataccacaaatggaaaattccacacctgaatgtgacaggtcacaatcaaaacacagacacacaatacaaagattatcagtatccctgaaagaaaaataaaattatcttcatgctatatgaacaaggtgtatatgaaacataaatgaatttt

SEQ ID NO: 111636 - DNA, 583 bp, Homo sapiens
actgcagcactattcacaatagctaagacatggaatcaatctaaatgcccatcaatgatagcctggataaagaaaatgtggtacatcatggaatgctatgcagtcatcaaaacaaaacaaaaccaaaacaagatcatwtcctttgcagggggacatggatggagctgtaggctattatccttagcaaactaacacaggaacagaaaaccaaatatggtgtattctcacttataagtaggagctaaatgatgagaatacttggacacatagaagaaaacaacacacactgggcctttcagagggtggagggtgggaagagaaagaggatcaggaaaaataactaatgagtactaggcttaatacctggctgatgacataatctgtacaataaacccccatgacacaagtttattatctacataacaaacctgcacttgtatccctgaacttaaaagtttttaaaaagcacaaatacattatataagaaatggtaatggggcagtaacttctgaaatgtaggaaaataaaagatttataagaattagttttgttcaactctgtgaaaacagaattgaaagtgtgt

SEQ ID NO: 111637 - DNA, 542 bp, Homo sapiens
cattcattgtttttaaagaatttccataaaataatttttgtttctaaataaaccagacgatcccaaaattttgaccaaaatattagtcaatatggatgtacaataatatcaggatataaggtgaacagatgtatgtagtgctaacatttttatttttagcgtgtaaartctaccatggcttaaaaggttcacaaccatatcagtgtaaatttaggcagaaatctttggaagtatttagaattgctctagaacactgcaaggctatatagaagaagcatctccaaaatgtttgcagttgagagcaatatctccgtatcaaataaacaattttaacctaataaaatttcagaaaattaaaaaatctagactcagtccggtataaaacacagatctgatgaagatcccagatattttgtagtgctgaaagacgcaaatgggaaaggacaaagtgttttctctgttttgaagatataaaaagaacgtttctatagtggtgtttctccaaagtcatgcccaacaaaatggatgtgaggaatgttgtt

SEQ ID NO: 111638 - DNA, 646 bp, Homo sapiens
tggccagtacaggcaaggcattgaagactctgggtttttctttggatgatgtggaaaaccacttgagagttttaaaggctgatatgatctatccatcattgaaaaacatcactcttgctcccctgctgagaattgattcaaggatgaaaaaggcaaggacagaagcacgaagtcctgaggactattacaataatccataagagaggggatgctgacttagaccaggaagatggaaggtggatagatacaaatagtcaaattctgggtttattttgaaggccaagctggaaatatttgccaaaaaattggatttggggtgtgaaagtaaaagaagagtcagggataaacccatacattaatacctcatcaactggatttgctgtcattaatgaaataagagccatatcaaaaagagaaagtggccgggcgcggtggctcatgcctgtaatctcagtcttttgggaagccgaggtgggcatgtcacctgaggtcagcagttcaagaccagcctgaccaccatggagaaacccccygtctactaaaaatacaaaaaattagctgggcgcggtggatcatgcctgtaatcacagttactcgggaggctggggtaggagaattccttgaactcaggaggtggaggttgtgg

SEQ ID NO: 111639 - DNA, 384 bp, Homo sapiens
ttgagctcagttcagtttgaactcagcygtctgtcttctcagccatactgtctttctgagtatgaatttgccttccttgcctgcagagtccactgtaaagaaacttacaaaatacctgttctgcaggcatgaaatctgccacagcataacatgtgacctggggactcacatcacattgaaaaattatggccgataatgcaccatctgaaaataagagccccataaaaatctggaaagccttttaaatggcagctgaattattatctcataatccagtgtgaaataatgggatgccatccttcaggacaaagtacatgtattaaatccgaggaatctatatggtgctgtattctccaaaggaagaatacataggtcccagaacaa

SEQ ID NO: 111640 - DNA, 554 bp, Homo sapiens
tgggagtccaggtcaggaggattatttggggccaagagttcaacactagccgggacaacatatgaagattcagtctctatgaaatatttaaaaattagctgtacatagtggcacgtacctgtacttccagctacttgggaggctgaggcaggaggatctcttgagtccagaagtttgtgattacagtgagttgtgattgtgccmctgcactcagcccaggtgacagtgttacactctgtccctaaataaatatatatctatatatatgtatataagtatatacgtttatctaaatatacacatatatacaatctttcatatagatataactgcaaatatagatatatgtataattgtgtcaatgtacagactgtccctgctgagatctacaataaattggccatggcagccactgcttatagaaagacaggttttaagtgtgtgtagataaaggacagcagaaaatttttttactgtttttttgttcgtttgtttttttttttgaaatcttaaagctgggtgtctgggggagacatcacatgtcggcaggttcc

SEQ ID NO: 111641 - DNA, 608 bp, Homo sapiens
ttcttacattactgtgggaaatgacagattaataaaggatagagaaatacacaggcaactctwcatttcttcattatctaagatcccatatcaaccctaccatctttaatttttatatccctacaactgtaagaccatgttagtggggaatacaaattcagaggtggccttgcatatttgccttaattaaagaattgtattttgactggggtaggtagtcaagaaaataagtcataaagatcagcattttgaaatgtgaactaatatattaaggtttcttaggtgtttccagttttctaagattactgagctatttctaattttagtgcttagttataaattcacacacaactataataagaaaataattggtaaaaacatgtatagcttccttttaagtatttatgcatattatagcttaactagctcccattgacagattagtacgcagtagaatatgattcagaatgtcaccgccatttcggaataaaacataaacatatgtgtgacaaaattgttacacacaatcgttacaaaatcaaaaacccatgtgtatgttttttattcccaagtgacagtaacattctgatttatattttactgtctaa

SEQ ID NO: 111642 - DNA, 608 bp, Homo sapiens
ttcttacattactgtgggaaatgacagattaataaaggatagagaaatacacaggcaactctacatttcttcattatctaagatcccatatcaaccctaccatctttaatttttatatccctacaactgtaagaccatgttagtggggaatacaaattcagaggtggccttgcatatttgccttaattaaagaattgtattttgactggggtaggtagtcaagaaaataagtcataaagatcagcattttgaaatgtgaactaatatattaaggtttcttaggtgtttccagttttctaagattactgagctatttctaattttagtgcttagttataaattcacacacaactataataagaaaataattggtaaaaacatgtatagcttccttttaagtatttatgcatattatagcttaactagctcccattgacagattagtacgcagtagaatatgattcagaatgtcaccgccatttcggaataaaacataaacatatgtgtgacaaaattgttacacacaatcrttacaaaatcaaaaacccatgtgtatgttttttattcccaagtgacagtaacattctgatttatattttactgtctaa

SEQ ID NO: 111643 - DNA, 419 bp, Homo sapiens
atgaattcagttacaggctaaagagaaattgcatcataaatggtagatagcaattggtcacaagtcatgcaagtgttcacatatgggtgaactctagcaaaaagcatcacttttaaggagcattactataagttttgaaaaaacagacttgagtactttgtgtcctgattgagtataggtttcgaagtcaaaaaaacctaatttgatgtatatctctgacactttcttgcttcgaaaactttaggaaattgcatgttttctctcaacctcattgttcttatctccaaagtgaaggtagagatgggggaagatatagacagattaggttatrtctcctaggtcatatatcacataagtgggtaaagactatgaacctagattttctaaattcagattcattgtgctttcctttatatcac

SEQ ID NO: 111644 - DNA, 555 bp, Homo sapiens
ctctagcaagggagtagcctcttttgccaggactgagagaagagtgtggtgtgggttcatgctgcaaagtgggagctggaggtccttcccttggccggaccaaactgggaagggtgtggcctaagagctgtggtttctgccccaggaagggtctcacagcctggggttgcttyaccatctgaacaaagactgcttgaaactagcctcgccaacctggccggctgccagtaaccagataatggagggagaactactgagttgcggctgtgggagatgggcttgtcctactgcagcctgctaggttacagatttcagggtacccctctatccctgtgtgggccccttggtgcagaagctcctccaccactccctggagggctgccccagcaatccgacagctgtcccttgacccttgctagggtgaacacttgaccgaccttagggagccaggtcatgggcttgcccaacccttccctgctcagctttgccccctccaactgccttagtggcagagcatggtatggtgacacctgggaatttcccacctgtccactg

SEQ ID NO: 111645 - DNA, 555 bp, Homo sapiens
ctctagcaagggagtagcctcttttgccaggactgagagaagagtgtggtgtgggttcatgctgcaaagtgggagctggaggtccttcccttggccggaccaaactgggaagggtgtggcctaagagctgtggtttctgccccaggaagggtctcacagcctggggttgcttcaccatctgaacaaagactgcttgaaactagcctcgccaacctggccggctgccagtaaccagataatggagggagaactactgagttgsggctgtgggagatgggcttgtcctactgcagcctgctaggttacagatttcagggtacccctctatccctgtgtgggccccttggtgcagaagctcctccaccactccctggagggctgccccagcaatccgacagctgtcccttgacccttgctagggtgaacacttgaccgaccttagggagccaggtcatgggcttgcccaacccttccctgctcagctttgccccctccaactgccttagtggcagagcatggtatggtgacacctgggaatttcccacctgtccactg

SEQ ID NO: 111646 - DNA, 555 bp, Homo sapiens
ctctagcaagggagtagcctcttttgccaggactgagagaagagtgtggtgtgggttcatgctgcaaagtgggagctggaggtccttcccttggccggaccaaactgggaagggtgtggcctaagagctgtggtttctgccccaggaagggtctcacagcctggggttgcttcaccatctgaacaaagactgcttgaaactagcctcgccaacctggccggctgccagtaaccagataatggagggagaactactgagttgcggctgtgggagatgggcttgtcctactgcagcctgctaggttacagatttcagggtacccctctatccctgtgtgggccccttggtgcagaagctcctccaccactccctggagggctgccccagcaatccgacagctgtcccttgacccttgctagggtgaacacttgaccgaccttagggagccaggtcatgggcttgcccaacccttccctgctcagctttgycccctccaactgccttagtggcagagcatggtatggtgacacctgggaatttcccacctgtccactg

SEQ ID NO: 111647 - DNA, 598 bp, Homo sapiens
ccagatattttgaatcagcacttctgaatgtagtgatttttttttttaaatcaagctcttaaactgattctcttacaaattagtgcttgagaaccactggcttagctggtatcaggaacttaaaatatattatgtaatctgcacaacaactttaagaaataaatattaaycccattttacagatggagatactaaagcttaaagaagcaaggagaattgcccaaagtgatacagatagtaaacgaaagtctgagatttcgcacccacatttgtctacattaaaactcacacttccccactatgctattcagcctcaagcagcaccagcagaaacaaaaatatgaattaaattctagtacattactcaattggtaccattcatgaagatgtctaaaatactaatgacgttaaatctgaaaatgaaagatctgaagatggacaattttggattgagatttaaggaatgctgtataagttaaggagaagcagtcatatgctactgctgaagtcaccaggattggggaagaatttggaatcaggaggagcttctctgaaatgtatatttttcttttcagtgatcttccacaaaggagatata

SEQ ID NO: 111648 - DNA, 564 bp, Homo sapiens
ttgtatattaattctctagctgataactgtctcccaggaaatctggcatacaggtaaattgtgtcaaagattaataaaatgtaagcatatgtctggcttcctgagtgttgagcrggaagataaatctggcactgaagtgggagtatcactgcagcaaacctggtgcagcaggagcagttcacagcagctaaagcctcccaagtgagtgcagctgataggtatttaataaatgtaagttcccatcctgattcctttcccatgttgctaaaataaatcaattctacagaattatgttttatgtatgaaatacttctgaagcatggttatatctaaacaaatcaagcccgatcagaaattctaatctttgtctttttctctcaattaagaagatccaaatagatatttcatggcaactctttaaaaatctcctgttaatatttctccccacccctaaactgagagtgtctcattctttgactccccaaaaacatcgtaatccatgctattcagtccttatcttagttataagacaaactcttttgtctctgtcatctgtgaccccat

SEQ ID NO: 111649 - DNA, 579 bp, Homo sapiens
ctttgaaaaaaatttaggtgaatgtataactagaataaccaatacagaaagtgcttaaaggagctgatggagctgaaagccaaggctcgagaactacgtgaagaatgcagaagcctcaggagccgrtgcgatcaactggaagaaagggtatcagtgatggaagatgaaatgaatgaaatgaagtgagaagggaagtttagagaaaaaagaataaaaataaacaaacaaagcctccaagaaatatgggactatgtgaaaagaccaaatctacttctgattggtgtacctgagtgacggggagaatggaaccaagtttgaaaacactctgcaggatattatccaggagaacttccccaatctagcaaggcaggccaacattcagattcaggaaatacagagaacgccacaaagatactcctcgagaagagcaactgcaagacacataattggcagattcaccaaagttgaaatgaaggaaaaaatgttaagggcagccagagagaaaggtcgagttacccacaaagggaagcccatcagactaacagcggatctctcggcagaaactctacaagccagaag

SEQ ID NO: 111650 - DNA, 240 bp, Homo sapiens
taacaattactgtgtcctgaatatatgctgtaggcaccagagcagtgcattatgtatatgattctgttatatcctcacatggggattaagatgcattaacctatcagtgctcatggmcccatctccaggctcgaacttgcaattgagtctgagaaatgtaaaggtctcaatgatattctctcaaaatgtatttctcatttggttaactgtagccatggtctacatgtttcttttgctaat

SEQ ID NO: 111651 - DNA, 552 bp, Homo sapiens
aggtccttctccatgatgtatatagtgaggggtcacacaaccccattctctcctctacattcaagggattctatacgcagagatggacaaaagagaagtaggaaaggggaaaagaaggagatggattgcagcacagataatgggaataatggaagcagaaaaaaaggaggaagaggaataggaggctgattatcaaagttggaggttgagcttcctgctatctctatgcctaactgagaagacactggagtgtcatgctgtatcttcatctctggtttggaggagttctccaagccaggagcagtttcccctggtgtatgtgtcagaggaaataaatggattctgggaaaacaatgttcttttggtacatattgaacaatttttactctagagtggactcttcaaaaaataccaaaggttcaagggcttcatacacctcaacgtaacctgagacatcttmgtcaaaagcagaaatggacaagtaaatttgtcttttcttttttgactcctgaagtacaaaagtagaatgttttataagccagtgaatttcct

SEQ ID NO: 111652 - DNA, 542 bp, Homo sapiens
acttgcctacttagattggcaccaaatccttaacacagactgttgtaataggacaacagaagctattaaagggtttcaaactgggaggggagggaagcatgcaatcttcctacttctgtcttcctacttctaagactcaatccacttgccgctattttctgctttctctaggaaagcttcccacagctgacgaggaaattagattccctatagtataatcttgtaggactgtatactttytcttgacacttatcacacttagaattactttttgcaatgtttctctgtctcctcagacctgtgatgagcaatatggcagccacatgtacctattgagcatttaaaatgtgcctagttcacattaagatgtgctgtagtgtaaaacacatgccagatttgacaaacttagtacatactgctactgaaaaaaaaaatgtggccctgcagaaaccttgattttagcccatgagaccaattttagtcttcttagctttagtaacagaagagaataaatttaggttgtcttaagacactagtctatc

SEQ ID NO: 111653 - DNA, 542 bp, Homo sapiens
acttgcctacttagattggcaccaaatccttaacacagactgttgtaataggacaacagaagctattaaagggtttcaaactgggaggggagggaagcatgcaatcttcctacttctgtcttcctacttctaagactcaatccacttgccgctattttctgctttctctaggaaagcttcccacagctgacgaggaaattagattccctatagtataatcttgtaggactgtatactttttcttgacacttatcacacttagaattactttttgcaatgtttctctktctcctcagacctgtgatgagcaatatggcagccacatgtacctattgagcatttaaaatgtgcctagttcacattaagatgtgctgtagtgtaaaacacatgccagatttgacaaacttagtacatactgctactgaaaaaaaaaatgtggccctgcagaaaccttgattttagcccatgagaccaattttagtcttcttagctttagtaacagaagagaataaatttaggttgtcttaagacactagtctatc

SEQ ID NO: 111654 - DNA, 261 bp, Homo sapiens
tttcgttcttgattaatgaaaacattcttggcaaatgctttcactctggtccgaactgcgccggyccaagaatttcacctctagcggcgcaatacgaatgcccccgcccgtccctcttaatcatggcctcagttccgaaaaccaacagaatagaaccgcggtcctattccattattcctagctgaggtatccaggcggctcggacctgctttgaacactctaattttttcaaagtaaacgcttcgggctgcaggacactca

SEQ ID NO: 111655 - DNA, 261 bp, Homo sapiens
tttcgttcttgattaatgaaaacattcttggcaaatgctttcactctggtccgaactgcgccggcccaagaatttcacctctagcggcgcaatacgaatgcccccgsccgtccctcttaatcatggcctcagttccgaaaaccaacagaatagaaccgcggtcctattccattattcctagctgaggtatccaggcggctcggacctgctttgaacactctaattttttcaaagtaaacgcttcgggctgcaggacactca

SEQ ID NO: 111656 - DNA, 261 bp, Homo sapiens
tttcgttcttgattaatgaaaacattcttggcaaatgctttcactctggtccgaactgcgccggcccaagaatttcacctctagcggcgcaatacgaatgcccccgcccgtccctcttaatcatggcctcagttccgaaaaccaacagaatagaaccgcggtcctattccattattcctagctgmggtatccaggcggctcggacctgctttgaacactctaattttttcaaagtaaacgcttcgggctgcaggacactca

SEQ ID NO: 111657 - DNA, 261 bp, Homo sapiens
tttcgttcttgattaatgaaaacattcttggcaaatgctttcactctggtccgaactgcgccggcccaagaatttcacctctagcggcgcaatacgaatgcccccgcccgtccctcttaatcatggcctcagttccgaaaaccaacagaatagaaccgcggtcctattccattattcctagctgaggtatccaggcggctcggrcctgctttgaacactctaattttttcaaagtaaacgcttcgggctgcaggacactca

SEQ ID NO: 111658 - DNA, 498 bp, Homo sapiens
tgtgaagatatttccattttcaccttaggccacaaagtgctccaaatatccatttgcagattatacaaaaagactgtttccaaactgctcaatcaaaagacattttcaactctgtgagatgaaagcacacatcacaaagaagtttctcagaaatcttctgccttktttttatttcaagataattcctatttcaccataggaatcaatgggctcacaaatatccctttgcagattctacaaaagttctgtttccaaactgctcaatcaaaagaaacgttcaacattgtaagatgaatgcacacatcacaaagaagtttctcagaatgcttctgtctagttattatgtgaagatatttcctttttcaccatagtctttaaaccgctcaaaaatatccctctgcagatactataaaaagactgtttccaaactggtccatcaaagaatgtttcaactctgtgagatgaatggactcatcacaaagaagtttctcagaattc

SEQ ID NO: 111659 - DNA, 537 bp, Homo sapiens
agtcatttaaaaaaaatatccttgacagttgtgaataatgctgcattgaatacaggagtgcagataatttttgagatgctgattttattttgtttctttacagaagtgaaatttcaggattgtacgatagtctattttttaaaataaactgcgtactaattttcatgactcttccagtctgcaactcattaaaactgtacagaaatattttgtcacatccttgttaaaacttgttatgtttcttttttgatattaaccattccactgctgtaaagtggtatcttttgatttgcaattttctcatgaatggtaatgtttagcatctttctacatatctgttggccatttraatatgtttgtataaaatatttagtcttggtcagtggagccaagagggccgaataggaacagctccagtctacagctcccagcgtgagtgacacagaagatgggtgatttctgcattaccaactaaggtaccagtctcatctcactggggagtgctggtcagtgggtgcaggacagtgggaacagcac

SEQ ID NO: 111660 - DNA, 419 bp, Homo sapiens
ctttcatgctgagtcaagtgtttaaaaaatatggctcaatattacaaacacacaggactgcgtagaggataatggtattaaactttcttgtacctcccagttaaaattcaaatgtggtaacatttggatgcatttgctccagagtttaagggaagaaaacattacggattcagccataatattcaagctgaagctcaagttatatgccccttttccagtccagttaccaccmccctcccactattctgaagtcaatgtgtgtcttcccatccatgtttaatacctagtgtgcatgtccatgaagaatggatagtatttttttggtctgtttttgcaattttatacaaataactgtccatacatactctcctgaaagttgcttttcccttcaacaatatcttccagatgaatccagaatt

SEQ ID NO: 111661 - DNA, 619 bp, Homo sapiens
tctcagaagaatctttaaaattttcccattacaaaaataacatatatttatttatgaaaatcagaaaatagagcaaraaaaagtagcataatgtcattattcgaacacaaagatggttatatttattgtatttctttctaatgttgctttttcttatttagacactgcgatggttaattttatgtgtcaacttgactgggccatgggatgctgagttatttgattcaacatcctttctgggtgcatatctgagggcggtttctgaaggggaccagcattagaacttgtggcctgagtaaagcagatgggcctccccagtgtgagtgggcatcctctaagcctctgagggcctgaatacaacagaaatgtggaggaaggttgaattcacactctgtctgactgcctgagctgggacagcaatcttctcctgtcctgcacactcctgcttctcaggccttcaaacttgaactggaatctataccatcagccctctagctctaaggtcttcaaactaaaccaccagctttcttgagtctccagcttgcagatggcagattatgggacttctcagcctctataattacatgaataataaatcttacatatatattacatatat

SEQ ID NO: 111662 - DNA, 555 bp, Homo sapiens
attaggtaaaaactgtctgaaatgtttcattaaggaggcaatggtgaaaaaagtttgagaaacacaactctttaataacatttattacacataacatattgtaattttctgtatttttccttcctctatccactactatacattacgactttttaagggcaaacaatcctgttttgctcatttttaaatctttaaaccatctattatagcatatacttatgttaggtataaaataaatgtttgttgaataaaaaagcaaacatggaagccacagcatgagtaaatttgaacaaagataaaagcaaccaagggtagtcgctaacttaagggtcaggttcaattatgaaagagactaaagaccagtagttggcaaaaacgtagatggtgtattagattagaagtccatgaaataagatactatttccccagaaaataaggctgtcaaggtacttcaraaagttctgtcaaggatactagtaaattatgctgaaattcccttgaattaaatggagaaattttccttgtttaacaaaataaaatgatgtttgatcaatt

SEQ ID NO: 111663 - DNA, 521 bp, Homo sapiens
aagaaatttccacagtacctggaggccctaagctattccaggatgatccatgacattattctcagttaccttgctctcttgctttgatttgggtcttgctagaggactggagtgtaaatcacctaagtgacttaggttgatacaaatatctgttataagatttaagggaaaaataaaattatcccaaggatgtagctgactgggagttgtcagaggtacatcgggacttcaaggttttgttcaactgtcatcctcttggggcagaaacgaaaatgtcagtagtttgagacttcctttttgctttaggataaccacaaattgcaatcttgtggtgacatcaattgtagaagtaggacggagaaatgctggtagctcaagaagaggtgagatacctgcaaaccctgtttgaactctgcacttatctgttttaaagcaggaaaatgatcacatcattctctggctcaaaaatttcaaatggctctccattgtcagtaggrtcaagctagactttttagcctagt

SEQ ID NO: 111664 - DNA, 545 bp, Homo sapiens
gaaacatttctgaaggcaaccataaacctttgcttctagagccccctgttaggacatgtggaaatgattcctgcttcaggtgggagattggtataggccacttctgaccacaattttagtgtgggccaagtagaataaaaggacttggaggaaaaagcaacctcccctggaggcacatgccaaggattctgaacagcagaatgtatgaaccaaacagtagccatgagcttgaattttcagataagcccttcaagaaataacttaaatcaagatagtacagcatttcataaagcttaaagtgctatgtaagtgaaagatactagcaattattcccaataatctattgacaaaataaaatccatcagtggtcaatataaattttcttaytaagaggtgacaatgcttccaatttccattttgtgtatagttcatctgaatatggtgtcatggtagctccaacaatggaagtcagggaggctggctttctgattatgttcacactaggattttctccggctctttgggaatctttgccagaagcaaaa

SEQ ID NO: 111665 - DNA, 554 bp, Homo sapiens
agcatgagcatcgtggccaggctgaagaaggtcatggcgaaagcgaagtaggtgcacgcgcggctctcgggcgccagtgccaccagggtctggttccgcgcgtacgaagccagtaccactgggctgatgaggcaggtcccgagcaggtcggtgaacaccagctcggtcaccagcacgtggaacaaggagagggagctcctgcggccggcgctgcaccccacgtccccccgccagcggcgcgccagcagcgccagtgctatgaggttccccagcaccccggccgagaacatgacggagctgatggcwgggctttcgcctgggggaagccactgtcgcgtctcgcagtcctcagactgggagtcattggaggcattgcccatggtggggtgcctggaaaagagatgcgccctcctctcccggcctttacctgggaggaagagggtctgagagccggagcgttccgagactcagaggaaaaaggggagggaccgaaatccagagcccccttcccgcacccagcgcgccgacggcggcttgccctgggtctcccgccg

SEQ ID NO: 111666 - DNA, 580 bp, Homo sapiens
tcggtcaccagcacgtggaacaaggagagggagctcctgcggccggcgctgcaccccacgtccccccgccagcggcgcgccagcagcgccagtgctatgaggttccccagcaccccggccgagaacatgacggagctgatggctgggctttcgcctgggggaagccactgtcgcgtctcgcagtcctcagactgggagtcattggaggcattgcccatggtggggtgcctggaaaagagatgcgccctcctctcccggcctttacctgggaggaagagggtctgagagccggagcgttccgagactcagaggaaaaaggggagggaccgaaatccagagcccccttcccgcacccagcgcgccgacggcggcttgccctgggtytcccgccgcgcgccgagtggcggctcggctgctgcatccgagcggcgctcgaggctcccgcgcctacccgcgccggccaaggccgggagccagagcctaggggagccgtcgtctccgcccccgcactgtcggggggcgggcccaagagtgctggccaggccttgcaagtgcgagtgtccgcgagctgcaggggagg

SEQ ID NO: 111667 - DNA, 464 bp, Homo sapiens
aaggcctgtttccctctgagtactcacttggcccaagggaaacatatcatccttgccataccccatagtgggagttcagactgactcactgctgccttctctttctgtgttattatggattgtggtctcccttcaaaattttccagaaaaggggctcatragtctctatgttcatatatgcctcactctactgaggatacatgtcaggtttgctcaagaaccctgttgctgtattctgctctgacgacacagtgaggtgggctaaccaggttctgcatttctgcaagtgtacagtttaagaatgagaggccagtctcctttgttcactctccattctccttcagtgtttctcctgatcaccatccgtttagcttgaaggagtaggtgcaccttccactccatttataaggccaccacactttccctttaggctgcaaactcctcatttctgttggtgactgaat

SEQ ID NO: 111668 - DNA, 618 bp, Homo sapiens
agactgaactcaattctgctgaaacaaaaggtaggagtttttaagcactggggtaagctggtggaagagtcctagaggaacttagtgagagggttagtcagtgtgattatgccattgtgtgtactaattgatgcttatcacttgaagttagsctcttacccttcctcagagactgggaggaagaaacactgtctttcttgatgatttcatttcaaagagatggctcccaggtccttaagaaagacaatcctgagttgtaaaactggtaaaagactggaagaagatttatttacatttcaaagggccagagaaagaatttgcaattacaggtttttaaaagtaaatgctttaagaaaagggaggtcagggcctacagttaggaagaaacctgtctaaactttagtcaagctgaggggagccttaaggccatcttgattaatgcagagtagtagcttctcatatatctgtcaatgcaaaaaccatcattggctcagacttttgaaacaagttcctggttatagacacaggccatggtgaaagaagagagcactccatctccaagggaatattaaaagtagagtccagtggcttgggcagagacagaaggctttgtgctgg

SEQ ID NO: 111669 - DNA, 577 bp, Homo sapiens
attttgaaatcagcaatctgaatctatggcctttgtttgatgtctgcatttccacagacccgttgagtccctgtgggatcttgccttctgtttctgccatgggtcctcctcctgccaaaggggtttccttgctgcatcacaaaagctaaagtcagtcaaaagaggttttatcaccatatttagacagaaaagcaatatcagaaattayagtgagtgctgctgcttctaatggctgtgagcggctgttgccccacttgccatctggtggcatgtttttctttttgtcttcatttatggaccatgtgctagtttgcgtgttatctctctctctctttctctctttttctctccattcatttgtccacccctttcatccactgagtccccttcctccttacctgcttattttcttttttgctgtttgtcttattaagagcattattaaagtcaatcattaaagtatggaaagtgttttaaaatccttagaaagaagagaggtataacttctattctgaataaacactctaaggccacattggaatgattcaggaacaacagcaacaaacagcacgaaatt

SEQ ID NO: 111670 - DNA, 602 bp, Homo sapiens
ttaaaataagccaagtttcatcacatattgatataatctatatgcaaaagcaaacctaagggagatgttcctttccttgagataagcaagttgcatatagtccaatgagcctcatttgtgctcacatatctatcacaacacccatcaaacctgatggcattgatttatactactgracttgaaaactcttgggggcaagacacattttgtctttgtatgatgactaccaggcactgtgctaggcaatgaatgcttgtggaaggcgaataaaaataaaatcataaaagaaaagacgtttgcacacaactttgcaggtatatatgtattatgctttcacagatataatacaattgttagcttttgtttaatcattgatttatacataatataccaacagagagatggtctgctcctaaagaaaaaatagtgtgataatcatcaaaatattctctatcacttctgtatgtttttactgcatcctaggcactctgttaaacagattatatgcgttttagttagaatgttaagtttggcacaaaaaaaaattttaatgtcttagaatagtttatattatactactttgtagtttgcttaatgcttcc

SEQ ID NO: 111671 - DNA, 593 bp, Homo sapiens
ccaagtactgagtcttacagcgaggatcagattatcaggtttgaccttcccacccaagaagacattttctaataactttacattgtctgccattaaaaggggagaaatgaaggaagggagaaaggagcaaagaaaaagagagaaagaaatgaaagatgagaatgaaagaargaatgcttaagaattatgtctaggcagggcatggtggctcacacctgtaatctcagaactttgggaggcctaggcaacagatcacttaaagtcaggaatttgaaatcagcctggcagacatggtgaaaccatgtctctactactcgggaggctgaggcagtagaatcatttcacttcatgaggcatcggaagttgaaaagagctgagatcatgccactgcacttcagcctgggcaacagagagagactgtgtctcaaaaaataaataagtaaataaaaagaattatgtctagaaaaaaactttggatatgattactggcacataaaactggaaggcaggaaataaaagtctcctaagttttgaggaagttttatttccaaagaaaccacaacctggactaaagactattttagtgtccaagc

SEQ ID NO: 111672 - DNA, 596 bp, Homo sapiens
aggaactgattccatctcaaaaaamcactttttttgctcatatctataagaaacaactcctcattcctcattcactcaagtttgatcatgagattgtagcaattcagttgcatcttcaggatccacttctgattctggttctcttgctatgttcaccacatctgacattacttttgccactgaagtctgaacccctcaaagtcattaattagggttgaaataaacttcttgtaaattcctgttaatgttgatattttcagctcacatgaattaagaatgttcttaatgacatctacaatcataaattatttccagtggtttaaatttactttgcccagatctatcagaggaataagagctatctatgatagctttagccttacaaaatattatatcttaaataataagacttgaatatctaaattactccatgatcccgggttaaagaatggatgttgtgttagtaggcatgaaaacttcaatcttcttgtataccttcatcagagctcttgggtgaccaggtattttgccagtgagcagtaatattttgaaaggaatctctttttctgagcagtaggtctcaacagtgggtttta

SEQ ID NO: 111673 - DNA, 593 bp, Homo sapiens
ccaagtactgagtcttacagcgaggatcagattatcaggtttgaccttcccacccaagaagacattttctaataactttacattgtctgccattaaaaggggagaaatgaaggaagggagaaaggagcaaagaaaaagagagaaagaaatgaaagatgagaatgaaagaaagaatgcttaagaattatgtctaggcagggcatggtggctcacacctgtaatctcagaactttgggaggcctaggcaacagatcacttaaagtcaggaatttgaaatcagcctggcagacatggtgaaaccatgtctctactactcgggaggctgaggcagtagaatcatttcacttcatgaggcatcggaagttgaaaagagctgagatcatgccactgcacttcagcctgggcaacagagagagactgtgtctcaaaaaataaataagtaaataaaaagaattatgtctagaaaaaaactttggatatgattactggcacataaaactggaaggcaggaaataaaagtctcctaagttttgaggaagttttatttccaaagaaaccacaacctggactaaaractattttagtgtccaagc

SEQ ID NO: 111674 - DNA, 591 bp, Homo sapiens
aaaaataaaatctgacctcatgtagaaaaatgaatatatttaatctcacctactgaattttaatgcagtacatttatattaccgattacccaaacataaaatatattttaattcctttatagtgactgaacattttggataattaaaagttaatgacctgaaaaagtagaagaaacctgagtaagtatactatttacttttatccctgtttagattgtataattgaaatgacttagctttactatcatttactgcaaaaatcatgatttttattcttcagaattcttgtatttaaaccccagattattggaaagccataggtgtcatacagcatatattttagtgctgyggatattgaaaataattgcaaaaggctgatgtatttctagaaaattttattataaaatgtatctatactttcatgccatttgcaaatacaaatgcaaagaaaatatcttcaaatctgtccctaaaaaagaaaacaacaactgatcctgagggttttgtctttgcatatagagttgtgctttatttatttagatattttaccaaacaaataagccaatccaaatgattaagtagtgttggaat

SEQ ID NO: 111675 - DNA, 591 bp, Homo sapiens
aaaaataaaatctgacctcatgtagaaaaatgaatatatttaatctcacctactgaattttaatgcagtacatttatattaccgattacccaaacataaaatatattttaattcctttatagtgactgaacattttggataattaaaagttaatgacctgaaaaagtagaagaaacctgagtaagtatactatttacttttatccctgtttagattgtataattgaaatgacttagctttactatcatttactgcaaaaatcatgatttttattcttcagaattcttgtatttaaaccccagattattggaaagccataggtgtcatacagcatatattttagtgctgcggatattgaaaataattgcaaaaggctgatgtatttctagaaaattttattataaaatgtatctatactttcatgccatttgcaaatacaaatgcaaagaaaatatcttcaaatctgtycctaaaaaagaaaacaacaactgatcctgagggttttgtctttgcatatagagttgtgctttatttatttagatattttaccaaacaaataagccaatccaaatgattaagtagtgttggaat

SEQ ID NO: 111676 - DNA, 479 bp, Homo sapiens
gggaaatagagagtaattgtttaatgggaatgtagcttcagtttgaggagacgaaaagagttctgcagatggatgatggtcatgattgcacaacatcagacatgtatttaataccactgaaccataatacacttaaaaatcatcaaagtggtaaattttatatgtattttaccacattaaaaaaaaagaagaaaggactaaaatatattttttcttttttttttttagtctctctctagatctgtcatggtatttttttttcttgcaatttaatgcctgcatcctctaccccggtgacactcacctgatgagtgcaaatgtttgtaattgtcctagggctctgtctcctgaactcagtgttctgaagcaggggaattaggkagagaactagtttctgtttctcttggcctgccacccaaatccacagaggttgagcaacctcttgcttaggtattggttagggtatggatgagaggcag

SEQ ID NO: 111677 - DNA, 682 bp, Homo sapiens
actaattattagaatttcatatttttcaattgtctgtccatttttttttatcttcatccttgtttgtagaacacccaatgttatactggagaccttaaatgtgcttayatctattaagcaagccagctatggtgctaaaccattagaaaccactaccatatataagaataacgagctactcttcttttccaacaatttttctcaggaatgccctcacattcactttgtagacctactgatctctactctcaactttctattttttttcctgaggaataatttataaaatgctgtgcaacatctaactgacatcctctgaaatcttaatgcagaaatgagagaaatatgctattttttgcacattttaagagtagagacttcttaaatgctcttccagtagactcaggaataacagaggacccaaaggcatgttttgtagaaatagagaaatggcatatttaactaatacaataatttattttatcatttcccaataagtcctttataaatcttcaaagatttgtgaatgtatcaagggaaacatattatcctgaaatctgttttaatgtctaacctgaaatcaatacacacagtaatttgagttgattattttctgcaaaacagagcaatctgagcacatgtcattatgcatttggtgggtggcagcagcagttagcacagc

SEQ ID NO: 111678 - DNA, 598 bp, Homo sapiens
ttttaaatgcctatgaaaacatatttattactctagacagggaattcaaacccggagtcactttcctgtcttctgcctccatctatgataaacttgtgtcagagagacttctgccaagaaactgttaaagctggttaaaattaaaacaaacaaggaaacagcagtttgggggaatgttggagcagacaaggaagccaggatttgagaagtcaagatcttgagaagaaaaatgcattaaagaaaatcctacattttccactttaaaaaaaaaaaaaaaactttgcacatttgcaaattcctagggcaggacagagagagtgaacagaaagcagcatcatagatatttggagggattcattaggattgaaaagaaaaaatatagaagttctgggttaccatatggcaacaggaaattgagcagccaatttaggagtaaagggaatcccaggaaatgaagtaacatttgctgtrcctttcacctcaattctttgctggttcctaatctttgcatgaaggactaaatacaagaaattcggagaaaaaatggttgatgaaggccacaaaactaaacagagctcttaacaattttatagtgtta

SEQ ID NO: 111679 - DNA, 580 bp, Homo sapiens
tatttgtgactatttcaatatcagaaatgtatgtgtaatctattctggtagcttaaattctggtagcttattttcttgtatgcttcaatatttataatttagttctcacaacacagagatctaatactgtaaatattttcaatctgtatgtttatgtatttattctagttggcctggcacaagactttcagtgttgctgtgtgaccagccattggcttttcacattcacaactcctctgaattttttcttgcctcatttctggtcctggggaactctgatattttctcctcatctccattgtacattttaggkattctcaaaacttttattgcacaaacatcaacactgtccacataaggtaaatattttacttagatattttctagcagacattgagtactcatgagaaatcctcagtttctttatttggaacaccccctccccagtattccatatggagtagttatgtgtagaatgtgattacttcattaatatgtcaaagtagggatatattttgaacacatttctgaagttctaattcctttcttcatgaatagcacctgcacatgaacataatcg

SEQ ID NO: 111680 - DNA, 630 bp, Homo sapiens
gtctggctgaaaggtggtacaaactagtaaagatgccctggagaagcttattagaggatatcaattaatatgaattgccagattttcattgctcgatatgtcactacttgcacagtcagtactattgaattattaatagcacaatgccctaggacttgcctcaattatttctatgcaggcttaaagaaaagtttaaagacaaataaatacatatcctgggtactgcatttcctgtagctagaagtttgattatatctatttctagattctgtttttagctaggaattatgaggtgacactgaggtgtgttcattattcgatattataaatgatgggcaacaagctggtgtartttatttgtgaccaactgcaatggcatctctcacagaatagaaaggtctgaatcaaaattccagagcaattccttgaaagtcaacctaggggtacatcctgaaggactttttatatttccaaaagaaaaaaagtatcacttcattccttgctatgggaaaagttgaagagatgcaggctagtattccaaaataaatcaatgtaccagtgttattggatctaccatgtttctcattaaaatattttcttagtaagtagagaagagctttgtggtcagca

SEQ ID NO: 111681 - DNA, 615 bp, Homo sapiens
ccagatggtcagattgaggttatgtatatgaataatttaaaactttaggtatatatgctgtggctggcatctactacaatgtgaagaagctaattacattagctttcttgggctgccataacaaaaataccacagactggaagccttaaacaacagaaattaattttctcacagttctggaggcttgaagtcaaagagcaaggtccagtagggtcagtttctggtgagggctgacatctgggcttgtagacagccaccatctatttgtgytatcacgtgacctttttgctgtgtatatgtgcaggagcatgctctggtgtctctttttctttttataaggacacaaattttattggcacaggtttagggtcccacagttatgacctcatttaacccttatcacctccttgcagtctctatgtccacatagtccctttcacatttgaggttaaggtgacaacatgtgagttctggggaacaaaattctgttcatattagtctcccctggctccccaaaattcatgcttttagcccatgccaaatacattcattcaatcctaacaactccaaaagccttaattcattccagcatctactctaaagtcaaaagttcag

SEQ ID NO: 111682 - DNA, 588 bp, Homo sapiens
aggtctacatgcaaattcaagaaattcacagaacctctgggagacactataccagacaaccattcccaaaacacatagtcatcagattctctaatgtcaatatgaatgaaaaagatcttgggtagctagagagaaaggacaggtaacttacaaagggaaaaccatcaggctaatagcagaccttccagcagaaaccttacaaaccaaaagggattgggatcctatttttaacatccttgaaaagaaattcaaaccaagaattttacatcccaccaaattaagcttcacaagtgaaggagaaactacaccattttcagacaagcaaatgctaagggaattattatcactagacctgcattacaagggtcctaaaggaagtgctaaacatggaaatgaaagaackataccagccaccacaaaaacacactcaagtacatagcccattgacactattaaacaactatacagtcaagtctacataactctcagctaatagcatgatgatagtatcaaatcctcacatatcaatattgaccctaaatataaatgggctaaatgtcccacttatggggcatagagtggcaagtt

SEQ ID NO: 111683 - DNA, 588 bp, Homo sapiens
aggtctacatgcaaattcaagaaattcacagaacctctgggagacactataccagacaaccattcccaaaacacatagtcatcagattctctaatgtcaatatgaatgaaaaagatcttgggtagctagagagaaaggacaggtaacttacaaagggaaaaccatcaggctaatagcagaccttccagcagaaaccttacaaaccaaaagggattgggatcctatttttaacatccttgaaaagaaattcaaaccaagaattttacatcccaccaaattaagcttcacaagtgaaggagaaactacaccattttcagacaagcaaatgctaagggaattattatcactagacctgcattacaagggtcctaaaggaagtgctaaacatggaaatgaaagaactataccagccaccayaaaaacacactcaagtacatagcccattgacactattaaacaactatacagtcaagtctacataactctcagctaatagcatgatgatagtatcaaatcctcacatatcaatattgaccctaaatataaatgggctaaatgtcccacttatggggcatagagtggcaagtt

SEQ ID NO: 111684 - DNA, 473 bp, Homo sapiens
aatatcattcttttgcacttatttatccagtttttcacaccgtttgttggagagactttcctttatattattttattgttttaggcaatatcataaatgagattgatttcttaatttccttttttgatagttcattgttagtgtatagaaaggaaactgattttggtgtggtcatttttgtatcctgcaactttactaaatttgtttattagttctaacaggtttttttttttttagatggagtcttgctctgtcaccagcstggagtacagtggcgtgatctcagctcactgcaacctctgactccctggttcaagagattctcctgcctcagccttctgagtagccaggattataagcaggcaccaccatgcccagctgatttttgcattcttagtagacacggagtttcaccacgctggccaggatggtctcaatctcctgacctcatgatccaattgcctcggcatccc

SEQ ID NO: 111685 - DNA, 605 bp, Homo sapiens
gattactgtgatttaggacctaagctaaacacaatatatatataatcttacttaatgtttctcactttcataaggatttccccattatatagataaggtaacggggtcttagactggataagaaagtggcagtcagtttggagtcaagctctgactaacaaagcctttgctccttactgctttgtgtgctgggcacatggtctggattcttaacctcttgatcaaaccagactgttctcatttataaggtgggcaataaaaccaaacagctcagacccctactgggaatgggacggtctaggacaaacagcctcgggaaatctgctcctccttggaggctggagctaactgtagggataaaaggagtgtttctctgggctttgccgggtgtggggagcatagacatatgtcctattacaaatacacctacataatagcttccttaagtctattttaagtstattcctcccaaggagatggaaagtaagagtgaaaacgggcacaatctgggacatctgaacaaaaaatcagacttctcatgtcaggcctctcctgccatgatgaggttgcaagcaggggatatgaagtggggaatagaagggctg

SEQ ID NO: 111686 - DNA, 633 bp, Homo sapiens
ccaaatgccaataagcaaatgttttttccttgagaaaatatggaagagggaattacactaaaacatactactcagaaggatctgttccactggttttgctggtagaagtggcataattagrcctcttcaaaccaaacagtgtcctgagaaaagagtgaaaaccagaaatccaggttctcattgatatggcctcttctccattctgctgcctttcatgagctattctttacggaattaaagcttgagactaacagcactgctatcaagacatgagggtctctagacaactggaaacatccctggtcacttcacacaccccacaccacaaactctcttgcttgaatccaacctggtagataacatattacccaacattgaagtatcaggttggctttgaatccctattgaatgtctactatgcattcagtgaggagtttcaagttatagagattaagaagaaaggccctaacgtttggcttataagctagttgaagaaaacacagtgcatgcagaacagtggaagacaatattccttcctcaaacactactgagtgcctactttgagctaggccctgtgctagacaataggggtgccaaaagtaaattgattccattttgttcaattcaactcat

SEQ ID NO: 111687 - DNA, 623 bp, Homo sapiens
cccttgacccacagttatgtgtctaggagtctactcaaactattctatagaaatgctgatacatatatgcaaaaatagatagaacaatgtataaagatacatacatatatatgcaaaggtatataatatatatacacctaaatacgtatataaatattcatatatttcttttttgttacagttctgtttattttagcaaaataargaagaaacaacttaattgcccatcagcaggggaattgttaaaaaattaggctacaaccacaccttacaatacaatatagccactaaaatactggagtagatgtattaggttaaccatatgaaactgccaatgttttactgctattgacataaataacaatttcatatgcttcaacgtaatatatgtacagatgtgaaaagatttataagaatattggtagttgaaaaaagcaagttgcagaacggtacctacagtatggcatatttatgtttaagacataagacaaacctatagagaataaacaagaaaggtactcaccaaaaaattaagatggttatttctgggcatggcagttttcatattttactctataaagttctacatcgttttactccttcgtgatgaaaattttttataa

SEQ ID NO: 111688 - DNA, 493 bp, Homo sapiens
agaaaagagtaaaaagcagaacttcaacttggattatctcaagacgattgcctgaaaatttcctgcttatttttcctgtttaaacctggcttttcagatgaatgtgaggtgatctgcttttctgtgattcagaacttcatagaatttggcaggccaagaattacaaagaaaggaagaaaatgaaaggaggaaagtgaggtagtgaaagaagatgggcagaacttgagaaagctttataaagtaacagaacayaccccacaccttttgggaacaaaggaacaaagctgatggaacacaacagatgttctccttcccaaaccataaaagcataacactctacaactcctcctcactccaaggagtggccaatgctccttactggaatatctgtacaacaacggtttttgttgttattattgtttccttagaacatggataaaaaggaaaaaacaccattaccagaaactgtcaagtgtggtttaactgtattatc

SEQ ID NO: 111689 - DNA, 493 bp, Homo sapiens
agaaaagagtaaaaagcagaacttcaacttggattatctcaagacgattgcctgaaaatttcctgcttatttttcctgtttaaacctggcttttcagatgaatgtgaggtgatctgcttttctgtgattcagaacttcatagaatttggcaggccaagaattacaaagaaaggaagaaaatgaaaggaggaaagtgaggtagtgaaagaagatgggcagaacttgagaaagctttataaagtaacagaacacaccccacaccttttgggaacaaaggaacaaagctgatggaacacaacagatgttctccttcccaaaccataaaagcataacactctacaactcctcctcactccaaggagtggccaatgctccttactggaatatctgtacaacaamggtttttgttgttattattgtttccttagaacatggataaaaaggaaaaaacaccattaccagaaactgtcaagtgtggtttaactgtattatc

SEQ ID NO: 111690 - DNA, 516 bp, Homo sapiens
gctgtcctgttcacagttacatcctttgtgcctatacagtgaccagcacagagtatgtgttcagtgaatgtgtgctgagtatataaataagtggctgaacacaaactattatctaaatgtaattgttagtaataataattcttcctttatttagcagggctaggattttaaattgcttcctgctattaacactgaataaatatggcaatatggctatactacattctcttaatatagaattcaakactctccaaatacactctgtttatcctcacacacaccttgacaataggtatgggttagtggtgctatcatttcatcactcataagaatagggagattctttacctcacccaagactgcacaggcattttcaggagcagccgttaatagattttatgtttctttatattcagcccattgctgaggatgctaaatcctactaaagctataggcaccagagccttatgctgcttcaagggtctacaatactcccaaattaattcatggaaatgg

SEQ ID NO: 111691 - DNA, 627 bp, Homo sapiens
cctacttccattttcatcactgcagggcccaagctcttacctgtctttatcagaattaactcttagggggataagaatggtatggaaaatatacatcagttagcatcagttaaagaggccagtcaattcctgcctctgaatactatattccagcccttcaattaaccatttccctctttttagccctgctccatttctcagatccatcctgagaggctgaaagtatgtttgcacaagcacgagctttggagtctagctatgtgacgttgaacaagtcatatcatcttgcagtaaaatgggaacaataaatacctacctcttggggttattgtgaggagtgagataatatgtataaagagcttagtaccagacctgaaacatagtaagtactcaataaatggttgctgttattattacacttcccaccccaatctggtacttaattttgatcactctctccatatacctgcatgtctttgasgtcaggatcttaactaatctatctttgaccccctgtacagtgccccatgtctagcaaaaggtagatgcttagtaaatgctgagtgaaggaacaggaccaacactgccttagatagagtggggctgactcctgggctcctgaattgt

SEQ ID NO: 111692 - DNA, 597 bp, Homo sapiens
cactttctccaagaagcctttcctagtcctccagttagaattaattgtcccctgctcaatgttcctgtgatgtttattgtataatattcccatgtcattatattaaaatgttatctatttattacataatatatattatgcagtattcctatatcattattataaaaatggtamcataaaggtatatggaagatgattagcactctgagcagcctataactcagcctcaataaaaaagaactattttaagattatgaataacttcatatctgccccacaggtcaggctctaaaggtacatagttagaaagaaactaacttctttgacattgtgaatcacaaaatctagctgttctaaaaacaaacctgaaagaaaatgtaggtatgagccataccccacgttccttcatctgctgggataaacacttcactttgtccaaaagatgtcaagtctcagaatgaaacaggccctactaacctaaccagcacatcacaccacataagacacataaaatcccctttccatcattccagctatgctcaaactcacttccacctgaggctactcactaaacttttaagcaactatagcaacaag

SEQ ID NO: 111693 - DNA, 597 bp, Homo sapiens
cactttctccaagaagcctttcctagtcctccagttagaattaattgtcccctgctcaatgttcctgtgatgtttattgtataatattcccatgtcattatattaaaatgttatctatttattacataatatatattatgcagtattcctatatcattattataaaaatggtaccataaaggtatatggaagatgattagcactctgagcagcctataactcagcctcaataaaaaagaactattttaagattatgaataacttcatatctgccccacaggtcaggctctaaaggtacatagttagaaagaaactaacttctttgacattgtgaatcacaaaatctagctgttctaaaaacaaacctgaaagaaaatgtaggtatgagccataccccacgttccttcatctgctgggataaacacttcactttgtccaaaagatgtcaagtctcagaatgaaacaggccctactaacctaaccagcacatcacaccacataagacacayaaaatcccctttccatcattccagctatgctcaaactcacttccacctgaggctactcactaaacttttaagcaactatagcaacaag

SEQ ID NO: 111694 - DNA, 588 bp, Homo sapiens
cagctaggtatttttccagtgacctatgtattagtgactacttttctgaacatcaaataggagcatggtttgaagacatttgagtaattttcttttattatgggaggtatacagaaaatgtacttcagatacttaaggcattttcaaaatttatagagacagggatgtataatagttaagagcagtgactgtgataataggatacaatatttaaaactgagattgtcgaggttttgactgaatggttgttgtgatggttaatactgagtgtcaacttgattggattgaaggatgcaatattgatcctgggtgtgtctgtgagggtgttccaaagaagactaacatttgagtcagtgggctaggaaaggcagactcacccttaatcaggtgggcaccgtctaagcagactccagagaatataaagccgacagaaaaatgtgaagaggcaagacgggcctagtctcccagcctacatctttctcccatatttcttccaataaagttaaaactttatatatatatatatatatawaatatataatatataatatgtaatatatactatatataatataaatatatattata

SEQ ID NO: 111695 - DNA, 582 bp, Homo sapiens
agatagcaatgctgtttggagcctttggcagactcccattgatgaatcacagtggaggcctctgggaatttggagtaaggccttgccatcttctgcaaataactactctctttttgagagacagctcttggactgttactgggctttggtggaaactgaacatttgactatgggtcatcaagtcaccttgtgacctgaagtgcctatcatgaactggttgctttctgacctatctagccatgaagygggtcgtgcacagcagcattccatcatcaaatggaagtggtatatatgctattgggctagtgcaagtactgaaaggacaagtaagttacatgaggaagtgactcaaatgcccatggtctccactcttgccaccctgctttctctctgcaagcctgcacctatgacctcatggggagttccctatgatcagctgatggaggaagagaagactagggcctggttcacacatggttctgcatgataggcaggcaccacctgaaagtggacagctgcagcactacagcccctttctaggacatccctgaaggacagcggcaaagggaagtcttccaagtg

SEQ ID NO: 111696 - DNA, 605 bp, Homo sapiens
aacatttttaggagcccagtagtcagggggtacactgagatatcccctccaagtaataattagtttgctgcatcttatactcactaccattaagaaaaaagcacgatacctgaacaaaaggttgtttgaatttyggagggaacacattctacacttacgatgctcgtccagcctatatgccaggtaacatggaagtctgccagatttgagagttatgtaaaacagaaaagagttctggatcaggtttcagatgcagtgcaaggagctctgactcttgggccatattattctatagacctattgtgttggtggtgtcattggtgggataagacgcagtgtggagcatatggcaaaccacagtgagagggatcataagttcaggcccctcggttttttggagcaaggtgccatctgcagcggagaattcaataccttttgagaaacagctcctggcatgttactagacccagacacagaaagaatcttgaccactgagcaccaagtgaacatgtatctggaacttcccattaggggctaggtttcatcaaacccaccaagtcataaagataaactactcagaaacaatccattgtccaagaccagaa

SEQ ID NO: 111697 - DNA, 605 bp, Homo sapiens
aacatttttaggagcccagtagtcagggggtacactgagatatcccctccaagtaataattagtttgctgcatcttatactcactaccattaagaaaaaagcacgatacctgaacaaaaggttgtttgaatttcggagggaacacattctacacttacgatgctcgtccagcctatatgccaggtaacatggaagtctgccagatttgagagttatgtaaaacagaaaagagttctggatcaggtttcagatgcagtgcaaggagctctgactcttgggccatattattctatagacctattgtgttggtggtgtcaytggtgggataagacgcagtgtggagcatatggcaaaccacagtgagagggatcataagttcaggcccctcggttttttggagcaaggtgccatctgcagcggagaattcaataccttttgagaaacagctcctggcatgttactagacccagacacagaaagaatcttgaccactgagcaccaagtgaacatgtatctggaacttcccattaggggctaggtttcatcaaacccaccaagtcataaagataaactactcagaaacaatccattgtccaagaccagaa

SEQ ID NO: 111698 - DNA, 605 bp, Homo sapiens
aacatttttaggagcccagtagtcagggggtacactgagatatcccctccaagtaataattagtttgctgcatcttatactcactaccattaagaaaaaagcacgatacctgaacaaaaggttgtttgaatttcggagggaacacattctacacttacgatgctcgtccagcctatatgccaggtaacatggaagtctgccagatttgagagttatgtaaaacagaaaagagttctggatcaggtttcagatgcagtgcaaggagctctgactcttgggccatattattctatagacctattgtgttggtggtgtcattggtgggataagacgcartgtggagcatatggcaaaccacagtgagagggatcataagttcaggcccctcggttttttggagcaaggtgccatctgcagcggagaattcaataccttttgagaaacagctcctggcatgttactagacccagacacagaaagaatcttgaccactgagcaccaagtgaacatgtatctggaacttcccattaggggctaggtttcatcaaacccaccaagtcataaagataaactactcagaaacaatccattgtccaagaccagaa

SEQ ID NO: 111699 - DNA, 554 bp, Homo sapiens
atatacgaggtgagctattcaactcacatgtcccaggccccacatgaagggccatggtcatacctcccatccattaggatggctacaagcgaaaaaaacggaagataagaactgtttccaagcatgtggggaaattggaagcctgctgtaccactggtggaattataaaacagtgaaactgctgtggaaatgagtttggtggtgacatgcatggaattgtgtccccaaaaattcatacattaaagccctaacacctaatatgactgtaccatatttagctatgaagccttccaaagataacaggacgttgaattagagccccacaccataggtccttctcagcttatattcttatacggacacccaatagaatgggtttccatataagaagaggaagagctattagaagtgtgggtccaccacccaccacataactccatgctgatagatcaccctcyacccacactgcacctccatcctgacagatcaccctcacacacactgcacctctatgttgatagatcaccctccacccacactgcacctccatcctg

SEQ ID NO: 111700 - DNA, 554 bp, Homo sapiens
atatacgaggtgagctattcaactcacatgtcccaggccccacatgaagggccatggtcatacctcccatccattaggatggctacaagcgaaaaaaacggaagataagaactgtttccaagcatgtggggaaattggaagcctgctgtaccactggtggaattataaaacagtgaaactgctgtggaaatgagtttggtggtgacatgcatggaattgtgtccccaaaaattcatacattaaagccctaacacctaatatgactgtaccatatttagctatgaagccttccaaagataacaggacgttgaattagagccccacaccataggtccttctcagcttatattcttatacggacacccaatagaatgggtttccatataagaagaggaagagctattagaagtgtgggtccaccacccaccacataactccatgctgatagatcaccctccacccacactgcacctcyatcctgacagatcaccctcacacacactgcacctctatgttgatagatcaccctccacccacactgcacctccatcctg

SEQ ID NO: 111701 - DNA, 554 bp, Homo sapiens
atatacgaggtgagctattcaactcacatgtcccaggccccacatgaagggccatggtcatacctcccatccattaggatggctacaagcgaaaaaaacggaagataagaactgtttccaagcatgtggggaaattggaagcctgctgtaccactggtggaattataaaacagtgaaactgctgtggaaatgagtttggtggtgacatgcatggaattgtgtccccaaaaattcatacattaaagccctaacacctaatatgactgtaccatatttagctatgaagccttccaaagataacaggacgttgaattagagccccacaccataggtccttctcagcttatattcttatacggacacccaatagaatgggtttccatataagaagaggaagagctattagaagtgtgggtccaccacccaccacataactccatgctgatagatcaccctccacccacactgcacctccatcctgayagatcaccctcacacacactgcacctctatgttgatagatcaccctccacccacactgcacctccatcctg

SEQ ID NO: 111702 - DNA, 572 bp, Homo sapiens
ccaggtgtcctgtgattgacttggcagctctatttgaaatgccatgttgagttcacagatgccttttgaagattgcagcctctggggtctgttttcttactaaaagcttaacgcttggggccgttcgctccactaccttgctcacacctcctccaggaagaacagagttggctctgcccagcagccacctctatgctgtggagaaatcttgctcttcaaagcttttcttgctattggatatgtggagttctttgaagtgataagactcaagttctttgtctggaggaaccactgtccactgtatttccaagtttcttaaggattcccttgctcaaggaattctaacagtatcagggccctgtgctgtcttctgggcttcagggtgtygggaaaagcagtgcttagctctctttctcactttggacagaatgtgaacattcctcagtcactcagtctgaaacctcccttgcccttctctcttgtgtttaatcttctctggccccttttccacagaccttatctctattcagttccagtcagtcccacaggcaattgcatttgtggttctactt

SEQ ID NO: 111703 - DNA, 433 bp, Homo sapiens
gattaacatttgaccacatatctggacactgtagcccagccaaattgacacataacattaactatcacagaaacaatgtatttaataggcaagaaaagaaaaaggagataaaggagaatcataaaaaagataaaatgaaactaaaaacaagcaaacatcatttattaactcagatatcaataagagaaatcaagcaaaagataatcttttttgcacctgtattagtggccttgaggatcacatgacttaatatttcatgcccacagagcaaaaatacaaagtgaatgaaatcatgagattgctgggagatgcagatgattktaagtcgttgaagttccggtaagagaaaaagaaacacatgtaggatagattaagaattatataaaaaacagaggaaaacgctcatgagttaaataaatatctacaattgtaa

SEQ ID NO: 111704 - DNA, 611 bp, Homo sapiens
ttggaaataaaaaagaataatgtgtgaaaattctagagccttacagagtatggggcaggaagatggtgttggtagatgaaccagtggtgggctgtgataatttcaggaggtttgggagatggctgctggtatcttgaagagtttacatgcagaaataacagaggaactgctttagtttctccagaaatatctggatgctaaagtttccaggccaaactgagaggtgggacttgaggcacagcccaagagccccagctgtcaccagcagggaagcygaatgtggtcatgtgtaccgggagcagcaggcaagttgaaagcagtgattggtcagaagcagattcatcagggcttctaaagatcatcttgccctgcttctgacccaggtaggtcagtgcccagtccattctttgtaggtgtcaattcaaagactccccagaggagcagatggcccactgtccccaagaagctcatgcctgtgtcttattcccttagctgtcaggcatagtaggatgccagatccaggcatctggcagggatgagaaagcaggcagagagagcagggagagaaaatcaggtaatgccagggagctttcatgagggattgagtaagg

SEQ ID NO: 111705 - DNA, 460 bp, Homo sapiens
tgaaaatcttctggaaaggattatccattctagaagtcattaagaacatccacgattcacagagaagtcaaaatatcaatattaacaggggtctgaaagaagctgattctaaccctaatagattactttgagagattcaagacttcagtggaagaagtaactgcagatgtggtggaaatagcaagagaactagaattagaagtaaagcctgacatatttacctaggtaacaaactgcacatcatggacacataccccagaacttaaaagtcaaataaaaaacaataaaaacaaattgattaaaaatttttttttaaaaagtagagcctaaagacttaattgytacaatctcatgataaaacttaaacagatgagaagttggttatgaatgagcaaagaaagtgatttcttgagatggaatctacacctggtgaagatgctatgaacactgttatgatatt

SEQ ID NO: 111706 - DNA, 586 bp, Homo sapiens
tcctaactgtgcttttagttatctgcaaggtcaacaggaaccaactctgcctttattcctcatcctttcaccactggccttaaagctgcttcaccaggaaactggaatactccctaacaaacaaagtgtccaagcttgtgtctggctcccttgcctgaactcctctttctactctgtctacacatgtttttagtttagtttagtttagttttttgagacagggtttgctctctcctccaggctggagtgcagtggcgccatcayggctcactgaagcctcaaccttccaagctcaagtgatcctcccacttcagcctcccatgagtagctggaactacaggcatgctccaccacacccaattaatttttgtattttttgtagacatgggattttgccatgttgctcaggctgatcttgaactcctgggctcaggtgactctcccaccttggcctcccaaagtagtgggattataggcatgtgctacaatgcctggcctatacatgttcttttatgatccacctccttcatgaagctttctgtaattcctcaggctcctatttatcttcgtgtctctattaatcaca

SEQ ID NO: 111707 - DNA, 557 bp, Homo sapiens
atgtatttcatcctctgttaaaggtaggcatttgctgagaattaactgctttggtcactgaatgggtatgtccaataaaatgtttgtatctccattggatgctctgttttatgatccacagagctttacagctcttgtatacacccctcaggatacatcatctctctcttagctagcctttggctggaactttcttagagacacaggaaagtctagctgtctgtgaaattatttcaacactatggggcctttagagctgccttttctgcattggcctcaccttaagttaatgctactgcatccttccrgagtttcagatggaaacttcgaagttttcttcctgaaatacatttgaggattcatctttcccaaaacacatccaagtgtaaaaatcataaggtaacacctcaaaagtatgattaaatcatggaaaggagatcttttgtcaagggtatctatcaaaaataaaatgtaccagatcaaaatatattctacgtcctattacaggaaatttaaacagtgtctaagtgaccagttttacggatatggttaaggaa

SEQ ID NO: 111708 - DNA, 568 bp, Homo sapiens
acatgtgctgaggcagtactgtatgttcaccttactcccctctgagtttttcattttagatgagaattgaggctcactgagattgagtaacttgcctgaggacatcctactaatgaagggtgagactaagatttgaatccaggcagttaaagtttagagcatgaagagagagagacgataaggaggatggaagtaaatcgtggaaaagctcttggagatactgcattgagccttaaataataggcttttgagattagaggggatatcttctattgacactagctttctgtagatccttgaagctacacatcacagaccagacagtactccaccagtacttggaaatgaatgagttggagaattctgtgattctagatggtctgtactccagctcaggagctgaatattcaactccatcctagcatacttgagttcaagacagtattacaataatttgagaagaatttcttgctttgaggggatgaaggaaccacctccctctcacagaaaatttgattttaacttaacattaygcagtcacaggaattctaaaagtttagacatagtt

SEQ ID NO: 111709 - DNA, 651 bp, Homo sapiens
aataattggaacaagacaatgagacccattttaccacccctattaaacatagtactagaagttctagccatagcagtcaggcaggagaaataactaaaagaaatccaaactggaaaaaaagaagtcaaattgtctttgtttgggaataacatatttttacatttagaaaaacataaagactccatcgaaaaaactctttgctctgataacttcagtaaatttgcaggatacaaaatcaacatagaaacatcagtagcatttctgtacaccaataataaactaaaaaaaataaataaataaggcattcccatttataacagctataaaaaatattaactacctaggaataaatttaacaaaggagktgaaagatctgtacaaggaaaaccatgaaacactggtgaaagacattgaaggggacacaaatgaaagacatagcatattcatggattgtaagaatattgtcaaaatgaccatactatctaaagcaatctacagattcaatgcaatccctatcaaaaggccaatgaaaattttcacagtaatagaaaaaaatattaaaatttgtatggaacccacaaatagtttaaataatgaaagcattcctgaccaaaaagaacaaagctggaggtatagtacctaaccacaaaa

SEQ ID NO: 111710 - DNA, 610 bp, Homo sapiens
aaaatagcagggtgaaggagggatagtgccctgattcatgtagatctcataacttacaggggaattgataatctaatccatctttatctgatatctaaacaaatgtttccaaaagcatgttctgcaaagcaaatcacttgtcaggagatattttctaaagaaaagactccatggtcaaattaatttataaatgatgagtaaaacagtggtaagcttttgcattgtctccctgctttgtgaagctccaargggaaaatcaatgcagtatttcccagacatatgtgataagggagccagcttttcacaaagcatctggagggcagatcctagcactttgggacattttgctctaacattctaaatagtaaatattaggtaccagaaacatatgtttctaaatattatttctaaagtaactgaaaaatctcaataataattaaagaaaggccaggaattctaagtattagttaagacttaaagaggagcaaaacattccaatattggggacgggcatagggaggaagaaggaaaagaaggggaggaagaaggaggagacctctaaaggggtcacctcaggtcagactctcttctacctgacccttctacaaac

SEQ ID NO: 111711 - DNA, 648 bp, Homo sapiens
aaagcataggctacaaaacaaaaatagaggctgggcatggtggctcaggcctgtaatcccaccactttgcgggctgargcgggcagatcacttgtggtcagtcaggagttcctgaccaacctggccaacatgataaaaccctgtctctactaaaaacacaaaaattagccagacgtgatggcgcatgcctgtaaccccagctactcaggaggctgaggcaggagaatcacttgaacccaggaggtggaggttgcagtgagccaagatggcgccactgcactccagcctgtatgacagagtaaaattccatctcaaaacaatacataaaaataaacaaatggggctatatcaaactaaaaacttcttcacagcaaaggaaacaatcaataaaatgaaaaggcaactcacagaatagaaaacatattttcaaataatgtatctgataatggagttaatatctaaatatataaggaactcatacaactcaagaacaagaaaatatataacccatttaaaaattggcaaaggatctgaatagacatttttcaaaggaagacaagcaaatgactaacaggtatgaaaagatgttcaacatcactaatcatcagagaaatggaattcaataccactatgaaacatcccctcaca

SEQ ID NO: 111712 - DNA, 420 bp, Homo sapiens
ttatagaaagtagggtggagagagaaagaaaagatttttagtattaaagcttttagagatttggagagtgaatctactctttccttatattcaatcaagggtattcatatgggattcaacttgtacttttgatggcaacaatttatgaaacagtaaatataaatatacaaaatacaatacatttcatttttaacatgctaaccttgaactatttatttgtatgtccctcaggggtctcaaagtggcagggagcatgacatcttccaggaagagtgtatcacatgggacwtagggggaccttagatggaacttaaaaggaataaggatactaaattatgaggacttgggggacactagggagagctatccaactggttgcaacacaaagagtagtgaaagagaagttgttgattaacctta

SEQ ID NO: 111713 - DNA, 629 bp, Homo sapiens
tattttatatacaaaaatgaatcagaaagccaggtgcagtgtcatgcatctaaagtctcaactacgaggggggttgaggcaggaggattgcttgagcccaggagttcaaggctatgattgccactctgaataccaactacattccagccttggcaacctagcaagacctcatctctaaaacaaacaggcccaaaaaactaatcaggaaaacattcacatayaaggccttttataatatataagccttgaaaatgtcaaaaaattaaattttacttttgaaccagaatgctcttggaaaaaagttcatattcttttgtttattttttcacataaaataataattgtggacattttcttggtcctgcctgttcattttggaaaaaaaattaagttcaacctcataaatttcctcttggacctaacataattattaccgagatattttgatagatggcagtttgaaaagcttaaatgattcatctaacatgacacagaagtctgtatgaagtctgagaatacaattcatatcactggggtaatcattaagaaatttctctatcttttattttaaaatggattttagtttgctagcagaatcaaaccacttgttataagtcatttgttgaaca

SEQ ID NO: 111714 - DNA, 640 bp, Homo sapiens
atacagttagggcacaggcattggtaaatacagttattccaaatggaagaaattggccaaaacaaagggactgcaggccccatgcaagtatgaaatccataagggaagtcaaagcttaaatctccaaaatgatctcctttgactatatacatgtctcacatccaggtcacactgatgcaagaggtggattcccatggtcttatgcagctccaccsctgtggctctgatgggtacagcctccctcctggctgctatcaaaggctggcattgtgtatctgtggctttttcaggtgaatggaggacagtggccctcttctcacagctccactaagcagtgccccagtagggactctgtatggggactccaaccacacatttcccttctgcactgccttactagaggttttccctgaggaccctgctcctgcagcaaacttctgcctgggcatccaggtatttccatgcattctctgaaatctatgcagaggttcccaaaccccaattcttgatttccatgcaactgcaggctcaatattatatggaagctccccaggcttgaggcttgcaccctcaaaagccatggcccaagctctatgttggcccctttcagccacggctggagtggctgggatgcagggca

SEQ ID NO: 111715 - DNA, 582 bp, Homo sapiens
aggcctgcctttacactgatagggatttgaatttatagctcttgcaattaattaaatctcaagttaaacaattaagttggtcctgtgttggtaggctccaaagtcctctctataaggattcataaccactgagactacatgcagcacaaaaagacaaaccccaaccagacatgaactcacaatacagaaagaaytatgccaatgagaggtgtagtgagcagaaagaacatatgattgaattagacaagcaaggagtttagctattccaactaccaaatgtgcattttggagtaagtgcatttgatttttcttttttaaaataaatgaatttagagcatgaataagacaaaaggtattttcaagcaaaattggaaatgcttttaaaagaataaaacagaatctttgtataagagcatataaaatttacaggcccatatccacgtaaaccccacttagtttttaagaaaaaaaacctttgtagaaccttagaggatccttttatgattcttaacaatcaagatctttccccctcaccattgtaaccactaccttgacttatagaataattattcccttaattta

SEQ ID NO: 111716 - DNA, 585 bp, Homo sapiens
gatgcttgtaagtcaaatacttttgacaaaaaaattgcattttctaaggtcgtaaatgctccagtgaaagcagatccacctaccatttaaaaaacaactatcgaatatatattgcaaatctcagtccatattcctaaagttaaagccataactaaacctcagaaaagacccttgtaagaagcaggcttatcaggctcagactctaagcacattcctttgaaaacttctgctaatatgcaccagctatctttcagtctgctcattcaactttgtgaatataacaccactctctggagacagccagactgtgagagtgcttggtgagagaacccaggtttatttgaccatagaagcttacttttgtggaatgcttactgtcatctagtagaacactagagcccaggggatacaagcttggaataaaaggctcacagatatctgaaccctctacgtatccttcttcatttcccatgatctctggctcacactttttgattgagcaacacatggaagctygtagccccctgtatgcagtatgttgcttttcatccccatgtctttattctgcaacttcctggatggtaa

SEQ ID NO: 111717 - DNA, 615 bp, Homo sapiens
atgttaaaactcaaatttaaccctgttataccaggaaagcctttctttttaaatgcgtgttgaaacattttagagtaaattttactaaagtatatatgagccgagtggaaaaaaaaaaaaaacctgaagctggtaactttggtgaacaagttacccttaaatttgattgcttttcatttttgaaccacaaatgtaattctgtctcacattatagcccctccatctgcccctcgggaattttaatttkgttttaatttttggggttggggtgccaaaaaatatttttactttaagtatttatgccacaaaccctaaaacccaaattttaggtaaaaaccgaagaattcagctacatagttgtttaaaaccatggcaaccatagttgctatggttttaactaattttttgctgaaacagtattttaattctgagttgatccttttatgttgtctacctgcatatttaagatgatttgttttaatcttcaaagttagagttaaaaaaaattgtatatgtctgaaataatgttgtttgtagcatctgtcagtaaaacaatatagaccaaattttagaccttagttttatggctgatgggccaaatttttttttgtattt

SEQ ID NO: 111718 - DNA, 615 bp, Homo sapiens
atgttaaaactcaaatttaaccctgttataccaggaaagcctttctttttaaatgcgtgttgaaacattttagagtaaattttactaaagtatatatgagccgagtggaaaaaaaaaaaaaacctgaagctggtaactttggtgaacaagttacccttaaatttgattgcttttcatttttgaaccacaaatgtaattctgtctcacattatagcccctccatctgcccctcgggaattttaatttggttttwatttttggggttggggtgccaaaaaatatttttactttaagtatttatgccacaaaccctaaaacccaaattttaggtaaaaaccgaagaattcagctacatagttgtttaaaaccatggcaaccatagttgctatggttttaactaattttttgctgaaacagtattttaattctgagttgatccttttatgttgtctacctgcatatttaagatgatttgttttaatcttcaaagttagagttaaaaaaaattgtatatgtctgaaataatgttgtttgtagcatctgtcagtaaaacaatatagaccaaattttagaccttagttttatggctgatgggccaaatttttttttgtattt

SEQ ID NO: 111719 - DNA, 615 bp, Homo sapiens
atgttaaaactcaaatttaaccctgttataccaggaaagcctttctttttaaatgcgtgttgaaacattttagagtaaattttactaaagtatatatgagccgagtggaaaaaaaaaaaaaacctgaagctggtaactttggtgaacaagttacccttaaatttgattgcttttcatttttgaaccacaaatgtaattctgtctcacattatagcccctccatctgcccctcgggaattttaatttggttttaatttttkgggttggggtgccaaaaaatatttttactttaagtatttatgccacaaaccctaaaacccaaattttaggtaaaaaccgaagaattcagctacatagttgtttaaaaccatggcaaccatagttgctatggttttaactaattttttgctgaaacagtattttaattctgagttgatccttttatgttgtctacctgcatatttaagatgatttgttttaatcttcaaagttagagttaaaaaaaattgtatatgtctgaaataatgttgtttgtagcatctgtcagtaaaacaatatagaccaaattttagaccttagttttatggctgatgggccaaatttttttttgtattt

SEQ ID NO: 111720 - DNA, 559 bp, Homo sapiens
aagagattacaaaatggggaaaatggggcatatatttattatcctttttctccagmaaaacaatgaaggcttctccagaaaaacaatgaaggcttctttcacatctttgagtcttttctatttcactgaaatatatatatatatatatatatatatatatacactctatcatatgcttaaatacaatattagagataattataataagacatttaattagatcacaaagtatggaagtattagaacaatgttaacagacttgcttaaccatcttttagatttctatgataatttgagaaattttatttgtcactattaaataaccaatttgcctaaataatgtaagttacatgaagaagctactcatgtttctcatattgttgataatctatattctccatatatgtctaaattatttataccaataaaaaataaacctgattcttattatatataatttggcagaagccaatagcatatggaggtatcttgtgcaacacaggcatttaacattgagggttacagctcaaaaactgcactgtgcaaacattaatacagc

SEQ ID NO: 111721 - DNA, 559 bp, Homo sapiens
aagagattacaaaatggggaaaatggggcatatatttattatcctttttctccagcaaaacaatgaaggcttctccagaaaaacaatgaaggcttctttcacatctttgagtcttttctatttcactgaaatatatatatatatatatatatatatatayacactctatcatatgcttaaatacaatattagagataattataataagacatttaattagatcacaaagtatggaagtattagaacaatgttaacagacttgcttaaccatcttttagatttctatgataatttgagaaattttatttgtcactattaaataaccaatttgcctaaataatgtaagttacatgaagaagctactcatgtttctcatattgttgataatctatattctccatatatgtctaaattatttataccaataaaaaataaacctgattcttattatatataatttggcagaagccaatagcatatggaggtatcttgtgcaacacaggcatttaacattgagggttacagctcaaaaactgcactgtgcaaacattaatacagc

SEQ ID NO: 111722 - DNA, 617 bp, Homo sapiens
gtggaatctaaaaaagtcaaactcatagaagcagagtaaaatagtagttaccagaagctgggggtgaaaggataattggggagatattggtcaaaggataccaaattagacagaaggaataaattcaagagatctattgtatatcacagtgactgtagatagtatgtttcatacttgaaaattgctaagacagaagatttttaagtgttctcacacaaaatatgatatgtatgtgaggtaatacctatgttaaatagcttgatttagccattccacaatgtatacatatataaaaacatcatgttggctgggtgcagtggctcacacctgtaatcccagcactttgggaggtcaaggcaggaaaatcgcttgagcccaggagttcaagaccatcctggacaaacagtgagaccctgtctctacaaaaactagaaaaaatttagccaggcatggtagtgtgtgcctgtagtcccagctacttgggagatggaggtgggaggatcactttggcctgggaagttgaggctgcagtgagygcagatcgtgtcactgcactccagtctaggtgacagagtgaggccctgtctgaaaaacaaaaatgaaaacaaaaccatgtt

SEQ ID NO: 111723 - DNA, 623 bp, Homo sapiens
catggctgggcagcatgtcactgttctaggggccgagggcaaatttgtctatgcttctgtcattgactgacagacaagcacatgtgattctgttgtttctccctagatggcagcagcagrgccaaggaaataggcagggcaggaggctcttggtttgctccacagggtgacatgtaaggcagtgattgccaccttaatgtcctcaggaacgtagaggtcccaaagggagtttgggaaataattcttttcccggtcagcctgtgggtcattgcatacccactggtcatcagcagcagcaaacaacctctcctgcaccccgccctgcacttggcatgaaaaacacagagaggcacagagagtccccagcttacaagctggatagagttcaagttcatctgtttcaaagtcaagaatgcatttttccaagaggcattgttataaatgggggagggggaggatgttcccagattaaccaaaaaataaaaatctatttaatgtatattaggagtttgcaaaccttttctgtatgtgactagatagtaaatattttaggcattgtggggtcatacagtctctatcacacattcttatctgttttgactttttgcagggagggggacaac

SEQ ID NO: 111724 - DNA, 597 bp, Homo sapiens
aggtattaatgtattatccagctccagaatctctctttggttcttttttaatgtattattcagctccagaatttctgtttggttctttttatttatagtcatataaaacgaactaggaaaattttgccccttttcctatgtattatactttgagatagttaagccatcaattccttgaatgtttggtaaaactcatctgtaaagttttctgggtctattgttcacgtgtaggaagcagcaagtgcagttttttaaaaatgatttcagaaaattttayaaacaaaaaaatgttaataaggttgtctttggatagtgacataccatggaattctttttgacttaatattatttcatttttaatattaagatttcatttatatagactaaaatttatctttgtagtgtccagttctgtgagtcaaatttctgcagtcacatgccatgaccataaaaaagacagaaaagttctattacccacagaaattttctcatgtctgtttatagtcaaaccgtctgtccacccccatccttggcaaccactgagttttctttctctatagtgttgtctttgtaaaaatgtcatataaatggagtcat

SEQ ID NO: 111725 - DNA, 479 bp, Homo sapiens
aaggaattcagttcacggtctggctctgaaacaaaattgataacaccccccaagacccccttcttgcctggggtccagtctgtctttacaggactaccaaattagctacaagatcagaaattacagtttaggggtcatgcagtctctggctccaagaatctgaacatccccaaattgctcctggggctaacatcactgtattgtaaaacctaagatcagtgtttgagatattttgyactttggatcagctgacaccatccagaccagtaatctggcccaaccagttctgccatcgcacccaggaagagaagacattaaaaaaccttgcttcaaccctctatgagtccatctacaacctgaccaaccagcactccccacttcccaagcccctacccaccaaattttcttcaaaaactctgatcaccgaatcagtcggggagactgatttgaataataataaaacaccggtctccctcaca

SEQ ID NO: 111726 - DNA, 545 bp, Homo sapiens
gagaatggcgtgaacccgggaggcggagcttgcagtgagccgagatctcaccactgcactccagcctgggcgacagagtaagactccatctcaaaaaaaaaaaaaaaaaaaaatcagaccaaatgacttcactagtaaatctatcactcacaagagaaataaaaccaatttcacaaaaacttatgaaaattaagaagggattattatttgttgtttagaagactggacagaaacaaaccaccaaacaaccaatgtgggatttggaaatagttaagaaggttaaatgcttgaatcagagataattaattattcctcttgctggaggtttgtaaaaccatgaaatgtaattcttagcccataaattatgtctccagcaggaacagctttcaaaatgacacccaccttgtcagcagtgtaggccacagagggattctctcccyataattaggaagtcctatgacttttctggtcagtaatgtaagttagctctttgggcccttcaaatcccaattttctttaagcctcaaaacactttctccattcag

SEQ ID NO: 111727 - DNA, 393 bp, Homo sapiens
tataagtaacaatttggtttctcttcattttctagacaacactgtataaatgctgccaaaatattcctctttgacaccatgtttaccatatttcatgccracactccattcttttgacatatctttcttttaagtatattaatactgtagagtccctttttatctgcttataacctagaagattttctgtattttaacatgactatgcatagatagtattgattttatcagtaatattggaagaaggcactgctcttgtgaacacttatgtattattctttgtaatacaggcaataaaaatgtgtcccacaacagatagcactgggatagtgcacaattcactggttttaactaattctttttaagatgtatcttgactaatgggtctctgta

SEQ ID NO: 111728 - DNA, 517 bp, Homo sapiens
cctgtaccatcactgtatatgggaagtaactaacttgcttttgattttacaggctcataggtgaaagggatttgctttgtctcagatgagactttggagttttgtgttaatgctggaatgagttaaaactttgggggactgttgggaggatatgagaattggtgccaggggaagaattataaggcttggctgtgttcccacccaaatctcatcttgaattgtagttcccataatccccacatatcgtgggaagaacccactgtgaggtaattgaatcatggggacaattactcccattctgctgttcttgtgatagtgagttctcacaagttctggtagttttacaaggagcttttcccccttttgcttggcacttctccttgctgtcaccatgtgaagaacgacttgtatgcttccccttctacccatkattgtaagttgcctgaggccttctcctccctgcagaactgtgagtctattaaatgtctttcctttttaaattacccagtctcagata

SEQ ID NO: 111729 - DNA, 566 bp, Homo sapiens
gatttcatatgtaggataccctaaagattcctccaaaagactcatagatctaatcaatgacttcagtgaagtttcagggtacaaaatcaatgtacaaaaatcagtagcattttgatacatcaataatgtctaagctgagaaacaaataaataatgcaatcccatttacaatagccacaaaaaataaaatatctaggaatacctttaaccaaggaggtaaaatatstctacaagaagaactacaaaacactgcttaaagaaatcacagatgacacaaagaaatggaaaacatttcatgtgtggattggaagaatcaatatcactaaaatgaccatactccccaaagcaatctacagattcaacaatctacagattcaagacaatttctatcaaatcaccaatgccacttttcacagtcaggaaaaacaattctaaaatttatatgaaaccaaagaatagcttaaatagccaaagcaatcctaaataaaaagaacagaactggaggcatcacattacttgacttcaaactattctgcaaggttatagtaaccaaaacagcatggtatt

SEQ ID NO: 111730 - DNA, 566 bp, Homo sapiens
gatttcatatgtaggataccctaaagattcctccaaaagactcatagatctaatcaatgacttcagtgaagtttcagggtacaaaatcaatgtacaaaaatcagtagcattttgatacatcaataatgtctaagctgagaaacaaataaataatgcaatcccatttacaatagccacaaaaaataaaatatctaggaatacctttaaccaaggaggtaaaatatctctacaagaagaactacaaaacactgcttaaagaaatcacagatgacacaaagaaatggaaaacatttcatgtgtggattggaagaatcaatatcactaaaatgaccatactccccaaagcaatctacagrttcaacaatctacagattcaagacaatttctatcaaatcaccaatgccacttttcacagtcaggaaaaacaattctaaaatttatatgaaaccaaagaatagcttaaatagccaaagcaatcctaaataaaaagaacagaactggaggcatcacattacttgacttcaaactattctgcaaggttatagtaaccaaaacagcatggtatt

SEQ ID NO: 111731 - DNA, 548 bp, Homo sapiens
cactatctatagcatgagatactatttcatgaccacaagaatgggtaaagtaaaacattaataatatcaaatgttggtgagaatatggaataatcattactcttattcatttttggtgggatcataaaatggtgtaattactttggagaatagtagtacagatgccttactgatagaaatatatctactgcatgatccaaacatggatggtttgcctgacagcacccccagaggactcagacaacagtcagtaacaactactggacaagtgaataaatactcctccagaggattctagcgctcactcattaaaagccamcaattttttagtcttcccagaagagaccctagacatcattgagcaagagaaagtcatttctgtatccttactgtgctttgtttgaatctctgttccacaaatttgtgaaaatcataaagcagttggtttaagccagtacaataactagaccagtaaacttggggtcatcgttatttagtaataataagtgggacagaaatttgggagctggaagtaggaagctaacatg

SEQ ID NO: 111732 - DNA, 602 bp, Homo sapiens
gcaaagacatggaatcaacctaaatgttcatcagtgacaggctggataaagaaaatgtggtacatatacaccatggaatactatgcagccataacaaacaatgagatcatgtactttgcagagacatgtttggagctggaggccattatctttagcaaactaacacaggaacagaaaaccaagtgccaacatgttctcacttataagtggcagctaaatgatgagaacccatggtcatacagaggggaacaagaaacatgggagcctctgggagggtagaggtgggaggagggagaggatcaggagaaataattaatgggtactaggctgaatacctgggcaatgaaataatctgtacaataaactcccttgacacaagtttacccatgttagaaacattcacatgtactcctgaacttaaaataaaagttaaaaaaagtatactgctgtaagtttggggtccataatcttagaaaggtaacattaataaagaaaacggttaggcaggtaggtattttacttatcagtgttatrttcaaaataatttttcattgatgcttgttgatattttcagaatttttaaaataaaagatgtttgagaa

SEQ ID NO: 111733 - DNA, 595 bp, Homo sapiens
ttcaatatttaaaatagttactttgggatttgggatggtggtatttaagtcagcttttaatttttctttaaacttatttgttgggatttttaaataatacaattttcatggactctttacataaagtcttagctcacataaactgtttcatacaatcaagtgtgaaaaagccagcagtcctccctggaatacaattcccagattgaactgattaatctcaataagaagggagtaattaatgagtctgatagtatyctgcttgcttaataatgttaataacttgaatgtggcctaatcttaatgtgtgttgaatttttactttcatttgtgaattataataaaaaacagggcaaaatcacactgaattctaaaaattacattgaaaaaatgttctatacattcatcctctaagagaaaattaagaattaacaaacatttctttaacagagtataagaagaacatgtaaaaaaatttatacaataggacttcaagttaacttttaaaagagtcaataaatccaataaaatctttatttgcttgtttgtgctgttcaaatgttttttttcaaaattccatgtagctctggtcctctct

SEQ ID NO: 111734 - DNA, 647 bp, Homo sapiens
tttttcccccttgcagtatagcctagttttggtatcagagtaatactggcctcatgaaatgagttgggaatattccctttacttttttcaaggagtatgatatggtttggctgtgtccccacccaaatctcatctttaattgtagctcccataattcccatgtgttgtgggagggacccagtgggagataattgaatcatgggggcagtttgccccatactgttctcatggtagtgaataagtctcatgagatctgatggttttataagggatttcccattcggcttggctctcattctctcttgcctgccgctctgtaagacggaygtgcttttcaccttctgccatgattgtgaggcctcccatccatgtggaactgtgagttcattaaacctcttttcctttataaatatgacacaatctcgtatttgggtatgtctttatcagcagcgtgaaaacagactaatatagaggatgtgtaggatttatgttatttcttctttaaatgtctggtagaatttaccaatatatcgatgtgggcattgcattttctttaagggaagttttaactaccaactcaattttcaaaattgatatagatacatgtttataaagctacctaaattttctgagttagccttataact

SEQ ID NO: 111735 - DNA, 546 bp, Homo sapiens
ttgaaggatcctggaatatataggctggagaagagtggattcagggacacaatatctttctccaaacatttaaagaactatcttgtggaagagggtaatatttatttttattctggatctgaacactagtataaattcggtaaaacttactagaaaacagattaggttccattcttgaggaaattctaaatcttcatgcatttccttgggtaatattcaagtagagctatgatcatctgttagagatgtgtaaactaaaaataaaatttaaagaccccctgcaaccatctgaatggactccctcctctgctagggcactctaaaatttaacttgaaagactggtttaggtcatggttggaaatgggggtagggtatgcctcattatgtcctccccmcttttggaatttagaaaaagccaaccagcatttaacatcaacacagacgttaagtcttataagaaacatttacaatctattctctctgaagcctgctacaaggaggcttcacctggatgagaaaattttgttctccacaacctctttatt

SEQ ID NO: 111736 - DNA, 473 bp, Homo sapiens
ctccagttttgttcttttgacttagaatagctttggctgttctgggtcttctgcagttccatatacattttgggattatttattctatctctgtgaagaacgccattggcattttgatagggattgcatcgaaactgtagattgctttgggtagtatgktcattttaacaatattgatgctgccaacccatgaacgtgaaatatttttctatttttttcctgtcctattcaatatcttttatcagtgttttatagttttcattgtaaaaatcttttatttacttggttaatttaactcctaggctttttatttcatttgtaatttttgtaaataagataactttcttggtgtctttttcagattgtttgctgttggcatactactgatttttggtatgttgattttctatcctacaactttactgaatttgttaatcagttctaatagttttttgatggaggcattagatttt

SEQ ID NO: 111737 - DNA, 633 bp, Homo sapiens
tacctagtcttaactgcatataactaaatgaggcactgaaaagagtaggaaaaaccatctcaatttgctgatcccacccctttccaatccttcagcagcagccacttggcacagagagagaacctgtgatcatggtagagggataacttagtgattgtggaattytacattaaaactcagtgattccaacaccatgcagaattcatctgatgcccacggagggaacatttagcctagccctaacaagagaggagtcaccaatcctagtgatcagaacttgcatttcagcaagccttgccatcattggctaaagtgccctggggtcctacatgaacgcaaaagggtgtctagggacacagactgcaagtcctaggcaaggcttagtggtatcctgggctcagaactagtggacttgggggcatctgacctagtgacacacacaccaaatatgttagataagggagtgcttgtgtcatccctatcccaaccccaggcagtgcagctcacgacttcaaaataagcccttccttctatttgaggagaggagagggaagagaaaagggattttgtcttgcattttggataccttcttagccaaagtaagacagggtaatgggaagagtcataaggcac

SEQ ID NO: 111738 - DNA, 633 bp, Homo sapiens
tacctagtcttaactgcatataactaaatgaggcactgaaaagagtaggaaaaaccatctcaatttgctgatcccacccctttccaatccttcagcagcagccacttggcacagagagagaacctgtgatcatggtagagggataacttagtgattgtggaattctacattaaaactcagtgattccaacaccatgcagaattcatctgatgcccacggagggaacatttagcctagccctaacaagagaggagtcaccaatcctagtgatcagaacttgcatttcagcaagccttgccatcattggctaaagtgccctggggtcctacatgaacgcaaaagggtgtctagggacacagactgcaagtcctaggcaagscttagtggtatcctgggctcagaactagtggacttgggggcatctgacctagtgacacacacaccaaatatgttagataagggagtgcttgtgtcatccctatcccaaccccaggcagtgcagctcacgacttcaaaataagcccttccttctatttgaggagaggagagggaagagaaaagggattttgtcttgcattttggataccttcttagccaaagtaagacagggtaatgggaagagtcataaggcac

SEQ ID NO: 111739 - DNA, 579 bp, Homo sapiens
ggcttctgtctccttttgtaaaataagaaagttaggtaaaaataatctccagcattctttcatatagacatcttacgtttctttcaatctgcagtggtttcgcaggtttagaaaaacatagaccacatttggagagaggcaaattttttttttttaaatctcagcaggtataaagaagctggtcacttaaccccaaattttaatccaaatctgtttatctcatatttgaagttttaactcttcaatttaacatcttttatttgcatccagagctaggtgctggattctagggtkttttttttccttaggctgatttcctctattttgattgtagtcaacctatttggatttttactttctgaaaaacgtagaaattctatgttgatggggccagcaacataggggctaagagactaaccgctagagggcaatgaatgttcttccttattgattgaagctatcaacatcataaatttaagataattgtatggtcatatgaaccctattttttatgtttcttttcaatgacggtttagttgtcctactctaatgcagttacagatagaaaaagataaaact

SEQ ID NO: 111740 - DNA, 579 bp, Homo sapiens
ggcttctgtctccttttgtaaaataagaaagttaggtaaaaataatctccagcattctttcatatagacatcttacgtttctttcaatctgcagtggtttcgcaggtttagaaaaacatagaccacatttggagagaggcaaattttttttttttaaatctcagcaggtataaagaagctggtcacttaaccccaaattttaatccaaatctgtttatctcatatttgaagttttaactcttcaatttaacatcttttatttgcatccagagctaggtgctggattctagggttttttttttccttaggctgatttcctctattttgattgtagtcaacctatttgkatttttactttctgaaaaacgtagaaattctatgttgatggggccagcaacataggggctaagagactaaccgctagagggcaatgaatgttcttccttattgattgaagctatcaacatcataaatttaagataattgtatggtcatatgaaccctattttttatgtttcttttcaatgacggtttagttgtcctactctaatgcagttacagatagaaaaagataaaact

SEQ ID NO: 111741 - DNA, 579 bp, Homo sapiens
ggcttctgtctccttttgtaaaataagaaagttaggtaaaaataatctccagcattctttcatatagacatcttacgtttctttcaatctgcagtggtttcgcaggtttagaaaaacatagaccacatttggagagaggcaaattttttttttttaaatctcagcaggtataaagaagctggtcacttaaccccaaattttaatccaaatctgtttatctcatatttgaagttttaactcttcaatttaacatcttttatttgcatccagagctaggtgctggattctagggttttttttttccttaggctgatttcctctattttgattgtagtcaacctatttggatttttactttctgaaaaacgtagaaattctatgttgatgkggccagcaacataggggctaagagactaaccgctagagggcaatgaatgttcttccttattgattgaagctatcaacatcataaatttaagataattgtatggtcatatgaaccctattttttatgtttcttttcaatgacggtttagttgtcctactctaatgcagttacagatagaaaaagataaaact

SEQ ID NO: 111742 - DNA, 579 bp, Homo sapiens
ggcttctgtctccttttgtaaaataagaaagttaggtaaaaataatctccagcattctttcatatagacatcttacgtttctttcaatctgcagtggtttcgcaggtttagaaaaacatagaccacatttggagagaggcaaattttttttttttaaatctcagcaggtataaagaagctggtcacttaaccccaaattttaatccaaatctgtttatctcatatttgaagttttaactcttcaatttaacatcttttatttgcatccagagctaggtgctggattctagggttttttttttccttaggctgatttcctctattttgattgtagtcaacctatttggatttttactttctgaaaaacgtagaaattctatgttgatggggccagcaacataggggctaagagactaaccgctagagggcaatgaatgttcttccttattgattgaakctatcaacatcataaatttaagataattgtatggtcatatgaaccctattttttatgtttcttttcaatgacggtttagttgtcctactctaatgcagttacagatagaaaaagataaaact

SEQ ID NO: 111743 - DNA, 609 bp, Homo sapiens
gggccagactagtgccctccagtgccccacatccatgctgacaccagctctgacataaacatgtataaaaatggcagcartcatgcaccccacactccatgtgtctcactgccaccattacaactgcaaatggctacatgggggctggcaccaccatgcctgacaatgatgcaccagagcagataagcatgaagcccatctcactgccactgctgctgtcacatacaaatgagcacagatctcactgccaccttccaatgaaatgcttgggctcttaccatctattggagtgtgtgactaacagtctgcgaacactttggcccctcaagcaaagcagtcctaacctagagggaccagaaagcaaagctagtggctggataccaatccctcccccagagttacagcatgcaactcaggagtcctgagatgaaacctggccccctaaaatccttcagaaaggaagacagttgactgagcctacctaataccacaaccaaacaactcaggatatcaaagaacataaaagaaaaatctatctatccaaaagacagcaacttcaaagattgagggatcatcagctgacaaagactagaaagagccagtgcaaga

SEQ ID NO: 111744 - DNA, 609 bp, Homo sapiens
gggccagactagtgccctccagtgccccacatccatgctgacaccagctctgacataaacatgtataaaaatggcagcaatcatgcaccccacactccatgtgtctcactgccaccattacaactgcaaatggctacatgggggctggcaccaccatgcctgacaatgatgcaccagagcagatragcatgaagcccatctcactgccactgctgctgtcacatacaaatgagcacagatctcactgccaccttccaatgaaatgcttgggctcttaccatctattggagtgtgtgactaacagtctgcgaacactttggcccctcaagcaaagcagtcctaacctagagggaccagaaagcaaagctagtggctggataccaatccctcccccagagttacagcatgcaactcaggagtcctgagatgaaacctggccccctaaaatccttcagaaaggaagacagttgactgagcctacctaataccacaaccaaacaactcaggatatcaaagaacataaaagaaaaatctatctatccaaaagacagcaacttcaaagattgagggatcatcagctgacaaagactagaaagagccagtgcaaga

SEQ ID NO: 111745 - DNA, 560 bp, Homo sapiens
tgctccctctgtgtatgtttgtcaactgtgtaattagttgtataattatcttgtgaagtcaagttactttgtatttttagacaatagttgaaaaacaacatatggaagatgtgatctttaaaagttcttcttccagcttacatttgtttcagtatgaccttaatttgttttctgtataataaaaaatattttgtgctgttacttgttttcttaattatataacattttatcagagttatctttgtcctgttggaaatatatataaaacaggtctagggaaacgcagctggttagaatgcaaaacccttttacaacagagaaacgtcgctatagamctgcattttgtgagcacacggccttcatgctaaatcctgcacttttttcttagttaatttcacttgtaccttggcgactattatgcagaatgatccatacacttaaaatttttcatttaattgccatggaaatttgataattttatcttaaaaacgggttgaagaaaactcaggaagagctctgattactgacaactggaaaaaaaatcttgattaaagcacttt

SEQ ID NO: 111746 - DNA, 522 bp, Homo sapiens
tgctccctctgtgtatgtttgtcaactgtgtaattagttgtataattatcttgtgaagtcaagttactttgtatttttagacaatagttgaaaaacaacatatggaagatgtgatctttaaaagttcttcttccagcttacatttgtttcagtatgaccttaatttgttttctgtataataaaaaatattttgtgctgttacttgttttcttaattatataacattttatcagagttatctttgtcctgttggaaatatatataaaacaggtctagggaaacgcagctggttagaatgcaaaacccttttacaacagagaaacgtcgctatagacctgcattttgtgagcacayggccttcatgctaaatcctgcacttttttcttagttaatttcacttgtaccttggcgactattatgcagaatgatccatacacttaaaatttttcatttaattgccatggaaatttgataattttatcttaaaaacgggttgaagaaaactcaggaagagctctgatt

SEQ ID NO: 111747 - DNA, 598 bp, Homo sapiens
catcactggggcataacagaggcaaaattctgcccctgtcttccttggaattggctgaataccactttcaccaacccatggagctaccctgccctgacagctagcaaaaggccaaaacccatggaacaaccaacaccacccctctgtcagcaggaagtagttacagaagacttacctttgtctattttcccaaagaattgggtcttagactcttaaagggagaaatgttagagtagataattaggcagacatgagcagggcaggagagcccctgacccaaggaatgtcaggcaaccatcaggtgatggtcgggggttgttaaacagtctttctaatagaataattagttgcagccagtgccagggaaagccagtcttcaaatagatagaaaacacctgaagctggtgtttagccacttcctgataagatctcaagatgtgggcgagtagactcaagcatacactctaagaggcaaaatggcagagtttaattggtrtatgaccttctcctaggaccactcgatgggtaaggaaaaaaaaacacctcaaactcaaaagagcatgtgtacaatttcagtaaacacacagtgcctgtgact

SEQ ID NO: 111748 - DNA, 633 bp, Homo sapiens
tgaggaatggacacagagctgataaagcataaagcaagccaaagggagaagaactgaaaatagttagctgagcagagatgtgtagtggtgatgtcgtggaaggggaatagcaaattatcaaaaaggagaaaaaggaaatagactaaaaactgaaggatagaggaagaacagaacctgcggatgacaagtagaaggaaggatggagacatggaaagtgtaagagtgggatctaaattcacacaggctaagaacaggctttaccttggaggcagaataaagaggagaacagaagggattattyaaatcatatctgagcagtcctggtacccccaatggagtcattccaagattttcagcatgataaaattgcctgaactatataaaacttgaacatataaaactcttctaatagtatctattttatgccataacactcacacataacaacaaaatataattgtacatcaaaatcatctttgcaccttatttaatggaagctggccgaaacagagtccagcagtgcacctaggacagaagggggctgtaatgcaaggtgatgtctcaagccagagaaaggcagagaagaatcaggagcaagccgttatggcgaaggagtgaggacacagcctgtac

SEQ ID NO: 111749 - DNA, 571 bp, Homo sapiens
caatgtgttaaactggtgcaaaagtaattgcagcttttgccattaaatgtaaatggcaaaaaccgcaattacttttgcactaccacctaataggttttggtgaaagaagaccattgggtcattcttgtaaatgtatgatggcttggatgactgtagtcattccacagcacaaattctacttaacaaatgacccactacacaatctcattcccttggaatggggtacagctgggattcagaaatccctctcctaatcaccttctataattatttggaatttgaaaataggcgttaaggagaaagggtgaaagggctggtttcccatcaacacgtgmttttcaagatatctacatgtcacaattaatatattctggcttgggcctgcattttccaggcctagaattccattagacaactgggtgccaatacaaattgtcattttttttgttctccattacttaggtcaggaccaaatctgctattaaatacataatcacacaattttctacagtcttcccttcatacattttccaagcagaaaaagtgaagttttcagctttgttcttaataa

SEQ ID NO: 111750 - DNA, 559 bp, Homo sapiens
gactgcagctgccctggttgatggttgagacaagccagcccagaatcatcccccaaatctcgtttgtctctcctgcctcctatggtggttcctgggctacttcatcagaaactagtgctccaaaggacacaactttamaataaaagcaagtacttacattttccctggatatgatactgcaagtaccaggttcacaagtggggattgaattctaggctgagataacataataaacaaaagatgtttttaaaacattttctccctagctctaagtaccattcttggcacattgtaagtaggtgacaattaatgtttccaaaaaggtgaataaaaatcatagtgaaaacataaacttaacagtcacttggctaaagagtctataaaactttcagctagttttacagtttaaatttatcacaaacaccattggtacttataaagtatacggataaagttcaagagagcttgtgtgcttcttggagccctgccaccgccatgtgaacaagctcaggccaggctgctggaaaatgaaagaccacgtggctgagtgtctaaccaa

SEQ ID NO: 111751 - DNA, 570 bp, Homo sapiens
aagactttaagctgtagtgttaaactcaggctcagagtcatactggcttgggtgataattctagataggtcattttttttttttagcagctatgtggtcttaaggaagttcattgacttctctgctcctcagtgttctyatttgtgaagcggggacaatggtattcctctgcttagaactgtcaagaagatgatgttaaataacacatttgacatttggcatagggcctagtacacagcaagcactggataaatgctggcctttctttctattgctactttgaaatacagtcactgtggactccaaaaacctgtgcttacatctcagctctcctcttggatacttgcgtacttctaagtctagttttctcatctttaaatgggattgagctaagggggtattggaaaggtaaatcatcaaaactatatgtgtaggctgggtgcagtggctcacacctgtaatcccagcactttgggaggtcgaggcgggtggatcacatgaggctaggaattcgagaccagcctggccaacatgatgaaaccccatctctactaaaaatacaaaaattag

SEQ ID NO: 111752 - DNA, 374 bp, Homo sapiens
ttttaaaaaatgtttcttcttccttccttttctctttctatttactcagcattacgtgagttggctgttaagcacctgaacagaggaagaaattgtttataggtgccccaatggsatgagtctagactaagagaaaacagccaacatagcaaagaagtgtttacagcatttattaggtatgtatttattaagcacctgttgggcacaaagaacatgaaacatggagactgcttgttagcggcttttaatctggttgtggggataggatatacatgcacaatgagttaagttgaagatttgtgatattgaaaggagagtcagctcatactgtgagcctgcaaaagacaaagctacaaacagggactgggtagaag

SEQ ID NO: 111753 - DNA, 575 bp, Homo sapiens
attttctgaacatattaaacccccaaccctctcctcctgtagggagaacagtctgttgactttggatccaattgaattgaaacagcctgtatccaggtgatatccaggatgtctactcgggaggaatccagacaccgaggaaagcccaatctggtgctggggaataacttggcaggcacagaaatatacagggagagaaaaagctgcagacaaaagtgtccaactaatgggaaaagccactgaaagaataggaaccagaatcagatgatgatgatgatgatgatgatgacgacgacgacgacaacaacgatgacaaagaagatggtgatgaggaaactgaatcacagagtagttaagggaattgrttatgttcatacagcaggtaagggatataatttaaatttgaatcttagaaatctggctccaaagcttttgctcttaacccaaaaacaatgagctgtacacaattcccagtccacacaaaagtggaagggcagcctacttcacctctgtgagagcagatccagaaacctgccttatgtctaccactcagagcttggccttcacactcaact

SEQ ID NO: 111754 - DNA, 580 bp, Homo sapiens
aagttaaatgtaaaagcactgaatactttccatggttttatataaatgaatattatctaggtcagcttttaagttttaatagtataattaatacatctcctttgtgtgtgtgtgttttttaagttttccatcctatttaatgtgactttattacaccttgaarccatgtgttccctagagtgttcccggctccagactgggccctcttctcctttctgtttataatagggggattcccagtgcactagaaaacatgtatatgctgataattttctaacatttctctctagtctttatctctcccctgagggccagactcgtagatccacttgctccctggatacctccattcaaatacataatccacaactcaaacatgacaggtctaaaatggaacttttgatttctacccagaattaaacagtttagaaggtgcattaaacacaacatttctatgagcctttcataggccggtgcatgttgttaatttccaacagtttcccagacttgagaagtgctgttctggaacaccctttggaaatactgttctggaaccaaagagctttgaaataaaacctat

SEQ ID NO: 111755 - DNA, 580 bp, Homo sapiens
aagttaaatgtaaaagcactgaatactttccatggttttatataaatgaatattatctaggtcagcttttaagttttaatagtataattaatacatctcctttgtgtgtgtgtgttttttaagttttccatcctatttaatgtgactttattacaccttgaaaccatgtgttccctagagtgttcccggctccagactgggccctcttctcctttctgtttataatagggggattcccagtgcactagaaaacatgtatatgctgataattttctaacatttctctctagtctttatctctcccctgagggccagactygtagatccacttgctccctggatacctccattcaaatacataatccacaactcaaacatgacaggtctaaaatggaacttttgatttctacccagaattaaacagtttagaaggtgcattaaacacaacatttctatgagcctttcataggccggtgcatgttgttaatttccaacagtttcccagacttgagaagtgctgttctggaacaccctttggaaatactgttctggaaccaaagagctttgaaataaaacctat

SEQ ID NO: 111756 - DNA, 460 bp, Homo sapiens
gaattctaccacatgtacaaagaagagctggcatcatttctaccaaaactattccaaaaaatcaaaaaggagggactcctccttaactcattctatgaggccagcattatcctgataccaaaacctggcagagaacaacaacaacaaaaacttcaggccaatatccttgacgaatatcaatgcaaaaatcctcaacaaaatactgacaaactgaatccagcagcacatcaaaaagcttgtccaccacaatcaagtagccttcatccccaggatacaaggttggttcaacatacacaaatgttgttttctaaraccgttcacctgatccctgattgggttaggtatccttccttctgtgttagtatccctactgtagcactttgcatatatatactgagctccttgaagcagaggactgaatcttgttcatctctgtggctccagttccttccaaggtaac

SEQ ID NO: 111757 - DNA, 582 bp, Homo sapiens
acagacttaaatgttaaatgctaaaagaatgaaaaaaaagtcaagctacagagttggagaaaatgtttgtaaatcatgtatctgatagaggatagtacctagaatatataaagaactctcaactctcaagctcaatggtaaaaagctaaacaatccatttagaacatgggcaaaagatgcgaagagacattttaccaaagaggatatacagatggaggcaaataagtacataaaaagatgttcaacrttattagtcattatggaaattgaaattaaaaccacaatatttgcataattcacctcataatctgagttaattttcagtaagtgtatatatcactacacacctaacagaatgactaagacaaaacacagtgccaacaccaaatgcaggagatgatgaagaaaaactaaattactcacatattgctgctggcaatgtcaaatggtagagccactctggaaaaatgtttggtagtttctttacaaattgaacatgcaagtaccatatgatccagcagttgtattcctggacattcatcccagagacttatgaagacttaggttcacacaaaaaggtgc

SEQ ID NO: 111758 - DNA, 562 bp, Homo sapiens
acttttcaatcatttattagttcataagaaatttaatgagaagtgggaaacataatttctgcctcatagaatgagatgagattgtttgcagaatatttatgatcttcaaatggcgyaatacatgcaataatgttaccttgcaataatgaacttttattattcagtagctatcagaggttactctatgagaaaatggtaaatgactaaaacttaattttaaagggaggaaaatgaaccaatattatctcgtatgccttgtttagttacttttgcatacattttcctgaaattgtaagtgtcttgtgttatgattatctgaacttatcttatttttctaattcagatctatttaggtaattaattgatctgtgtagtaaatgtcacagacgaatatgagtcttcagttttctcaatgaaaacagattgagcttctggcttagtctgttttctgttacttataacagaatacctgaaactgggcaatttataaagaaatggaacctatttctttatttctggaagctgagtagtccaaggttgaggggccacacctggcgagagt

SEQ ID NO: 111759 - DNA, 597 bp, Homo sapiens
tcccattgcattgatttgtcggccttatttttgctaatatggtgggtgtgtaatagtattttgttgtggttttaattttttttctgttaatgaggttaagcacattttagtatatttattggtcacttagatttatattttgtaagaygcctgttcagtttttttcctgtttatcattgtgttatctgtcttttccttaacgtttggaagaacttatttattttgaatattagtcttttttatatacagttattacaagtagattctctccctctgtggttagtctttttattcactttataatatacttcaataacttgaagattcaaattttaatgtcttaactgtatccatgtttttctctatggttaatgtttctttgtgccttgtttaagaaatctttctctcttctaggttgggaggatattcccctatattatcttctgaatctttataattttgcttgaaattacctataagtggtcttatgtttttcattttcttttcatctagataaccaattattgggtatcatttattggaaaatatgtcttttgctcatagatctgtaataccaactctattgtataacaaagg

SEQ ID NO: 111760 - DNA, 553 bp, Homo sapiens
agtcagaatttgatataaaaatgccatttataatagcatcaaaatataaaataaataggtttatatctgacaaagatgtgcatgttctgaatgcagaaaactggaaaacattgctgagagaaggtcttcttaaataagacctaataaaatgaatgaagacctatactagattcatgaattggaagacttaatattttaatatgtaaatcatctctaatttgatctatctgtgttttttctttaatatttagtgtccctgaacttcttttatatactgcatataacccataataaagttattcatctcatgtttcaagcattctttcttctaaacaaaatttatctgacatatgaatccttctatgtgtttatgaatgttaaaaacttattttccatatttcaagatgataactcactaatatatcaaactaatcattattagtgttaaatggcgtgagaatgttgttgccatactacctcagataggttcatgytatttttcccaatcaaaaacttacagagtagttgaaagtacagttcaaaaaacattttc

SEQ ID NO: 111761 - DNA, 559 bp, Homo sapiens
tatgtcctgttactgtgtttccctcaaaaaccctgatcaatgcagaggggaacaacataagagagtgaatattgagaggcacaatacattggggccattaatgtggcaatctaccacagtttgtccttggactctgtatttttttttttgtcctccaataaggagtttccaaggtgggatcagataggccataggtgtattaggggaaatgctgtgaaaaatggaggggagtgaaccagagaaggcatggagagccttcagatgtgatccagctctgacaccttggaggaagtgggaagaaggaggaatctcagattgcagggcagttctaacaaaggttcatccaggccaatggggggctttgagccaaagttgcccatcttaggcatctcaagactcactggcatgggactccattagtaatcctgcagytggaataggaagcatggactcacatgaaagcagtagtggatccagacaggccagtagcttcagctgtcactcaactgtggtctccacagcagctctgagtggtacattttcatggctgcaacagccc

SEQ ID NO: 111762 - DNA, 591 bp, Homo sapiens
gtgagtaatggaatagtatcacaatagtattgtgataaacatgtgagtgcaggtgtcttgatgacatgatgtcatttcctttgggtggatacctagtagcaggattgctggaccaaatggcagttctaattttagttctgtaagaactctttactgttttccwtagggattgaactaatttacattcccaccaacagtgtataaacatttccttttctctgcatcttccccaacatctgctttttttttcttttcactttttaataatagccattctgactggcataagttggtctcccattatgattttaatttgcatttcactgatgattagtaatgttgagcattgttttcatatgtttgttggccacttgtatgtcttcttttgagaagggtctgtccatgttctttgcccacattttaatagggttatttttttttgttggtttgttgagttccttggagattttggatatcagtcctttctcagatgcatagtgtgcaaaaatttttttctcattctgtaagttgtctgtgtagaatgttgattttgttttcttaagtccattttgtctacttttgtttttgttg

SEQ ID NO: 111763 - DNA, 521 bp, Homo sapiens
caggttgagatctcattaagcttttaggaggaccttggtattcattttatgatacttagggcagaaatttaatttttgatgtttttatctaattctctttagtcagcaaaataaatatgcagttgatttgttaaagaaaaaaactattttaattggcattgcatggtttctttaaacaataaatggatttgaatacagactaaatatagaggtcatattttgcatcatttcaatggctatcatttcatggtagacatagaaaaargatctgttttgctactacagacagtgtctaccctaaggtattgagttgcgatgcattgatgaatattccaagactttcagctttactaaacatctgcttttcacaaccacattttaaagggaaaaatctaagagacagaaaaaacatacaaaatccccaggacaggaaaaaatttccttctcatctcttccataaaccagccccagattccaaattgaaaccactgatcacgtgaaaacattttaaatgttgcttt

SEQ ID NO: 111764 - DNA, 630 bp, Homo sapiens
attcttctcaaaaaattaatctatagattcaatgcaatccagacaaaaatgtcagcaggctttaaaattttttttaagaaactgacaagttaattctaaaacttatatagaaacacaaatcatcaagaatagccaaaacaatactgaagaagaataaatggaggrctaacactacctggttgtgtagtatggacatattatacaaatagatcaaaacagaacaaaatacaaagtccaggaatagatccgcgtatatagggacaattgattttttttgaaggtagaaaggaaattcagtggggagaagattgccttttctccagattgtgctggaacggctggatatccatgtagaatcatgtgaatgggacagttcaaattcagactgatccaggtgtgctgtattggcagctgacaggccatgagcagcattgccatctttaaagtgatttgagaaatggtgagcaactcttggaaaacttccaaaccaagcgtaaaatgaaacaaagaacaatcatttctcaaaatggtagttatgattctgaaaaattcagtatatattaaaatactgaaaaattattgatgtttatgattgagataaaattaggttgtaagcttgggtaattgaat

SEQ ID NO: 111765 - DNA, 630 bp, Homo sapiens
attcttctcaaaaaattaatctatagattcaatgcaatccagacaaaaatgtcagcaggctttaaaattttttttaagaaactgacaagttaattctaaaacttatatagaaacacaaatcatcaagaatagccaaaacaatactgaagaagaataaatggaggactaacactacctggttgtgtagtatggacatattatacaaatagatcaaaacagaacaaaatacaaagtccaggaatagatccgcgtatatagggacaattgattttttttgaaggtagaaaggaaattcagtggggagaagattgccttttctccagattgtgctggaacggctggatatccatgtagaatcatgtgaatgggacagttcaaattcagactgatccaggtgtgctgtattggcagctgacaggccatgagcagcattgccatctttaaartgatttgagaaatggtgagcaactcttggaaaacttccaaaccaagcgtaaaatgaaacaaagaacaatcatttctcaaaatggtagttatgattctgaaaaattcagtatatattaaaatactgaaaaattattgatgtttatgattgagataaaattaggttgtaagcttgggtaattgaat

SEQ ID NO: 111766 - DNA, 600 bp, Homo sapiens
tagagtaatgtactcacttctcataatgatcagtttttcttgatcatcttacaaggcacattttcttcttaggaggagaatcttcctagtggctctcagctagtaattggtctctygccaaagaaagggaggcgaatgagtttctcatgtagaggaggcaaagagtggattataaaatgcaggtgaaattacatggaactgagtttaagtcacagattgtacaataggaagtgattaaaaaagaaaaaagaaaaaatattaattctgctctcacaggtactggataagaggctagactgtttaatatttattacatgggtagtaggacaaattcaataacaatgaaaataaaaaattctaacttgttatattcttggtactaggagctataggttgataaaaattgcaccttttcttcccctcttgtgtacagaaataattgagagataagtcacagaagtcagaaagcatggaagcaaaatatcaactctactactgatagagactggatgagagtatacagcttcagtaggcaatcgcaatgggttttccgtcacttcacccagaattaacatacctagatagtcattaagaaaaaaa

SEQ ID NO: 111767 - DNA, 535 bp, Homo sapiens
tatcaactctactactgatagagactggatgagagtatacagcttcagtaggcaatcgcaatgggttttccgtcacttcacccagaattaacatacctagatagtcattaagaaaaaaagcaagagatatgttggccacctctgcggggcaaagactgcccttaaccrtaccaccatatggctgagaacagataaaaaacaaaacaaaaatacattctctgcaggcagaaacatttaaaagaatgtcagaaagactgagctaagcttgtttttgtcctttctcttgaactcattgatgaggtaagtggcttttcctcctttggtgactgtgagtcacatcaagaaaagtcagaatgtccctccctggtggtttcttgcacttgactgtggccaagtgcatgagctgaccaccaggcagccagcagttcactcagcaaatccttgctctggtaagacactcaaagggaaatgaaggctctactgccacactcatgaatcagataagccaccccttccttcaaagagagggaaaaga

SEQ ID NO: 111768 - DNA, 582 bp, Homo sapiens
cttttggcccatgaattaaagcccctaggagggacattctgatccctgtgaaaatcttaaaaccatgtcctagggaatactatgatttcaccaagacgacattctctaccacgtaaacccacgtgtatctatttcaccagtactctctccaccggtgggacggagattagcctaagggcatggaggagggagggctgggtaataagaggaccatatgcacgggctgaggttttaccttctgggtcatctcgratcaccagcagcccgttcctgcacacaaccttcccagtggtggcgtcgaggaatattagtgatggaatgttggaaattcggtatttgttccaaagtttgagctgtatgaagaaaagcaaaagaaggtggttaagtccaaaccagattcattgcagagttcttttgagccccttaggtctggaggctggatgaacaggcaagcattcaagcacacagaaaagaataatggatgccaagcagggctgctgggcaaaggggcacgttaactacaatcccactgccccccggggtctgtgacagtgcggggggctccgaggagggaggtgatgg

SEQ ID NO: 111769 - DNA, 530 bp, Homo sapiens
aaagaaaccaagagaagtgcaaagtagagcaagcctagtggggaagctgctccagtgccctgccccgagagctcaggacctcagctctgagcagcagcactgggacctccagggctttgttcttataggggcaggaacaaagggtcaggcattatcactctgtcctgcagccaggtctataggccacagagagatggaaagagatggggcttggtggtctgrtggttttggtttgactctcattcttctcatactagttactatcctccttgaatcagtttgttcacaaatacctcccttgcatggctaaagtacagatttgatgagatattgtataaaatgtgcctggcacatacaaacttgctcaaacaatggtagttcctttcccatatattttctcatctatctgtaagaagtaacccagaagaaaggagttaagagatcacttgctccctgtctggagttgcctaaatgaaacttctgtgaaaaaaggaaaattcatcgccgcagaaacttctagtcagatgctt

SEQ ID NO: 111770 - DNA, 583 bp, Homo sapiens
tatttatttttttgagacagggtctcattcggtcacccaggctggagtgcagtgatgcaatcacagctcactgcattctctatctcttgggctcaagtgactctcccgcctcacctcctgagttgctagaaccacaggcatgcaccaccactcctggctaatttttttatttttgtagagacaaggtctcgccatgttgcccaggctggtcttgaactcctgggctcaagcaatcttcctacctcagccacctgaatagctaggaatacaggtgcaagccaccatgctcagctaattatcmatttttttttagagatggggtcttgctatgttgcccaggctggtcttgaatttctggcctcaaggaatcctcccacctcagcctcctgaatagctaggactacaggtgcaagccaccatgctcaactaatgatcattttttttgtagagatgggatcttgctatgttgcccaggctggtcttgaattatttttggcctcaaagaatcctcctttggcctctcaaagtgttgggattacaggtgtgaacaaccacgccaagccgagagctcattctagttcaa

SEQ ID NO: 111771 - DNA, 547 bp, Homo sapiens
taatagttaagatgtagagaattttaggaaatttgaaagcaagtttattattcttacaagggatacctggggagagcagggtgggcacaaacagatccaggctggcttggtcaaggcagaaggaggggattgaaccttcatagaggttaggggataaggctgggggttggctagatttgaatttcccaccggggcccaaggaaggggcatgtatgggctttttgatcagcctgtccagatgtggggctagcagaaaagggaaaagtgagtcttcagagtaagtggtcaaatgtcaaaaaatgagggtgggtctctttttcacactgatttttccctgctatgtgggaatgactggtcattgcccaggggttccttactccagagaccaaaggcagcttccccacagaatacatgaaactgcagtgaggggtggtaagagaccatgakgattacgcaaatttggggaatatgaagaaagccagggtctggttccttctttccttttgtacctatttcctgaggtagatctggaattacacacaggacc

SEQ ID NO: 111772 - DNA, 632 bp, Homo sapiens
taaaatagtagaaaagtataaaaaacactttcatgcttcaaacatgatgtgctaatagagtaatatttgtagggcaggagcaaatgtgtgacattcacaatcaattttaaaatgagacctcagtgtatattcatttattcattcattctttttttaatgaataaaaccatatctacttatttagccaggcagttttctaggtgttgagatacatgagcaagaaagataaataacctgaccttatggagttggcttttttttgagatggagtcttgctctgtcacccaggctagagtgcagtggcaccatctcagttcactgcaacctccgcctcctgggttcaagcaattcttctgcctcagcctcctgagtagttggttgcaagccacsaagcctggctaatttttgtatttttagtagagagggggtgtcaccatattggccaggctggtatcgaactcctagaccttgtgatccgcccgcctcggcctcccaaagagctgggattacaggcgtgagccaccatgcccggccagagtttgcttttttatagatgacagttaaaagaaaaaagtacaacttcaattctgttaagtactataaaggaaggcctaacctagtcttgggtacaa

SEQ ID NO: 111773 - DNA, 468 bp, Homo sapiens
ttcataggtagaaaggacaactcaatgtctggattcagtgcttcaaaggataggctgactcttatttagtggctaatatagctggtgactttaagctaaagccaaygttcatttactattctgaaaatctttaagattttctttttttttttttaaagtgcctttaggaattatgctaaatctactctgcctatgctctgtaaatggaacaagaaagcctggacgacagcatatctgtttacactgtggtttactgaatattttgaggcctaacactcagaaaaaagattcttttcaaaatataactgctcattgacaatgcacctagtcacccaagggctctgatggagatgcccaaggatatgaatgtggttttcatgcctgctaacacgacatcttttctacagcccatgaaccaaggagtcattttgactttcaagtcttattatttaagaaatacattttcca

SEQ ID NO: 111774 - DNA, 640 bp, Homo sapiens
gtgcacttaattggagctatgtaggaccttctactaatgtgcattaataagaaataattcacctaagtatgtttctggatttggggaatgcaaaagtttcaaatcaacattatttaggcataatttacatgtggtaaattttatcttttgaaatcttatggtttgatgactttttttacaacaaaaawtaggttatttgcatgactcaaagactttcttcctgtcttgcagtcagagcccctcacttaactctagtgcttggctaatactggactggattctgtacatatagattagattttccttctctataattcatttaaaatataatcagactgtatgcacacagtgtgccttctttatctaagcagcatgttcaagtcatccattttcttgggtatatgtagttcatttctatctatgcttgaggaattttccattgcagggatataccacaacacgtctccttatctgttgatgaacatttggattatattttccaggttttggttattatgaatagaattgttataagtatttgtgcaaacatacattttcatttcttttaagtaaaccactacaagaattgttgggtcaaatgatcagatgtaagattattttgataacagattgctagatt

SEQ ID NO: 111775 - DNA, 640 bp, Homo sapiens
gtgcacttaattggagctatgtaggaccttctactaatgtgcattaataagaaataattcacctaagtatgtttctggatttggggaatgcaaaagtttcaaatcaacattatttaggcataatttacatgtggtaaattttatcttttgaaatcttatggtttgatgactttttttacaacaaaaattaggttatttgcatgactcaaagactttcttcctgtcttgcagtcagagcccctcacttaactctagtgcttggctaatactggactggattctgtacatatagattagwttttccttctctataattcatttaaaatataatcagactgtatgcacacagtgtgccttctttatctaagcagcatgttcaagtcatccattttcttgggtatatgtagttcatttctatctatgcttgaggaattttccattgcagggatataccacaacacgtctccttatctgttgatgaacatttggattatattttccaggttttggttattatgaatagaattgttataagtatttgtgcaaacatacattttcatttcttttaagtaaaccactacaagaattgttgggtcaaatgatcagatgtaagattattttgataacagattgctagatt

SEQ ID NO: 111776 - DNA, 530 bp, Homo sapiens
taattcaaaattatctttagtaaggtttcacttaccaaagtgaattgtgtatttgcagcttccaaggcatagccagaagatagagcactaggttctttagaaattaagaatcccattwttactttgaatcttggtgattcaggattcaagattcaagaatctttagaaattaagaatccccattttactttgaatcttggtgatacaggagttaagaagaaattacttaggcagatagtgagggtacagaagtcctcgggaaggttttccttttaatgaaaagaagccccaaatcattttctaacaaagagtagcctgtaaagtcgagctgcagacatagacaaggaagctgggagcttgcacaggtgaatgtcgccaggaaagaactacctgggactagacatgttcaagatggcagctccatcttcccttctctgccagccatctgtacagtaaaaagctgacaagttgagagacaagaggtgagttcatttgcatagtaagattagggtggggtaaccagccttccc

SEQ ID NO: 111777 - DNA, 445 bp, Homo sapiens
tccaatttataccctctaccattttatatcttctttttgggcttgacagtccctgagatggttcttgtccaattactttgaaatttctgcatcgtggtcttaaacatccctttgaactttcaccatgttttgaattttggtaccctagcctcaacttccattaatatcctcttatrgggaattcatattgagatatttctctaaacttgcaactatttcacctagtatgttctcgtatttaatttcaaaattaatgaaattaattcatcattgtatagcaaaaggaaggaactctttcttcacacttttcttagagttcagagtttcagacatgaataaggctgtcaggctcacgctctgacaaactgggtcttagaaacagctttgcagtttggcttgttatgcgctctaattgcattgaaacagcatcttgcattttttaaat

SEQ ID NO: 111778 - DNA, 596 bp, Homo sapiens
tccttttcctgagggaacccacccttccctcaccccatagtcattatttccagttctctgattttgcagaaattgcatatttcccctttacttgaaaggggaccgatgatttaagaagaaatgatcagagcactccactgcaatcctcacagtgctctgttcagaagtgagactgccacttcatctcggaggccaagtctttgcctgagctttttgtatgtgggggataagggctagaaagacagatcccactggaaaatgaagtcagtgtggtgaaaaacacgtgtaccttgttgtgcctctgttcattctgcctgcactagatatgtgctatcctgggcctctttctgcttatactgatttccattktgtttctgtcacctgtcacctgagcaacaccaatagatgacatttcaggccttattcaatgctcagcttttactctacatatcatctcacatgagagcatgtccatcccggtcctatttgtgttgtcttccttcttttctgtggatgagctcctagtatgtcctgggatgcccttaagagcacaggtgtatctgtgtgtatgagagggaggatggtggccatgggga

SEQ ID NO: 111779 - DNA, 521 bp, Homo sapiens
attagtatattcaattctgcttgcctggaataagctgtgaaatttcctggctacctgcagtttcatagcatgaagtcatagagcaatcactgttagtgcatagcaggtttctgttttgtttgtgttcttatgaaagaaacactgtctccagtgcgtgtcaattattttcccacatctacacttgtgttgcacccatgccactgcctccaactccatgttgaatattcatcttatttagtttaattttaatgattgaattatcttcatatgtttgtttctgagttattgaaaaatgacacaatttcttggaagtttctattagacctgtctcttccataatatttatcacaattactccacatcttgaaaaccaatttattattgtgacaattgatctcatctccaggtagttaatagtaatcataaccatccttaaaaactgtaatgaaaaataaattcaggtagcatacgcccttccaggagatacaggtataaggtgawtctgtatgaagtgtggcatt

SEQ ID NO: 111780 - DNA, 449 bp, Homo sapiens
agatagatgaagtttgagtcactcttccattcctaactgcccactttctcctgaatttcccagaaccctctgcctccacgccccttcaccggattccttaccatggtccactccttagaatcctcaagagcggtcctcctattttccagttggatcagctaaagctggagacagcaaagccccactgctaatttgtggcaaagttggtttggagtccatcatcccggccacctctctatgttgcctcctcccgcgcccactccctcaggaccctgcactctgccatgkgtgacagtggatagcaactctcttgggtgatgaccgttaatcctgtgggagtcctactcaccctgaggctttgactcacctggccagtcccaaaaaggataccccttttaatcagtacctatgatatcagacccaaattcttaggcagttaaagacaaaaa

SEQ ID NO: 111781 - DNA, 332 bp, Homo sapiens
ggcctcccaaagtgctgggatcacaggtgtaagccaccgtgcctggccagcgtgccttattttctttatctagtctaccattgatgggcactttgggttggttccaagtctttgctatcgtggatattgctgcaataaacatacatgtgcatgtgtctttacagtagaatgatttataatcctttgggtacatacycattaatgggattgctgggtcaaatggtatttctggttctagattaacaattatccatccactcaacagatatttattgaacatttactatgagcaagtcgctgagataaacaaacatgctctcaagtgggtatct

SEQ ID NO: 111782 - DNA, 544 bp, Homo sapiens
tactaccttttttctgaaatgtctttgctttctatttttcatccatgtttgcccagaaatgcaagaagcttcatcttaattttcactttatccccttatatacacatttaacaagggactaaagtctttctgttttttaattcttaacatactttacagtcaaccayatctctccattcccactgccattggttttgttgtatcccttaggtcccataaatctctttcctcttgtttccatctttcagatcttacaagtcaagccagaccaaccaatttttaatttctgatcccaaagtatttaactgtttctttccttgcctagaaactcttttagtgtttgtggcaaatattctagactcagataaaataaatgataccctttctgatgtttcccctctttttcacaaataaagttaataaatacatatagagaaaatattttaaaatgcttaaaattaatgtacttgtattaacctctttcataacagaaatggaagaacctatgattcagagttgagagcaaatcaattccatgacttca

SEQ ID NO: 111783 - DNA, 483 bp, Homo sapiens
actaattaaagtcatattgctgaattttaattcaggcttctttgattttaaatccatatttaacattgaaatataaatagaaatgtacatattttgtgggtcaggactgtcttaataaaggacaatataagccataaataataataaagtgtttttcaattaaatttggaatgggaagagaagttggtaggcaaggatgagtaaagaggagagaggatattctaggcaaaacatttgatatttgttgatagctgaggtttccaatagaatacttttgaaagagaggaaaacataattttctctctcctcttttaagttctcactggggccactgtaacaaaagacagattaacaagagaaaaatagaagtttgttagcatgtatatctcatayacatggaaaatacacagaaaaataattcttaaagaggtggtttagattctggccagaatatcattccagctaaaaacaaaaaagaagagt

SEQ ID NO: 111784 - DNA, 600 bp, Homo sapiens
taaggcacgaggagggagtattaaatggggaagagccacacattaagtcttatgatgttaattttgtgtgtcaacatgactgagctaaagagtgcctatatatttggttaaatgttatttctgagygtgtctattagggtgtttatcaaaaagatgaactttttttttctttcgagccatgtttcgctctgcacttaggctggagtgcagtggtgtgagctcagctcactgcaaccttcgcctccagggttcaagcaattctcctgccccagcctcctgagtagctgggattacaggcctgtgtcaccatgcctggctaatttttatatttttaggagagatggggtttcaccatgttggccaggctggtctcgaactcctcacctcaagtgatctgcccacctcagcctcccaaagcgctgggattacaggtgtgagccactacacctggccaagagaaatatttgaatatgtagactgagtagactgttcttcccaatgtaggtaggccacattcaatcctataaagacctaaatataataaaagattgagtaagaaagaattctttgtttttgcctgtctttaaactgggacattgg

SEQ ID NO: 111785 - DNA, 600 bp, Homo sapiens
taaggcacgaggagggagtattaaatggggaagagccacacattaagtcttatgatgttaattttgtgtgtcaacatgactgagctaaagagtgcctatatatttggttaaatgttatttctgagcgtgtctattagggtgtttatcaaaaagatgaactttttttttctttcgagccatgtttcgctctgcacttaggctggagtgcagtggtgtgagctcagctcactgcaaccttcgcctccagggttcaagcrattctcctgccccagcctcctgagtagctgggattacaggcctgtgtcaccatgcctggctaatttttatatttttaggagagatggggtttcaccatgttggccaggctggtctcgaactcctcacctcaagtgatctgcccacctcagcctcccaaagcgctgggattacaggtgtgagccactacacctggccaagagaaatatttgaatatgtagactgagtagactgttcttcccaatgtaggtaggccacattcaatcctataaagacctaaatataataaaagattgagtaagaaagaattctttgtttttgcctgtctttaaactgggacattgg

SEQ ID NO: 111786 - DNA, 600 bp, Homo sapiens
taaggcacgaggagggagtattaaatggggaagagccacacattaagtcttatgatgttaattttgtgtgtcaacatgactgagctaaagagtgcctatatatttggttaaatgttatttctgagcgtgtctattagggtgtttatcaaaaagatgaactttttttttctttcgagccatgtttcgctctgcacttaggctggagtgcagtggtgtgagctcagctcactgcaaccttcgcctccagggttcaagcaattctcctgccccagcctcctgagtagctgggattacaggcctgtgycaccatgcctggctaatttttatatttttaggagagatggggtttcaccatgttggccaggctggtctcgaactcctcacctcaagtgatctgcccacctcagcctcccaaagcgctgggattacaggtgtgagccactacacctggccaagagaaatatttgaatatgtagactgagtagactgttcttcccaatgtaggtaggccacattcaatcctataaagacctaaatataataaaagattgagtaagaaagaattctttgtttttgcctgtctttaaactgggacattgg

SEQ ID NO: 111787 - DNA, 600 bp, Homo sapiens
taaggcacgaggagggagtattaaatggggaagagccacacattaagtcttatgatgttaattttgtgtgtcaacatgactgagctaaagagtgcctatatatttggttaaatgttatttctgagcgtgtctattagggtgtttatcaaaaagatgaactttttttttctttcgagccatgtttcgctctgcacttaggctggagtgcagtggtgtgagctcagctcactgcaaccttcgcctccagggttcaagcaattctcctgccccagcctcctgagtagctgggattacaggcctgtgtcaccatgcctggctaatttttatatttttaggagagatggggtttcaccatgttggccaggctggtctcgaactcctcacctcaagtgatctgcccacctcagcctcccaaagcgctgggattacaggtgtgagccacyacacctggccaagagaaatatttgaatatgtagactgagtagactgttcttcccaatgtaggtaggccacattcaatcctataaagacctaaatataataaaagattgagtaagaaagaattctttgtttttgcctgtctttaaactgggacattgg

SEQ ID NO: 111788 - DNA, 463 bp, Homo sapiens
gaattctttgtttttgcctgtctttaaactgggacattggtgttctcttgccattggacagactggaattatatactcagctcttctgggtttggacttgtaagcctctgtaattgcataagccaatcccctacaataaatctctctgtatgtgtttctctctctctctctctctctctctctctctctctctgtgtctctctgtgtctgtgtgtgtgtgtgtgtctgtgtgtgtgggtgtgtgtgcacgtgtgtgcatatacatatagagtagtcctgcatatccatgagagatttgttcaagkgtaccttgcggatgccaaaatccacagatgctcaagttgctcatacaaaattgattagtatttgcaaataacctatgcatatcccccgtatacttctaaaaatctctagattacttactatgtctaatagaatgtaaatgctatggaaacagttgcta

SEQ ID NO: 111789 - DNA, 583 bp, Homo sapiens
tcaggtgaacaaaggtgtaatttgattcatgaaaacagagtcattacccttcaatcagtttccagatttgaacgagtttacagtaccagaagtccctaaaaagaagaggctgtgttaccttaaggaaggactcagtacactgtggaaggataaatgtttatgttcttaatctttctctgaaactactccaaagggacctatagtcttctaccaggttaactgtgcatgtaggaaataaaaataattggacctttggagaactactgaacataaacaccagttatgggagacctaacacatcactatagtttaccagtcagaataggagcttgtagaggtaagtgatcaatggcgctttagctcagctctgtcttctcaccgtggayccagttgttccctgaacccatcctatagttatttctacagttctggatgtacagttgaaatagacatactcagcagctagtaaaatcccaatattggttccctgacctttgggtcaaggactaatatgggtgaaagtctaagtggaagccgctagaactgtctccacataagaaaatagtaaaccaagaacaatatc

SEQ ID NO: 111790 - DNA, 510 bp, Homo sapiens
agcccatttaatgaatgatccccaaatatgctaggttttagtggggcttagaacaagggacagttttgcaacaggccaaggttgctgtgcaagctggtctgctgcttgggccatctaatacagccaatccaatggcacttgaagcgtttatggtagacagaaatactgattggagcctttggaaggcccttataggtgaataacaacataagttctcaggtttttagattaaggtcctaccgtcttacccacacgagtccccttttaagaaacacctcttagctcaccactgggtcttaggagggactaagtggttaaccattgaccaccaagttaccatgaaatctgagctgcccatcatgaagrggatatgatctgaccaatcaagccataaagttgagcatgcattgcaacaccctgtcatcaaatggaagtggtatagacatgataggaccagagcaaccctgaatgtacaagtaagttacatgaagaagtggcccaaatgcctat

SEQ ID NO: 111791 - DNA, 534 bp, Homo sapiens
tccacttctttacataggtacctctttctcccatatttatatattttttctggtgttttcctttgttcctatgttttccttcttctttaacacccttactaccactytatctccctttttaatgtaaaaatttcctaactggtgttaaacaaagtttatcttaaagctgcttgcttacatattttacgttcagcctaatggattctccatgcttagtgactgtaacctaactggatgtgtaaacagactgtaacctacttttgtactagtcacagagttttggccaatcacaggtagccatctattcaaaccatgatcaaatatgagaaatgccaagctgtaaccaatgcagatgtttccgttccacatttgatgttctgtatgctaccttccttttcctgtccatgaagattatcccaccatgtggcatccccagagtcactctgcacctattctggcttgcagggctgcagattcatgaatcattcttaattgaattctgttcactttgtccaaaagttgttttgttgttgt

SEQ ID NO: 111792 - DNA, 534 bp, Homo sapiens
tccacttctttacataggtacctctttctcccatatttatatattttttctggtgttttcctttgttcctatgttttccttcttctttaacacccttactaccactctatctccctttttaakgtaaaaatttcctaactggtgttaaacaaagtttatcttaaagctgcttgcttacatattttacgttcagcctaatggattctccatgcttagtgactgtaacctaactggatgtgtaaacagactgtaacctacttttgtactagtcacagagttttggccaatcacaggtagccatctattcaaaccatgatcaaatatgagaaatgccaagctgtaaccaatgcagatgtttccgttccacatttgatgttctgtatgctaccttccttttcctgtccatgaagattatcccaccatgtggcatccccagagtcactctgcacctattctggcttgcagggctgcagattcatgaatcattcttaattgaattctgttcactttgtccaaaagttgttttgttgttgt

SEQ ID NO: 111793 - DNA, 534 bp, Homo sapiens
tccacttctttacataggtacctctttctcccatatttatatattttttctggtgttttcctttgttcctatgttttccttcttctttaacacccttactaccactctatctccctttttaatgtaaaaatttcctaactggtgttaaacaaagtttatcttaaagctgcttgcttacatattttacgttcagcctaatggattctccatgcttagtgactgtaacctaactggatgtgtaaacagactgtaacctacttttgtactagtcacagagttttggccaatcacaggtagccatctattcaaaccatgatcaaatatgagaaatgccaagctgtaaccaatgcagatgtttccgttccacatttgatgttctgtatgytaccttccttttcctgtccatgaagattatcccaccatgtggcatccccagagtcactctgcacctattctggcttgcagggctgcagattcatgaatcattcttaattgaattctgttcactttgtccaaaagttgttttgttgttgt

SEQ ID NO: 111794 - DNA, 610 bp, Homo sapiens
tgggggcaattttccccatattgttctcatggtagtgaataagtctcatgagatctgatggttttataaggggtttctgcttttgcgtctctctcattctctcttgctactgccatgtaagaaatgccttttgccttctggcatgattgtgaggcctccccagccacatgaaactgtaagttcattaaacctatttttcttcccagtcttgggtatgtctttatcagcagcataaaaatggactaatacacccctctaatcctaaatacatgagtttgtgaaggtggcaatgagggtgaaaaacatctgttggaatttggttattttttttctcytcttagtgcaattttgaattgtgtagtagtctctttcttagtagtgatgaaactagttttttattattttaatttttgttgtgctcattttttggcatgtgtaaacttttggaggatgtgtaaagtttaggatgatactatttttataaagcaaattggaatatgtacaattcaagttttttaccctttaattaaattttaaaaagatatatcttccacttgtttagtttgcattaaaatttggatgttgcaactttttctctactgcttcaatt

SEQ ID NO: 111795 - DNA, 446 bp, Homo sapiens
aaaaatcaaaggaagaaactgagtcatccttcaaaaagtaaacacctaaccttaaaggagaggacaaaaacaaagtctcaaaaactagcaagaggtagtcagtcacaaagcggtaaaaatattccagcagaactgaaagtcaatctcctttgaaaagaaaagtttgcaaatgaaagttcaaagatgcacagaagcttgaggcaagtctattttcagaggtttctaactttcatgcaaagtcaaagggaggaaaaattttatctacatgaatacatttatgtatagatgtccataaaccactakgtataaagtatattgattcaagaagtcagaaaggggtaaaaataacagaaactcaaatcttccatattcctctatccatttctgctaagagaccctcatcaggtatctgtgtattaataaacaatgcccgcatttcccatatt

SEQ ID NO: 111796 - DNA, 597 bp, Homo sapiens
catttcttgtcacataaaagagaaatacagagctcctaatagatttctttctctttttcaatattttgcccctggccagagttctagggtctgtgccaaagaaaaaaattgggtagttgtccttctgttgcatggatattgcttttcatatgttcaaaatatgcagcctattcaagagtacagtttattctattttttttctaataggactttgattcctggaaaacaacatactagcaagcagatggaactggtgagagcacattgccacactgatagtgacaagtaaatgcatttatttcaataggccactcaatcccaactytgacctaccctcagccaccagaaaaagatgctccaataaagacagagagaaggaacatgcagccatgagaagaaagtgacgtaatattccccaaagcagaaaatatgaagcaaatattgttaaaatcaactgaacaataatacaaacaccagtacatgaaagttacaccattgcaacaaagttaaaagatcaacagcaaactggagataaacatatgctatactagtggcaggaaaatgcgagtgttctcatcatgtagagaatcattacaa

SEQ ID NO: 111797 - DNA, 552 bp, Homo sapiens
catggtttcattgcaattgtcactagtgaaaactacctaataactaayctatcattgtcctttctcacccctgagtttgagaagtcaggaggttttccctatttaaatctttcaggagagatagtaaagattttttgggaagatgaaaacttcaaaatgctttcatatattttaaaataaaaaactgttaccaaaagtaggttgccatcaatagctataatatcttaataaataaactcctaaaatggtctaatacatgtttctcctaacaaagagtttaatattcataaataaatatctgagataccttttaagaaaaaagtcactgtcactaaatagtgtttactgaaaatcagtaattgtaattaaatcaggatgtattacttgtttaacttaccatcttttgtaaaactttagttcatgtcaataagggcacatccacatattaataactgatttctttcttaaaaaaaagagagctaggaataaacttgtatattattttagaagagaaatagacaggttggcctatataatgttactgctatttgc

SEQ ID NO: 111798 - DNA, 552 bp, Homo sapiens
catggtttcattgcaattgtcactagtgaaaactacctaataactaacctatcattgtcctttctcacccctgagtttgagaagtcaggaggttttccctatttaaatctttcaggagagatagtaaagattttttgggaagatgaaaacttcaaaatgctttcatatattttaaaataaaaaactgttaccaaaagtaggttgccatcaatagctataatatcttaataaataaactcctaaaatggtctaatacatgtttctcctaacaaagagtttaatattcataaataaatatctgagataccttttaagaaaaaagtcactgtcactaaatagtgtttactgaaaatcagtaattgtaattaaatcaggatgtattacttgtttaacttaccatcttttgtaaaactttagttcatgtcaataagggcacatccacatattaataactgatttcttycttaaaaaaaagagagctaggaataaacttgtatattattttagaagagaaatagacaggttggcctatataatgttactgctatttgc

SEQ ID NO: 111799 - DNA, 598 bp, Homo sapiens
tccataattgctatagcaaaatgtttcatartttttgctagcttcaaattaattttagcaatgtaatttaatcaaattactaagtgtattcctttataaatatctataatttacactctcaggaagtacattttaatatttcaatacttctaagaaaagtgatatccaagagaacttaatttctggaagaatcagagaggaaatatattttaaaaatattgtgtaaaaatctgccaacagtctgttttacattttctgaaatggctgatacatgcttttggaaaatcacacaagttataaatatgtctaggttcatattgttaacaactctaagcattaaaacatggtcgacagtaattagaagaaaacaagacatcctgaactttattggcttttatttagaagtacttttgcgagcaactttagataataacttgctagggaaggagtcagtactgtctcctcttttcttcttttcaacattctctcagcattaactccacctctgaaggcctgaccccatcaccatacttacttcattttggagccatttagttccttcagcgagagggtatatcagatctctccaggtattcct

SEQ ID NO: 111800 - DNA, 565 bp, Homo sapiens
gaattctttcttctgaggaggcaagaattgaggttactgcagatccgtatggatttgctgccagtaacaacagtgcagcctattgcaatcttgccaatgcaccacagtgcagtagtctctcaccgctcaaggtatcacccaaagttctttgtctcatgataaagaaaattaaggagtgcagacaccaagagtgaggttggagtgaaagtttaataagcaaaagaagaaagctctccactgcgaagagggggcttgaaagaggttgycatttttacagttgaatgaaaaggcttttataagaaactgatgagggttgcatgtctcatttgcataagttgcaaatttctggtagctccactcagtcctcccagtgcgcatgcaggcccttatcttgagttactccatattgctttgttccccttactggccatgtgtcaggggatggaattttccattgtgggcatatgtgggcatctgtgtagcctttcttttctgtgtggctgggggcatatcttagccaaggccccctgtgcaaatttccttatctgtgtctgcagctcaattt

SEQ ID NO: 111801 - DNA, 546 bp, Homo sapiens
tcctatacttttctgtgtagactttttttttttgctgtaacaccaaactatatctaatgtttttgaagatattttaaatggcgattaaactccacttgcgtagtactaatgttgcaaataactcaaatgaattgatgacaaaatgaccgaatttacctgtgtgcaggtaatgacaatcagagctatggcaagtctccatcaattatgggatgaatcccagttttagagatgttacaatgtggaaaagaaagtgcatctcataatcggtgaaatatggtaatctctgctatggaaaataccttggctcagctatcacctcctccrgggagcctgtcctaacaatcttccagcactccctctgagttgggctcagtcccacaccttgtgttcctgtagcttcctgtgtatatctgtatcttcccacttagcatgtggtggcctaattacctgtttacctgaggaatgtatcttggagaactctttgggttcacggtgcctggaactgtgcctggcacatcatatcggtcctcagtaaatgcttgctta

SEQ ID NO: 111802 - DNA, 527 bp, Homo sapiens
gttgtttctttcccaggtttcaaaatgttgatggtagcacagcctgtgtcttttgatactaccttggatacccctaaatgatccaggaattatttgtgcacagaggctgagtgtgtgttatctaggtgtgtactcaggaaaagtatctgtgagaawcagattaagtatgagttaagtcatattccaaggttacgtctgaagccttctggtgtagtgtagtttgaaacataaaacagcacttgaaataaatgagctacaactatgagcagcaatcttttccctagcctatggtttcttataatgatacttaacaggaaggtatttttaggcttgttacatttgcagaacaaaagatggtcacatacctttggctgaagaatacaagggatgttattttcttttttaaataaacattttgtgcagtgtacaatgtgaatctagatacaggaaagcaaactattttcttgtagaaaaaaaccaggctatatatttagcacctgctcatttcccagcatgtcccagcagct

SEQ ID NO: 111803 - DNA, 527 bp, Homo sapiens
gttgtttctttcccaggtttcaaaatgttgatggtagcacagcctgtgtcttttgatactaccttggatacccctaaatgatccaggaattatttgtgcacagaggctgagtgtgtgttatctaggtgtgtactcaggaaaagtatctgtgagaatcagattaagtatgagttaagtcatattccaaggttacgtctgaagccttctggtgtagtgtagtttgaaacataaaacagcacttgaaataaatgagctacaactatgagcagcaatcttttccctagcctatggtttcttataatgatacttaacaggaaggtatttttaggcttgttacatttgcagaacaaaagatggtcacatacctttggctgaagaatacaagggatgttattttcttttttaaataaacattttgtgcagtgtacaatgtgaatctagatacaggaaagcaaactattttcttgtagaaaaaaaccaggctatatatktagcacctgctcatttcccagcatgtcccagcagct

SEQ ID NO: 111804 - DNA, 595 bp, Homo sapiens
gatggggatacattctaagaaatgtgccattaggtgatttcatctttgtgcgaacatcacagagtgtacttactcatgcctagatggtacagttgactaaacacccagactatatggtatagcctattgctcccaggctacaaagctgtacagctgctgctgtactgaaggcaatggtaacacagtggtaagtacttgtatatctaaacatagaaaaggcacagtaaaaatacagtataaaagataaacaatgaagcygggtgcagtgtttcacacctgtagtttcagcctttttggaggctgaggtgggaggattgcttgaacccaggagtttgagaccagtctgggcaacatagggagaacttgtctctaaaaaaaaaaaaaaaaaaaaattagccaggcatggtggtacatgcctgtgtttctgcctacttgggaggctgaggtggaaggatctcttgagcccaggaggttgaggctacagtgagctgtgattgcaccactgcactccaatctggccaacagagtagagaccttgtctcaaaaacaaaacaaaaacaaaaacaaacaaacaacacaaaatccaaaaattaaa

SEQ ID NO: 111805 - DNA, 554 bp, Homo sapiens
acaggatatggaatggaacttatcctgttgtctcaggtgttggccaaagcttcaaagttggagtcagtgggtaataagcactcctacattctaaagagaggtgctaaaagaatcccattggacttgctaacgagaggctagaggttcatggagagttccttgaagggaatktgtaagaggagcaagctttgctttttccttccttttccatggggaaggggatcccctcccccaaagcaagcaaagaggggtccaagagaacctcgggtttagggagatccttgcaaggagagacaaactctcattttatggacagaagcttgttgagtggtgaaaacatttcagcccgcatagtgctactaccagagttgcgaatgccaaaggtcttgggagagcttgccatgtgtcccctggagtctgggggcatgatgactggcacctggctctcgagagctgtgaaagcaggagccaggtggagccaggaggcagggtaagaagagagagggcagctgggtagcaagatgccatttgaaagtgtcaaaaggcaaattaca

SEQ ID NO: 111806 - DNA, 554 bp, Homo sapiens
acaggatatggaatggaacttatcctgttgtctcaggtgttggccaaagcttcaaagttggagtcagtgggtaataagcactcctacattctaaagagaggtgctaaaagaatcccattggacttgctaacgagaggctagaggttcatggagagttccttgaagggaatgtgtaagaggagcaagctttgctttttccttccttttccatggggaaggggatcccctcccccaaagcaagcaaagaggggtccaagagaacctcgggtttagggagatycttgcaaggagagacaaactctcattttatggacagaagcttgttgagtggtgaaaacatttcagcccgcatagtgctactaccagagttgcgaatgccaaaggtcttgggagagcttgccatgtgtcccctggagtctgggggcatgatgactggcacctggctctcgagagctgtgaaagcaggagccaggtggagccaggaggcagggtaagaagagagagggcagctgggtagcaagatgccatttgaaagtgtcaaaaggcaaattaca

SEQ ID NO: 111807 - DNA, 554 bp, Homo sapiens
acaggatatggaatggaacttatcctgttgtctcaggtgttggccaaagcttcaaagttggagtcagtgggtaataagcactcctacattctaaagagaggtgctaaaagaatcccattggacttgctaacgagaggctagaggttcatggagagttccttgaagggaatgtgtaagaggagcaagctttgctttttccttccttttccatggggaaggggatcccctcccccaaagcaagcaaagaggggtccaagagaacctcgggtttagggagatccttgcaaggagagacaaactctcattttatggacagaagcttgttgagtggtgaaaacatttcagcccgcatagtgctactaccagagttgcraatgccaaaggtcttgggagagcttgccatgtgtcccctggagtctgggggcatgatgactggcacctggctctcgagagctgtgaaagcaggagccaggtggagccaggaggcagggtaagaagagagagggcagctgggtagcaagatgccatttgaaagtgtcaaaaggcaaattaca

SEQ ID NO: 111808 - DNA, 540 bp, Homo sapiens
ctcattattatgtaccacatttcctgcgtctattgagatgatcatactattttattatgtcttcaactctattcatgtgctgaattagaatactgatttttaaaagatcatcaattttgcatttgtaaaataaattcagttgatagtgatatatggtcatctatattgtaatggaaaaggcagacattttcaggagttcttccatcttcaagggagcacatctttctcaccatgtgagttacagtatcagaaaaactttaaaggwggtgatgtatcctaggcaaagcaaactggtgtgagaagaatcttgtgaaaagggaaattacaataaagtagtgatgatgattctcatgcaccaagggtaagggtgaggaaaataaagaaggtaagaaaattaactcatgttgaagagaatgaagaggagtgtgaggaggacatgagacacaggtggagaaaagggtggggatagcgattgggcaagtgagtgagaatgaagcagagatgcaggtgtggatcccaaaaaagaagtggagcacaaag

SEQ ID NO: 111809 - DNA, 586 bp, Homo sapiens
gccggcagggtggggagctcaccatcctaaagggagggacacaagcctgactggatttgccacctgctgactgtagagcccttgggcctgagtgaacgtaagtagtagccagggaattgtcacggaagcccatctacaaaacccagtgctatactagcttcaaatctggcatagcacagtcccattggtggtggccacagggtgcctgtgtcatctttcccagagctccaggcagctcagcatcaagagaaagagatatcatttgtytggagaaaagtaagagaagacaatagtctctgccttctaatccagaaaattcttctgaatcttatccaagaccaccaaggcagtacttctacatgtctgcaagagccacagcattactgcactcggggtgccccctgaagcagatacagctgcggtgaccaaagacataggtcacaacacgcaagtcccttcaaatacctggaaggccttcccaacatgaatgggtacaaacaagcgcaggctgtgaagaccacaataaatacctaattctttaatgcccagagcccagacactgacaaacatagacgataggccaaga

SEQ ID NO: 111810 - DNA, 560 bp, Homo sapiens
aacaagactggacgatggcccacccaggagtaacatggagccaggggaacctccgccacccagggaagcagtgagtgaatgtacaaccccaggaatccacacttctcccatggatctttgcaatccttcggtcaggagatacccttgtgaacccactccaccagagccttcagtctgacacacacaactacatggagtctcagcagagcagccaccaagacacatagagagcagggagccttagatacccagggtttctgggcttcccagaaaaagtagctgcaaccctggcaaagcaggaagttagacccctgtacatacccctaagaaacagctgaatccaggaagctcagcagcaacagtctacaggccctgcttccacagcacctcactggataagacccattggcttgaaattccagccagtcactggtagcagtgttgcacctcccagagacagagttctcagggsaaggagtggccaccatctttgcagtttgggtgatctaattgttccagccttccgggtttggaaagtccaagcctactgaggactgaag

SEQ ID NO: 111811 - DNA, 560 bp, Homo sapiens
aacaagactggacgatggcccacccaggagtaacatggagccaggggaacctccgccacccagggaagcagtgagtgaatgtacaaccccaggaatccacacttctcccatggatctttgcaatccttcggtcaggagatacccttgtgaacccactccaccagagccttcagtctgacacacacaactacatggagtctcagcagagcagccaccaagacacatagagagcagggagccttagatacccagggtttctgggcttcccagaaaaagtagctgcaaccctggcaaagcaggaagttagacccctgtacatacccctaagaaacagctgaatccaggaagctcagcagcaacagtctacaggccctgcttccacagcacctcactggataagacccattggcttgaaattccagccagtcactggtagcagtgttgcacctcccagagacagagttctcaggggaaggagtggccaccatctttgcagtttgggtgatctaattgttccagccttcygggtttggaaagtccaagcctactgaggactgaag

SEQ ID NO: 111812 - DNA, 564 bp, Homo sapiens
tttatttttatggttccatagtattctatggtgtaacatgtaccacattttctttataaaatctgtcattgatgggagtttaggtagattccatgtctctgctattgtgaatagtgctgcaatgaatatttgtgtgcatatgactttatgatagaatgatttctattcttctgggtacatatccagtaatggtattgctgggtcaaatggtggttctgcttttagctctttgagaaattcatactgcattacacaatggttgaactaatttacagtccgaccaacagggtataagttctcccttttstccacaaccttgccagcatctgttatttttttactatttagtaagccattctgactggtgtgagatggtatctcattgggattttgatttgcatttctataatgatcagtgatattgagcttttttaaatatatacttgttgtatgcatgtatgtcttattatggaaagtgtttgttcatgtcctttggctacttcttaacgaggttgtttgtttttctcttataaatatgtttaagttctttagagatgctggata

SEQ ID NO: 111813 - DNA, 543 bp, Homo sapiens
aggcatgggaaacttttttttttttggcctagtttagagggttaaagaattgttttaagtgagataggctaaagctgaaggcttgagcaagttgtggaaggttcataaaaaattaaccttgtaaataattctgtgtgtgagcaaattgactaaaattaaaaggatattattcaatatttctataaattaaatattgaaataaaagcacactgatacaaaatctgggcccatatgtcagaataatgaggctttttggaacactaatatgctccttaatagaaattaataagtgttataaaaggtttgtggaaatcttacctatggtcaaacgaattaaacttgaataaatgtgtttataatattatatttaaaattagytttagtgttaatgatgcactaatgcaaaagtgaaatttggctttctgtcttgaacaagattttcatgtaatattaaaagataataagagacttatgtttgtcttttgaataaacaatgggaaaagaaaggagagaaaggagacagattgtttggaaaattaagtc

SEQ ID NO: 111814 - DNA, 555 bp, Homo sapiens
ttcattcctttttggagattttggggataaatcattgtttcttttgcatgttccagctttagaggctgccctcattccttgacttgtggcccacttcctccattttctagctagctatatggattgagtctgtttcccctgcattattcagatgtctttttctcctccctcttccacttttgagaacccttgtaattacattgagacaacttggataatccaagataatctcactatattaaggtaaactgattggcaaccttaattccatttgtaaccttaattccccttgsccatgtaacataacatagtctcaggttctacgtattaggatgtaggtatctcatgggggccattatcctgcctaccacagtactcattgtatttttttcaccattacacactcagaataatgccaggtttgcttatgtcttcgataggaagtaaaaattacttttatttttatttatttatttgtttatttatttattgagatagagtctcactctgttgcctaggagggagtgcagtgctgcaatatccgctcactgcaac

SEQ ID NO: 111815 - DNA, 440 bp, Homo sapiens
ttgctcactagttccaatcagtataatattatcaatgtattggaccagagtgatatcttgtgaaatggaaaggtaaccaaagtccctgtgaactaaatgatgacatagggctgcagagttgatacacccctgaggtaggacagtgaagatgtattgctagcctcaggagctaaatgcaaactgcttctggtggtctttatttgcagggatggacataaatacatttgccagatcaatagcagcataccaggtacctcaggatgtgttaatttccttaagtagtgaaatcacatctgrtacagaagctgcaattggagtcaacatctaattaagcttaaaataatccactgccattctccaagatctgtcttatgcactggccaaataggtgagttggagatgcagtgaaaattaatgcccctgcatttttgaagtccttg

SEQ ID NO: 111816 - DNA, 398 bp, Homo sapiens
ttacagctaagtaaggcctaggaacatgtggagatagccatgctcccttgctatgctggaaagagtctttttatctgcacttctgtctggtgccctaggctccacacctagtacctaaataaaatcactaactagccagatttttcaccaaaagttgctgagaggtaacagtgtaacatatacttgaaactactgaagaaacagttttacatgcaaggtgtgtaaggacagtgaaatgcacctttaggaaaagattataagaaggcataagaatgtamatttttgcctaggttagaaggttaaatgattgttttaaatgagatagaataaagctaaacacttgagcagttgtaaaagatttgtaaaaaaaaatcttgtaaaaaattatatgtgttaat

SEQ ID NO: 111817 - DNA, 531 bp, Homo sapiens
aaatcttaaacactgtaaagctgaataatgacctaataaagcatcactttaggaaggttaggctatgtcagcatatgtcacagggtggggtaaaaagcttttaatttgacagccattgtaccagtgtgaggttataatgacctgcactgagagaaagttggaaggaaagagaaaatggaagaaggtaatagggcttcatgatgggacacactgtgtgagctgagaaagtcaaaaataacagcgttcactggagaggcggagaaaatggtaacaataaggggattmgggaaatcggaatgagaagcatctgaaaagaacctgaactcaaactcgaaggcattgatgttgagataataggcgaatcactgcaaatgccctggatggactagagtggggatggaagtaaggactggaaattgatttgggagtcacctgtgtagtgttgagtcctccaggtaaagactatggaaagaaaaacagggataaatctgaatcttagacagaggcagtccttggaaaggagcagcaaga

SEQ ID NO: 111818 - DNA, 628 bp, Homo sapiens
ggaacattagagcaacaattgcagagctggggaaattataaaccaaggaagagaacaactcaagagttattagaaggtaaagaaggcggagaaattccctattgaagggctgagaccactacgaacagatggtgtgcatgaagaagacaactttgtgaggtcaaaaagacgtcaatcctgccaagttccctggaaatgcatggaaatttcttaggcagcttggcctcccacagactgtacagttgctcgggcataataatggagtgggtcaggagattcaagacaaattrtctcaccccaaagggctaagaaactgcagctgacattgggagtttactttgaaaatgaagtgcattcgctcgggaactcaactgccagagtccaccagctgccacctgtgtggtgagggggaacattccctgcaggccaactgtcccccattccatgcatagccctgaggggggctgggtttcacacactgcctcatgaagtgggtatctgacaatgaaaacttcccaatttagagccacttcaaacaaacatttatttagaacaagcagataatgagtgattattttcatttctggaacatcacagatgtggttcattagggtatgtcaaataggaa

SEQ ID NO: 111819 - DNA, 586 bp, Homo sapiens
acaaccattatctgtccttgtgattgggatctcagcctgggaagtcaccttcatctccaatgtgccttttagtgtgctcccccaaaggcccaatgaggtccatgcaaatagactttccagcaccccatgctgacattctctcctgcttctagaggaactagaaaggcctccatccaaggcctctgtgtgtgtgtgtgtgtgtatgtgactttgcaccattgatgtgtgctgagtgacagtgtgaaccagcttatcccaccaagctccctgacatggggaccaggatgcactagggcaccagctctgctcctccgaggtataaaaagccctagacaatgagcttggcaacatccccrtcgctgcctacgacagacaggcagggagaagtgctcagggccagccagctggctgtgttagcagatggagcagttgctgcgtttcatccacaacactgcatttgactaagtctgcagattggcctgcacagccaatgaccacctgcagagccttgagtgctgatgttatgatggcgatcatgggcatgtcctttagctcaccattcagcattatttctattttgactaac

SEQ ID NO: 111820 - DNA, 504 bp, Homo sapiens
cctttccaagtggtataggaaggcacaaaaataacaacaaaagccaaaacaactcagaaayttcatgtctatctcttctctgtgtatagttcataattctgaagttcacatgacatttcacattattcaaattgagtgccacagcaataagagcttatgaatatggccttctgtagcctcatgtacatgttcgacaagtttcttcctggtgtgatgttgcagatattgcccatattgatgggtatagcctaaaacataagttccttgagaggagaagaacatctttcttaggtttttgtgtttttttttttttacaaaatctattttaataaaatttccaagattgagttaagcaaatagcactaaatattaatatttataaatgaatacttaatatatggcattatattaatatatcaattataatatataacctatattatattaagtatactattacttaagtacatattacccttaagtatattactatattaagtatac

SEQ ID NO: 111821 - DNA, 504 bp, Homo sapiens
cctttccaagtggtataggaaggcacaaaaataacaacaaaagccaaaacaactcagaaacttcatgtctatctcttctctgtgtatagttcataattctgaagttcacatgacatttcacattattcaaattgagtgccacmgcaataagagcttatgaatatggccttctgtagcctcatgtacatgttcgacaagtttcttcctggtgtgatgttgcagatattgcccatattgatgggtatagcctaaaacataagttccttgagaggagaagaacatctttcttaggtttttgtgtttttttttttttacaaaatctattttaataaaatttccaagattgagttaagcaaatagcactaaatattaatatttataaatgaatacttaatatatggcattatattaatatatcaattataatatataacctatattatattaagtatactattacttaagtacatattacccttaagtatattactatattaagtatac

SEQ ID NO: 111822 - DNA, 504 bp, Homo sapiens
cctttccaagtggtataggaaggcacaaaaataacaacaaaagccaaaacaactcagaaacttcatgtctatctcttctctgtgtatagttcataattctgaagttcacatgacatttcacattattcaaattgagtgccacagcaataagagcttatgaatatggccttctgtagcctcatgtacatgttcgacaagtttcttcctggtgtgatgttgcagatattgcccatattgatgggtatagcctaaaacataagttccttgagaggagaagaacatctttcttaggtttttgtgtttttttttttttacaaaatctattttaataaaatttccaagattgagttaagcaaatagcactaaatattaatatttataaatgaatacttaatatatggcattatattaatatatcaattataatatataacctatattatattaagtatactattacttaagtacatattacmcttaagtatattactatattaagtatac

SEQ ID NO: 111823 - DNA, 531 bp, Homo sapiens
agtgtctgctgtttccttctttgtgttcatagttttttttttttataaagtctcgcttcctcacccatgctggagtgcagtggcactatcctggttcactgcaacctcygcctccagggttcaagtgattctcgtgcctcagcctcatgaatagctggtatcacaggtatgtgccaccatgcccggctaatttttgtatttttagtaaagctggggggttcaccatgttggccaggctggcctcgaactcctagcctcaagagatcccccagctcagccttccaaagttctggaattacagaagagagccaccacacccagccttgtgtttataagttcttatcatttagctcccacttacaagtgagaacattcagtatttggttttctgtccctgtgttactgctaaagatggtggcctccagctccatgttcctgcaaaggacatgatcttgttcttttttatggctgcatagtattccctggtgtataggtacaacattttctttatccagtctaccattaatgggc

SEQ ID NO: 111824 - DNA, 222 bp, Homo sapiens
atctctgctttcaacatccacagaaaaagccctggggtgatttccgtggctctgggtgtgtggtatccatccctggaggttggagcacactacattctyattgtctgggctcatatgaccacatctgcagggaaacagagaatctgtttcacccaaaacaaaaggactagaacatagttgcaattttcccaaggaaaatgtaagtgctgtgaccatgaggcg

SEQ ID NO: 111825 - DNA, 601 bp, Homo sapiens
gaatctctgctttcaacatccacagaaaaagccctggggtgatttccgtggctctgggtgtgtggtatccatccctggaggttggagcacactacattctcattgtctgggstcatatgaccacatctgcagggaaacagagaatctgtttcacccaaaacaaaaggactagaacatagttgcaattttcccaaggaaaatgtaagtgctgtgaccatgaggcggggaaatgaatgctgagctgcaaaacccacagatgccctcaccgtagaggctctgaacgaaggagagagaagtgagaagggttgtcgtggggccctgctcagagtacccacttctggaacgtgactggttgaaagtcttcagacaccattctttggacccctctccactcatttgggccactcccagccactgactaagcgaggcagaatactagaattgggccatttctgcctgatgcaggattcctctgttgggcaatgttagttcggccacattgcctgggcaaggctctttcagtactgccccatagtctgaggctctttctacccaatccttcctgctctctcttctttcacaggtgtcagggctgcattgc

SEQ ID NO: 111826 - DNA, 571 bp, Homo sapiens
caaaaattgaaggtagataaatccacgaagaggaggaaaaaccagtgcataaaggccgaaaattccaaaaaccagaattattcttctcctccaaatgattgcaactcctctccagcaagggcacaaaactggacagagaatgagtttgacgaattgacagaaggaggcttcagaaggtgggtaataacaaactcctgtgagctaaaggagcatgttctaactctttagtgcaaggaagctaagaaccttgacaaaaggttacaggaactgctaactaaaataaccagtttagagaagaacataaatgacctgatggagctgaaaaacacagcatgagagcttcatgaagcatacacaagtaacaatagccaaattgatcaagcataagaaagaatatcagagattgaagatcaacttaatgaaataaggtgtgaagacaagattagagaaaaaaagattgaaaaggaatgaacaaagccttcaagaaatatgggacaatgtgaaaagaccaatcctrtgattgattgggtttcctgaaagtgaccaggagaatggaaccaagttagaaaac

SEQ ID NO: 111827 - DNA, 578 bp, Homo sapiens
acccctgtatattccccacaccaaattttacttcctaaaccccttcactcagcccagaaggctgagatggttcctttgaggcttgaggccagccattctcccatctgctggcatttggttgataaaagctgctttcctttaccacacctagcttctcatgttttgactctgagcaccaaacagctggacttgagctggtacattaagtgcaatcatctcttttttttttccaaataatatatcttttattttaaaaattttcttatggtgttgcattgtattgtctttatttgtcttgtattgtattgtatygccctgtattgtactggtgttggtggaaatttttggccttcttgtctggctgtgccccagttctgtagaatgatttgtagtatacacgatatcaggcatccttgtctcatgcagaactcagagtcaacttgttcctacttcactattatttgtcatctttgtactttgttgtagttttctgaactattatgtttttattggttttattttttatcaatacgtaatagttgtacatatttttgaagtacatgtgatactgctggtga

SEQ ID NO: 111828 - DNA, 578 bp, Homo sapiens
acccctgtatattccccacaccaaattttacttcctaaaccccttcactcagcccagaaggctgagatggttcctttgaggcttgaggccagccattctcccatctgctggcatttggttgataaaagctgctttcctttaccacacctagcttctcatgttttgactctgagcaccaaacagctggacttgagctggtacattaagtgcaatcatctcttttttttttccaaataatatatcttttattttaaaaattttcttatggtgttgcattgtattgtctttatttgtcttgtattgtattgtattgccctgtattgtactggtgttggtggaaatttttggccttcttgtctggctgtgccccagttctgtagaatgatttgtagtatacacgatatcaggcatccttgtctcatgcagaactcagagtcaacttgttcmtacttcactattatttgtcatctttgtactttgttgtagttttctgaactattatgtttttattggttttattttttatcaatacgtaatagttgtacatatttttgaagtacatgtgatactgctggtga

SEQ ID NO: 111829 - DNA, 605 bp, Homo sapiens
ataataatctaagtaaataaatatttagtgtgttcaggggaaatgcactttcccagcttttaatttccatgaaatatttcctgagtcttagatgagcttcacattctcttgggaatatgtacacatgacttattcatacatttggaaatgtagaaattggcttacctgcaatcagcatgagttcygtctcacccttccattcttcaagactgtctacatgaggaggttgtctaaataaggttttatctaggaatagtacacatctgacaattctgtagtccacttagcaaacgcttttggtttccacactaaactatgatctccaaaattgatatgtgggcttccatgtactatgtacagtattagctttctcaattacctaaaacataggtgcagaagagggattctattaattggaggacacctcaaaatctccaataacattgtaaatagcattaaaataaaattaaagaggtggtaaaataaatttattatgccagtgttttatagcataagacagattattcatcacattgtcaatatgcatactgcaaattgtttaataaacagtttctaaacttgtgctattcatttagtaggcatat

SEQ ID NO: 111830 - DNA, 617 bp, Homo sapiens
accttcactgtataaaaatatattaagctttatttgaaacaaattgatttattttgtgaaaagaacaaaggagagaattgactaaatcaaaaagattaaatgttaattcccttggtacttaaaagggaattctacacaccacatttctcttgtggtcttattaacactactgcaggccaaatacaatatccatgtatcatcaaagaatttacaagcatattcagttctctctatttatcaaccacatttctcattgaataatcattttttcattacacatatgaattagttgcaagttwaagttgattttgttagtcttttattccatctagtttcttgataattgttactttgactgcacttggcacatcttctctgaaaaattatgtacaactcacgatttttatatagctatgctgatgttattctctgtactttctgattacaattattataataattcaatttatcaaagttatgcttccatgtaatttaaagagacaaatattttataaggcttatcaaaaaaattaagcaggctataggcatcttcagtttttcatttcttattttctcttcctcagttaactgttttcaaatctactagcttagttctt

SEQ ID NO: 111831 - DNA, 594 bp, Homo sapiens
acaaacctgcacttgtacccttgaacctaaaagttaaaaaaaaataaaaagctttgctctgagttgagtgaagaatgtgggaatcattaatacaaacagaggaatcaagagggctgtaagggtctgggcagaagtgttaaggatgcgtttgcgatgcattttatttgtgagaccccaagaaggtccagcttgcaaatccaggcttggagctccagagaagagtcggtcacagggaagtccctcccatggaggcagggaactggaggggatgccgaggagcataggtgaagacaggagcaggaagaagtgtccaaggagggattgacatgggtgggtagcgagacagrgacagagggaggcagctcagagtcaggagaaggcctggctgggaggatggtaggggtcgtggcgaaaaccactgcatcaaatgaaaggaaaacaccctccagtgaacacatgaatttgaaaacacagtcggaatgggagagtcccagcaggtccatttcaaatactctggctcaaggctgaggaggatggcctatgggaagagggccatgggtttgcaccagggaatctgagctacagctaataagg

SEQ ID NO: 111832 - DNA, 461 bp, Homo sapiens
gcctgctcccacccatgctgggtgaagccttaggtctgcatgtctgggagcagtgcattctagccccacctaggccagtgggattggccatgtggccataatccaggtgatctgaatttcactatgttttaatctgtaatatggaatgatttctatttgccaagcttagtacatagggttagggtgaggagtgacaggatctaaacacactttgagaaaggaaagtgttatgyttctccaccctgccagagtcagaggggtgatcagggctgctccgccacaagctgaaggtttcactgtgctataaaggaaacttccatccaaaggaatcgttctgctagcaaaacacagacatgcacacagctgaaacaacttccacgcacagtgtatgatttcctattctgcgcacagagagaaaggacagatgtgttagcagaggattactgttggaataattatgt

SEQ ID NO: 111833 - DNA, 525 bp, Homo sapiens
ggcctgctcccacccatgctgggtgaagccttaggtctgcatgtctgggagcagtgcattctagccccacctaggccagtgggattggccatgtggccataatccaggtgatctgaatttcactatgttttaatctgtaatatggaatgatttctatttgccaagcttagtacatagggttagggtgaggagtgacaggatctaaacacactttgagaaaggaaagtgttatgcttctccaccctgccagagtcagaggggtgatcagggstgctccgccacaagctgaaggtttcactgtgctataaaggaaacttccatccaaaggaatcgttctgctagcaaaacacagacatgcacacagctgaaacaacttccacgcacagtgtatgatttcctattctgcgcacagagagaaaggacagatgtgttagcagaggattactgttggaataattatgttagctaagacacaaatgggctcccatgccagctccagttttgggttctcactgaattgaattc

SEQ ID NO: 111834 - DNA, 507 bp, Homo sapiens
cttcccctcccactccacaaacacagtttttcactttttatctatatatacagtgtctataaatcagatattttggtccccaaatacatgagtrtttaccaagaaaataagatgctttccagagaaagccagcatttttatggaggtgcacccacactcaaaaacacatgtgtgccagtgagctcttgcctgaagcaggcccaggctactggggcttctgcggaaccctgcctctgcccaggtcccccccacctcacagagtcaacctcaggcctgggccatgctcttctgccagctccagccatcgccccacccacaagcaggcctgcaagcagagtgtcagcatgacttggctctcgtgagatggcacgtggctggagagtgatgttagccttggggacacgttttagtaagaatcagcccatgacacgctaccccatgctaatttgagataagactgccaattatttcctcctttctttcaaaacttttcctttttgctactga

SEQ ID NO: 111835 - DNA, 507 bp, Homo sapiens
cttcccctcccactccacaaacacagtttttcactttttatctatatatacagtgtctataaatcagatattttggtccccaaatacatgagtatttaccaagaaaataagatgctttccagagaaagccagcatttttatggaggtgcacccacactcaaaaacacatgtgtgccagtgagctcttgcctgaagcaggcccaggctactggggcttctgcggaaccctgcctctgcccaggtcccccccacctcacagagtcaacctcaggcctgggccatgctcttctgccagctycagccatcgccccacccacaagcaggcctgcaagcagagtgtcagcatgacttggctctcgtgagatggcacgtggctggagagtgatgttagccttggggacacgttttagtaagaatcagcccatgacacgctaccccatgctaatttgagataagactgccaattatttcctcctttctttcaaaacttttcctttttgctactga

SEQ ID NO: 111836 - DNA, 507 bp, Homo sapiens
cttcccctcccactccacaaacacagtttttcactttttatctatatatacagtgtctataaatcagatattttggtccccaaatacatgagtatttaccaagaaaataagatgctttccagagaaagccagcatttttatggaggtgcacccacactcaaaaacacatgtgtgccagtgagctcttgcctgaagcaggcccaggctactggggcttctgcggaaccctgcctctgcccaggtcccccccacctcacagagtcaacctcaggcctgggccatgctcttctgccagctccagccatcgccccacccacaagcaggcctgcaagcagagtgtcagcatgacttggctctcgtgagatggcacgtggctggagagygatgttagccttggggacacgttttagtaagaatcagcccatgacacgctaccccatgctaatttgagataagactgccaattatttcctcctttctttcaaaacttttcctttttgctactga

SEQ ID NO: 111837 - DNA, 507 bp, Homo sapiens
cttcccctcccactccacaaacacagtttttcactttttatctatatatacagtgtctataaatcagatattttggtccccaaatacatgagtatttaccaagaaaataagatgctttccagagaaagccagcatttttatggaggtgcacccacactcaaaaacacatgtgtgccagtgagctcttgcctgaagcaggcccaggctactggggcttctgcggaaccctgcctctgcccaggtcccccccacctcacagagtcaacctcaggcctgggccatgctcttctgccagctccagccatcgccccacccacaagcaggcctgcaagcagagtgtcagcatgacttggctctcgtgagatggcacgtggctggagagtgatgttagccttggggacacgttttagtaagaatcagcccatgacacgctrccccatgctaatttgagataagactgccaattatttcctcctttctttcaaaacttttcctttttgctactga

SEQ ID NO: 111838 - DNA, 601 bp, Homo sapiens
atgatcttcacattgcattcttgctggtcctgaatatagtcagtattttttctttagcaatcttatagatgtgtagtgatatcttatcattacattagtttgcatttctctgacagctgatgaggtcgaatttatttccatgtgcttttttgccgtaactgtatctctttttgcaagtgttagttcaaccatctgaccaattattatatgcattgtttgttttctgattgttgagttttgagagttctttatatagtcttgataaatatcatttgttggatatataatttayaagtaattttactcaatacatagcttgtctttatccacttaacagtgtatttcacagagcaaaagttgtctttaaattttggtaaagtccagtttacccttttttttcttttatggatcatactttcgatgttgtgtttaagaattcttcatctattagacacctatctcttgccatatgtgcaaatcaaattaaaatggattaaaaaatttaaatcaaatacctcaaaccatgaaactactacaagaaaacattggggaaaatctccaggacattgatctaagcaaaaaaattattgggcaatacccc

SEQ ID NO: 111839 - DNA, 469 bp, Homo sapiens
acattgaaataaaagtatgcatgcatgagtcacataaatataaagtgagtttatatacacatcccacaaagctttacttgcttccctatatggaatagctccagatacatgtggcctttcaagaacacatgcgygcacacacacacacacacacaaaacacacacgcaacacaaacacagtgggtgtgcacatatatatgcatattatatatacacacatacgttttatatatatatatatacatatattctacagttcagagactctctcgttaaaaaattagcaaaactcatttacttggctcttacaggattcattaacctttgtcttctttcaagaaaccaggaactattctaaaactgacattgtcattaaaaaccaataggaaatcaccatttttaaattaaagtcattagctaagtttttcaagagttaaaaaaagattggaaaaaaattcaaatgagaaaa

SEQ ID NO: 111840 - DNA, 484 bp, Homo sapiens
tatgaccacttctaagtagttatcttcagagatggtattttttttaagccagtcaaatttaacagtgggggctaaatagcagagatggtactaatacaaatcaatcagggagaaaacttattttctactgtatatacttccatgtttgaatattttataataaaacaaaagaccaaaatcatcacatttgaagttttattctgtggktagcagggagacacacaatccaatctgtactctaactgagggggctgtgaaaagagctgtgtaaagaaaaaagcagtgtgaagacagaatagacggcaaggccagaggcaagaaataccagtgtatatgagagatgttaagggcctgaaacaaagaaataacggggggaacaggaaaaagaggtagattctaaaggtgtttgagatgctctatcacaataaaaacattttttgtttcttgaaattatgcctataacttacctgaaatcatccatact

SEQ ID NO: 111841 - DNA, 608 bp, Homo sapiens
caatgtaattctacatgggttrtcagatctaggacaaatataatttattggctgttctcttcttttgacaccagccactggaggtcattctctacttctagcctcagaagcttatgttctttttaaaaaaaaatccagaatctgaatcccattgctacagaaactgatttgtcaatgcattctgaaactgtgcaaaagggacaaaggaaatacaaaatacaactctcactctatgttcctgtatttcttttttattcccctcagaactgaatttgcaggatttaatggctggatgacagtcccatcctaaggcacttaaaaatgctcgtgacaatgctgttcattcattatgcgaatacaaaaactgtgcaaaaaaaagcctggaactcagctcacggataattgcttctttattttcctgaatgcttctttgctagaatagccaaatttaacatcctggtttctctttagctggttacaatctaactgttccctgaacagtgtctttctagctgtactcaggaaatgtagactttgccacttcaactccattggactagcactgccatgcaagaatattttaataatttcttttgattattttgatg

SEQ ID NO: 111842 - DNA, 586 bp, Homo sapiens
ttagttgcaaacataaccacttctgtccggtgaagattaacaatgtttctgatatggatagtcctgattaattgctgttgaaactcctgagctgagtgtcaaagctggaaaatgaactcttaaatgcactcaaaagacaagagccccctgtatccttgaacaaaatccaattaaagagattgcaaaggaaaacacaagagacagtattaaattcatggtgatatgaaagtttcttcttccgtttttgaaaaaccaccaggtcattgttcactaacagacctctttgatattgacctgcctgataagtaaaaaaaaacatctttctaaaacattactcttgacttctctygttaaacatacattagtcctacaaaattctggtttgcaaatcctgatgctcaaagtcatcctaaaagaactaaggggaaaggaaaactcagtcaagaaaatagaagtgcttaattgtttgtaatgtagatttttagataaggggagtattagttggtaatgtccattggtgaactggcatcctactgtgtccggaattggtgggttattggtctcactgacttcaagaatgaagccg

SEQ ID NO: 111843 - DNA, 546 bp, Homo sapiens
caattggtgcatttacaaacagtgagctagacacagggtgctgattggtgtgtccacaaaccttgagctggatacagaatgccagttggtgtatttacaatccctgagctagacataaaggttctccacatcctcaccagactcaggagcccagctggcttcacccagtggatcccgtactggggctgcaggtggagctgcctgccagtcccgcgctgtgcactcacaatcctcagctcttgggtggtcaatgggagggggcaacatggagcagggggcggcactcatcggggagacttgggccatkcaggagtccacggtggggggaggttcaggcatggcaggctgtaagtctcaagccctgccacaccgggaggcagctaaggccctgcgagaagttgagcacagcagctgctgggccaggtgctaagccactcactgcccggggcttgcaggctgggccggcggctccgagagaagggcctgctgaggccacacccacccagaactcgcgctggcctgcaagcaccgaatgcagccctggtt

SEQ ID NO: 111844 - DNA, 581 bp, Homo sapiens
cagacccatggactaaaacaaaacatttaaatcttcctatattcctgtgtggtaaactgataaattgagtagaagtgattggtttgaagaaaatatctggaggagtcatgcttatatagatcctatatcttaatattgctagcaataaaacattcttaccatttacatatttttttctgttcataaaaattacatcattgaaagcataaaaattatttwaaaaagataatcaaaataatctgtaagtaatttcactgcccagtggcaatccttgctagcatattaatgtatactctaatgtttttccaggcaatcaaacctttaattgaattatatctgtctatatgccttttttacttaatgtcttgagaagttccccttattcttacatgttttcaagaatctgttttttgttttttattgagacagggtattgctgtgttgcccaggctggtcttgaactcctgggctcaagcaatactcctgcctccacttctcaaagtgcttggattataggcatgagccactgcacacagccaagaatttgattttaaaatgtgaaatactggccgggcacagtg

SEQ ID NO: 111845 - DNA, 548 bp, Homo sapiens
ttcatcactgtctgtctatgtatctatcatctatctgtctattcctattcatctgtttctctctccatctatacatatctatctatcmaccaatctatctatctatcatctgtctatctaatctggctatctatctattcctatccatctgtttctctctctccatctatacatacctatctatctacctatctatcatctatatctatcatctacctatctatttatctatctatctcatttactcttcacagcatggctttgtgtcttttatcttttattgcttccaacaacactctggggtataaactagtatcatcctcattttcagaagcagaaactgagatgcagagagatgaagcaacttgtccatttttttctttgagtttatcctattggaactttgggacaggatctcttatattctccagagcatctagcaccatgcttgcttattaaacaaatgaacacacatgttaagtaaataagagaatgtctcaggatgctactgtcagattttcttccaggcctattgcctggttgggctc

SEQ ID NO: 111846 - DNA, 578 bp, Homo sapiens
gaaggttttattcagtgattaaaatcagatgacttgcattgcaaattaagagaaaaaggctgactaatagtaccacatgttcaggagtgactcgtgggtatgtcctgaataattatcacaccaggcaaatgtgttggagtaaaccactttcccacaagggcctccctatgccacattaataggtcacttactagacttagcacaataaaatgatagtctatgcaatttagtcatttccaaaagggaagagcatttctctggcacctgagtggatcagatcaaggtgactttagagaaaactgaaggagaaggggcgatggcacaagctatggtttggatcactctgaatcgactcaaaaaaaaaaaaaggtacctaattatctcataaatcttttggtacactgtttccagtgaagactctgactgtgttgagcaaataagttgaaccagcaaaataaacagcaagttttggatgaaatccttaaatatagagcttctgattcaggacaggtagtcacawttgctaggggtctatatagactaaatgaagtgttccagaattacataggggagattgg

SEQ ID NO: 111847 - DNA, 590 bp, Homo sapiens
attatcttaatttttatcaaatatggtttaggaacaatgtccaattcaaatatttatgcgcctaagagtagctttactatctttcaaatgtttcctctttgagaatgggttttgcagggaggatgtgacaatgagaaaggctgtgaggaagactcctggacaaaggccaataagaaggattttgaggaaagaaaggcgacrggagcgaggggaggtggactagtggaggaagggagagaaagaatttggaaaagcttcccttaactctcaaagtcgccggtgctctgagaatctcagtaggtccctatcaatgggaagcaagaggatattcaagcttcccaaatgcgatctcttttttttttcaattacactttcattctaaacatcaagaatgttaaatatctcaaaaatatgccatatacatgggctcgcttcagcggcatatgcactgaatgtgcaatataccaagtacactcccttcaatccgctctcccaacctcctccttccccgaccttcgtcagacccttttcaatgtatttgcacgtgcacacatagagtctggccctgtggatctttccccacaaatgag

SEQ ID NO: 111848 - DNA, 595 bp, Homo sapiens
gtctctctaaacaaattctaagattataatttcaaaataagtgtctgaaaatttagatagctggaggaacaatagtttttgttttctactttctgagtaagtttatgtataaaattacttatatattagtagtagcttgcctttaagtttgccagtgtttttyttttgtgtgtgtgtgtgtgtgtgtgtgtgtgtgtgtgtgtgtgtgtgtgtgtgtaatgtttatacttcattaagaattcacagggaaaaataaacatttcctactagcaatgagaattctacagaagtagtaagatatctgcaaatgttaaatgtctccacactttctgagggtttgcaatttttttaaaaaagcatatttttcaaaaccttaaaacagttttatctaggtcaccccttctcctggctggatgttaacagctagccctgcaggaggtataatattgagtagatgggcttggcagagggagctcttcttgctaaaacctgcaacgtaacacaaaaactaatggactgcacagagagaagaataaaacaaagttcaacgtcaataaaccagataagaaaatgcaaggggttcatgaaagaatgg

SEQ ID NO: 111849 - DNA, 557 bp, Homo sapiens
atttcacagcttttcttctgctgctcgtgaagcctggggatagtatttggatgaatgtagagaaaaatggaatattttggaatagctcaaagtctttttagagactactggaagcagggaggagaatgaggatattacatacttcatgattttcccagtgttgaccttgcttcatatataaaatgaaagacagcaatgagacaatggccataatttaatgactaaagtaaatggtttactgaaggtcagatggattatttttagccttcataataagcaaatcaaatcactgcctgattcatatggtcaaatgatgcacagttgaatataaaaataactaaacatgacagataatttgaactgtgcctagttagcaactacatgatttgtgttaacttcgtaaaagcaacttgctaaagacctacaatagctaatgtctacacagatgttaaagaagtaaaaggctcaacccccagccagaacattctgaaaatgcagcctattcaatgctgaataagaatgtgargagccctatgactaatacaattccggtcaca

SEQ ID NO: 111850 - DNA, 592 bp, Homo sapiens
tttactggatagcggttccttgtggcagggcctctttttaagaaagggggcccaatgaaaacaggtctgtctttgttagtggtaaaggtggttgygtaaagctagtttatctctacctgaagcagacacacacacactaatacctcctacttagctattgcctcagttgatccagtgtttgaaaattccaattttccaagttgctatgagtctagctgctacagagaaggttgttctacaggatttgtcaattgtgtattatttaggagaagattgttctacagtacttgtcaatcagtgttgacattacactttatatcagatcagatccaaagattgcaaatatctgtagatagaaaaaatacatgaaatttctttaagatgtcatctctttcttttttgcagataaacaatattaaaacactattagcacctccctacttctagatgttgttattcctattgtgtgatttactagctgtggctagatacctacatccaaaccaattaaataaacaaaaattgcatattagctatatgctcacctctgtaattgatgctgagtttatttcattgattaagggcaattgtt

SEQ ID NO: 111851 - DNA, 592 bp, Homo sapiens
tttactggatagcggttccttgtggcagggcctctttttaagaaagggggcccaatgaaaacaggtctgtctttgttagtggtaaaggtggttgcgtaaagctagtttatctctacctgaagcagacacacacacactaatacctcctacttagctattgcctcagttgatccagtgtttgaaaattccaattttccaagttgctatgagtctagctgctacagagaaggttgttctacaggatttgtcaattgtgtattatttaggagaagattgttctacagtacttgtcaatcagtgttgacattacactttatatcagatcagatccaaagattgcaaatatctgtagatagaaaaaatacatgaaatttctttaagatgtcatctctttcttttttgcagataaacaatattaaaacactattarcacctccctacttctagatgttgttattcctattgtgtgatttactagctgtggctagatacctacatccaaaccaattaaataaacaaaaattgcatattagctatatgctcacctctgtaattgatgctgagtttatttcattgattaagggcaattgtt

SEQ ID NO: 111852 - DNA, 592 bp, Homo sapiens
tttactggatagcggttccttgtggcagggcctctttttaagaaagggggcccaatgaaaacaggtctgtctttgttagtggtaaaggtggttgcgtaaagctagtttatctctacctgaagcagacacacacacactaatacctcctacttagctattgcctcagttgatccagtgtttgaaaattccaattttccaagttgctatgagtctagctgctacagagaaggttgttctacaggatttgtcaattgtgtattatttaggagaagattgttctacagtacttgtcaatcagtgttgacattacactttatatcagatcagatccaaagattgcaaatatctgtagatagaaaaaatacatgaaatttctttaagatgtcatctctttcttttttgcagataaacaatattaaaacactattagcacctccctacttctagatgttgttattcctattgtgtgatttactasctgtggctagatacctacatccaaaccaattaaataaacaaaaattgcatattagctatatgctcacctctgtaattgatgctgagtttatttcattgattaagggcaattgtt

SEQ ID NO: 111853 - DNA, 564 bp, Homo sapiens
taaaatttatatataatgaaatgaacaattacaaatagatatgttcatgtaactcacaaacctatccatgttttgaacattttcaatactccagaaagttttcttatgttccttcacagtttggcccccccaacctcttctactctctcaaggcaattatcaaatgactttttttccactataaattagtttagattggattagacttcacataaattataaattttaattagtttagattcgattaaaacgtcacataaatgcaatcacatagatatgtgcaaagaatttcattaagatgcttgcatagaggcacccagaastggtgttgcccacaaaaaaaggaccaaagcaaaaaatagataaccaggcttcacataggacatctaaaggagaacactggaattcaggaaggaactgagaaagaccctccgaggcatagaaacttgagatagcagcatagagagggaagtgaagcagctagacagaagcaactctgaggcaagagagactcctcatagccagaagaggtaagtgggagatccctagcagtccacattccac

SEQ ID NO: 111854 - DNA, 465 bp, Homo sapiens
tgattctctgttactgttgttgttttaacttcctaaacatctaggtgaaagcttgtgtctagaaagggacctgccctaaacttctctttgaacgcccattctaagatgttaatgttaaatcaagcaaaacttaaagatactaaatattcctaacacagctaagaactagtagtatctctgtataggatctaacaagccacagtcagaaaatggtagcctttgagacgatgtgaatcaaactaccagaatggcttttggctagtccctgaaatctatttccatatgtcttgtggtttcagcaatcagtggtcagggagaggagaaaaggcagcctctttytaaaggttccagaaatcaaaggccagtgaccagatatgaaccgccaaaccaccgcagcaacaaccagtgcttcaagccaaagcacaacaatctttttaaattcaggcaaaaaaaaaaaaaaaaaaa

SEQ ID NO: 111855 - DNA, 564 bp, Homo sapiens
taaaatttatatataatgaaatgaacaattacaaatagatatgttcatgtaactcacaaacctatccatgttttgaacattttcaatactccagaaagttttcttatgttccttcacagtttggcycccccaacctcttctactctctcaaggcaattatcaaatgactttttttccactataaattagtttagattggattagacttcacataaattataaattttaattagtttagattcgattaaaacgtcacataaatgcaatcacatagatatgtgcaaagaatttcattaagatgcttgcatagaggcacccagaactggtgttgcccacaaaaaaaggaccaaagcaaaaaatagataaccaggcttcacataggacatctaaaggagaacactggaattcaggaaggaactgagaaagaccctccgaggcatagaaacttgagatagcagcatagagagggaagtgaagcagctagacagaagcaactctgaggcaagagagactcctcatagccagaagaggtaagtgggagatccctagcagtccacattccac

SEQ ID NO: 111856 - DNA, 539 bp, Homo sapiens
ctttacttttccttcattgtacttacaagttataattacatatttgtttgattatttgtttaatgcctgcctttgccaatagaatgtaagctctgtgattaaagaaagagttggagtcagaagaaagattttattataatcagtatttcacacttttgacaggtaaattagacccaaaataactcccagggagcaatacacagcctggaaaacatgaaacaaggagcggctgtttggtgtaataaaggaggagcaccaggctgaattttcagaggcctaatagagtaggttatggttgatggaggtggtggtggtgggtcgatttctgcatggcaaaagagtgtaccctgactatttcactgtgtcatttgaggcatatcttttgaccattctgggcctgtttccttgtcattaaaaggaaacctaaggttctatgactataacattgtcaccttcaaacaggagaatggagtaaggctgggcttcagcattytttagtgtccagaagatggattatagttgtgagccttaccaagaat

SEQ ID NO: 111857 - DNA, 611 bp, Homo sapiens
acagagttgaaaagtgtggatcacactgggaactgccagtggctcaattatagccaggcagtggaatctggtgatggagtgggatgaaataagcctaggaggcacaaacaaaatcatgtggggaattcacattctaaactactggaacttacacagacagcccaagaaaagatttgtattttttgatgatctctttggcagtgatagtatgaaggaatgaaatggacaggaggacaactggaggaagggagaatgattgggatgttactgcaacaaagcagtctggaaatgaagttggcctgagataaagcagtggcactcaaagagacggaagaccagacttgagcaaccttaaggagatagaataaatcatgcttggtgacaaatgtggtatgtatgtagtagtggtcgtgagtaaggcaaaggaggaagyttccaacatgggggagcaagttgggttggtgtttgggaggtgagataagaggacagagatgtaccttgttgggggtggatgacaacacccaaggagagaatgctctcaccctggcctcaccccttaaaggtctgtgtgagagcccaaactaagaacggccaagaaaagtgcaaatatt

SEQ ID NO: 111858 - DNA, 207 bp, Homo sapiens
gaattctatatgtcacacaaagagagaattgagctgttttgagcattataattggtcatagaaaattattttggaaatcctaaatccctaaggaatctgggatgtgatgaaaagctacactaaaagaacastaatgtggttggcacacacttaaggagtagtgagaagactaagcttgattgaattatgaggtctgtaaatcatgta

SEQ ID NO: 111859 - DNA, 616 bp, Homo sapiens
agcttaatggtattcttcccattcagagtagagatggaattaaagttagaaaaatctcttcttgcattgggcagggtaaaatgtgtgaaaacagtatttccytcaatgcttataaagttgcagctctcaaaagatgatatatctgccattgaattgccagaatgaacggctgaagctatgcattattatattagaaaagatccaaatgcagagaaacttatttcacgatatcaccctcagctagctctaactagtcaatcattatttactttattaaataatcatggaccaatgtacaaggaaccttgggaactttcggtattgattcaagtaatacctgttgcaggttcaaaaccagttaaagtaatatatattaattcgccacttccccgaaataaaataactatgagagaaagaaaacaaatctttcatgaagttccattaaaatttatgatgccccaaaacacatttgttccagtatctgcagtctttatggacaaacctgaagagtttatatctgaaatggacatgtcccatgaattcaatgagtgccgaaaaattgagactcttgaaaacttgtatctggattttgatgatgaggtcacagaacttgaaa

SEQ ID NO: 111860 - DNA, 498 bp, Homo sapiens
ttacttcgcctagagcctgaatgggaaagggagaggcaagcaactgaccaactagcaaacaaataaaatgaacctactgtgaacagaaaaactatttctgcccatagtagtggcttattgcagatacttatcttcagtttaaagttatctttgagtctctatgtttgtagctggaaagatgcagatgttttaaatcaagaaagttggacaagtttgttcctaatattccttccaagtttaattcaatggatatatgagtttggggattaataaaaaaaaacagcaaggagtaagaatctttgggaatataggaaaaagtgctgtattcaactgggaaatatctacatatttaaagacaacttctcagagaagatgattataagcccacrttatgttttatttcaaacgtgctgttggatgaaaagttgctgaataagctgaattcaagattctcccctaggtagaaacatttgggtgaggggtggtggggagaggtca

SEQ ID NO: 111861 - DNA, 631 bp, Homo sapiens
gcttccccgggtccttgactactgcatgaaaaaagttaatcaataaaggaagcctatcacagaggatcataagttctacaactgatgatcccaggactgtaattggccttcttgtttgtattattactcatcaaagctggataattactaacaccagcagaagacagcccctcactgccctttgtgtaaaggaaacttcagctggcatatcccttaatgatagtctttgaaatcttatcgatgagcgtattcaattctacttttcaattgtgtggataatatagtattttagcattttggaagtgcaaaattcatgaaatcatgtctgtccagtatccagataaagtcactctgtgccasctggtgaatgtccatttaagaacaagcaacaagttcaggttctgttcacctccacttctggaactagggcctcttgataatctttggcgatacttttaagtgtggggctttgttgaaggcaaacctgaagggagactgtgagtagcttccttgggatatctgctctgattttatgatcctagttcagttgaacacaaatacattaagtatcaagaaactgcacttgctccaagaaggtgatggcggtggtaatagtttggataacccctca

SEQ ID NO: 111862 - DNA, 587 bp, Homo sapiens
tgtctcgccttgccttcagttcagacaggctcaggtagctgccttcttcaatcaactgcgcgtgaacatgctcacagttactgcacttcagccagtgcccctcctgtgctagcctacctgagattcatacatttgcatgtctgttttctgggacattgataactgactgagctgagccttccacctcaaacatctttaaaaattgtgacatggtttcataaggtataaaccccaatggacactgttctatggtatcttagttggttcagaccattataacaaaataccckaggcccggtggcttataaataacacaaatttgtttctcacagttctggaggctgcgaaatgcaagatcaaagctctggcagattcagtgtctggtgagggttcatagatggcacgttcttggtgtttcctcacctggtagaagggaaaaggcagctttctgaggtctcttctataagaacactaatcccaatcgtgagtgttccaccctcatgacctaatcacctcctacaggtgccacctctagcaccatcacattggtgatttggttttaacatatgaaatttggggtaacacag

SEQ ID NO: 111863 - DNA, 587 bp, Homo sapiens
tgtctcgccttgccttcagttcagacaggctcaggtagctgccttcttcaatcaactgcgcgtgaacatgctcacagttactgcacttcagccagtgcccctcctgtgctagcctacctgagattcatacatttgcatgtctgttttctgggacattgataactgactgagctgagccttccacctcaaacatctttaaaaattgtgacatggtttcataaggtataaaccccaatggacactgttctatggtatcttagttggttcagaccattataacaaaatacccgaggcccggtggcttataaataacacaaatttgtttctcacagttctggaggctgcgaaatgcaagatcaaagctctggcagattcagtgtctggtgagggttcatagatggcacgttcttggtgtttcctcacctggtagaagggaaaaggcagctttctgaggtctcttctataagracactaatcccaatcgtgagtgttccaccctcatgacctaatcacctcctacaggtgccacctctagcaccatcacattggtgatttggttttaacatatgaaatttggggtaacacag

SEQ ID NO: 111864 - DNA, 713 bp, Homo sapiens
tttacagccaaacaggactgcttgcattgcctgctccactgcaagcttaattccttgacatttatattactaatcaatacttggctgagtttatttccagtaaccctagtgtcctaacatagtcagtgctagcgtagaacatcacctgaatacttggcaaagtctatttaaaaaaaaaaaaattgcctttgatcagatttccatccacacatttaaacacatttagttgctttccttttctgaaacttgaccttcagatgcctccaaaagaaaaatgctgctgaagccagttggaaaacaaattaaagcaaagaatgtctagataaagggggaaagtaacaggagctctttatactaagaacaattgctgctaatcactatgtgccaagtactgtgctaagcgcgtttcctgcatttgcttattcaatccttgcaataaacttataaggtagatataataawtccttttcacagatgatgaaactgatgattaagtaacttgtctaagttcccacagccagtaagtggtctgttccaacagtctttgctcctaaactagactagccttcatctcatttaaaccatctttttcaagacaatataatctcccttgatcttctaaaatcatccttcggaggtcagccttagcacatgacaccttgaagccactgcttggccaagctgggcctagggagctgtttgctattgcccct

SEQ ID NO: 111865 - DNA, 596 bp, Homo sapiens
aaaattgttgtctccagtgaggagaactgggagactgggagataggggtagaaagaagatttaattttcatagtatacgctttttgccatttgaattgtttactactatatacatgaaataaatgatttaagaataaataaaaacatcaaagattatccgacttggcttcttgctcctcttttgaggacttctcrgctgctaggagtttaatcatgggctctatggccaatctctgggaatgctaatgagggtcctgctgctttaggtggaaggtttcacttgatcttctccaccaaaccctagtatccaaacagtggattctgaagttctgacaattctaatttcgtcaattcttctgagaagtaaccatcctttcctgtttttcctcatgctacttaggttacatcttcagcagtgactgatattttcttcatatacctgcctctattcatccctgcacatcacctacaatactgccaatattcgctttctaaaataaaaaagcacatcactcctctgcttataagcatccactgctaccctttgcttatagagtccttaggctggatcacaatgcctctcagaacttgactcc

SEQ ID NO: 111866 - DNA, 570 bp, Homo sapiens
gatgatattccaattgaattttccttaatgctttgacttcaagaaataactcccagttatactataccagtaaattcttatagtcataattcatttatttataaaacagtgctaccatttaaacctaaaaaggttttgtaattatctttaaaactaaattgttgagagtttatctcctaattatattgtatttagaaatgaaattcattctgcataaataaatggaaatttatagagaatgttatgttcaactaaagaaaaaatgctgacatgttcatagtcaatgaagatcaattcgtgaataagataaattgcttagttttattatttaaagtaataataaaccgtttttattagtggcaatcatcgcctgaactgttgatcttgctatacttcaaattttccattaatacactatattttatttttaatattttgagaaacctccatatgcttgccagcatccgtaatttcttgtcttttctgataatagcctrcctaacatgtgttaagtgatatctcactgggtttttccttcaatttccctgatgattagtgatgttgagcact

SEQ ID NO: 111867 - DNA, 618 bp, Homo sapiens
tatgtttaatacattagtcggatgattatagtttacaaaactctactgcacatttcaatatagtgtaaagaacaatttgaatatttctagcataaaaaagacaaagaattaaggtgaagaaaatcacaactacacagacttgatctttataaattatatgaatatatttaattatcatatgtaccttgaaactakgtacatctgctatgcatcaataaaaggactgttttataaaaaataacattgggaaatattaaatatgtaatatacatgtagttggaatatgagaaaaatgaataagacaataatatttgaagagcataacacattaaaaataataatagctaataactttctaagattgattgtcatcaattcacagatctaggtagctcagataacttcaagcagaataatttccaagacaaatgatacacacacacacacactcctaagcatatcattttgaaattgcagagaaccatagataaagcaaaaattttgagataagccagggccagcgttgaggggtgtggatggagaaacttatgtataaaacaaaggtaagaatggcaaaggacgtcttgtaataaatcaggtcagcaagaagagagtgca

SEQ ID NO: 111868 - DNA, 618 bp, Homo sapiens
tatgtttaatacattagtcggatgattatagtttacaaaactctactgcacatttcaatatagtgtaaagaacaatttgaatatttctagcataaaaaagacaaagaattaaggtgaagaaaatcacaactacacagacttgatctttataaattatatgaatatatttaattatcatatgtaccttgaaactaggtacatctgctatgcatcaataaaaggactgttttataaaaaataacattgggaaatattaaatatgtaatatacatgtagttggaatatgagaaaaatgaataagacaataatatttgaagagcataacacattaaaaataataatagctaataactttctaagattgattgtcatcaattcacagatctaggtagctcagataacttcaagcagaataatttccaagacaaatgatacacacacacacacactcctaagcatatcattttgaaattgcagagaaccatagataaagcaaaaattttgagataagccagggccagsgttgaggggtgtggatggagaaacttatgtataaaacaaaggtaagaatggcaaaggacgtcttgtaataaatcaggtcagcaagaagagagtgca

SEQ ID NO: 111869 - DNA, 570 bp, Homo sapiens
attaaataaagaaaataaaacgtctttgtatttcagtctaaggaggacagatgcacattaaactcagtttggagcgcttaactccaggcgaaatgcccttttatcaaatcccacgcgtcgacttgggttgcgctgggaatttcacgaattcctcgctgcagcgtggcgtggtttacccccacccccaccgccaccccactttgggtgaaatggatttttggaaaccatttaagcagagctaaaaataagggtggggggatccctacactagagatagctgcagccacctaggggctcacccctkgtcgggagcgagcagctatttgctagttgtagctcaggggtgcccaactcttcccgtgtggttgcgccagctgccccgcactgcaggtatctgaatcattacgtgggcaacctgatgcggctctgaaccccagctctttgaatgctggaatcctgaaggaggaggattccaccaggtcttagccgaccagatagcccagctttctgaggctggtgacctcattaactggccagggaatttgcaagaccaggaataatcacgtttcc

SEQ ID NO: 111870 - DNA, 661 bp, Homo sapiens
tcattgtaaggatgtaccacagtgtgtttatccatccaccccttgaacgacattttgggttgtttctagttttgacagttatgaagactattgctacaaacatttgcatacagggttttgtgtaaaaacagatttttatttcactggagtaaacacccaaaggtgggattactgggtcctatggaaagtgtatgtctaatcttataggaagctaccaaacattttttcagagtggctgtactgatttttattcccaccagcaatatataagagtcttgttgttagacatgtttgccaacacttggtattgacagtatttttttwaaaaatgttatcattttaataggtatatagtggtatctcactatgacttcaagttgcatttccctaacagctaattatgttgcacatttttatgtccttatttgccattcttacatctttttggtgagtgtctcttcaagtcttttgctcattttaaaaattgagttgttagtatacttactgttgaggcctgcgtgttctttacacattaaatattcaagttcttttaaaaaaaaaatacaggggccttttgtattccctaaactggaatgcagtggcatgatcatagtttactgtagccttgaactcctgggatcgagggatcctcccacctcag

SEQ ID NO: 111871 - DNA, 661 bp, Homo sapiens
tcattgtaaggatgtaccacagtgtgtttatccatccaccccttgaacgacattttgggttgtttctagttttgacagttatgaagactattgctacaaacatttgcatacagggttttgtgtaaaaacagatttttatttcactggagtaaacacccaaaggtgggattactgggtcctatggaaagtgtatgtctaatcttataggaagctaccaaacattttttcagagtggctgtactgatttttattcccaccagcaatatataagagtcttgttgttagacatgtttgccaacacttggtattgacagtatttttttaaaaaatgttatcattttaataggtayatagtggtatctcactatgacttcaagttgcatttccctaacagctaattatgttgcacatttttatgtccttatttgccattcttacatctttttggtgagtgtctcttcaagtcttttgctcattttaaaaattgagttgttagtatacttactgttgaggcctgcgtgttctttacacattaaatattcaagttcttttaaaaaaaaaatacaggggccttttgtattccctaaactggaatgcagtggcatgatcatagtttactgtagccttgaactcctgggatcgagggatcctcccacctcag

SEQ ID NO: 111872 - DNA, 581 bp, Homo sapiens
taaatgtcaactaggccaagttggttaatattgttcttaaaatctacttactctatcaattactgaggaagaagtattggaatctccagccataaytgtgaatttatctatttctctttttagttccttaagtttctcctttgtgtttggaaacgttgttgttgtgtcaagatattgttagtattgctattcttctttttaaattacccatttatcatcaaaaaatgaccttcttaatacaagtaatagccttttctctaaatctctgtgtctaatattaatagagccatgctagatttcttatgcttacagtaagcatagtataaaggaagagtgtttttcttgaagtagcatatagttacattttgctctgttaccaagtctcactatctatgccttttaattggattaaagtttgggaaagcttaaatggctggaacttaaaagacaggtcattaaagaggaacttcacagggaagtaacccaagcaatctacgtagatgttccctggagtttttggcagaattctaagacaggcatgcacatggtatcactttacaagaccttggaggggggaaaga

SEQ ID NO: 111873 - DNA, 581 bp, Homo sapiens
taaatgtcaactaggccaagttggttaatattgttcttaaaatctacttactctatcaattactgaggaagaagtattggaatctccagccataactgtgaatttatctatttctctttttagttccttaagtttctcctttgtgtttggaaacgttgttgttgtgtcaagatattgttagtattgctattcttctttttaaattacccatttatcatcaaaaaatgaccttcttaatacaagtaatagccttttctctaaatctctgtgtctaatattaatagagccatgctagatttcttatgcttacagtaagcatagtataaaggaagagtgtttttcttgwagtagcatatagttacattttgctctgttaccaagtctcactatctatgccttttaattggattaaagtttgggaaagcttaaatggctggaacttaaaagacaggtcattaaagaggaacttcacagggaagtaacccaagcaatctacgtagatgttccctggagtttttggcagaattctaagacaggcatgcacatggtatcactttacaagaccttggaggggggaaaga

SEQ ID NO: 111874 - DNA, 587 bp, Homo sapiens
aataaaagtaaactacaaaccaaaattctcatggacatagatgcaaaaatcctcagcaaattattaaaaaattgaatccaataatgtgtgaaaataagtatggaccacagctgactgggatttatccctggtatgcaaaaacagttcaatatttgaaaatcaattactgtaatctaccacatcagcaagctaaagaataaaactcacaagaccatatcaatagatgcatacaaagcatttgatcaaatctaacaycacttatgataaaaactatcagtaaaccagaaatagagggaaacctcataaagaatattcacgaaaactgacagctaatgtcatagttaatggagagaaactcaaagctttcccactaagattaggaacaaagcaagaatgttgcctctcaccattattttcaacatcatactggaagtcctacctgatgcaataagacaagaaaaggaaataaaatatataaatgatgggaaggaggaaatgaaattgtctttttcacagtgacatgattgcctatctagaaaataaaaagaagaaaagtactcctgatactaataaataattataccaag

SEQ ID NO: 111875 - DNA, 587 bp, Homo sapiens
aataaaagtaaactacaaaccaaaattctcatggacatagatgcaaaaatcctcagcaaattattaaaaaattgaatccaataatgtgtgaaaataagtatggaccacagctgactgggatttatccctggtatgcaaaaacagttcaatatttgaaaatcaattactgtaatctaccacatcagcaagctaaagaataaaactcacaagaccatatcaatagatgcatacaaagcatttgatcaaatctaacatcacttatgataaaaactatcagtaaaccagaaatagagggaaacctcataaagaatattcacgaaaactgacagctaatgtcatagttaatggagagaaactcaaagctttcccactaagattaggaacaaagcaagaatgttgcctctcaccattattttcaacatcatactggaagtcctacctgatgcaataagacaagaaaaggaaataaaatatatamatgatgggaaggaggaaatgaaattgtctttttcacagtgacatgattgcctatctagaaaataaaaagaagaaaagtactcctgatactaataaataattataccaag

SEQ ID NO: 111876 - DNA, 608 bp, Homo sapiens
aaaaataacaatttagaaatcactaatgacaacaccaaagcatataaaattgtartttcccaggaaatacatgtagatgtctagatatcgctgtatgtatatgtatatttacatacataatacatatatgtgtatatcaatatatgtatatttctttttttaaatgtgatattccaagctatttgctgttttgtaattttttcaattcatataaccattttctatttaaaaagagttctactcctctgcattttaaatgccaagtaatactccactgtttgtgcagaccataattttttattacccaatcattattgggtagttagatcacttccaattttttatatttgatacaacactgacctgcctgtggttttgctcaacattcatgaacacacatgaaattttccaagggtaaactcttttttaagcccttaatatatgttgccaaattaccttctgaaaccttctacaatagactctcacctgaagtgggagggatatttttaaagtcagtacatataatacaaaatgctggtcatcaaaattgccctggcacatcttttaagaaaatagtgttggagattgacattcagtaattcatttgt

SEQ ID NO: 111877 - DNA, 637 bp, Homo sapiens
tgtagaacaatttactaaaataattcacaaaaaaataacaatttagaaatcactaatgacaacaccaaagcatataaaattgtaatttcccaggaaatacatgtagatgtctagatatcrctgtatgtatatgtatatttacatacataatacatatatgtgtatatcaatatatgtatatttctttttttaaatgtgatattccaagctatttgctgttttgtaattttttcaattcatataaccattttctatttaaaaagagttctactcctctgcattttaaatgccaagtaatactccactgtttgtgcagaccataattttttattacccaatcattattgggtagttagatcacttccaattttttatatttgatacaacactgacctgcctgtggttttgctcaacattcatgaacacacatgaaattttccaagggtaaactcttttttaagcccttaatatatgttgccaaattaccttctgaaaccttctacaatagactctcacctgaagtgggagggatatttttaaagtcagtacatataatacaaaatgctggtcatcaaaattgccctggcacatcttttaagaaaatagtgttggagattgacattcagtaattcatttg

SEQ ID NO: 111878 - DNA, 637 bp, Homo sapiens
tgtagaacaatttactaaaataattcacaaaaaaataacaatttagaaatcactaatgacaacaccaaagcatataaaattgtaatttcccaggaaatacatgtagatgtctagatatcgctgtatgtatatgtatatttacatacataatacatatatgtgtatatcaatatatgtatatttctttttttaaatgtgatattccaagctatttgctgttttgtaattttttcaattcatataaccattttctatttaaaaagarttctactcctctgcattttaaatgccaagtaatactccactgtttgtgcagaccataattttttattacccaatcattattgggtagttagatcacttccaattttttatatttgatacaacactgacctgcctgtggttttgctcaacattcatgaacacacatgaaattttccaagggtaaactcttttttaagcccttaatatatgttgccaaattaccttctgaaaccttctacaatagactctcacctgaagtgggagggatatttttaaagtcagtacatataatacaaaatgctggtcatcaaaattgccctggcacatcttttaagaaaatagtgttggagattgacattcagtaattcatttg

SEQ ID NO: 111879 - DNA, 608 bp, Homo sapiens
aaaaataacaatttagaaatcactaatgacaacaccaaagcatataaaattgtaatttcccaggaaatacatgtagatgtctagatatcgctgtatgtatatgtatatttacatacataatacatatatgtgtatatcaatatatgtatatttctttttttaaatgtgatattccaagctatttgctgttttgtaattttttcaattcatataaccattttctatttaaaaagagttctactcctctgcattttaaatgccaartaatactccactgtttgtgcagaccataattttttattacccaatcattattgggtagttagatcacttccaattttttatatttgatacaacactgacctgcctgtggttttgctcaacattcatgaacacacatgaaattttccaagggtaaactcttttttaagcccttaatatatgttgccaaattaccttctgaaaccttctacaatagactctcacctgaagtgggagggatatttttaaagtcagtacatataatacaaaatgctggtcatcaaaattgccctggcacatcttttaagaaaatagtgttggagattgacattcagtaattcatttgt

SEQ ID NO: 111880 - DNA, 621 bp, Homo sapiens
ctaagtagaaagaaatctatttttcagcatttaattcatacaaaatcttccattttcaataagcattaatttaacacagacaaaatggctatagggtgacagaatctcatctctatatgtagaagatttttaaacaaaaagccacgtttatattttattgaattccaggggcctgaaggcaggtaagttgttgggataacccctgcaatctgccccaactttctagtgttatagaagaaacaatattgaggaaagtcctaggtttccttttctaatttttttagtcttgcaacattaactaacaagaattttcttccaaaattgcagaaatttttctttaagactaggcgggaagagtggaaataaaagtcaaatctaaaacctgcaaacataaacctggagcaggcgagagaccattattgctggtgtctgttctcagctatagaatcattaacatgaaataccttttaatgaatgcattgaaaaaagtgattatatattaaagtacaaaagtctattcctgcaccatttaaattactttacaatgctgattaaaataacagaacattatagcttgcttagctaamcattatatttccaaatccatttccaattgtttcc

SEQ ID NO: 111881 - DNA, 598 bp, Homo sapiens
tctctaaccatcccatgatttccctctgctcccagtttctagagagcaggggtgctctttagttctcttcctgggaattctcttatgtctccaattattttgggagcctcccagaggtacctatctgtgatcaaattatcattgggctaacggcaggtgatcttcctgccaccacttatccctagatgcccacatatggccccactggagagcctatatataaatccagctgcagtttccccccatcttgtcctaaaattcaaagacatcacgatttccctctttacttcccctgaaacatcaagaaccacatcacttctcaaggctcacctggcctggctcaccaacacacaaaagctctgtgtgatatgagtggaaaaccctgaatgggctaaggctaatgtaaacccttgtgggtacctagttcagctttggtttatctcaccttccccaactggttaattatggggaaaggaagagagtaatgacaccacttcccagcctctgtggtctggtccattcatggagaggacacagcactttgggggtcacaggattctgagttcgartcctggctctaccactgcctgactgtatg

SEQ ID NO: 111882 - DNA, 578 bp, Homo sapiens
ccctagagtccacgtcttccagcttttggacagctccagcctttacaaaatccttgagtaacttgaattaaaatttcttcctagaacktgtgcccctcggtcctggttctgcatttagggttctctctgcagaactcaaccccctccagtgagacagccgtgtccagggatgtgttcagctcccagtgcccccacccagctcctctgctccagactgcaaatgccattaatatttagcattagaaggatctggtgaagcccataaatctgcatatgttaaaaaaaaaaaaaaaaaaaaacaccacagggaattcctaagtggagagggtgggagtaggggatgggggaggtggcccttaattctgccttgagaaaccccgcctgaggcctcagcacctccttgtccagccacccacaagtgagggtcaactcaagtgcctgagtgtcctctctgcaccctgagagaccgctattcccagccatgccctgaccccagcctccagcttagcagccaaggccccccacccaggaccatcacatgccggttagaaagtcccaggctctgagtgcagtcagat

SEQ ID NO: 111883 - DNA, 575 bp, Homo sapiens
aatgccattaatatttagcattagaaggatctggtgaagcccataaatctgcatatgttaaaaaaaaaaaaaaaaaaaaacaccacagggaattcctaagtggagagggtgggagtaggggatgggggaggtggcccttaattctgccttgagaaaccccgcctgaggcctcagcacctccttgtccagccacccacargtgagggtcaactcaagtgcctgagtgtcctctctgcaccctgagagaccgctattcccagccatgccctgaccccagcctccagcttagcagccaaggccccccacccaggaccatcacatgccggttagaaagtcccaggctctgagtgcagtcagatttttacagcaaaaccacattccctcggccccagcttccttctttctgtttctctgaagtaataactggtcgcagccagcgccagagaaaagcagtctcccaatagctgaaaacatctgaaactggtgatcagcagcttcctgataagatcccagagttgggcaagtggactcaagcatgcgcgctaagaggcaaaatggcagcatttacttggtat

SEQ ID NO: 111884 - DNA, 582 bp, Homo sapiens
  misc_feature (1)...(582): n = A,T,C or G
ctctccagagaaagaagcaatagtgtgtgtgtgtgtgtgtgtgtgtgtgtgtsagtgtgtagatagataaagtaatttattgtaaggaattgtctcatgcaattatggagatgggcaagtccaaatctgcagtgtgggccggcaggtgcagccagtggtgccgatgaagtcgttaggcagtctgctgnacaattcttccttatttggcagaggatcagcttttatttctatcccgttcttcaactgattggatgaggcccatttacatttatagaggccagatggctgtagtcagtctaccaatttaaatgttaatctcctcaagaaacaccctcacagaagtatccagaataatgtttgaccgaatatctaggcaccccatagcccagtcaagttgacatataaagttaaccatcacaagtaggtagagtatgggttgccagccatccaagacagtgatattgatcaagctgacaacatggcacatggagtgcccctgatcaccagccctgcctctgggcccataaaaccaggagctgtacataacatggggtagatgtcaatctgtggttagcaagatcc

SEQ ID NO: 111885 - DNA, 459 bp, Homo sapiens
aagttcaaacaataaaaatgcactcatacatttcctcagaaattttaaaaacacacattaaatgctaaatatacatcctgtcaattaaaaactgtaagagtaaccttataaaaggaaaaaaaagtttgctctcgggagatgattaaatacccatattgactaaatatatttaaagtggttatgattcaatgtcagactaatatttttgcctctactttaattgctttttaaaaagaagtatcaggaggttccaattagaaatttaactgaagsccactttgaatcaatatgctgtgggaattaaatgatgctgtttttatgttttcctttttgaagatattggtcattctttttttaaatttttatctctaagagttcaaggaaagcttggtttttattggtaaggcaagaaatgcagcttctgactaaatgtttatatcttcagtgtgggatgccctt

SEQ ID NO: 111886 - DNA, 594 bp, Homo sapiens
atttttaataattttaaactgatgtgctatttaatggtttggtgataacgcacagttttatgaagacggtttttgaatttggaatttttattgaacttgattaaatttaatgagactgcatcacttacattctaccttaattcttaatgtttataaaggtcacaacaactaattttaaaagttgtattttagaaaagcaaattctgtcagttaatgactatacaatttaaaccataattccaagattttctaaagctagcctacatgtagtactgtggtatgtcttcatgaggggtattaaagcgtaaaagtctaagacatatcactgttgygaaggaaaacaaataggagaattttattaactccagattcttttgactttgtctgacttttgattagaactagagtacgcaaaactcagcagactatggtaaagaggatttacgtcaactcaacttcccaagaagttaaaattaaaaacatatctcccctaagtcaatacatcccgcattatttcactggtgactttagtcccaatttgtttgaggaaactaaaggtaaaagagaaaacaaatttgctttgaaggagtcaag

SEQ ID NO: 111887 - DNA, 565 bp, Homo sapiens
ggactgtgctgttaatatgacaaatgcaatcgaaaacaatactaatataacattcctcacctatctgacaggaaagtcttaaagttcaacaatatagtatgttggccagacttagggaactaggaattcttatatagttgtggtataaatacaaagagacatatgcaaaccctatggataagtgttcatcaatacctagcaaaattacatatgtatttatcctttgacacagaattgcacttctgggagtctatccaaaagacacactagcaaagataaaatatatgtttgcacaaagcaattcactgcagcattatttaaaataacaagagattgaaaataaaaatgtttataaataggggatggagtgagaaaaaarcatggtacatcccccatgatggagtactataaaaccgtaaaaaaaaaaaaaaaaaaaggagaggaggaagaggaaaaagaagaaaagaaatcattctagaaagtgcaactaaatgctctccaggctatttttctaaagaacgaaagaaagttgaagaaaaatgtatagagtatatataacttttca

SEQ ID NO: 111888 - DNA, 565 bp, Homo sapiens
ggactgtgctgttaatatgacaaatgcaatcgaaaacaatactaatataacattcctcacctatctgacaggaaagtcttaaagttcaacaatatagtatgttggccagacttagggaactaggaattcttatatagttgtggtataaatacaaagagacatatgcaaaccctatggataagtgttcatcaatacctagcaaaattacatatgtatttatcctttgacacagaattgcacttctgggagtctatccaaaagacacactagcaaagataaaatatatgtttgcacaaagcaattcactgcagcattatttaaaataacaagagattgaaaataaaaatgtttataaataggggatggagtgagaaaaaagcatggtacatcccccatgatggagtactataaaaccgtaaaaaaaaaaaaaaaaaaagragaggaggaagaggaaaaagaagaaaagaaatcattctagaaagtgcaactaaatgctctccaggctatttttctaaagaacgaaagaaagttgaagaaaaatgtatagagtatatataacttttca

SEQ ID NO: 111889 - DNA, 554 bp, Homo sapiens
ttgcactcacagacgcagcagcagaaacactagtttccttcctagaccacaaggaggaccgaggaaggttggatttattgtcccttacygacacactctcaaaaacctgcactatttcctgtcctcctagaccacaaagaggaatgagaaaaatcagatttagtggcccttactgatgcattcttgaaaaactgttagagtcctaagcattctctcattagtattgggacttcactcctgtcctataaagatgctatgcctcaaaaatgcagtggagggccataccctgagggagggaagggatctccagggttggaagagtgatgacttttgtcctcacttgaataggaaggatacgatttctgaagctccccatatcctagcttcaggggtagctttgttaggcctgctattctgaggagtgatccgaaaattctagataagatagtcccccaagaccactgacagggctttgggcaaaaattatgtctttctgattggtgagcctgggtgcctaaagaagggaatagagtcctggagtttatagtagaaat

SEQ ID NO: 111890 - DNA, 554 bp, Homo sapiens
ttgcactcacagacgcagcagcagaaacactagtttccttcctagaccacaaggaggaccgaggaaggttggatttattgtcccttactgacacactctcaaaaacctgcactatttcctgtcctcctagaccacaaagaggaatgagaaaaatcagatttagtggcccttactgatkcattcttgaaaaactgttagagtcctaagcattctctcattagtattgggacttcactcctgtcctataaagatgctatgcctcaaaaatgcagtggagggccataccctgagggagggaagggatctccagggttggaagagtgatgacttttgtcctcacttgaataggaaggatacgatttctgaagctccccatatcctagcttcaggggtagctttgttaggcctgctattctgaggagtgatccgaaaattctagataagatagtcccccaagaccactgacagggctttgggcaaaaattatgtctttctgattggtgagcctgggtgcctaaagaagggaatagagtcctggagtttatagtagaaat

SEQ ID NO: 111891 - DNA, 554 bp, Homo sapiens
ttgcactcacagacgcagcagcagaaacactagtttccttcctagaccacaaggaggaccgaggaaggttggatttattgtcccttactgacacactctcaaaaacctgcactatttcctgtcctcctagaccacaaagaggaatgagaaaaatcagatttagtggcccttactgatgcattcttgaaaaactgttagagtcctaagcattctctcattagtattgggacttcactcctgtcctataaagatgctatgcctcaaaaatgmagtggagggccataccctgagggagggaagggatctccagggttggaagagtgatgacttttgtcctcacttgaataggaaggatacgatttctgaagctccccatatcctagcttcaggggtagctttgttaggcctgctattctgaggagtgatccgaaaattctagataagatagtcccccaagaccactgacagggctttgggcaaaaattatgtctttctgattggtgagcctgggtgcctaaagaagggaatagagtcctggagtttatagtagaaat

SEQ ID NO: 111892 - DNA, 554 bp, Homo sapiens
ttgcactcacagacgcagcagcagaaacactagtttccttcctagaccacaaggaggaccgaggaaggttggatttattgtcccttactgacacactctcaaaaacctgcactatttcctgtcctcctagaccacaaagaggaatgagaaaaatcagatttagtggcccttactgatgcattcttgaaaaactgttagagtcctaagcattctctcattagtattgggacttcactcctgtcctataaagatgctatgcctcaaaaatgcagtggagggccataccctgagggagggaagggatctccagggttggaagagtgatgacttttgtcctcacttgaataggaaggatacgatttctgaagctccccatatcctagcttcaggggtagctttgttaggcctgctattctgaggagtgatcckaaaattctagataagatagtcccccaagaccactgacagggctttgggcaaaaattatgtctttctgattggtgagcctgggtgcctaaagaagggaatagagtcctggagtttatagtagaaat

SEQ ID NO: 111893 - DNA, 594 bp, Homo sapiens
ttcaaagggtctgtaaattcttttggttgttctagtatgttccttcagtggttcttggagcaaaagttcacaatgtgagtctccacatgctgttctgtctgtccaaatgggagctgcatgttagtcctgtctcctatccatcattttcctcctgtcttgaagattttaaattaacaatagcctcctacagattctaagaattcttttttctttttcttttttttttctgagacagagtctcactctgttgcccaggctggagtgcagtggtgcgatctcrgctcactgcaacctccagggttcacaccattctcctgcctcagccttctaagtagctgggactacaggcacacaccaccatgccaagctaattttcgtatttttagtaaagacagggtttcaccatgttggccaggatggtctcgatctcttaacctcgtgatctgtttgcctcggactccaaaagtgctgggattacaggcatcagccaccgcatccagtggattctaataattcttactaaaatatttgaatttgttgaaattgaaggtactcgatatctggccacaaaatcatattatttatgttacccat

SEQ ID NO: 111894 - DNA, 590 bp, Homo sapiens
gctgttgctatacacagagactaatagagaccatgggatattaagcagctttgtaactgcagttgcccatcaagaatgttgtcagactcatcaagtcatrcatagtaatccattacatgatgaaaatggcatatcagggatcatacctgagcaggtctggagaccatggtagtttatatgaataggtatcccagaatcctatgacacttacatctgttgctctgacactcctccctcagttcaggcttatggcctggtagcagattccttatggtctgaggaaaagtcaaaaattggaccttccccattatccccattggacttgggagcaaggagaactaatgcaatgaattgatactcttgctgcttgctgtgccttgagttataaagttcttggtctatgatccaggagtttcatgtcttctacctgtatccatgagaccaaaacagcagcatcagatcaagtatcagactcaacatatatataatatgaccatgtatcatgtatgagtatatgtgtaatgaatatttatatgtttgtatatgtaaacaaacaggcatagttatctctgagtgatagtgtcataagt

SEQ ID NO: 111895 - DNA, 590 bp, Homo sapiens
gctgttgctatacacagagactaatagagaccatgggatattaagcagctttgtaactgcagttgcccatcaagaatgttgtcagactcatcaagtcatgcatagtaatccattacatgatgaaaatggcatatcagggatcatacctgagcaggtctggagaccatggtagtttatatgaataggtatcccagaatcctatgacacttacatctgttgctctgacactcctccctcagttcaggcttatggcctggtagcagattccytatggtctgaggaaaagtcaaaaattggaccttccccattatccccattggacttgggagcaaggagaactaatgcaatgaattgatactcttgctgcttgctgtgccttgagttataaagttcttggtctatgatccaggagtttcatgtcttctacctgtatccatgagaccaaaacagcagcatcagatcaagtatcagactcaacatatatataatatgaccatgtatcatgtatgagtatatgtgtaatgaatatttatatgtttgtatatgtaaacaaacaggcatagttatctctgagtgatagtgtcataagt

SEQ ID NO: 111896 - DNA, 590 bp, Homo sapiens
gctgttgctatacacagagactaatagagaccatgggatattaagcagctttgtaactgcagttgcccatcaagaatgttgtcagactcatcaagtcatgcatagtaatccattacatgatgaaaatggcatatcagggatcatacctgagcaggtctggagaccatggtagtttatatgaataggtatcccagaatcctatgacacttacatctgttgctctgacactcctccctcagttcaggcttatggcctggtagcagattccttatggtctgaggaaaagtcaaaaattggaccttccccattatccccattggacttgggagcaaggagaactaatgcaatgaattgatactcttgctgcttgctgtgccttgagttataaagttcttggtctatgatccaggagtttcrtgtcttctacctgtatccatgagaccaaaacagcagcatcagatcaagtatcagactcaacatatatataatatgaccatgtatcatgtatgagtatatgtgtaatgaatatttatatgtttgtatatgtaaacaaacaggcatagttatctctgagtgatagtgtcataagt

SEQ ID NO: 111897 - DNA, 590 bp, Homo sapiens
gctgttgctatacacagagactaatagagaccatgggatattaagcagctttgtaactgcagttgcccatcaagaatgttgtcagactcatcaagtcatgcatagtaatccattacatgatgaaaatggcatatcagggatcatacctgagcaggtctggagaccatggtagtttatatgaataggtatcccagaatcctatgacacttacatctgttgctctgacactcctccctcagttcaggcttatggcctggtagcagattccttatggtctgaggaaaagtcaaaaattggaccttccccattatccccattggacttgggagcaaggagaactaatgcaatgaattgatactcttgctgcttgctgtgccttgagttataaagttcttggtctatgatccaggagtttcatgtcttctacctgtatccatgagaccaaaacagcagcatcagatcaagtatcagactcaacatatatataatatgaccatgtatcatgtatgmgtatatgtgtaatgaatatttatatgtttgtatatgtaaacaaacaggcatagttatctctgagtgatagtgtcataagt

SEQ ID NO: 111898 - DNA, 535 bp, Homo sapiens
aaccttgtctgatgttggtattctgagtatttttttatgcccaagaggagaataacttgatgtgactacaagtgcaggccagcttccaaaggtcaagggctgctcttttgcattctctctttctctctctctctytctcttctatctatccatccatccatccttgttcaataatcactgcaaccttgataagcaatgcattcttccatcacagagagcatggacttttaataatgatcttctattattacatttttacctcagtgagccagttaggataggaggaaagcctgctgtcatggcagcctgctgagtgctgaatagtgatttttatgaaggagaggtttaagggaatctaaattgcatcttgaagatagctgcctaattcacccatgcttagatctgaatgggctgaacaatttaggcagtgtaatccgtggaactctagagaaggagctgcaccggcttgtgcttcctagctttctgggaagaggagagtgtctgggaacaggaagaaagatgcagtcactttggc

SEQ ID NO: 111899 - DNA, 535 bp, Homo sapiens
aaccttgtctgatgttggtattctgagtatttttttatgcccaagaggagaataacttgatgtgactacaagtgcaggccagcttccaaaggtcaagggctgctcttttgcattctctctttctctctctctctttctcttctatctatccatccatccatccttgttcaataatcactgcaaccttgataagcaatgcattcttccatcacagagagcatggacttttaataatgatcttctattattacatttttacctcagtgagccagttaggataggaggaaagcctgctgtcatggcagcctgctgagtgctgaatagtgatttttatgaaggagaggtttaagggaatctaaattgcatcttgaagatagctgcctaattcacccatgcttagatstgaatgggctgaacaatttaggcagtgtaatccgtggaactctagagaaggagctgcaccggcttgtgcttcctagctttctgggaagaggagagtgtctgggaacaggaagaaagatgcagtcactttggc

SEQ ID NO: 111900 - DNA, 450 bp, Homo sapiens
tcattcttttgacagtgacaagctgcttgtaaggaatgattgccacttcaaaattgygttcagccttcttaaaatacttctgttcttcaaacaaaatacctcacatcagttctaaatctgtaatacttggggaattagggcctcaccctgtgtaatgctgcagtatgctctctgtgctactgaaacctctggcacaagcgtttcctcacctaaggcatctgcctttcactggtgggtggctgatctttagatcatctatgcggtgcgttgggagccttctggataaaggatgcttgaatatataagtcagggtttctgctcaacacatattcattgcaactactgaatatattaactcattatacctctcccaaataattatacagtatgtgcagcaagcattttaaaatgtgtacatttcaaacacggagctggcattttacaagattt

SEQ ID NO: 111901 - DNA, 670 bp, Homo sapiens
taagcctgctttataaatatgagtaacttctgatgtgtcaatgttctaaatcagtcagcattgtgtaaattgataaaagatgacagaataaagacattgaaggccagagtgctatctaaagaagtctcacctgggtcaacttctaaagaaatcttagagatatttccaaagatggacacaaaactccaaggaaaataagcatyaaaatgattgctgagaagcactattccaaagtgcttatgaataaaccacagaagtaagatctaggctgtttgatataacaaatatgttttctggactttgtcactcacagcatctcacagaaccaacagaatctcctgacatatatgctaaaccaatgatctcttcatgaattgaagaatcagtagcgctggctctattcctgattgtccctaggaaaatataaccatgcatatgactagagcaagaaggcagtgactagagttaatattctatcattcatgttttagaaacattaaaaaaataagtcaactcaatttttaaatcctaccttgacattgggtattatttatttccaccctttataataatctcctaagttaatatgttcttatttcaaaataacttacttgcaattgaacttttgggagacaacttattccttagtctaggtttgcctttaatataa

SEQ ID NO: 111902 - DNA, 624 bp, Homo sapiens
ggtcctcacaaatgcataatttcacatattcaggtcacatgactgcaaggatttgagggtgaactcccacccagagcaaagaaagtgctaacccatcattgtggatgttttagaattcaccttgaactttctgttcagttttaagtactatgctttaacaaccttgagcaaacttaaaaatattttgttaagctaaaaaggtgagacaaacagggacaaatgtatgatctcatagataagaagcataagtataggtaatataagtcgtaataacgattccatggagagttatattgactggaaaggcacacatgaagtagttgggtggactgaactgctctacatcttgatttgtgtggtggcctcacaagtgtttatatatatgtgcaaaaaatcatagagctgtgtgaagattggggtagtttaccgtatggaaataaagtactgaaaaaagttttaaaaagcmtattttaaaaaactgggaagaagcacagtagaacagctagactgcaaatccaccaaataaaagtcaccccctccttattccataacctgtaccataagaaaaataagtactagttaaagttgaataaaggaggagcctgaggaaaataagctgaaatc

SEQ ID NO: 111903 - DNA, 669 bp, Homo sapiens
atcaggctatgcatatggatggtaataatatttgagccaagacttcaaaaaatataacttgtttgtttaatttatattgaagtagccagatcactgaccagtgcaattataattcagtatattcagccagtagaaaaaaatgtttctggaaggcagacataaataagagaatttgcagtaattttgaatgcaacttacaaacttggtttttgcaatagtcacttcctcttcctgctaaaaaattatagcttttgtttcctttatcttagactgtgtytcttgataagaaaattaaatttcatggatctcatttttagagaattagcactttgtgctaaaataacttgcaataatctccctagttctttcaatgaaatagaaccaaaggctcaagccaactgagcagacagaggtgagttccataagttaaattttacagaaatgaatcaaacataattatgttttgtatttatgagtgtgtataaatacatagatatgtatagttctattagattgtttgctatattttagtatcaggttatgtcaaccattaattcaaactgattgaaaaatattatttatcatctaactcacagtagaaaatgtagaacttaacgatatttttagtaatatattttcatatagtacgtgatttttttaaattagaaa

SEQ ID NO: 111904 - DNA, 665 bp, Homo sapiens
acaaacagaaattaacaacacatatttcactagtgctcgacattgaacattctatttagaaatattttgtagttatgtgaaaataacatattttgtatactctaattgaaattatgtgctatcaattttgttgctgtagcacaatttaaatgttgaaaggytatttcaaatagactctaaaaaatacatttatttatttatttatttatttatttaagacatggtctcagtctgttgcccaggctgcagtgcagtggcgtgatcttggcttactgcaacctctgcctcacgggttcaagtgtttctcatccctcagcctaccaagtatctggaactacaggcgcgtgccaccatgccctgtagtcccacgtgtcaaattggtaataccttttacccctgtctttctctgctaaggcgtatttctcacttccctctgcctatatatactttatactgagaaaaatgttaatgtctatgcattgagtttgaaatatgacttaactggtcattagttccaattagttcacatcagacttatttatgcttctacattattcttcaaattttagatacagagaacttaacaatgatgccataccactgctacaataaatagcattttagaataaaagagagatataaataattccaatattaagataacc

SEQ ID NO: 111905 - DNA, 527 bp, Homo sapiens
ttttcatcttaatagctcaaagctagtatggtttggctgtgcccctacccaagtctcatcttgaattgtagttcccatagtacccacatgtcrtgggagggacattgtgggaggtgattagattatgtgggcagttcccccatgctgctctcataatatttagtaagttctcacaagatctgattattttataaggcgcttctccctcattgactctgcacttcttcctgctgctgccttctgaagaaagtgcattgttcatcctttgtcttctagtatgattgtaagttccccaagacctccccagccatgtggatctgtgagtcaataaaacctctttcctttataaattacccagtcttgggtatttccttatagcaatgtgagaatgaactaatacagtaagttggtactgcagacagtgaggtgctgttgtaaagacaccctaaaatgtggaagcaactttggaacagtgtaacaggcagatgctggagcaatttggagggctcatgagaagacaaggaaat

SEQ ID NO: 111906 - DNA, 555 bp, Homo sapiens
ttatatgaaggtaaaaacctcactggtaacagtaagtacactgacgaatatagaatattataacactgtaattgtgatgtgtaaattacttatatcttgagtgggaagactaaaaggcaaacctatcaaaaaaaataactacaacaactttttaagacatagatggtgtaataatatatgaatagaaacaacaaaaagtcaaaaaataggaagacgatgttaaagtttagagtttttattagttttcttttttcttgttagctaatttgtataatcagagttaagttgtatgtttaaaataacaagttttgtcatttgcaagcctcaggctaacctcaaatcataaaacctacgatagatacacacacacacacacacacacacacacacacacamaatgaagcaagaaattaaaacataccacctgagaaaatcactttcacagaaaggaagacagggaacaaggaagaaacacaagaccacaaaacaaccagaaaacaaataacaaaatggtagaagttaagttcttacttatcaataatacattgaatgtaa

SEQ ID NO: 111907 - DNA, 596 bp, Homo sapiens
ctcaacatctgaatctgtgaacatattttgagtgataaactcagaataggacttgtaagtcaggactgatttttagctattatagaaagagtgtttcttattttctattaaaggtactggcaggtttatgcttgaaagttatgacaacatcgcctttagaagtggctacgtacatttaygaaacataaatttatgtgatgtcattgactggagttcataattaattctttataacattaaaatgggtttagtcatgaagcagtggtaaaaagccttttggtaaattcctcatgtttgactcaaatagctatctctctttgttgtttaaattagatcatttacacatatattgtgcatttaataaatgtcaaaaaagggaaggaaattattacattaaatctaaaaatgtcctccaagctgttgtgattactcagatgaaacagctctaaaatataacactttacttaaaagtagttaattttatttataaaattttaatctccaacgtacaggtataaaatgatggatcaagagctagatatggttaattgacactgccttttactttactcacactgtagagtatttaaaaacaa

SEQ ID NO: 111908 - DNA, 615 bp, Homo sapiens
ttttattaaacacgattaaagaaaaaacaataacttgaaaaaaagcttgctagagagaaaagagaacctctgcttttcacataatattcatcataactaacacatgcatattttatcagaatatcagaagatatttcagtttctgcatttctaaaataaattgactggtccaagcatcaccttaagatatgttgaaggtttcccagaattgaaggtgtctaaagtttattagagcagggatacaattggatagaaatgcaaagaatgtytagaggaatagtaaagagcctaaagatggcttgcaagagattaaagaagtttctgaagatctttaaactaaaattaagaatttaaaatattcacatgtcaaagacaaacatatgagctacaattggttaagggaagagattggaaataagtagtagaaatttagtgtgggctgaataaggtaaaagaggagattaaaatgctgtagatagattgaaaaaaccttgagtgacctatatactgagatgatatctttagctcttgttatgatatctgtatcaattcagatactttacatatctactatgttgtattaaaatttgtagattatttgattcattttacttg

SEQ ID NO: 111909 - DNA, 593 bp, Homo sapiens
tagtgtgtatgtcagggaacattattttctatttgataaggacactgcatgaatttagagayaataacttttctctctattaatgtcatcattccaccaagagcctaagccattgacatacattacaaaacactaggtcacagagaaaatcactttcaaatttatattgtgaatgcacaagttagattgatttatacctgtaagtgacaaattgttgctgaaataagatgaatgcattcacaagtcaatagctaaaggaactgaaaactgtgcctatatttatgccatagcagtctgttagttcacaaagctgtggcagaggatgataatgctgtataaccaagtatccaaaatgtcaaaaatcttagggatctggcacatgtatacctatgtaacaaacctgcaggttctgcacatgtatcccagaacttaaagtacaataataaaaaaaaatcttagggatctatttaaaataaacctctggatacctgattttattcagagcactaaccatgacatcaggtatcacatattcatgtttgatttctgtacaatttaaaaataaacagaagtaaaattgaatagggggaggg

SEQ ID NO: 111910 - DNA, 593 bp, Homo sapiens
tagtgtgtatgtcagggaacattattttctatttgataaggacactgcatgaatttagagataataacttttctctctattaatgtcatcattccaccaagagcctaagccaytgacatacattacaaaacactaggtcacagagaaaatcactttcaaatttatattgtgaatgcacaagttagattgatttatacctgtaagtgacaaattgttgctgaaataagatgaatgcattcacaagtcaatagctaaaggaactgaaaactgtgcctatatttatgccatagcagtctgttagttcacaaagctgtggcagaggatgataatgctgtataaccaagtatccaaaatgtcaaaaatcttagggatctggcacatgtatacctatgtaacaaacctgcaggttctgcacatgtatcccagaacttaaagtacaataataaaaaaaaatcttagggatctatttaaaataaacctctggatacctgattttattcagagcactaaccatgacatcaggtatcacatattcatgtttgatttctgtacaatttaaaaataaacagaagtaaaattgaatagggggaggg

SEQ ID NO: 111911 - DNA, 529 bp, Homo sapiens
gtgtaaaccctaaattttatattacaattgtttgttaaaataggtataatgttttttcaactctagagggagaatatactcatatatccctggatattgtttaacgttacagaaagttaacaatagtgaccagaagatattatcatctccatgatcattgctgtctcctaatggtgctgtccagtgaacttagaaacttggactaaatctctgaaaggtatcacaaatttgtgtatattttaaaagatgtcgacagacacacacacaaataaagtgatttttttttaattttgctatctgactgacagaagtaattttcctttcttcttttaattatatacataactttgcaacaaaggtacctgacaaagaaaacagaaaaggtgtttttctgtcctaagagaagataaatcttttagaatgtgtttttaaaatattcagacctccaattatttttagttccttgagctattaaaataagtttagtcatgtcagaacaagcaattrcttccgtgtggttatagaacca

SEQ ID NO: 111912 - DNA, 550 bp, Homo sapiens
tatcccatatccgtctgcttacctccatctccagtgccataactcttgtctgagccaccgtcattacttgtttagtctattgcagtagcctcccgactggcatccccacatccattcttgcctccttaaaatatcttctccacagaactgccagagtgggctttctaaatgcaaatctgacctctttttctgaatgttttactttcctgtattactttatttcaaaatcaagtcaccaagaaaatgagttacttaataggatcatgtctctttcctcctaaaatcttcacgagacttccatgcacccacccattgcacttagaatagaatccaaactccttattatgtccataaagatccttaatggcatgtctcctgcttgtgtctctgacctcacactttatcatrcttctcactcagtaatctgccatcccagtcccccacctatgccttgaaaatgtcagcctcaggctttgcacttgctgtggcttttgcctggagttctttttccctagctggctgcttctcctccttcaggtctcaaaatgtc

SEQ ID NO: 111913 - DNA, 583 bp, Homo sapiens
tgtctccatagtcctattcttaagtaaataaggaccattagaagcttctatgagatgtgctatgtgtacttctggggtcagtcttgtgcttgacacactgaaagctcattttagttcactgtggaaaatcagatctcaccaactcatcacaactaactccatcaagatggagcaggggatcactcttcatctgactcctcccataggaagacctgattctcatttacaggctgatgccagaacccagacaattagcctttgagagatccttccaggacatgatgtccttaaccctgcagttcactacagcatgtttccatgactcaggactggaactcttgtcattgacctgaaggcaagaaactgttctcctttccagggcaaactcatttccatactatggggactccaacagacagcataacttcctggctmtgcttgttggacctccaagctctctgctgcagatctgtggatccatcatttacatttcatgactttgagatagacttgggaaaagacatctaggaaataactgaaaaatgacatgagaatacctcacacctgaactgtacacttcaac

SEQ ID NO: 111914 - DNA, 583 bp, Homo sapiens
tgtctccatagtcctattcttaagtaaataaggaccattagaagcttctatgagatgtgctatgtgtacttctggggtcagtcttgtgcttgacacactgaaagctcattttagttcactgtggaaaatcagatctcaccaactcatcacaactaactccatcaagatggagcaggggatcactcttcatctgactcctcccataggaagacctgattctcatttacaggctgatgccagaacccagacaattagcctttgagagatccttccaggacatgatgtccttaaccctgcagttcactacagcatgtttccatgactcaggactggaactcttgtcattgacctgaaggcaagaaactgttctcctttccagggcaaactcatttccatactatggggactccaacagacagcataacttcctggctatgcttsttggacctccaagctctctgctgcagatctgtggatccatcatttacatttcatgactttgagatagacttgggaaaagacatctaggaaataactgaaaaatgacatgagaatacctcacacctgaactgtacacttcaac

SEQ ID NO: 111915 - DNA, 494 bp, Homo sapiens
tgtgtgaattcgcctctcctttgggcatccctgattgtgtctctatttgtttatgtttctcttaatgtctgtgttctctgtctgtttccctgcctgtaggtctgtgactctgtgtgtgtgtgtgtgtgtgtgtgtgtgatgcacgagtgtccattgtgtgtggggtctgccctgtggggctgtgtctcatggccttgtgtatctgtggtctcctggtgkgtgtgtgtgtgtgtgtgtgtgtgtgtgtgtaagcctgtctgtgggccaaactgctgagtgcccaggtgaagctggggcggttctgtgcctttgtgtctctgtgcttgtggtgtctgtttatttacctgtgagttcctgggtttgtacacctaaaaaattggcagtcacagagggccctctgtgggtgagaaggggacaatatgtgctcctctcattcccaggctaggccctttctgcccctgctcttctgagcctccgttggccccctggtagtt

SEQ ID NO: 111916 - DNA, 507 bp, Homo sapiens
gtctctatttgtttatgtttctcttaatgtctgtgttctctgtctgtttccctgcctgtaggtctgtgactctgtgtgtgtgtgtgtgtgtgtgtgtgtgatgcacgagtgtccattgtgtgtggggtctgccctgtggggctgtgtctcatggccttgtgtatctgtggtctcctggtgtgtgtgtgtgtgtgtgtgtgtgtgtgtgtgtaagcctgtctgtgggccaaactgctgagtgcccaggtgaagctggggcggttctgtgcctttgtgtctctgtgcttgtggtgtctgtttatttacctgtgagttcctgggtttgtacacctaaraaattggcagtcacagagggccctctgtgggtgagaaggggacaatatgtgctcctctcattcccaggctaggccctttctgcccctgctcttctgagcctccgttggccccctggtagttccctcttacgccccaaggagggatggagaaaagggtcaggttacagaattc

SEQ ID NO: 111917 - DNA, 377 bp, Homo sapiens
tctctatacatcaaaggtatttgccaactatccctcttctgaaaggtcaagaagtcaaaatccccatgaaaacttgaatggcggtacattaaaaaacaagaaccttcaaaatatgtaatagctcttttcagagctgtcatacacaaataaatacaaaatctactcttacttgctttccttcaatagtatcacaaaaggaggtactatgttgattcagtatatastttgtatactcacaatgcatggaaaaatgcatggagaaccatgcatacagaacgttttacctcacgtattctcaattgattttctaacttttgtttttagcaaccatccttcatcaaaaagatccaagtgttaaataaacaagtctagaattc

SEQ ID NO: 111918 - DNA, 581 bp, Homo sapiens
attggacaatttcactgtctctcccatcatgaatgagcttttgaaagctagaactcagtctgtgttaacaatgggaatcttctggttctcattcaccaaagactgagatgataacataaacaaaggccccacaggcataattgagcctttggaagatctgtagcaatggagaaaagatggcttaggtgacagagttgctggaagatatgaactggttctaggaaagcagttaattagcatgggagtggccagattgattcaattgtagctcctgaatagcaaactaatgtttctcagtctttacctttcaccagcccatagaaatgagccacagaaaatgttattcactcaattgtttggtcagctttgatctaccttgtcatacaaccaaaacaggttcaggaaaaaatgataaaatagtacatatccttgattactttttacttatcctttggatgtcatttctatatttcatgtatctcttgcctattgctgagtgccctcagttgcccttaaagtacctcaggatcaattcytaaaacacgtatacacacatacaacctgtagctgtgctcacaacc

SEQ ID NO: 111919 - DNA, 635 bp, Homo sapiens
aagtgaaattatccaggcacataaagacaaatattacatgttctcacttatttgtgggatttaaaattcaagacaattaaactcatggggatagaaggatggttaccagaggctgggaaacgtagtgggagggtagaacaaaaaaagagttagaaagaatgaataagacttagtatttgatagcacaacagagtgactatagtcaataataatttaattgtacattttaaataactaaaagagtataactggattatttgtaacacaaaggataaatgcttgagggcatggatacctcatctttcatgatgtgattattacacattgcatgcatgtatcaaaacatctcatgcaacccataaatatatacacctactatgtacccacaaaaatgaaaaaaaaaatagtgagagctaacttttattgagaacttattatgtgtcagccaccgaaataagtgatttatatggattgacttatttattcatcacaaccttataagatagatattattatttcccttttacacaggaagaaactgagacaaaaggttaagtaacttgcccaaaggtcacacaagttacaagaggcagagctagaatttgaacacargcagtctggctgagacattaatc

SEQ ID NO: 111920 - DNA, 575 bp, Homo sapiens
ccctccaatttcgtattggagcttctctttagctgatccaaactggcagccagagggcaaaggatccttaccatggcagacagcagggtagagaaacataaagagtggtgctgagggtgggggggcatgtaaaaagaagatatctaattcaccttgctatgtgtataacgttgagctaagtgctgagagccttctaggaagcatcaagtcttcttcatcaagaatattgaagaagaggagaaaaacatcaattatgtgacaataaagagaagagccattattattgtcttgaagataattgtagttaactcaaaacaacacacatacataaataagataattcaagacaactacttggcccacacagttccaagcccagtaccccttttattagtttasggatatccttgtgctcagatttcttctctgaatctcccttgaggaccaaaggtgaataaaggttttgattttgcccccttgtctgacattcagaaattgctagagatgtgtcccagccagcaatttcctaccttgactttgctccttgaaaactgctgattgttggacaccagtct

SEQ ID NO: 111921 - DNA, 546 bp, Homo sapiens
aagctcattgcccaacagtctcccctcagaaaaagttacccctttcaggccagacatgataacacacacctgtagtcccagcagctactcaggaggtggaggcaggaggcatcccttcagtccaggagttcaagactagcctgggcaacatagcaagacctcatctgtaaaaataattttaaaaacattttttcaaagttactcctttcaagctttccattagcagtttcagcctcggtgtactctgccatttgtcagttatgagaccttgmcctcttgggccttagtgtgtcctctatgtaaaatgagggtactagaacctcctccataagatcgttatgaagcagatgattagcacatgcggagggcttggcacagcccaggaagctctgcatgatgtgtagctgttatcttagacattgagactgtcacaccaccatggagatgaggataatgatctgcttctttcagcgagcagcacctcagagcatgtttgacccagcactcactcagggcctcatgctcctctgcatgtcccattgtcac

SEQ ID NO: 111922 - DNA, 616 bp, Homo sapiens
ggttaatgagtgtggccaggagaatagaatgtgctgattgrtttactcccagtgggtccctgaactggaccagtggtgaggccagaagtccaaatccttcaaagaacagaattgcaagaagtacagataccccaattaaaattaagtctgtgttcaggggaggatcctgaggcttagtgaagtaaggtgacttcccaagaccacgctgtagcacaatgagtaaggtttgaccctcaactctgacaggcataaccactgtcccagcctccaacttttattttcaacccaagtggcttctgaacttgactcttctggcttttctcttctaacctgttgaataatgtgatggcattgcatgacccataaggtcctattcatgctataattctattttccctgtagcaaaaaggtggtatatgtatatgttttgcttcaaagctatagatattagcatttgctggtctagtatgaataccaatcatgtctgtgttaattaaggtctgcaattaacccaactaggagacaatatcaagagtaacttgaaaacaagaatgagtctgagattcatttctttatcaattcactcactggcaaatgtttattgagttcctattat

SEQ ID NO: 111923 - DNA, 597 bp, Homo sapiens
atagttgctactcctatagaayataaacccatgcatttgattctcatttctggttcccaaaaggtctgctgtttattggtggtcatgactcacactggacaccaagtttctacaatttataatatcctgtttagcataagatcctgagaagaaatcagtgtaattttatttgatttagcatttaaacctcattattagtgatttaatgatttattgttagcgtaccatccaaatacctgaccacaaaaatcacattctttcaatttatctacttatgttttatgctttatattatcaccaattcataatccccataggtttttgttgattttttgctcaccttgcttactatctccaggagaaaaagcagcttacttcctaacagaagaagcctggactagagacacagggaaataatgatggaatatttttccttttggtttaccgccctatattcctggtgccttgttagagcttaaagaaagtaaggtctttctcttgttccaagtattcagagcctgtattagcccctataatcagaactatgcctctgtgtctgtggtgggagggcagtaaggaacataaaattctttagtg

SEQ ID NO: 111924 - DNA, 395 bp, Homo sapiens
ttttaggaattcttgtcactatacatgcattaaagaaaaaaataatactttctctccttgctaagtctcagtaagtcagaattaagtcattggaggctgtcttttctagtattcagactctttagaatgttgtatcacaaatagtaatacaagtatatagacaatcttcttgagatctggaggacctgattcagttgggcttcaaggtaagccctgaataattctttgttcatgtttcycatgtcaatcggctagaattatctgtgattcaaatcctgctcatgtctttagaatagtctacagtacaaattttatactaatgcctcataagatgaatttgacccaaggagctgtgttttaaaacaacaaacaaaggatcattggtctccaggagt

SEQ ID NO: 111925 - DNA, 394 bp, Homo sapiens
gaattctgagcagcaatagtggaattagaccccaagggatggtgcaggtgaaagtacagggagaagaactccataagcacaggagaacttgtgagaaagctgagatagaaacaaatacacgatttgtttccaggattgactaaaagctggagaagctcactggcaacctttggaatccygtttgctgcccctgggcacttacctgattcatctctaccctgagattacatctatttcttataggaaccaataattttatttggatcacaactccccccacccctgactttgtccttttggattagttttcaacactcattctcattttcttcttcttcagtcaatatgaaataatgagagatctggaatatggaacctgagacccctggtttga

SEQ ID NO: 111926 - DNA, 627 bp, Homo sapiens
tgtatgatttcaatcattttatatttattgaggttgttttatggcataaaatagtctatcctgaagactgttcctttgtacttgagaagaacatgtattcttctgctgtcaggaggactgttctccagatatttgttaagtattgttggtgtatagtgttactcaagtcttctatatacttattaatcttctgtctagtcattatggatagtcagttgtttgaatttcaaactattatttttgaattgtctatttcttttttcagttctgtccatttttgcttcaggtattttggggcattatgattaaatgtatacatgtttttaactcttacatctttatgatgaattggcatgttttatcattatgaaatatggcttttcttctctgatagtgtttcttgtattaaagtctattttaaataatgttaatacagctacttcagctgtcatagagttactgatttcatactttaccttttttacatcattttgctttttatttatttatgtatttgaatataatgtgtgtctattatagacagtgtrtacttgggtcttgtttctatcaaatctgacaatcctttccttttatgtgttgtgcttggtttatttgcttttcatgtat

SEQ ID NO: 111927 - DNA, 445 bp, Homo sapiens
gaattcaagttttttaaagttaaaaaaaaaaaactttccattttacgaatgcttaagttytgttccttactaaaaaagataatccttacataaaaatgtatttttaagctcaaaatggttcacagcttcatggtacctcagtgactattcgctattaaaattccataatatgacagggctattttagtgtttgaattaaaaaaatataaatagctaaaaatataatgtagtcatatgatagaatcattcaaacttaagactctaatttctctcaatagtttctgcagtcagaggttttgagattagattatactgtcacgtatttactaagaatgcaaacagaacaaaaccagaaacacaccagaccactcataccaatatggtaattctggtcaaaatatagtctacattcaacatagtctatatacaatgttaaaaatctctc

SEQ ID NO: 111928 - DNA, 607 bp, Homo sapiens
tactatgcagccataaaaaggaacaagatcatgtcctttgcaggaacatagatggagctggagccattaccctcaacaaactaacacaggaacagaaaaccaaataccatgtttccacttataagtaggagctgaacaatgagaatacatggacacacgaagaggaacaacacatactggcgcctgtggkgggtgggggaggtgcggcagggggagggagagcatcaggataaagagctaatgcatgctgggcttaatacctgggtgagaggttgataggtgcagcaaaccaccatgacacatgtttacctatgtgacaaatctgcacatcctgcacatgtatcccagagctaaaataatggagcagatacatatgtacagctataaaatgacctacaaaacatactattcaatgaaaaaggcaaggaatacaacagtatgtacaacatcctttcaactgtatttttaaaatggaatatgtacataaatatatgcttaatttatgcatagactatatctataaaaaaactaaataactggtagtttgcaaatagccattccaaaaatattaatatgttcgtatagcatttgtgtatgttttattctt

SEQ ID NO: 111929 - DNA, 561 bp, Homo sapiens
agaccaccctggccaacatggcaaaaccccgtttatactaaaaatacaaaagttagccgggcatggtggcgcatgcctgtattcccagctagtcgggaggctgaggcaggagaatcacttgaacccggggggcggaggtttcagtgagccgagatcaagccgctgcactccagcctgggtgagagtgatactgtctcaaaaaaaaaaaaaacaacttgatgaaraactctaatttatttgtgcgtgtgtgtgtgtgtgttttttttttagaggacagaaaaatggttcgtattgttcttacaaagacaaagagagatgcagcaaattgttggacttctctactagaatctgaatatgcagcggatccttgggtgcaagaccaaatgcagagaaagcttacattagagagattccaaaaagaagtaagtcagatgaagtgtatgagtatgtgtaattaaatatataaaaatcatcaaataaatatttgaaattaaaactcaaatgtcattatgaaaagttacaaacattttctagaagaatttttaaagtgaattgttagaa

SEQ ID NO: 111930 - DNA, 593 bp, Homo sapiens
tgtaggcaacatttctctcagtccagattttaataacttttagatagaaggtgagactccaagtcaattatgggttccctcaatgtgacagtgtaaacccaccaaactcattgctacggtctgaatgtgtctgaaaattcatatgttggaagtttgatcctcaktgaagtggcattgggaggtggggcctttggggaggtgaaatgactggtgctgtttgctatggtttggatgtggtttctttgttcccaccaaagctcatattgaaatttgacgcccagtgtagtggtgctgggagatgaggcctactgagagatgtttgagatgtgaggacaaatcatgaatggcttagggaagttcttgtggtaggaagtgagttcttactcttgtgagaataaattagttcttttaggaatagttgctgagagagcgggttgttataaagccaggacgtccctcaggtctccctcttcttcacatgtgttcgcttcccctttgactttctccaccatgttatgatgcagcacaaaagccctctccagaaaccagggccatgcccttgaacttctcagcctgcagaaccatgaattaaa

SEQ ID NO: 111931 - DNA, 593 bp, Homo sapiens
tgtaggcaacatttctctcagtccagattttaataacttttagatagaaggtgagactccaagtcaattatgggttccctcaatgtgacagtgtaaacccaccaaactcattgctacggtctgaatgtgtctgaaaattcatatgttggaagtttgatcctcagtgaagtggcattgggaggtggggcctttggggaggtgaaatgactggtgctgtttgctatggtttggatgtggtttctttgttcccaccaaagctcatattgaaatttgaygcccagtgtagtggtgctgggagatgaggcctactgagagatgtttgagatgtgaggacaaatcatgaatggcttagggaagttcttgtggtaggaagtgagttcttactcttgtgagaataaattagttcttttaggaatagttgctgagagagcgggttgttataaagccaggacgtccctcaggtctccctcttcttcacatgtgttcgcttcccctttgactttctccaccatgttatgatgcagcacaaaagccctctccagaaaccagggccatgcccttgaacttctcagcctgcagaaccatgaattaaa

SEQ ID NO: 111932 - DNA, 593 bp, Homo sapiens
tgtaggcaacatttctctcagtccagattttaataacttttagatagaaggtgagactccaagtcaattatgggttccctcaatgtgacagtgtaaacccaccaaactcattgctacggtctgaatgtgtctgaaaattcatatgttggaagtttgatcctcagtgaagtggcattgggaggtggggcctttggggaggtgaaatgactggtgctgtttgctatggtttggatgtggtttctttgttcccaccaaagctcatattgaaatttgacgcccagtgtagtggtgctgggagaygaggcctactgagagatgtttgagatgtgaggacaaatcatgaatggcttagggaagttcttgtggtaggaagtgagttcttactcttgtgagaataaattagttcttttaggaatagttgctgagagagcgggttgttataaagccaggacgtccctcaggtctccctcttcttcacatgtgttcgcttcccctttgactttctccaccatgttatgatgcagcacaaaagccctctccagaaaccagggccatgcccttgaacttctcagcctgcagaaccatgaattaaa

SEQ ID NO: 111933 - DNA, 593 bp, Homo sapiens
tgtaggcaacatttctctcagtccagattttaataacttttagatagaaggtgagactccaagtcaattatgggttccctcaatgtgacagtgtaaacccaccaaactcattgctacggtctgaatgtgtctgaaaattcatatgttggaagtttgatcctcagtgaagtggcattgggaggtggggcctttggggaggtgaaatgactggtgctgtttgctatggtttggatgtggtttctttgttcccaccaaagctcatattgaaatttgacgcccagtgtagtggtgctgggagatgaggcctactgagagatgtttgagmtgtgaggacaaatcatgaatggcttagggaagttcttgtggtaggaagtgagttcttactcttgtgagaataaattagttcttttaggaatagttgctgagagagcgggttgttataaagccaggacgtccctcaggtctccctcttcttcacatgtgttcgcttcccctttgactttctccaccatgttatgatgcagcacaaaagccctctccagaaaccagggccatgcccttgaacttctcagcctgcagaaccatgaattaaa

SEQ ID NO: 111934 - DNA, 627 bp, Homo sapiens
tttaattggagttctggaagggaagcagagaatgaggcagcaacaatatttaaagagacaatgagagagagcccttcaatatactgataatattctatgacaatagcaacagcatcttactgaagtctatattccctgaaatactgcctttaagtgtctgttgaatttgttaggtgaggaaacattccgattacattctaatctagtattgtatctttgaaattatatcaaaagttctttcaaaatgttatactctttaaaataatatcagacaatgtgaactactgtctgatgtggatatgtgttcaaatatttgaatctctatatttgcagtcgttacttcaaaaattagagctaaatctataattgacactataaagtttaagctctcatttataakcttgtgattaattttcgaccaaaactctccctaaactcatatatgttatctatgataatactctatttgatttcttacaatgtaaattttgtagcagcctttggcattgagttaaatattctaacctgatcacaggtaattaaaacattaatatttacttgcttttgccttgtcctctttaatgacatggtattttgataactttctatttaatttgaaatagagaa

SEQ ID NO: 111935 - DNA, 519 bp, Homo sapiens
ctctgagaatataaagccattgttttaagccacttgattcatgtggaaacaaatacctaggaaattaatacgctgggaatgstgctagacagtctacaatgcacaagacaaccacctataacaaggaattatatgatccataacattaagaatgatgagattaaaaaaccctgctatagatcttaagtctataggtctcctcaatattttattatgtatgctttgaggtgtttctatgtttgcaatttctcacctgattcctatacgttatttaagtttttgggactttgtgtgttggtatgtcaagtaatttgttaactcttgaaaggcatgtgtttgcctctttgattcctttaatgttaattgatatgtacatagtaggaactcaataaatgcttcctaaataaatgaacaaaaactgttagcacacaagccagttgcaatgaacctgtctttacttctgtcagtagagcatattctgaggtcttgaggttgtacttttccaagttgtgattgatg

SEQ ID NO: 111936 - DNA, 519 bp, Homo sapiens
ctctgagaatataaagccattgttttaagccacttgattcatgtggaaacaaatacctaggaaattaatacgctgggaatggtgctagacagtctacaatgcacaagacaaccacctataacaaggaattatatgatccataacattaagaatgatgagattaaaaaaccctgctatagatcttaagtctatrggtctcctcaatattttattatgtatgctttgaggtgtttctatgtttgcaatttctcacctgattcctatacgttatttaagtttttgggactttgtgtgttggtatgtcaagtaatttgttaactcttgaaaggcatgtgtttgcctctttgattcctttaatgttaattgatatgtacatagtaggaactcaataaatgcttcctaaataaatgaacaaaaactgttagcacacaagccagttgcaatgaacctgtctttacttctgtcagtagagcatattctgaggtcttgaggttgtacttttccaagttgtgattgatg

SEQ ID NO: 111937 - DNA, 540 bp, Homo sapiens
acaagcctctcaccaccttgaatatatatgcaaatcctaaacaaagtaaaagcaaatttaatcaagcaatgtataaaaaagataatatatgatgacaaatggatttattccagaactgcatgcacagtttaacactataaaatcaattcatgtgattatctcaatagcagattaaaggagaaaaactatctgataattataatagatgtgggaagaagcatgtaataaaattcaacatccattcatgttaaaaatcttatagcaagtggggaatagaaagacacatccttaacctcataaatgaatacacacacacacacacacacacgcacacacacaccttcagtaaatgtcatacttaatagtaagaygttaagagcatttctttgaagatcagaaacaatacaaaaatactcactatcaccgcatataataagcattgttctgaatcataaaaaagagaaaataaagaatataacagaagcaaaggggaaaaaaaaacttgtcagtttcaaatgatatatcggcataaaaaattct

SEQ ID NO: 111938 - DNA, 409 bp, Homo sapiens
taacgaattctattttcacccatgttcctgggaaacatggtcaaaatgcaaaaactcatcttaaaggtcatagttaccaacttattttaccttcaggtagatcatgtggaggttcagtggtgatgcacccrgggaccgggaaggcataggcactgctggctgtgaccaagggaagtggactcgtagggtagcactgcctcaggatctgaagcaccacagagatgacgggctccatgctcttgtcatccaggcagttctgagcaaagggaagattatatcagatgccaacatctgggcacagtcccctagctgtaacacagctaataacactctccaagctgtaacacagcacagtctcctagctgtgtttcagctaatgaattatacgcatggacagaccgtaaacagc

SEQ ID NO: 111939 - DNA, 622 bp, Homo sapiens
ttaaagtgttagcaataatcgttacagtattagaattatgttataaatagcccctaggtagccagtagtattggttgaaaatggggccccaagagagtttctgatgaatattttaggaggtaaaaaattgggatctcactgagaacttataactgtatgaaatgacaagagacaacaaaagcggtcattagcagagtccatgtattgggggagcttaaggatcttaaaggatagagcakaatttttaccagacacatatacccactgtgaaagatgtgaatactgttatctccagagacaggggtgggatggggaggtggggggaggtggaagaaagagagggaagaaagaagaagaaagaaagaaagaaaagaaaaggaattagaatgccacatgcacaatattttataaaagactcagaataaatgaagagtttaagaagtgtccagtgggaaatgttgacttacatgtggcatatcgaagatgcaatgagcaggccataaatcagcactgtcaagtaatcagtagacagagatccatccttgtataggccaaacaaatgacagaccccaataaaggttcttgatgttgaagaggcgaacatggaaagccattctgaaga

SEQ ID NO: 111940 - DNA, 622 bp, Homo sapiens
ttaaagtgttagcaataatcgttacagtattagaattatgttataaatagcccctaggtagccagtagtattggttgaaaatggggccccaagagagtttctgatgaatattttaggaggtaaaaaattgggatctcactgagaacttataactgtatgaaatgacaagagacaacaaaagcggtcattagcagagtccatgtattgggggagcttaaggatcttaaaggatagagcagaatttttaccagacacatatacccactgtgaaagatgtgaatactgttatctccagagacaggggtgggatggggaggtggggggaggtggaagaaagagagggaagaaagaagaagaaagaaagaaagaaaagaaaaggaattagaatgccacatgcacaatattttataaaagactcagaataaatgaagagtttaagaagtgtccagtgggaaatgttgacttacatgtggcakatcgaagatgcaatgagcaggccataaatcagcactgtcaagtaatcagtagacagagatccatccttgtataggccaaacaaatgacagaccccaataaaggttcttgatgttgaagaggcgaacatggaaagccattctgaaga

SEQ ID NO: 111941 - DNA, 640 bp, Homo sapiens
tctatgcaacactttatttctgaaagtcggtgttagaaccaaatatttaagaaawtttttttttaaacagggtctgactctgtcgtccaggctagagtgcttggctcactgcagcctcaacctcctgggctcaggtgatcctctgacctcagcctcctgagtagctgggaccacaggcatgtgccaccacgcccagctaattgtttttgtattttttttttttggtaaagaaggggtttctccatgttgcccaagctggtcttgaattcctgggctcaagggatccgcttgccttggacttccaattgctaggattacaggcaggagccactgcacctggctagaacgtttttatatgtgatgggaagtgtgcctctggcttctttggcttaatagcttcatttgtgcaagaagcatcaaaacacactggaacaaatctaggtttatatctgccctccaaataagtgttactcacatgttttattgatggcagtttctgatttgtaagaagccagttccccttttaaatgttatagctgttgttcctcttacaaatacttctgctaaattcggtgctcctcatttgtcgaccatagtcagataatacaaggggctggctaaacagaaaaggttttctcat

SEQ ID NO: 111942 - DNA, 410 bp, Homo sapiens
ccattactaaaggtaaaagttaccagtggaattaagggatgatggtagtctcaattcttaaggaattgccttattggatatgcaagagaattcaaaataataagaaccatgctaaatacactatcccttggttattgctatctgtaataggtaaaatgaaagtaaaagagacttccgagtcaggccttgaggctgtactaaggtcagatgtgtgtytctctgagctcaggcctctagcctgaaatctacccacaaaggcgaaaattatgtcaaggcaacagaaagtacctcaaagaccttttttttggtcaccaagaagttagtcagtatgggggaagggcaaaaccaagaaactattgaaactagagggtatagtgtaaaggaattatctcgttttgtggatgggtatc

SEQ ID NO: 111943 - DNA, 546 bp, Homo sapiens
cccaggaattagagaccagaatgggcaacatgrtgaaaccccgtcttcattaaaaatacaaaaattagccgggtgtggtgtcacatgcctgtagtcccagctgctggagaggctgaggtgggagaatcatttgaacctaggaggtggaggttgtagtgagctatcatgccaatgaactccaacttgggcgacagagtgagaccctgtctccaaaaacagaaagaaagaaggaaagagagagagaaagaaaaagagaaagagagaggaagaaaacaacaaaaaaagaaaaattcaatgggataagggagacagagagtgtggggaattggaaggtcactgatttttagagagtactgtttaatcacgtgacctttgagaaaaaacctaaataaatgaagaagctaaccaagtggttatctgcagggaaaacattctaagcagaggggacattaggagcaaaggccatgaggtagaggcatgcttggcagttttgaagaagagcagggctgcgtggatggagcagagtaggcagagaagataatgcag

SEQ ID NO: 111944 - DNA, 546 bp, Homo sapiens
cccaggaattagagaccagaatgggcaacatgatgaaaccccgtcttcattaaaaatacaaaaattagccgggtgtggtgtcacatgcctgtagtcccagctgctggagaggctgaggtgggagaatcatttgaacctaggaggtggaggttgtagtgagctatcatgccaatgaactccaacttgggcgacagagtgagaccctgtctccaaaaamagaaagaaagaaggaaagagagagagaaagaaaaagagaaagagagaggaagaaaacaacaaaaaaagaaaaattcaatgggataagggagacagagagtgtggggaattggaaggtcactgatttttagagagtactgtttaatcacgtgacctttgagaaaaaacctaaataaatgaagaagctaaccaagtggttatctgcagggaaaacattctaagcagaggggacattaggagcaaaggccatgaggtagaggcatgcttggcagttttgaagaagagcagggctgcgtggatggagcagagtaggcagagaagataatgcag

SEQ ID NO: 111945 - DNA, 548 bp, Homo sapiens
ggatgggatgctctgttctttgcgggtcccaaggatgaatatgattatatttgtgttagtgcacatattattatgttctgtaattgcattgctaaattgtatgcatacactatatagagaaattatgcatacaatccagttcttcaactaacaagatagaagtttagacttcttaaaataggatctactaaagcaaatgtatgtttaaacwctggtgatcactcactatcataatccagtggcaggcctcaatctggtgtaaagcgggtgtttagttactaatagtaattcagtagtaaacttcacaaattgtttatttttcttttcaatgttattttaataataaatctaccatgtttgtttgaaatctgtcctgcatccttccgaaagggaaagaaacaatggaggtacagctggtgtgctggaaattaaacagagcatcacctaccttaattttaacagtgtttcatgaaagctgtaaatgggaatatcatatgtcatgtctgttgtagcaaatttgagaacacttttaaaatggccagcaaaga

SEQ ID NO: 111946 - DNA, 582 bp, Homo sapiens
taatttacactctgtacagagataaaactcagcaaaagcatgccatagagttccaggagtatttactgagaagattcatcacaagctaaggaagaaatcagaacggaaaaggatgctgagaaaagggaacaactttcaaggacaaaagctaaagataaagaaaatgttaaagataattttaaaacattttgacttgttgtttttgtttattttacaaaatgcccaagtgaaaaaaaattcctcttacaaactagtacgatggagtattaaaatttcttatattggacatctgttaaaaaggcattttggcaaataagggaatcrtagctaaggattagaatttctattattatctaactttatttgtttaagggaaacatcatttggaagctgtcagtcatgatgccgcagaaaaacactctcaccggtgctcttcagacaccacgcttggctaatttttgtatttttagtagagacgaggttttgccacattggccaggctggtcttgaattcctgacttcaggtgatctgcccgccttggcctcctaaagtaccgagattacaggtgtgagccattgtgt

SEQ ID NO: 111947 - DNA, 551 bp, Homo sapiens
gcttctcccactggagccctgcaaatcagattaacatagcacagattagcaagagagaagcacataattttattagcgtgcccatccccaaaacacatggaagaaacttagtagtcagtaactcaaagggtagttattggtrtctccaaacctaacttagtaggggaaagggaaagggagaaacggtacttgtgaaaaagcagctgaatttctggaaagataaatgggctcttagaatagacagaagatatgagagtgcatgaaaatgtctatgtgggtatggtgatgacttctcttcttctaaaaaagaaatgagagttgttcctaggaaaaggtaggctgaggcaggagaacacttgaaccctggaggcggaggttgcagcgagccgagatcacaccactgcactccagcctggtgtcagagcgagactctgtctcaaaaaacagcaacaacaaccaatcccaatttcttggtggaagttaccagatgtattatatagtcagggaaacttgtaagtcacaaaagattaaacaaatttaacataagcaaa

SEQ ID NO: 111948 - DNA, 551 bp, Homo sapiens
gcttctcccactggagccctgcaaatcagattaacatagcacagattagcaagagagaagcacataattttattagcgtgcccatccccaaaacacatggaagaaacttagtagtcagtaactcaaagggtagttattggtgtctccaaacctaacttagtaggggaaagggaaagggagaaacggtacttgtgaaaaagcagctgaatttctggaaagataaatgggctcttagaatagacagaagatatgagagtgcatgaaaatgtctatgtgggyatggtgatgacttctcttcttctaaaaaagaaatgagagttgttcctaggaaaaggtaggctgaggcaggagaacacttgaaccctggaggcggaggttgcagcgagccgagatcacaccactgcactccagcctggtgtcagagcgagactctgtctcaaaaaacagcaacaacaaccaatcccaatttcttggtggaagttaccagatgtattatatagtcagggaaacttgtaagtcacaaaagattaaacaaatttaacataagcaaa

SEQ ID NO: 111949 - DNA, 526 bp, Homo sapiens
agggtgcctcagactgccttcaacagctgtacagcagctcagacccagtccatacttcagtattgctctaggttctgcatttcagcactccagcaactctgtggaaaagggtaaagcaaatttcatgagaatacattcaattccaatttatcagtacatagtctggctgcaagcgcttctataaattcgtgtagaacacaattccatgttccagccctgcaacacatacaaaatcttttcttcttcatttakttttggatacacaggctgtaacttcctttctcacataaaacagctttaagaagtaatctgaagttttaaatatttctttcacatttgcctgatatggtgctaaaagtcgccagtcatgggttcctaccatcgctggtttgctttgctgactatcacagacaatggctggattctaccctgcctattcccaaacacgaggacactagtaagataaagcatcaatagcaaaaagagcttattagcagccctgggaaaacagactcaacatgcatgc

SEQ ID NO: 111950 - DNA, 526 bp, Homo sapiens
agggtgcctcagactgccttcaacagctgtacagcagctcagacccagtccatacttcagtattgctctaggttctgcatttcagcactccagcaactctgtggaaaagggtaaagcaaatttcatgagaatacattcaattccaatttatcagtacatagtctggctgcaagcgcttctataaattcgtgtagaacacaattccatgttccagccctgcaacacatacaaaatcttttcttcttcatttagttttggatacacaggcygtaacttcctttctcacataaaacagctttaagaagtaatctgaagttttaaatatttctttcacatttgcctgatatggtgctaaaagtcgccagtcatgggttcctaccatcgctggtttgctttgctgactatcacagacaatggctggattctaccctgcctattcccaaacacgaggacactagtaagataaagcatcaatagcaaaaagagcttattagcagccctgggaaaacagactcaacatgcatgc

SEQ ID NO: 111951 - DNA, 549 bp, Homo sapiens
atccacaccaaaacatatcacagttcaacttcggaaaactaaaagaaaatctggaggctaggctgggcttggtggctcactcctgtaatcccagcactttgggaggctgaggtgggcagatcacaaggtcaggagatcgagaccatcctggctaacacggtgaaaccctgtctactaaaagtacaaaaaattagccaggcgtggtggcaggcgcctgtggtcccagctacacaggaggctgaggcaggagaatggcgtgaacctgggaggtggagcttgcagtgagccgagattgcgccactgcactccagcctgggggacagagtgagacactgtctcaaaaacaaaaaaacaaacaaaaaaaacactggaggctagagagaaaaatcacrgtttacctatagggataaaaatctaatgaaaacagatttttcacttagaaaccacagaggcacaacatttttcaagtactgaagtaaaataagttttaacccagggaaatgacatcggcagaataggaagccctagtcccttgttctcccacagaca

SEQ ID NO: 111952 - DNA, 611 bp, Homo sapiens
gtaaaaaggtaaatatgcacctaccaataacctaggcattccaattttatgtatttaccccacccaaaataaaagcatacgtccatacaaatacttgtacagaaatgttcaaagtagttttaactagaaatagcccagatgtccatcaactggtcaatgaataaacaaaatttggtatgttcacacaatggcactctactcagccatagaaggaattaactactgatgcatgcaatgatatggaagaatctcaaaataattgcattgagcaaaagaagatggaaaccttcccccaccaagaaaagagtacatactccataatttcatttatgaaaagttctagaaaatgcaaattataattacagaaatcagatcaagatttacccaaggatgggaggtatggggagttaaggtgggaagttttactacgaaggaattaaaaggagactaraaacacgaatgggaagattacatatgttcattattttgattgtggtgatagtcccattggtataaatataattcagagttatcagattgtatacttgatgtgcattttagtgtatctcaattttacctcattaaagttgttttgaaaaccctaagaaatg

SEQ ID NO: 111953 - DNA, 605 bp, Homo sapiens
agaataactagaaacagtgataaagattatattggctggggacctagaaaggggggagttagttcttcttataagtcctctgaatttttttgctttgttattgtatycatttgtgagggctgccacaataaatgatcacaagctgtatgacttaaaacaaaagaaattcattttttcacggttctggaggctggactgtaaaatcctggttggttagcaggttagttcttttttaaagcttctgacagagaacctgtcccatgcttctcctctaatttctagtggttgccagcaaaccttggtgttccttggcttgtagctgcatcactccaatctttgcctctgtcttcacaatagcattctgtgtgtgagagtgtgtgtgtgtgtgtccccatatttccctcttcatatgaagacatcagtcatgtcaaatccaggacccaacctgagtatcactttatcttaactaattatatctgcaaagactctattttcaaacaatgtcacattctgaggttgtgggtagacatgcatttttgggggaatactattcaacccatgacagtcatcatatgtgcaagtattagttggataaaaagattcat

SEQ ID NO: 111954 - DNA, 598 bp, Homo sapiens
ggttttgtgccatttcctccagcaacctgggctctttctaggctgctgatttcacttgagttcctgtactttacagcgtattgacatcgtcctactggtgaacaaccacctttgatcaatgtgtaaatttatgtttgctacaattaagtatccatgctgttcctgatatcttccagataaaatattcagtgacagagtcatgtgctgcagagtggaatggagtacaccccgtctagkgtcaattaagattcatttgattataagccatagtagtcaactgggagaactctgtcttatttcacaaagctaaaggaagaatgggataatcaaaccttgaaatgggcaatttggtgctaagtgtttgtgacattttctagagattggtgactgccagctcctaggtctttccattctacctttcaaaattcttggtgaaagaatctgattgatccaacttgggtgtcattggggtccctggagctgccttggaggtccctggagctctccacttttggaagtcccactttgctgtggctcatgtagtcagaagttcaaggttttgttatgcatacacagaacccctgggacccagctcctg

SEQ ID NO: 111955 - DNA, 518 bp, Homo sapiens
tgcaataaagaataaaatgctgtgtttatgtcgcaccacttctaagaggtttaaagcgccgtacgaatgttaccacatgaatccccacaacacccctgtgaggtaggtaggtggagagtattgtyatccccactttacaggtgggagaaatgaggcacccaatagttaataagagatttgctcaaaatcacacagctagtcactggcagggcttagaataaaatgtatactgattagcacctagcacagtgctttgcacatagtaggtgttcgtttaatatctgtggattttatttgacttatgtctcaacatacaatatacacacataaagtacaagcagccaccgtaaaacatttttctgatgatatctctcattatttcaaatcctggtggaggaaggaggttcaagaatccatctcaaaattaagacctcagggttgaagaggatcatcataaaaactatcagctgacaaccagctcttacacctgctctaccacacaatattattaatagttt

SEQ ID NO: 111956 - DNA, 287 bp, Homo sapiens
ctgcctttactcttaagagccatctactggatcacagcccaaatgacaccaccaaacaaaaataaattccttcaacacattgcctacaaaacccaatgcatraatctggctagaactaaggaaccaatacagaaccttagccctctgaaagcacccagaaatgaagccaatcaactatgtacaacatatatcataggcaaatcctcagagaaaaaagaatataaaaacaaaaagacccattcaaatgacaacaacttcaaaaagataaactctagccctctcagaat

SEQ ID NO: 111957 - DNA, 615 bp, Homo sapiens
tgtccttgtttgcagacaatatgatcttatatttgggaaaatcaaagactccaccacaaaaaccgatacaactgataaatgatttcagtaatgttacargatacaaaatcaactgacaaaaatcagtaccatttttatattacaacagcaaactttttctgaaaaagtaaccaagaaagcaatctcatttacaatagccacaaaaaaatgtaaaatacttaaaaatgaacttaatcaaagaagtgaaagatctccacaatgaaaactataaaacattgacacaataaattaaaaaggacagaggaaatggaaagataattcatattcatgaattggaagaatcaatattgttaaaatgtccatactacctaatacaatctatagattcaatgcaattttttcaaaataccagtgacattcttcacagaaacagaaaaaaaaagtcctaaaatttatgtggaagaacaaaagacccagaatacccaaagccattcagagtaaaaagcaaaactggaagcattgtattaccagacttcaaattgtactacaaagctataataaacaaaacagcatggttctggcattaaaaagagaaacacagacctattaaacagg

SEQ ID NO: 111958 - DNA, 566 bp, Homo sapiens
tttatttaacatgatgtgtctattttgaaataagcttcatttgttgataaaacttcatttcttccaattgtctaatttcatgtgtagtaatatcctttaagcaaatattaagatatttatgactgaagtggataaaccaaattaytacttataattgcaaaaaaatagaaataatataaaaataaatagcattgcaacaatagaataattttgcaaccgtaggaaatactttcaaagcatttctacaacattgaatgaaaataaagacaccaataaataggatgcaaaactgtacatatagtatattcctgattttgtaacagtatgtaaaaaaaacataaagggagagtcaccaaagtttttaaaaactggtttcctctaggtagttgtcaataattactgggcatttttcatttatttatatatttctctgaaattttcaaaggctatattactttattactatacctgttattttaatgggtacatttttataattaatcatgtaaaagatacaaatgtaaatgattggatgtagacatgtaaacaaagaaaaaaaaggaagt

SEQ ID NO: 111959 - DNA, 612 bp, Homo sapiens
gttgaagctactcatcgtaatggatgtctctgctttagcagagaggaggtgaaaaggatgtaattcccagtgaaagaaagcaacatgaactattatttaattactgcttaatatataactcactaggagtccctgttgatttacagttctagcttcttcttttctttattaatggaacaatctagtcttttaatgcgatgtgattgagccacacctgttattgatagggactttcccaaatgaacaaggcaaataatccattttaatacccaagcatgtatgattctgaaatgcttaattttttcamatatagaagttactcttttcaccccacaaaaacaaacaaacaaacaaacaaacaacaacaacaacagccacaaaagaaaaccttgagctagtattgcccagacttatttctttcactggtttaggatatggtgtgcatatttctgaatactctggacaccaacctttttaactctctggattctaaaaatcaattagaaccctccactctctccttcccacttcagttttcacaccaataggatgctgagttaaatagacgtagtttcattttgttttttgatcggatgcaatttctggatgtgc

SEQ ID NO: 111960 - DNA, 653 bp, Homo sapiens
ttccacttggctaagtaattctcccgcgttctgatatgaaagaactgcttttaccattaaaatgctgaaaattgtaatcataaacttatttgtgaattctaataaccattactaagataagcgttattctgcttatgtctctgcccacctctgatgataccaactgtaaccttttccccttaaaaaaattttattttggaacgcctttcatgaaccttcattttcaaaatagctcttyttaaaaatttggaaatcatttcaatcttaaaacttaaagttgcaaatgtagtgcaagggaatttccaaacccttcccgaagatttcactaagatttcttaaatgttaacattttacatttaaaatgctctctctctctgtctctctctctctccatgtataaatgtgtttgtatcattcaaaatagctctttaataaggggattttttaagactccaaggggacttcagttaacaagtaatcatttagctattactttgaacattatctaacacaaacatatgtttttacttgccttggataattgatataactataattttgttctctagcttgggctttcactaagttaactggcatataaatttcattgaagatttataatattatttgtaaatatatccaaatcatactaa

SEQ ID NO: 111961 - DNA, 523 bp, Homo sapiens
cagatttcaggtttttggtatacaaagatgaataagcrtgctatactccttgccctcaagcagcatacactctttgtttaaaagggaaaaaaaaaagacaatgactaatttgtacaatgtgctccagaagcacaaaagaaatcgattttcttggaaatgaagggaaggcagagaggggtaaggaaaagcttcatagagaacgtaaacttaagatgggtcttaagatacaagaagagaggtattccccatcaaaagaaaaatatataaaaatgtaaagactatttcaaaaatagacttattacctaatgaatttcaagaaaggaataatgtgagtaaaattttctaagtgaatcaaagacaaaagaatgccttgaaaattaaatctgcttttctccgtattgtagctcatagtgtattcatttgtaaattctaaattcaattcaatcgagcagatagttgttaaagacctcgtcaatgctttatatgctaggaaacgtatatacaaatgaactggaaatcacac

SEQ ID NO: 111962 - DNA, 523 bp, Homo sapiens
cagatttcaggtttttggtatacaaagatgaataagcatgctatactccttgccctcaagcagcatacactctttgtttaaaagggaaaaawaaaagacaatgactaatttgtacaatgtgctccagaagcacaaaagaaatcgattttcttggaaatgaagggaaggcagagaggggtaaggaaaagcttcatagagaacgtaaacttaagatgggtcttaagatacaagaagagaggtattccccatcaaaagaaaaatatataaaaatgtaaagactatttcaaaaatagacttattacctaatgaatttcaagaaaggaataatgtgagtaaaattttctaagtgaatcaaagacaaaagaatgccttgaaaattaaatctgcttttctccgtattgtagctcatagtgtattcatttgtaaattctaaattcaattcaatcgagcagatagttgttaaagacctcgtcaatgctttatatgctaggaaacgtatatacaaatgaactggaaatcacac

SEQ ID NO: 111963 - DNA, 462 bp, Homo sapiens
gactgaactatacactttaaaaatgttaacagggaccaggcacatggctggaattacgtggcctgtaattccagcactttgggaggccaaaatgagtggatcacttgagcccaggagtttgagaccagtctggacaacatagcaacaccccagtctctataaaataaatttttcaaaatgcatgctaagagagtaaatttatgttacggttttcaccacagtaaaaaaaaaaaaaaaatcaatgggcctaagagacgacaaatttgaaagtacattgtgtatttttaagttagagtcatatgactcagtttatgacttaaaagctatgcaacctttggtaaaactgcttgccgccttcgggcctcatttgtaaaccacatctctttcatcaagcgaaataaaggatgtacagtwtttagagaacagcggttaagagcacagactctggagtcagactctgta

SEQ ID NO: 111964 - DNA, 569 bp, Homo sapiens
ttagatacagggatagatccaaatgccatactacttgctgctaggtatccaacctcagataggccatgattgycaccaaaaggctccaatattccttctgattctcattctgtcagtccagactatgagggacacaaaactccagcaagtgacaacagtcatggcaagcactcttggaagtaatatacttcttattattctggaaatagtgctcactgggaatttctctgctttattcagtaccttggaaatcattaagtcagattatttttaacaaaggcccactataatgtaaataaagcctgaaacttctttagaggaaataaatgagtgcattggctgaaccaatttactgagcttgaaggaggatccagtaaaatgcactggggcttctcagctaaagaaaaggctcatatcaatcataatgtgtggtacaaaggaaagcatcactcagaactactacaagagcctccaaaaacaagatatggtaattccatgaacaaccaaagccaactacagtaaaagtaatgctgagtctgcaatgcacattttatccaatcaacattaca

SEQ ID NO: 111965 - DNA, 535 bp, Homo sapiens
gccttgtgcacacagcctcaaaaagaattcttttaatgtgaaatgaaggtcttggggataaaaaatgaaactgaagattctatgaatgtccatagctgttgacataacaactagcaattcctaaawccagagccactctaattgtcagctttcttttcaacccagcccagaacaggacatatatggtgaaagttctaagtagaatgctaatcgaatgttgattccttaggacaggtggcacaacctcaaaggcatagatgaggccaggttatgtggagcagcagggaatgcagggaacgggagaggacctacatcatctccaagaggcaatgccatctctggaaatgtggactttaatgtgtaatttaacaaatgtaaaaactgcactttctaaagaaggcatgcctgaggactaaatttggtccttgcaaacagtcttagataaatgattacacttttggataagcagctgaggaaagagacttagggacattacagagggatcattggaagaatccaggaggaggctgttaat

SEQ ID NO: 111966 - DNA, 580 bp, Homo sapiens
ccagggagttgagcattgtttgagaataattacaaaaacgagccacactcattttgggacaaattcagcatgtcaggtcctgcgtgctatcaggggagcctttcactcatctctaactggctcccaatcatgttctcacaacattcactttaagcattcctcctccttggacttccattgatttctcctgtctctctggccaagaatcccctagttccttatcatacctgaagcgcttcccatgagcctactccatgctagggacagaaacgtgaggaggcccagcccctgaggagctcataataccaggatggggtcatccaccaaaacaaaacaagctatgccacaatggtgtaagtgctctaacagaggtacatatacagtattatgagattaaggcataaggaaggacccacaagaggtatgccactcaggtacatacaaaacagaagtcctcatttctcaccccaaacttgttytttaccccatgttatctaatttcaaagtaaatcaagattcatggcttttgagtgctccttctctcttcatatatcctgaatctaatacattgccaagtttt

SEQ ID NO: 111967 - DNA, 562 bp, Homo sapiens
agtgactccaaacttctgcaaactgtgaaactattgtgaacttgtgtgaatgtatggaagktggcactgattagacgtttgaacttctttccttgtcctgtgttatgcatggtaatctgccatttgctgttcctagctgtatggtcacccttagaggtatgagttgtgcttatatgtatatgttcatgcctagatctgttgctcacagaatcatctgacatccccatttcgttgaatctaggcagcagggttgatggcagccagaaaagtgtgccctgggggcaagaatgtctttagggaaaaatatgttattgtctttcagatagtagttctccaaacagttgctccaacagttcctatgaaaagattgcttgagcccaggagttcaaggcagcagtgagccatggtcatgccattgcactccagcctggacaacaaagtgagaccctgtctcaagagaaaagaaaagaaaaaaatgctaggtggatcttcagtttagttcagttaattaagtattttaattattaactattaattataacattaagaatgccaggggagg

SEQ ID NO: 111968 - DNA, 630 bp, Homo sapiens
gcttacacaaaatgaactgtaatttaaatggaataaacaggacaagtgtggtggcacatgtgtcatcctagcactttgggaggccaaggcaggtggatcacttgagcccaggaattcaagaccagcctgggcaacatggcgagacctcatctytacataaaacataaaaattagctgggtgtggtggcacatacctgtagtcccagctacttgggaggctgagaactacacgagaattgcttaagcctaggaagcagagattggaaagagtcgagatcatgccactgcactcctgcctgggcgacacagcaagactctgtcttaaactaatccaagactagactacactagaccaaactaaaattaaattaaattaaattaatgctggcagtggaaaatttctcatccagcacatatacactggagacagcatggtgtggactgaatgagttctaaccctgcctctgccagaacctaaccttgggccttggataattcaaggaacccttctggccctcagttttccccactgtaaaacaggcaggcagaataaatgaccatgaagctccctgaaggccaatagggttataggagtccatatattcctgcttactgattcactgactgagt

SEQ ID NO: 111969 - DNA, 217 bp, Homo sapiens
gattgaagatattacaatcaracaataagattctttttgtagctactcaggaatgaataccttagcatagtactgcagtgtaattgattgttcaatgcctgccgttacccataggcaacacgcactaatggctttctaaaatacattttacatgcttgctggtccagctgtgctctgatgttgacactctgaacattaatataacctgaaaagcccc

SEQ ID NO: 111970 - DNA, 546 bp, Homo sapiens
ctgatctcaaagagatgttctttccacatactggccactccctctgcctggccccccagaggttctgtgaatgcactctgtcccatagaacaccaggagttgggatgaggaggacacttttaggaagcaaatcagtttttgtttttgtttttttttttagatatttgaaaactatatataatcaactgaattgaaatgtgaaacasaaaacaataaataagtcactaactttatccacttctcctggtaacccaggggagatgaaacacacccaccagctgaggggccatctggccagatgacactgcgtctggacatagacctgtctcaccactgacctcacaatggcttctgcagggtgctggaagccctcagcaccatttatgtacttctgtaatgtgtataaatcactccccaccagcttaccttttttcctcttcctattcctctggatgccctcgtaaaattttaaaagctttgcatgtcagactgcacttcccaaggctctaaaactggagactggatttgtacctgctgtttcatggt

SEQ ID NO: 111971 - DNA, 617 bp, Homo sapiens
ggcggggggctatctacttgcctggtgattgccctttcccttacaagctgtacatcctctttaccatccctccttctctccttccacagctccccttccacctctgttggtttctgcctccctttgtttcctcagtccttatacccacactctccccacggaagggcataaagaaaggtgtgaagtttccaaaggaatttctgttccctgaatagcaggtctgatgaatggaatctgaaggggctctgcagggaggagtatgatctgttgtccgagggagatttggggaaaaagaaatatttttaccagccatgaatgtggcagagaggacacatggcaccaayaggttggttaaggggcaggggaggaaagactggtgggaagtgagcagctggagggaaaagaggagcccttggtgctgtagaactgcggggagaaaggcatgaagagagcaacgcccagaacatctgagtgagaggctgccttctgatgatgctgcaaaggagagctgcttggcttcaaggcacccaggattgattgcaggaatatctggatgtgagttagttgaaaaccgagtgttaccgcaagaggtgtaaaaatccaggttcatgtttgca

SEQ ID NO: 111972 - DNA, 603 bp, Homo sapiens
ctgctgacaccttgagtttggacttcttgtctctaaacctgtgagacaacaaatttatagtattttaagccactcagtttttgtgttcttacagcagtcctaggcaattaaaaatacagcaaataatgaagatcaacacaaatacaaattaatcctattttttgtgccacacaaggcttcgtgtgcttaaaaaggacctatgtaaccttaaccacatttattttattttagtgaataccaggaaaggggctccrtacagatgtaacaaaacgtctaaaagctgcctgtaatttgaggggtggactcttggcagcaagaatgctggagagccaaatgagcaattccattcctgcccaggcttaggtaattatgaggcatatctggcagagtttgagtgtagctacttcttaagctctctgaggctactgtcgaaccttatcacatccaactccactcagctgcaaatactcagcacctggccagtaagagcctgtcctaacagtgcatggggaatctgttcctcagtaagaggtgggtctaaaggccaccttggtatccagcagtggagggagggtgggcgggcgggggagaagctggcaagca

SEQ ID NO: 111973 - DNA, 546 bp, Homo sapiens
tatctggcagagtttgagtgtagctacttcttaagctctctgaggctactgtcgaaccttatcacatccaactccactcagctgcaaatactcagcacctggccagtaagagcctgtcctaacagtgcatggggaatctgttcctcagtaagaggtgggtctaaaggccaccttggtatccagcagtggagggagggtgggcgggygggggagaagctggcaagcaactgtgtgctctagatggtgcaattttcccctgtcccctttatgtgtgctgtgtatgacacggctgctgccctggtttccactgaggttcagctgagtttggagctctcatgggatgctgggatcacttagctggggcctggaacccttcttcttccctagggttcaagcttgtgagtgcagccactgtgtgcctcctgtttactattgtacacccagagactacttgtgtctgacatacaggaactaaaatatttgtcatatgaatggacagttgtctttgctatcggcaagatcctatcctttcttgctgccagattc

SEQ ID NO: 111974 - DNA, 590 bp, Homo sapiens
gtagccagtttttcttccaacttatctcaggcctccttcattatctcttggcatggagggattcaagcctcttatatttctgctatcacaccagagctgtattttataagctgacatctacacatctatctcctgacatctgagaggatcttaacttggtaaacaatacaaccggattcattaaaagtttctaactcacagcaactccatgaaaacttcctctagttttctgatgaattttgttcctgggctcctttgtcttgagtgtttcaatctggtaaagttgttttagtctctgggaaaaaaaaaaaaagaaaagaaaacttatctacactctccagatatataggggtggctgtaatagaatcttgatcaatggactggaaatgttgaagacaatacaattgagctaatatagtgaatgaaaacaaatttgaacttgggttctgaaatcagagtcagttcaatctgagagtctaccactcactagttgcatgactattcaacaacttgagaaagcacctaagcttcaatttccrcatttgcaaaatggttggaaaacatcgccttaaatatgcagcaggaaaaaa

SEQ ID NO: 111975 - DNA, 618 bp, Homo sapiens
tcatgcttatctccacctaccaactgggaagtttagacagcttaccaatcaccccaactcagaaggtatgtgccgttggcctgatatcaccgataagagtgcacaaacaaaaacataaggtaatgtgcccaaggccctgtagctggtaattgcttatctgccttcargcctatgtgatttcctctccaccttgcagtcttcttcggtgatctaattaggctattgtcccaggcaacatgacaattggcagtcactgattcctttgctttgtcctaggtcatacataggacaaaacagaaaacaggcagatgataatttgatgaatacactcaaaaccagactctagagagcctttagatgctcttaatactcacttatgtttagtgctttatagttcacaaaccttgtcacatttcttagttgacctttatgaaaatcttgaagcagatgttcctattattctctctccacagaagaagaagccaggtcttaggaggcccaggtaagtttctgaaaggcacagtgaaggagtggaacagaaaccctcagccagatcattttactcctagagaaacgcacatccacagactctgctgccctatttaggtcaaggacagg

SEQ ID NO: 111976 - DNA, 585 bp, Homo sapiens
atacatacctcacttaacaacacacaaggaaagtattgttattttgacccccatttaacagatgctgccttagcctggcttccacctgaaagcagaacctgagccaagggcttgtgtgcagtaatttgagaaccaatggcaggcaacagaagtgatggatggaggaaagagaaaaagccagttcaagaaggcattatccactggcctccattgtagtgctcatcccctcccctttctctgaggactccccatttccatttccctctggttgaggaatcctccttggggcactaactatcttatacattcaggttgcccgtgtgtgagtgttgagtaggctcttgcaggcacactgggacagaaagcagcacacacacttaactgaggcaccgtcaagagtaaaactggtagaaacttkggcagaacagtttatactagtagtggctggaatagagaggtcaagagaatgtgaggcaatgagtgtacaaaaaggatcccacacaggtcaaacaactaagatctccagagattgtcttgcccaaagtaacacaaattgaaaaataatgtaggctcaaatctggtctt

SEQ ID NO: 111977 - DNA, 510 bp, Homo sapiens
caaaggctcatgaggttaatgagtcattctggacacatgcaacttacatcgatggagtcgcccctgttgcccttgggaccctgtaaaaccaaggaacgaaaggtgagaggcacagcagatggggaattcgaataaacaggctttggcccccagraatacacagagcaagacaaaggggcccctggataaccttgattgtttacagcctctccctctaaacctgatcttatcccttgcaaagcaaaaaagagaagattctggagcaaatgtgtttccctgggaggtcatttggcctttgaaatagtctcatgttctgaaaccaggaagctcaccaccaatccatgtaaagcccacgagtgaacctgggtctagattctgcttctcttgagaaaagagctccctttcacacgcttgatacgctgtcccctgccgaaggggcagtgagagatcattgagctgccctggctccctccgtgtctaaagcatcccagctgaattccaccccgagga

SEQ ID NO: 111978 - DNA, 582 bp, Homo sapiens
gaattctcatgaggaaacatccctgtcacatttcacaacactgataataaagaraaaatcctaacaacttacagaaagctaaaaagaaaaacaagattgcatgggtttatacaaagcatcaggaatcagaaagcctatcagacattctcatcagcagcactggaaggaaagagcccatggagcaatgcctttgaaagcctggaaagaaaatatttccaacctaaaattttacaaccaaccattaatcaaattcactgctaggtaagatgtcaaaagttattatccattatctttgctcagaagttcactaaaggctgtgttacaccaaggatgtgtaaaaccaagttgagagagaaatcaggaaaaaggaaaacaaagattctagaagacagggatcccagagaagacgcagggacagtgcatttccaatacatgagaaagaacaactgctaatgcagtgggcacaaggtcaagatcaatgagccaggcccagagcaagaggatagggaggtcccaaaagggaggcctccatgaatttagaaagcagatggatcagtgttgcatttaatgattattgaagag

SEQ ID NO: 111979 - DNA, 522 bp, Homo sapiens
tatgtgaatgaccccaagtccctcatagcaaatgatggggttggactaggtcagtatttcttaatctatgtcctggggaacacttatttaaaaaatgcaaatgagggtttcagataattttgtatgttcccataatgaaaaaaaagctattttaaataaaattaatttagacactatagattagggtttgcaaactatgacttgcaggctaaccccaggtcatacatttttttatttttgtaaatacatttttattaaaagtcagccatgtccattttttgtttattttatgttattttattttattttattttattttattttattttattttattttattttattttattttttgagacggagtttcgctcttgttgcccaggctggagtgcaatggcgtgatcttggctcactgcaacctcccacttactgrttcaagcaattatcctgcctcagtctccttagtagctgggattagaggtgcctgcaaccatgcctggctaattttttgtatttttta

SEQ ID NO: 111980 - DNA, 569 bp, Homo sapiens
tatatttgatgtgtttagactagaagtgtttggaggaggccgacactttacggtattacaaatgaacaagaaacgttcgttcttacatatgttacagatttgccgcaaactgaatggtattcgtttcacctgttgtaaaagtgccaaagacaggacatcgatgtcagtgacacttgaacaatgctcaatcttgagagatgagcaccagttacacaaggacttctttatccgagcgctggattgcatgagaaggtatctcacatgtttttcaagttttttttcttttaaggtcattttgagttgtttttattttttttttcaaaatacatattttattggaggactaaatattttagaactttactgcattttcatggcttatagcttatgacatcagagatagataattttctccacctgtrtaatgatttcatctctatctatatttcccctactcattttaggctacttttctaaacttttcacttttagaaaacgtggctgtgtacacatttgatgacatgcattattatatatgatattatatattttattagctcattggctca

SEQ ID NO: 111981 - DNA, 536 bp, Homo sapiens
ggttatagttgatatatttatatgtacatatagagagagtctcatgctaaagcagggtctctcagtctcagcactgtcaatattcggagctgaatgtttaccatggactgtacagtaaccaaactattgactttattccctgaaatgttagctgattggcctgataagtagagtatcagtactcaataagaatgaagtagaggccaggcacagtggctcatgcctgtaatcccagcactaygggaggctaaagcaggaggattgcttgagcctaggagttcgagaaaagcctgggcaacatggtgaaaccccatctctataaaaaaacacaaaaattagctgcgcatgttggtgcacacttacagtcccagctacttgggaggctgagatgggaggctcacttgagctcgagagatagaagctgcagtaggccatgatcacgccactgtactccaacctgggtgacagagaacctgtctcaaaaaaaaaaaaaaaaaaatgaaatggagaacttacttaggagataaaaagaagct

SEQ ID NO: 111982 - DNA, 605 bp, Homo sapiens
ccttgcacttacacaaatgattaactacatagagagggctcatttctcctaagtggagctgcagtattattttttagaaggaaaatatgtgggtgaaccagcacttactcaacctaactatatctaaatttcaaatatctgctatacatatattatttattcattaatgaaaaaaatagagaagatgctggcttcaaaaaacattaaaaaaaactcaaccattacaaatgagggaaaattgggaggtggtgttacatktatgtaaaactttttccccccaaaaaggaggacatagagagattaaagaatattcacaaatcatcagtgtgtctgctgttttaatttagccttacgaataagtttaaaaatttaccatcttgcacagggttttatcagtccaccttccctccaaggagataaaataaatgaaatcagcatttcttccaactcccttggcataaattattacttaccctaagcaagatgactgatgatttttaaagctctttaattatatgctaaatggattagtggctgaagggaagtccttttagagcagtgaaccgggattattccacaaatacctgtatgttgaggtgggtact

SEQ ID NO: 111983 - DNA, 594 bp, Homo sapiens
cagtaggtgctggaattgtgctctccctgttgcaggccttgggtggtaggagagctgctacagttgtggtttctcctgggcaatgagacttgcaactggggccagcttggagacctggaactgatctgtgtgtgtcattgctggctgccccrgcctgctcctctgagattgtggtgcagtggggccctgtctgctccacacccaggcagatctctaggcattcagaacccctgcttgcctggttcagcagcctgagcctcccccctcttcttggacatagattgtggtgcagtgagtcccccttcactctacccccaggcagaactccaggcatttggagcacctgcttgcctaagccagcatcctgagctgccccacccttcctgggcatagattgagatatagcaggccctctccactctatgtgcagctagatctccaggcattcaaagcaactgcttgcccagattggtagcctgagctgtcccacccttcctgtgcagagatcatggggaagcagggccctctacactccattcccaggccaatctccaggcatttggagcatacacttatctgaatcagcagcctaaa

SEQ ID NO: 111984 - DNA, 635 bp, Homo sapiens
ttctttctcttgattgattgctctggctaggatttccagtactatgttgaatatgggtggtgaaggtggggatccttgtctcatcccaactttcaagggcaatgctyccagcttttgcccattcagtgtgatgttggctgtcagtttgtcataaatggctcttattatttcgaggtatgttccttcaatgtctactttgttgagagtctttatcatgaagtgatgttggattttattgaatgctttttccatttctagtcagatgatcacatggtttttgtttttaattctctttatgtggtgaatcacatttattgatttgcttatgttgaaccaaccttgcatcacaggaatgaagcccacttgattgtagtaaattaactttttaatatactgctggatttgattggctggtattttgttgaggacttttgtgtctattttcatcagggatattgtcctatagttttcttttttcactgtatctttaccagggtttggtatcatggtgatgctggcttcagaggatgagttagggaggagtctctccttctccattttttggaatagtttcagtagaattggtaccagctcttctttatacatctgatagaatttggctgtgaattcatctg

SEQ ID NO: 111985 - DNA, 642 bp, Homo sapiens
tagtgacaccaagtggtgataaaagagaccagtgaaaacattctccattacacatgtctagcattccctatccctcatctaaaaaccctcagaggcccaaggaaatgtcttctgcccccatggcggggcagtagcataaatacaataggagctccagtggaagcataagaacaaagccccacaacagtccccagtgtgtgatgttccccttcctgtgtccatgtgttctcattgtggggtggggggaggggggagcgatrgcattaggagatatacctaatgctaaatgacgagttaatgggtgcagcacaccaacatggcacatgtatacatatgtaacaaacctgcacgttgtgcacatgtaccctaaaacttaaagtataataataataaaattaaaaaaaaaagaaaaaagcctagagcagcattacaagggataagaaaactaaattgtctttgtaacaatagctcacagactaggtcagaacatacatacatgctagaggggccaaatgataaaaaagaaaatttaaataagattgcctactaatgagatatctaaattattggtaacacaaccaaaaattattcatcatatgaagaacaaggagaaatacaataggaatgagaaaagacaattaa

SEQ ID NO: 111986 - DNA, 578 bp, Homo sapiens
gacatgggcagagcagtgacattgtctactccagagtgatgcagaggattcgtggtatcagtgcttaggggagggagatattgtcataggcaaaggaaatcagggcaagctttcatctggtcctttaaggatacaaaagttttttattattattattattagaaagagtcttgctctattgcccaggctggagagcagtggcatgatcataactcactgcagcctcaaattttggggctcaaacgatcctatcattccagcctcccaagtagctgaactacaggcatttaccacacctagctaatttttgtattttttgtagagacagggtcttgctatgttgccacagcatacatcctgcctcaacctcccaaagcactgggattacaggagcaaacaccgagcctgacccagatataaaggttttggatattasaagtggtgaacctcttttttgttcatgatgccctttctaatattggagtttttcaccaacaaacttgaagggcttaaaaagtaaacactatttgttatttaaagcaagtttcagaaaaggaaaacataaaccttgtacagct

SEQ ID NO: 111987 - DNA, 470 bp, Homo sapiens
ccccattaatttttgtactcaccatgcacaaggccctgtgataaaaatcgcagctcccaaatcactaactgcaaaattcccaccaaaaatctcgagtagcatgttggatttcacatatatatttacatagattttacatatatattcacagtagatgctttctttacacttcatttcctttttttattattattctaytttaagttctggggtgcatgtgcagaacgtgcaggttagttacataaatatacacgtgtcatggtggtttgcaccacccatcaacccgtcatctacattaggtatttctcctaatactgtccctctcccagcccccaaccccccaacaggccccggtgtgtgatgtcccccaacaatgtccatgtgttctcattgttcaactcccacttacaagtgagaacatgcggtgtttggttttctgttcttctgtcagtttgctaagaatgatggtt

SEQ ID NO: 111988 - DNA, 470 bp, Homo sapiens
ccccattaatttttgtactcaccatgcacaaggccctgtgataaaaatcgcagctcccaaatcactaactgcaaaattcccaccaaaaatctcgagtagcatgttggatttcacatatatatttacatagattttacatatatattcacagtagatgctttctttacacttcatttcctttttttattattattctactttaagttctggggtgcatgtgcagaacgtgcaggttagttacataaatatacacgtgtcatggtggtttgcaccacccatcaacccgtcatctacattaggtatttctcctaatactgtccctctcccagcccccaaccccccaacaggccccggtgtgtgatgtcccccaacaatgtccatgtgttctcattgttcaactcccacttacaagtgagaacatgcrgtgtttggttttctgttcttctgtcagtttgctaagaatgatggtt

SEQ ID NO: 111989 - DNA, 560 bp, Homo sapiens
tttagtgcatcaagattctcagagtaaattttatctgttcccatcactctgcatatgtaattaatgactgcaaaaccttttgaacaaaaaagaagcaatacctattaatgttaattaaacaatgtatagatttgaaatgttatctttcaaagctttcaatccaatgctaaatgatgccaagggtcttccaaagcaattaggggaaagaaacagatcaagttaaccttcatcatcttcactaattaatatttattgggtgcycagacatcttgcttggctttgaaatagaaaatgaatctggaattttatgatagttgatgaaatacttatgagttcagtgacaaggtagaaaagggaataaatgtactgcttgagcatgctatgaattatttgaagatttttggaatttagtgagctgatctcattagcagggtactgagaatccctaatgggttatgtttctgaaatatcaatttatttctttatgaagaaattacagttgaactgtggcaagatttttggcaagtatttgaatgttagcagctacccttctctccagt

SEQ ID NO: 111990 - DNA, 549 bp, Homo sapiens
tcagtcaaagcatgataatcaatgctgcttgccttattctctttcctctggcaggagttttctggcaggagttctcaaattgtacgccactatattttgctcagtatgaaactgagcgcttagcttcccttgaacagaattacacatccatttacttgccatagcttcataatggataacatacatctttctccccccatcaccttgattttggggatgggccatatgccttgctttggccagtggatgaagtcagctttgagatgagcagatgcttgaaatgtgctttgtgattagatttgcttctcttgcattctggtgatctgccacatgaagaatatgttccctttttctgggacctaaaatatgacatcggagcagacctacaacccacagtctggagcagtgcccggctgacctgaagcaggaggaagagctgctcmgccaagctcgctcgggctacattagtcaaactgcagcttccctgccatcccagaagcatgtgtataaatgcttgtaattgtaaattgctgagtttggggaagtatt

SEQ ID NO: 111991 - DNA, 588 bp, Homo sapiens
tactcctttcttttggctaatttctccctttggcaatgggaatgtttatccaatgcctgaaccatcattgtatcttggaagtaaacaacttgttttgattttacaggatcagatgtggaggaatatgagtctcagatgagatttaagactttgaacttgaagctggaatgagttagggctttggaggattgttgggaagagatgattgtgttttgcaatgtgagaaacacgtgagatttggcagccagaggcagaatatatggtttagatatttgtcccctcraaatttcatattaaaatttaatctctagtattggaagtggggcctggtgtgaagcgtttggatcatggaagtggatccttcatgaatggtttaacatcatccctttggtgatgagtgagttcttactctgagttcgtgctagatctggttgtttaaaactatgcggcacctcctatcccacctctctttctccttcttgcatgatgtgatgttccttctttcccttcaccttccaccatgattataagcttccttaggcctcaccagaagcagatgctatcatcacacttcctgtacaccttaca

SEQ ID NO: 111992 - DNA, 610 bp, Homo sapiens
aactattccaatacgtagtggcataaaatagacattttgttatgctcatggattctgtagtttagatatttaaacacagcacaacagggaaaactttttcttgctccacaatgtctggggctttggccagtaagacttgaaggctgaaggtgactctactgctttgggctgaaatcatttggaactttcttcattcacatgcctgatagttgggaagattgctggctaagccctcaaattgagatgttggctgtaacttctgcacatgatctccccatgtgtttttttctcatgggatagttgggcttccttgaatgtggtgcctggattccaagagtgaggtcttaggagagcaagatgggaatatatgttatttttgcaacccagtttggaagtcacakaatgtcatttctattgtactctgtcagagaaattacaaagatctgtgtaggtgcttggactgccaagggcacattataagaaaagcatataggatggaagtattgtgactatctttggaaaatataatctgcatagaaatcatttaattgaaaactgttcaaaaattaaagaggaaaactgaaagtccaatatggttgaaaacattata

SEQ ID NO: 111993 - DNA, 531 bp, Homo sapiens
aaaacgcaatcatacgttcttaatagtcccctaaagtcttaactcattccaacattaactgagatctcccaactcctaagttctatctgagactcaagccaagtttctttcacctataagcctgtaaaatcaaacacaggttattaacttccaagatacaatggtgttataggcattgggtaaacattcctgttccaaaagggagaaattggctaaaagaaaggggctasaggcctcacacaaaactgaaacacagcagtcactaaacattaaagctccaaaataatcttctttaactctatgtcccacgtccagggcaactgataagagaagtgggttccaaagacctttggcaactccacccctgtggctttgcagggttcagcacccaaggctactctcacagctgtagttgagtgtccgcagcttttccaggctcagggcacaggctgctggtggatctaccattctgggatctggagggcagtggcccaattcccacagctccactagaaagtgccctattgggga

SEQ ID NO: 111994 - DNA, 531 bp, Homo sapiens
aaaacgcaatcatacgttcttaatagtcccctaaagtcttaactcattccaacattaactgagatctcccaactcctaagttctatctgagactcaagccaagtttctttcacctataagcctgtaaaatcaaacacaggttattaacttccaagatacaatggtgttataggcattgggtaaacattcctgttccaaaagggagaaattggctaaaagaaaggggctacaggcctcacacaaaactgaaacacagcagtcactaaacattaaagctccaaaataatcttctttaactctatgtcccacgtccagggcaactgataagagaagtgggttccaaagacstttggcaactccacccctgtggctttgcagggttcagcacccaaggctactctcacagctgtagttgagtgtccgcagcttttccaggctcagggcacaggctgctggtggatctaccattctgggatctggagggcagtggcccaattcccacagctccactagaaagtgccctattgggga

SEQ ID NO: 111995 - DNA, 596 bp, Homo sapiens
ctgattttatctttatagcaatactccactccttggtaccaattttctgtattggtctatttttgtatcactgtaggaaaatatctgaggctgggtaatttacaaagaaaagatgtttaattggctcatagttccacaggctgtgaaggaagcataatgctggccatctgcttctggggaggcctcaggaaactttaatcatggcagaaggtgaggggagaagcaggcatgtcatttggcaaaagtggaagtggggtggggaagtaccacacttttaagcaaccagatcttggatgaactcatagtttgaactcattaccatgaaragggcaccaaaccattcatgaggaacctgcccctatgacccaaatgtctcccattaggtctgacctccaacattagggatcacatttcaacatgagatttggaggggacaaaaatccaaaccatatcaccagtggtgacagcagaatatgtaaagaaagtgacatagagctcaagaatcaggaactgagctgatagctagggtacaaaggtgttcccagactaaggtccaaccatttggaatgttttactccttattcatcaatgagtac

SEQ ID NO: 111996 - DNA, 588 bp, Homo sapiens
tctcagtcatttatggtcagtttcatgtgctgtttgttactcctttgtgtagattccacccactaataatttctatggctgttgctacagtaaagtcatctctttaaggggattcttaatgtgtgagcacgggtgcatcactttatgcagacagtggtgattattattttggttgggcagtgagctaaacctggaacaaaaatgtcttttataggagagcctttctgtcaagcagaaatccctttgacgagatgaaggagctaatctattcgtctcagctcacccctgcaccgccccccctcccccccagccccaaggccatgggcaytgaatttaccagccgtgcaaccttggccaggatccttctacctctcagtgttgtccctattgcagtggaggggatgtaacctacctcacaggcttgtgttgaggattacataggtaacatacgtgagcttccagcagaggtgcagtaaatgctgctttctcccttatggcctctccggcttttaacatttatttttatagaggtatgctaacttaaagcaagacatgttttatagattgaattatttacatcttggctat

SEQ ID NO: 111997 - DNA, 583 bp, Homo sapiens
gttgctgacctaaggaactttgaaaatgaggaaactctataataagtgtaaagaaactgaatataagcactctattctagtagataaacatgtttccaacaaggktacagctttacatttctgatactgctatgcatgtgtcctgaaattgtgcagctaagtaatcaaatggcatatggttggatggggttcctcactttgcagtgagtggttatagacagtcaaggaaggaaggctagaaaggtccatgtggtagcataattgggtagagagaccagtgtgttctcacttttaatgtaatcaaattacagaaggttagatacatagtttactaggccagtcagttgagaggtcctacaagtacttataccacgttaacaatgcacatacccagtattacaattttttaaatactattctttaacatcagaaacaagcagtctttagaaaaatggctgattctatgtacgaaaaagataatatagaaaatgagtttagaatttattataatagcaggaaacagggaagtgttcaaaaacaaaagcatgaggtgagctgtaaggatgcaggatccaaactaaat

SEQ ID NO: 111998 - DNA, 574 bp, Homo sapiens
ggtgacagatattgatttaataatttcacaatgtatacatatcggaaaacatcactttgtacccacatatgtatacaattattatttgtcgattaaaaataaactaaaaaggaaaaactaatatatctgaagaacacaaatgcaaaattcctcaacaaaatgttagcaaacagaattcaatagtatataaagagaattataaccataacaaaacagaatttattcaaatattcaaaaatgactgaacacacaaaccaatcaatgtaatttaccatttcaacaggctaaaaaaaaaagaaaaawtatgtgattatatcaatagatgcagcaaaaccttttggcaaaaattcatcaattcattgaccaaacaaacaaaaatatctcataaactaggaataaatgggagctttctcaacttgataaagtacactcataaaacctaaagctaacatcatacataatggtcagaggctgaatgttatatctttaaaatagggaaaggcaattataacttctgttgccacacttttgaacatctcactggaaattctacctaattcaataagacaaaaaa

SEQ ID NO: 111999 - DNA, 536 bp, Homo sapiens
gaattcatttacacaaatatgggaagaaaaggagctcctggtgaaaygagaggagaggtttgcagggccctgaggaagaggcaggggatgccacccaagggtcagggacctggagacgctgcaggccctgtggagggaggggcagctggagtcaaccagagaggacaccaagggggcagtgggcacaaggagtgagagaagagggaggtgaggcaagagtccccccactcttaggggttgggggaaaaaaggtaaatatgtgagtatatataaaagacaatattttcctcgtaatttttttaaaggtacattcatactgaagcaaacaacaatactatatatattgtgatgtctatagcatagatgtaatatgtacacttgccacagcaaggaccgggaaggcacctggttgcaagacagtgaccagcttcttacactgcacaaggcggggtacagtattaactctaagcagactgtggaaagttcagtatctacagtgtcatctccagaccagccactaaaatcatgcaacaaag

SEQ ID NO: 112000 - DNA, 522 bp, Homo sapiens
tgaaatgagaggagaggtttgcagggccctgaggaagaggcaggggatgccacccaagggtcagggacctggagacgctgcaggccctgtggagggaggggcagctggagtcaaccagagaggacaccaagggggcagtgggcacaaggagtgagagaagagggaggtgaggcaagagtccccccactcttaggggttgggggaaaaaaggtaaatatgtgagtatatataaaagacaatattttcctcgtaatttttttaaaggtacattcatactgaagcaaacaacaatactatatatattgtgatgtctatagcatagatgtaatatgtacacttgccacagcaaggaccgggaaggcacctggttgcaagacagtgaccagcttcttacactgcacaaggyggggtacagtattaactctaagcagactgtggaaagttcagtatctacagtgtcatctccagaccagccactaaaatcatgcaacaaaggaagccaacagataaaaaatggaattc

SEQ ID NO: 112001 - DNA, 599 bp, Homo sapiens
gggatatgaaattattggttaaaatttattttctttaaggatgctgaaaataagctaccaatctcttctgacttgtaagctacctgctgagaggtctgctgctagcctgatgaagttccttgtatgtgactttaccctgcctttaagacttttttctttagtgttgaccttgatgaatattgtactatgtgccttggaggtagtcatttcatgtcatatctatctggggttctgcgtgtttcttggatttgtatgtaaatctccctaaagagataagaggaattttcatgaactgtatcttcaaatatattttccaagttgcgtattctctctcctctctcaggaatgacaatgagtcatagattttttcgctttacaaaatcccatattcttggaggtktcacttttttttcccatttttttccttatttttgtctgagttgacttaaagaacaagtcttcaagttttgagattatttcctcagcttggtctattctgctgctaatactactgattatttgataaaattctgatagtgagtttttcagctctagaatttaagtttggttatttctgaaaatggctactttatcattca

SEQ ID NO: 112002 - DNA, 599 bp, Homo sapiens
gggatatgaaattattggttaaaatttattttctttaaggatgctgaaaataagctaccaatctcttctgacttgtaagctacctgctgagaggtctgctgctagcctgatgaagttccttgtatgtgactttaccctgcctttaagacttttttctttagtgttgaccttgatgaatattgtactatgtgccttggaggtagtcatttcatgtcatatctatctggggttctgcgtgtttcttggatttgtatgtaaatctccctaaagagataagaggaattttcatgaactgtatcttcaaatatattttccaagttgcgtattctctctcctctctcaggaatgacaatgagtcatagattttttcgctttacaaaatcccatattcttggaggtgtcacttttttttcccatttttttccttatttttgtctgagttgacttaaagaacragtcttcaagttttgagattatttcctcagcttggtctattctgctgctaatactactgattatttgataaaattctgatagtgagtttttcagctctagaatttaagtttggttatttctgaaaatggctactttatcattca

SEQ ID NO: 112003 - DNA, 647 bp, Homo sapiens
aataaaagagatttatttcctggagttctggaggctgggaagatcgaaaaggttgtatctggtaagggcctgcttgctgtgttataacatggcagaaggcatcacatggcaagagagcacacaagacgaggaaagaaaattgagtgaaactcattctttctatcaggagtccactcccatgataactagttcactttgcattaattcattcacaaaggcaaagccttcatggcataatcacctcttaatggtgccagctcttaatactattacaatggcaattaaatttcaacatgagttttaaaggggacattcatatcatagcatttgtgtaccttagtgattttatyctgtcactaaagagaggtaagctttagcctgaaaatgctggatctttttctctttggtattctcttacccagaagtgttagcttcctggaaatggtaagggatggaaatattaaagccatttcaaaactatgatttttgctgagacaactgccagttaagattcatagatatagatatagatattatgcctatgagaaaatacctagttagttgacctaaataactaagattcactaattaagtataaaaacaataaacaaaatcaaacaattagtagctttaataaatgtgtacat

SEQ ID NO: 112004 - DNA, 517 bp, Homo sapiens
aaaaatcgaccaagcaaatggaaaacagaaaagagcaacttgcttcctgaaaattcacggtaagttaaccaaagcctactgccccttcttcagaggtcattaatcttatttgttttatatgcaattactttgtatgttgccatcccgcagcttccccttcctcactcagttttcttagtcagggttaagcatccacattcaaatgtactgggaagcacatgcaagaatatgctgtgttcagggacagcttcctatggggaggaggatgtttatcttcatagcagatgatagttggggcttccaccctgtttatctatatttgtactaatgtctgaagacaccttaaattatttttcttcatgtgyttctttaaacaattgtttaatcatttaaatttaaaaaaatttttaaaaatatgtaattaaaagcaacagaaagaatgaaaatcatgtattatttttatatagttaaacataaatacatttttatctagttaacttagaaaacaaattgcctg

SEQ ID NO: 112005 - DNA, 630 bp, Homo sapiens
tcccctcccttctctaatctaagaattattttattaattagatgttcttattttttgcctctgytctactgtaatatggagagtatggttttatcatgcaatgttttcagaggggtaagtcatttcaaattggttcctaaggacaaaaaaaagccaccttaatttggaaaccatgagtgcctttctctcaccagtataatgccattagacatttcctctgggtctatcaatttagggctttaactattgcatccttcattatgtcacccacctaaactttgaatacaacctcagtggaacaatagcaactgtgtttacatataggcatgatctaagttttatgatgtttcttggaaaactagcatcactattctctgtgcatgtgctatgaagggcataccaaggaagtaaaagttcccaaggcgtatatcaatttttgtttaactgccaagctactgtatttcattaaaagaaatctttaccttttaatgaatttcccaagctgcttcttccaatggtatgtaccgttgctcaactaaataaagcagctttggaattttcaaaacctctttttggctgctcaagatacttgtattccctgggatgtgtactccaaatggattaaacaga

SEQ ID NO: 112006 - DNA, 537 bp, Homo sapiens
ctttgttctacccacctcattttaactagagctcacccccattagccctgtgcacacacattctttatagcagcagcatgtcctggcacttcacattctctgaaatgatcttgaggtttgttgtttacttctttatgtctttgctcctgggagctgtgtctagtttaccactatgttcctagtgccartcacagtgcttggtccatggcaggtgctcaaagagtagtttttttgtttttgtttttgacagagtcttgctccatcacgcagctggagtgcagtggcacgatcttggctcactgcaacctccacctcccgggttcaagcaattcttctgcctcagcctcccaagtagctgagactacaggcatgtgccaccacacccagctaatttttgtatttttagtagagacagggtttcaccatgttggccaggatgatcttgatctcttgaccttgtgatccacctgcctcagcctcccaaagtgctaggattataggcatgtgccaccgtgtccggccaagagtagttttttt

SEQ ID NO: 112007 - DNA, 537 bp, Homo sapiens
ctttgttctacccacctcattttaactagagctcacccccattagccctgtgcacacacattctttatagcagcagcatgtcctggcacttcacattctctgaaatgatcttgaggtttgttgtttacttctttatgtctttgctcctgggagctgtgtctagtttaccactatgttcctagtgccagtcacagtgcttggtccatggcaggtgctcaaagagtagtttttttgtttttgtttttgacagagtcttgctccatcacgcagctggagtgcagtggcacgatcttggctcactgcaacctccacctcccgggttcaagcaattcttctgcctcagcctcccaagtagctgagactacaggcatgtgccaccacacccagctaatttttgtatttttagtagagacagggtttcaccatgttggccaggatgatcttgatctcttgaccttgtgatccacctgcctcagcctcccaaagtgctaggattataggcatgtgccaccrtgtccggccaagagtagttttttt

SEQ ID NO: 112008 - DNA, 561 bp, Homo sapiens
catcttctcccaaaacttattccttctcaattccgcttcttggtgaattgcatccagtcactcatgccagaagcataggaagcacaggtttagaaagtttaggataggcaggtatgggaaccatgcaggtcttcatttacgccaaagtttcattattctttacttaatttctttgatcttcagtgtcctcatctataaaaatgaaaatgataatatccacctgaagaagctcttgtaaggatgcagttcagaagtccccaaaccactctgacattagacagttggcgagaactcacagaactcagaaatgccgttatgctctcgattacagtttcttacagccaaagagtaaagactcaaatcacaaaaggaagaggcgcatagggcagagtcagtagagaccaggcacagagcttccagctgtcttctcccagtggatcacatggacagcagtaacttctcctagcaayagtgtggcacaaatgcatggagtattggcaaccagggaagctcatctgagccttagtattcagagtttttaataagggtcagtcacataca

SEQ ID NO: 112009 - DNA, 571 bp, Homo sapiens
atatggagatacaattgatttttgtttgttttatatccattgattctcacaaattcacttattagttcttactgtttatctgtaaagtcctttgggttatctatgtacaaataatgttctcatataatgacagcttttaaagccatcttttatcatgttaaacaagttattttctgcttccagtttgctgaaaatatcataaattggttttaaatatcgctaaggctttgtaatatcaattgagattattatttgatccttttcttcatttttctgttaatgtgatacattatatttactgaaaattttaaaggctggaaattgcttactttgattttgggtaagtcaaacattcccctacccaacattgcaagttattaattaccttttcacctgctatttttctccatggataayagaaaaataaccattcatttaaacacaattaatatgatgacagaactaagatgcaatgggaataacaggtttcaaaatcatttgtgtactagctgtgtgttactgttatcctccattcatgagaataataaaatctgctccgtctgcctaacat

SEQ ID NO: 112010 - DNA, 571 bp, Homo sapiens
atatggagatacaattgatttttgtttgttttatatccattgattctcacaaattcacttattagttcttactgtttatctgtaaagtcctttgggttatctatgtacaaataatgttctcatataatgacagcttttaaagccatcttttatcatgttaaacaagttattttctgcttccagtttgctgaaaatatcataaattggttttaaatatcgctaaggctttgtaatatcaattgagattattatttgatccttttcttcatttttctgttaatgtgatacattatatttactgaaaattttaaaggctggaaattgcttactttgattttgggtaagtcaaacattcccctacccaacattgcaagttattaattaccttttcacctgctatttttctccatggataacagaaaaataaccattcatttaaayacaattaatatgatgacagaactaagatgcaatgggaataacaggtttcaaaatcatttgtgtactagctgtgtgttactgttatcctccattcatgagaataataaaatctgctccgtctgcctaacat

SEQ ID NO: 112011 - DNA, 571 bp, Homo sapiens
aagtgtgatatagcccaggagaatctgctggtccttcttgcagcacagcaattcccttttcttctggctaacaaacaccaattttattttgcttcaggggataagaggcatgagaaccatagcaccacacctaccatggaagtctcaagctctttgctagtgattggttaggcatgggcatgtgatctagttctggccaatgagatgcaaaagaaagtacctggagatcaggaaatattctcccagatgatgaaagagcactgatgagaaagccccttttctgtctcttctttccctccctcccctggacactgtggtgtagggatatgatgcttggggctgctacagccctcctaggactacaaagggaaggcctagagaactatattaaccttgtgcagtattacttttctccagacttattattatataaactgctaaaatatctttattgctaaagcrcctgctgatcaggtgttcagtggcgtgtggcccaaagcatccaaagagatatacctcaagaggcctcagttcttgcctttctctaatggtgtgtacactttcatgggcc

SEQ ID NO: 112012 - DNA, 607 bp, Homo sapiens
gatagcaatgtaaattggtacagtcactgatagcagtaggaggcagatcaacttctagacagacagggacaggtccccagtgatacccgactttcaagtcaataacagcttaaagcctgaaaactgagctgccagttctgggtagagtccctgaccagagttagaacctccttgaagccttttagccaatcaaatggtgctttttccttgtgagaaaatattttaaatggtctattttcaagtcttgataaatctaagcactggcagccagaccgtggatgtaacaaactgcacagctcatgctcctagaaagtcaagataagcaaacagaatgcagaagaggggtcagcttataaaaggggagaaagctttgttactgggaaattgaaatttaagggaggaagggaactggggtataaccttataagggggataatgaaacttagggaacatccaggaagattataacctcatagtagtcgaccaataaggaactgggcagaggactaacatgctaggagaaaaattacatgctgtagctgcccsgtgtgtgcctgcctaccagacacacaatcatgcaaaacagctatttaaagtctcactttca

SEQ ID NO: 112013 - DNA, 578 bp, Homo sapiens
actcaaactgaagatggaagatgggaaatgggtacttcctgatgggagagaaatgataagtaaatccctgatgagagaattaatgtccatattacaaaagggaatcattggggaccccaggctctgtgtgatgcaatacttaggaattatgggtgtatagggatttatactctcactaaamaagtatgtggaagttgtgtaacttgtcaatggataaataaaagtgattagaaaacaggtcatgggaggaggacctccagggctacgacaattttaaaacattcaagtagatttcacagaaatgcccacagtaggaggactaacatatttactggtgattgtaggacacctttctggctggttggaagcctttcatcttccaacagccactgctgggaatgtggtcaaaataatattaggaccaattatacctagatttggcctggaggaaaattttgattcagataaagagaaccactttacctcaacggtgttaaggggaattatggaagatttacaaattagatgggattatcataccctttgtcatcccccttcctctggaaaggtagaaagaa

SEQ ID NO: 112014 - DNA, 549 bp, Homo sapiens
gcagacatccctccccacgcgaagctggatcatcccagatcaacttcagccggctgtgctggcagtgagaattttaagccagtggttcttagcttaatgggttccatgtgagtgggacccatggagtgagatcacttggctccctctcttcagccwttttctcaggggagttaacagttctgtcttgctgggttctaagcaccactggggtacaaaaaaatactcttgcagctagctcagtgtctgcccaaacagctgcccagttttgtgcttgaaacccagggccctggtggtataggcacatgagggaatctcctgatttgaagattacaaaatgcatgtgaaaagcgtagtaacccggctggttagcacagtccctcatggcttacctaggctcagggagggaggtccctcactccttgcacttctggggtaaagtgacgccccaccctgcttctgctcaccctctgtgggtggaaccagtgcctaaccagtcccagggagatgaactgggtacctcagctgggaatgcagaaatcagctccttct

SEQ ID NO: 112015 - DNA, 567 bp, Homo sapiens
cttctcattgcacaacaagtgagatattctcactaaatatatgttctaaatatatgctctgctagagctagcccataagacactcttgggaaatggagaaatgagaagtttccatggaagaaaaccaaacaagaagcacttactggttttcccacagctctggcagatttcacggatgattctttttttcacatccacattctttaatttatcaaagtcttgaaaagtgattattttttcagaattgcctgttattggcaggagatgttccttataaacatctcctatgcccaaaaccaggacacaaattccaaggtccttcagggtttttactgcatctgccacatcatagcgaggatctccagatgtsataacaaccaaagtttgggggacaccagcatttcttctcccaccagcatgtagattaaacatattgctcacttttttaagggcaaagtcaattcttggaaatccaccgctcttggagacattctgaatttgagtcttccactgggttttagtcagagagtttttcaactcaataatactctggtagttgcttccaaa

SEQ ID NO: 112016 - DNA, 553 bp, Homo sapiens
tggactgaacttggactattccaatcacatacataaaatggattcctcttatattatctggtggtattcacatttaatcttgcaggggacttggctaactaattttttatctctcttctctattacctcagacttcttcctgggatatatgaaataaagacagaaaatggtgatctgtttgatgaatttgattcccaggcacaacatctccttgtattagggaacaatcatagtartggttctgagacagctactgatttgatgcagaagttatatctgctcttttcaactgagaaactggcaatgaaagacaaggaaaaagcacatttagaagaaatttcagctctagtggttgataaacagcaagaaaaagaaggtaatcgtgagtaccatagagctgaagaccctcaagtacctttgtttggattttcccctggtggaagatgagcagttagaattcactgggagaggtagagatgacaggatgaggataaaagaggggcttatcgtctaaggatccaagggagataaaacttcagaaaggcaaaaaata

SEQ ID NO: 112017 - DNA, 553 bp, Homo sapiens
tggactgaacttggactattccaatcacatacataaaatggattcctcttatattatctggtggtattcacatttaatcttgcaggggacttggctaactaattttttatctctcttctctattacctcagacttcttcctgggatatatgaaataaagacagaaaatggtgatctgtttgatgaatttgattcccaggcacaacatctccttgtattagggaacaatcatagtagtggttctgagacagctactgatttgatgcagaagttatatctgctcttttcaactgagaaactggcaatgaaagacaaggaaaaagcacatttagaagaaatttcagctctagtggttgataaacagcaagaaaaagaaggtaatcrtgagtaccatagagctgaagaccctcaagtacctttgtttggattttcccctggtggaagatgagcagttagaattcactgggagaggtagagatgacaggatgaggataaaagaggggcttatcgtctaaggatccaagggagataaaacttcagaaaggcaaaaaata

SEQ ID NO: 112018 - DNA, 607 bp, Homo sapiens
tgttcagtagcgagtgaattaagtaattaatatttaaatgagtatataatctttcaatataagaggcactaggtatatgtcatatagcatctctgtaccgctgcctgaccactagcaaggaaatccaggaggctccctggaggtagcctactagaataattcagaaattcttttcacagttaatgatctaagctgtatgggagaaaggcaggcatttttctcatattcttcacttttaagatgaaaacacaagcctattgtttcttcccaaggaggaggagaaagtttatcatatacagagcrtgagttaaattatataaaaatatgttcagaaaaaaaatgtccagagatttgcccttttcctctccccttcattctccattactatttctgggaatgacatgttcttaactagagctggaaaggaagggatcattaggattaaagaggagaaaaggcagagagagagagagagagagagagaaggagacaaggtacaagggtagtaagaggtgtggaatattttctagttgatttcctactgccttgtgccccaatggggtaatattgaatccctctctcttctaactgaatatctcactgcaca

SEQ ID NO: 112019 - DNA, 619 bp, Homo sapiens
gaagcaggtgttttaaaaaggaggacatgaataaaatcaattaagctgagatctaaaaggtattcattgtagcaggctgctaaggtagtttgtggcccaatcatgaaagactttgtttaataaacatttttttttcttttagacaaggccttgctctgttgcccaggctggagtgcagtgccacaattacagctcactgcagcctcaaactcctgggcttaagcaatcctctcacctcagcctccaaaaatgcttggattacatgtgggatccaccacaactggacaataaactttagttactagctagtagtggagcatcaaatcatttgaagtggggaggggcaagatcataaaatcaaatttatatatttgtaattatctctgaaacctctctctctctctctttckctctttctctctctctctgtctctctgtctctctctctctctctctctctgtgtgtgtgtgtgtgtgtgtgtgtgtgtgttggggagggggaaagatttttggagttgagatcagctagaaatacataatctgctctaacacagtcattgtaggattggaaagtaaagcacatagatgatacaatattaacaaaaaataattatagcta

SEQ ID NO: 112020 - DNA, 619 bp, Homo sapiens
gaagcaggtgttttaaaaaggaggacatgaataaaatcaattaagctgagatctaaaaggtattcattgtagcaggctgctaaggtagtttgtggcccaatcatgaaagactttgtttaataaacatttttttttcttttagacaaggccttgctctgttgcccaggctggagtgcagtgccacaattacagctcactgcagcctcaaactcctgggcttaagcaatcctctcacctcagcctccaaaaatgcttggattacatgtgggatccaccacaactggacaataaactttagttactagctagtagtggagcatcaaatcatttgaagtggggaggggcaagatcataaaatcaaatttatatatttgtaattatctctgaaacctctctctctctctctttcgctctttctctctctctctgtctctctgtctctctctctctctctctctctstgtgtgtgtgtgtgtgtgtgtgtgtgtgttggggagggggaaagatttttggagttgagatcagctagaaatacataatctgctctaacacagtcattgtaggattggaaagtaaagcacatagatgatacaatattaacaaaaaataattatagcta

SEQ ID NO: 112021 - DNA, 349 bp, Homo sapiens
attcagtgacctcccaccgggtcctcctcattacctgtggggatgtgccctccatcctgattgtaagtttcctgtggtctccccagccatgcagaactgtgagtcaattaaacctcttttctttacagattacctagtcttgggtattaattatgggattaaaatttaagatgagaattgggtggggacacaaagctaaaccatgtcattagataatcatgttaatccaragcttgtgttttgcctgatggttgaagaataagagagagggactaagtagtttaggctattggcaatagcattattgaaatagggaaatgttagactctcagcaggataaggagaaagt

SEQ ID NO: 112022 - DNA, 544 bp, Homo sapiens
tgtcatgcactttttgtttaaacaagtttgagtaaggtatcttcatcaataaaattttgatgtaggatttggtaacatttacttcaaccagtttgctctgccttttgacacaaatcagccatatctttattgctaaatagatacrtacactcataacttgaacgtgcactgtgttactcatcattaatttattttccattggaatatgagacatagtgatacaatgaacatgaaatcttttgtctagactcagtggatagcatgaaaaagtttaagacactaataagaagttatttcaaagtacataatggggtattgatacaaatctaatgttgatcctaaagtgaaatctatatcagctaatggaagaaaaacaaatgaatgtaagatttgtcttgagtaaaattgttaacgtaggaaatgctggttatgttttgtctttgtcttctccatccttgccagttcttaatcccatgctaccaaaagactggactctgtgcctttggcagcctcctcctccccactagccctagagctagtggtc

SEQ ID NO: 112023 - DNA, 544 bp, Homo sapiens
tgtcatgcactttttgtttaaacaagtttgagtaaggtatcttcatcaataaaattttgatgtaggatttggtaacatttacttcaaccagtttgctctgccttttgacacaaatcagccatatctttattgctaaatagatacatacactcataacttgaacgtgcactgtgttactcatcattaatttattttccattggaatatgagacatagtgatacaatgaacatgaaatcttttgtctagactcagtggatagcatgaaaaagtttaagacactaataagaagttatttcaaagtacataatggggtattgatacaaatctaatgttgatcctaaagtgaaatctatatcagctaatggaagaaaaacaaatgaatgtaagatttgtcttgagtaaaattgttaacgtaggaaatgctggttatgttttgtctttgtcttctccatccttgccagttcttamtcccatgctaccaaaagactggactctgtgcctttggcagcctcctcctccccactagccctagagctagtggtc

SEQ ID NO: 112024 - DNA, 591 bp, Homo sapiens
tccaccagcctagctcaaatgtatgaagtgttcctatttggaaacataacttggttgacacattgaatccctcttctaacacgttactcaaaatcatgtgtgaattacatrtgtaaagcatagatgacttggcttaagaatttaaatgccatcttcttcttcttctttttttgctgcagtttgctagctgtggaaatgacactagctatgacatagtatatgctgacttaaggctactttatagcaaatgttttgaggatctacatcccactgtaatacagacacaatcatgtcttttactaaattttaaacagtaataggaagagtttgttggataatgaaatacatacggatgaatccaagcaaagaggtgttagacaaagtgtcagatgaacaaaacaaactggaagattttcattcttggctaaaagtcttcagaaaataacaaattgtaagaaagttattagtgatatttatatttttttcattcaaattacctaattgagggtctgaaaatatgacctctctatattcccatgtaaaaaaaaaatatttgttctattcagtattttaatcagactgtttatcagt

SEQ ID NO: 112025 - DNA, 590 bp, Homo sapiens
tgcttcggctcaccctctgtgggctgcacccactgtctaaccagtcccaatgagatgagccaggcacctcagttggaaatgcagaaatcacttgccttctgtgttcgtctcactgggagctgcagatgggagctgttcctatttggccatcttgcccgggaataaaaattgtttcatttcttaaagaaaaatggactttgacaatctctataataatgtaaaggaatgtatcttttatttctccatttcctcatattgatgwgattgtcatattaaataaaataggatagcaaagtttggccctatcactttaattaatgtctataagttagaggattaatattatattcagatgtactagaaagcatctgaaggcaatatactgatagcaaatggaaaaacatcccaaagatatctgacagggtacacaaattcatttatgtagatttatggtagagcagtgagtctgtcatgtgttatcttctgagatcagacatccttgtttatcacagtgtgatattttgaaatattatcaattcattattgctacaagaactgtaatatggataggtgcatatgatcattagtga

SEQ ID NO: 112026 - DNA, 512 bp, Homo sapiens
ctagttcctgaccttactctggtcatggtctctgtgagacctgatcaaaactgagggccttttctccaggaaaaaaataacctagtgtgcgtgcacatacatacacacaaacacacatgcttgtgttctgtgtacaattcaagggggttcctagcttcccctgaaggttatccatggaccctgggttaagaatccctaggttaccattagttgcattgtattatattcctgataattgctaagagaatagattttaggtgttctcaccataaaaaagtttgcaaggtaatgcatatgttcattagcttgatttagccactccatratgtgtatataattcaaaacaacatattgtacataataaatatatataacttgtatctgtcaattaaaaattttaaaatatgactgtcatacaaaaaaaaatccctggtttagatagagagacagacatgtaaacaactgtgtggtatgaaatgtggagctgtgaaatttggagtgaagtcatgctc

SEQ ID NO: 112027 - DNA, 622 bp, Homo sapiens
gaagtggtttggccaggtcttttacaagggaaagagagtaaacaaccccttagtgggtgagacaggagagctgtggctaggaggaaatgcagccagcctgaatggaggcttttgacacatcagcttggccttaaatctctaagccactgcagagggcctgtatgcaagacagattaggagctggttagtgagtgctccctgaagcagaggtgagagccaggtgagagccatgattaagtcatgactgaagacagttaaggggacagtaaaggaattgtgaataaaatgcctcattctaccttgggttttatatttcattaaatcctattttagctgcatatcttttcgtcacatgagtggatggttactgctggagaaggttattacgcttaactattttaacgagagttttgttatgtgtatgggacagcaaattgggtagaaaagtgtgcaagaaagactccatttctctgctaacgttatgaccacagccaatgctgcaaccaaaactcagttatctaaactgakaataaagcaatgataggcaagggatgctgagggaaggagacattaattatgaaggtggcccgaacttagaaagtagatgccaccagtcaacaag

SEQ ID NO: 112028 - DNA, 378 bp, Homo sapiens
caggcaaagttccagcaagaatgaaggtgtcccaagggagggaagtgctccaggtgttcagggagcagaagatgtaggactgcggcaccgagtctgggatgggttggggagggtggcaagccctgagtaaggagcttgcattctgttctaaaagaactagatggccaggggaggggatttaagcattgtagattgattaccccacctggaatcawgttcttgactttaaccttcagtaacagatttgtagtatttttcctctgcatcttcacaccaacaccagcaggtaagatgcaccttcccaaacccacctcagtccccatgaaacaaacacatcaaggttataaccaacacccttccctttacctcccccagtca

SEQ ID NO: 112029 - DNA, 410 bp, Homo sapiens
acacacacacacaccaaaaaaaaaaaaaaaaaaaaaaaaaaaaagtttaaatagcaaggcacaccatacaccactaggagctaagactggtcaggagctgaggactactcaggaggctgaggcaraaggatcacttaagctcaggaggattttgaggctgtaggagccaagattatgccactatactccagcctgggcaacagagcaaggccccatctctaaaaaatatatatatacatatataaactgtagcagatgctgtcagtgccccacccatacaacccctcaccctgatcacacttcagtgcccactggtctgacttccacctaccagcatctgcatgtcttggcctgaccgcttcccctggccactgaacctcctctgcccacccatggggcaggctagaaag

SEQ ID NO: 112030 - DNA, 560 bp, Homo sapiens
agaatggcaaggctcctgggaagtgtcttgtttgacctcagacccaagtacaagtcttcacctaaaccatatatggtccagaaggaaagcaagtttattcttcacgtttatactaaagtatgccacctctcaattaagagtttgtcccagtgcagtgatgcataaatagcatctgaaaattcttctatttgtacctttttaaagatgagagtttgtatgcaaagacacaatttggagtaggtttctgaaggctaaatytctttttgttgcattttaattgctatggcaaagagaatgaattagatttctgatgctaggcttgacctgtaggctccagattgaaattgtaactgggaagaatattatgtaaagtaatctgagactgtttgtgtagttaggagagagtataggatccacacatgcactcagactggcctgggagttctgaaatgtgaatgtaattagaaagctgcatgccaattagttgtggcctatctaatgaaaaacttcactgacagagaattgtcaatgtgggatgacaggaatctagtgatgttaac

SEQ ID NO: 112031 - DNA, 617 bp, Homo sapiens
tagatcccctcatttatcttagttttaaaaattcttcttttactaagcaaagtggacagactaaaaatgtaaataaaatatatataactcacttgaatatatgtatataaatctttttaatgaaacaggatttcctttttttttgccttaaaaaggaaaggctaaaccacttaaatttaccttaatacaaactcccccagcctttagaggctcaacttgcatttcttcaattgaaagagaactggctgcctggcatgtggttgtctgcagatacaaggaaaacgaaatgacattatttaacaataacatttatgtattagttcattcttacagtgctataaagaaatacctgagactgagtaatttataaagaagagaggtttaattagctcacagttcttcaggctgaatagcaagcatagtggcttctgcttggcttctggagagggctcagggaacttacaatcatggtggaggcarataggaagcaggaacatcttacatgcctggagtaggaggaagggagtgaggggggaggtgatacaaacttttaaacaaacagatctcatgagaactctgtcatgagagcagcaccaaagtgatggtgctaaaccact

SEQ ID NO: 112032 - DNA, 527 bp, Homo sapiens
atccatgttatctaggatatctagctctcaaagtctccaaatatacttaatccaaaaagctcctctccaaggcctattgggattttactgtcaaaaggcaaagacaaagaaakaattttaaaaatagagaaaagccttaagtcacatataagtaaatctccattagactaacaactgtttctcagcagaaaacttgcacaccaggagaggatgggacaacatattcaaggtgctgaaaaaacctttgctggccaagaatactacccccagaaaagctattctttaaaaatgaaggctaaataaagtatttcctggacaagcaaaaacaggaaatgtatcaccactagacagatcttacaagaaatacttcagggaatcccacatctggaagtgaaaggataagaacacagatgagaatataaaactcactggtagaatggatacactaatgagcagaagaaaggtatctaacttaccactacagaaatacatccaaccaaaaggatatacaatactagaggaagaaa

SEQ ID NO: 112033 - DNA, 682 bp, Homo sapiens
acttatttgctcaatgtgtttacaggtgcatgtggtcattcaatataatcaattgatttttttaattgtttaattacataaacctgtgcaactatgtccagtcctttttttgtgttaggagtgtaccacactgtaaaatatctcactatgataattcartttaaaggttctgaggcttctctctgcattgtgtgacaaacaggctcatatcaataagactggttgatggagctagaggacgttattctaagtaaagtaactcatgaatggaacaccaaatatccaatgttctcacttaaaagtggtagctaaactatgaggacacaaaggatgagaatgatataatggactttggggactgagggaaaagggcagtaggaggaataagacataaaagactacatattgggttcagtctacactgcttgtgtgaggggtgcaccaaaatatcagaaatcaccactaaagaacttatccgtgtaaccaaaaaccatctgcaccccaaaaactattgaaattaaaaattaatcaatgaataaattttaagataaaaataatgcatgtaatttacccagcacaggtcacaatgtgcctgtcacatcataagcacctcataataagaatcttcctactattagtaccttctgtctaagtattctggtatttattttggcattgacca

SEQ ID NO: 112034 - DNA, 466 bp, Homo sapiens
tgctcctgtgtttctattggaaacacttgtcatatttcttccttagtgggggtcacctttgtccctggtctctgcagtgtcttttacaaagcactggtcacatgactctgacactttatttctaaatgtgattctccctcctacctgtagattgctctctgcaaatcatgggggacaacttttataatgttaatgtgtcttttgttgtcaaataatgtcctggtcagatgaaatgttggaaaggaattagaaggaaggactcattcgggagaaggatgtcccatctataatgaagatgactctgattccgtgtatgcttcttgaatrgtttgggagatggtcagatctcaaggaagttataaactctgtgtcagatctcattccaccactccaagtgaaagtacttagccatgactcattgcctttaatgagtaaaaacacatttttctgtatgtcttacagtata

SEQ ID NO: 112035 - DNA, 466 bp, Homo sapiens
tgctcctgtgtttctattggaaacacttgtcatatttcttccttagtgggggtcacctttgtccctggtctctgcagtgtcttttacaaagcactggtcacatgactctgacactttatttctaaatgtgattctccctcctacctgtagattgctctctgcaaatcatgggggacaacttttataatgttaatgtgtcttttgttgtcaaataatgtcctggtcagatgaaatgttggaaaggaattagaaggaaggactcattcgggagaaggatgtcccatctataatgaagatgactctgattccgtgtatgcttcttgaatagttkgggagatggtcagatctcaaggaagttataaactctgtgtcagatctcattccaccactccaagtgaaagtacttagccatgactcattgcctttaatgagtaaaaacacatttttctgtatgtcttacagtata

SEQ ID NO: 112036 - DNA, 473 bp, Homo sapiens
ctttgttacccataattttgaattctcacttggatttgaccaagtcaggtagagttggtcaagtctgatgggagaaagaccaaaacaaacaacaaaatgtccaacaawacgattaccaagcattttaatgataaggagaaattaagaccatctggttgttaaactttagccaagacaaagccccagttcagctacttacctagggatgggtctcaggctgaaagctgctttctaccattcctggaagcaggaaaaaaactcaaactggtgttccctgctgggagtgagctcaaactttacatgcgtttcatcatcatggaagcaggaaatcttgccttccttgtaaaggaagtaaaataaatcttgccttccttgtaaaggaaggcaagtaagccagtaaaactccaaaaaaaaaaaaaaaaaaaaatagatggggaagttgtacagcaaaatacactttagatcttcaccaa

SEQ ID NO: 112037 - DNA, 473 bp, Homo sapiens
ctttgttacccataattttgaattctcacttggatttgaccaagtcaggtagagttggtcaagtctgatgggagaaagaccaaaacaaacaacaaaatgtccaacaaaacgattaccaagcattttaatgataaggagaaattaagaccatctggttgttaaactttagccaagacaaagccccagttcagctacttacstagggatgggtctcaggctgaaagctgctttctaccattcctggaagcaggaaaaaaactcaaactggtgttccctgctgggagtgagctcaaactttacatgcgtttcatcatcatggaagcaggaaatcttgccttccttgtaaaggaagtaaaataaatcttgccttccttgtaaaggaaggcaagtaagccagtaaaactccaaaaaaaaaaaaaaaaaaaaatagatggggaagttgtacagcaaaatacactttagatcttcaccaa

SEQ ID NO: 112038 - DNA, 473 bp, Homo sapiens
ctttgttacccataattttgaattctcacttggatttgaccaagtcaggtagagttggtcaagtctgatgggagaaagaccaaaacaaacaacaaaatgtccaacaaaacgattaccaagcattttaatgataaggagaaattaagaccatctggttgttaaactttagccaagacaaagccccagttcagctacttacctagggatgggtctcaggctgaargctgctttctaccattcctggaagcaggaaaaaaactcaaactggtgttccctgctgggagtgagctcaaactttacatgcgtttcatcatcatggaagcaggaaatcttgccttccttgtaaaggaagtaaaataaatcttgccttccttgtaaaggaaggcaagtaagccagtaaaactccaaaaaaaaaaaaaaaaaaaaatagatggggaagttgtacagcaaaatacactttagatcttcaccaa

SEQ ID NO: 112039 - DNA, 613 bp, Homo sapiens
ggtggaaactttggaggccagatgtataaaaggtccagattgcaaggggtcatcagattctgggaaactcacctctgaacagaarcccaccctccacccctgacaccatgacccactgttgctccccttgctgtcagcctacctgctgcaggaccacctgctgcaggaccacctgctggaagcccaccactgtgaccacctgcagcagcacaccctgctgccagcccgcctgctgtgtgtccagctgctgccagccttgctgccgcccaacttgctgtcaaaacacctgctgtaggaccacctgctgccagcccacctgtgtgaccagctgctgccagccttcctgctgcagcacaccctgctgccagcccacctgctgtgggtccagctgctgtggccaaacaagctgtgggtccagctgtggccagagcagctcctgtgcacctgtgtactgcagaagaacctgctactaccccacgactgtctgcctgcctggttgcctaaaccagagctgtggctccaactgctgccagccgtgctgccgcccagcctgctgtgagaccacctgctgcaggaccacttgcttccagcccacctgtgtgtccagctgctg

SEQ ID NO: 112040 - DNA, 564 bp, Homo sapiens
aatctctcctttttttcttcattctgtacatctttcattaatcccttttattctttcttccttttttccctttccttcgtttattcctgaatttggctacctgttttatagtttatttgaaataatcctttccatactgcttttaagacaccagctttaggatataattaatttgtatagactttttttttttgagacggagtctcgctctttcgcccaggccagagtgcagcsgtgctatctcagctcactgcaagctccacctccccagttcacgccattctcctgcctcagcctcctgagtagctgggactacaggtgcccgccaccatgcctggctaattttttgtatttttagtagagatagtgtttcaccgtgttagccaggatggtctcgatctcctgacctcgtgatccacctgcctcggcctcccaaaatgctgggattacaggagtgagccatgtatagacttttaagtcaatttctgggctctactcaatggcaaacttcactgtttgaaaatctctgggttagatatctctaacgtgacttccagtttacaa

SEQ ID NO: 112041 - DNA, 564 bp, Homo sapiens
aatctctcctttttttcttcattctgtacatctttcattaatcccttttattctttcttccttttttccctttccttcgtttattcctgaatttggctacctgttttatagtttatttgaaataatcctttccatactgcttttaagacaccagctttaggatataattaatttgtatagactttttttttttgagacggagtctcgctctttcgcccaggccagagtgcagcggtgctatctcrgctcactgcaagctccacctccccagttcacgccattctcctgcctcagcctcctgagtagctgggactacaggtgcccgccaccatgcctggctaattttttgtatttttagtagagatagtgtttcaccgtgttagccaggatggtctcgatctcctgacctcgtgatccacctgcctcggcctcccaaaatgctgggattacaggagtgagccatgtatagacttttaagtcaatttctgggctctactcaatggcaaacttcactgtttgaaaatctctgggttagatatctctaacgtgacttccagtttacaa

SEQ ID NO: 112042 - DNA, 546 bp, Homo sapiens
acactaatgttatattgctctactgatatgataatgtactttaatttttgccattttcttcttcgtccttgtctaaattttgcttctaactaaagtccttaactcttgggcctattgatattatttggttatggaatggaaattatctcaaagacatgagaaactgtgataagtttgaacttccaaaagggaaagtagttgctaaagagcagaggaaacaaccagatggctgccttggagctaggctgccttgggtaaaacattcacttgtcatggggagataagaggctgctgtaaacatggtgacacacgctataaagacaaaacagataacatttcttgacaatttgctttgcctatcccagacaagtgtggacagtaattggtatttaggtataaatcrtaccaatgaaaatgagaaatctaccagtatttctcgctttaccttcctgctgtctacccatcagctgagtggcacccccatcatttgcaatgaccttccactgcatctgtgcttcaccttgacagccttggcattactgctta

SEQ ID NO: 112043 - DNA, 629 bp, Homo sapiens
actcaagagttgatcaaaatctatggtaaccattcatattgtacaaaaacattttgaaggacactaatactgagattaggaatgctgctgttttagattgtgtgctctctggggcaaacccacaaaagaggatctgagaacatgtggtatatttggacgattaacccaagaaacactggaggaaacttgaagaatgaccctgggaaggagggaaagtcattatagagtgagttcatgatcagaatgttcctgcaggcatctggtataaatcccgctgaagacctctggaagactggtttgacataccccccactggagggaaacaagccagggcatatattaccaactcccactmattctctgagtgctgttcctagaggctttaagtctccagcccagagtttgctcctttatccagagaaagtcctcaggtagagagttccaggtgcctgctctaaggaaccattttcctatgtttgaatggagagtgctgataggatagaggtggagcccctgatatcatctgctgtggtcttctccctctgcagggaagaacatcagaaaatttgacaggtaaggatgagaattcaagaaggaaaaatgagacacaatgcccgtatattatttgt

SEQ ID NO: 112044 - DNA, 629 bp, Homo sapiens
actcaagagttgatcaaaatctatggtaaccattcatattgtacaaaaacattttgaaggacactaatactgagattaggaatgctgctgttttagattgtgtgctctctggggcaaacccacaaaagaggatctgagaacatgtggtatatttggacgattaacccaagaaacactggaggaaacttgaagaatgaccctgggaaggagggaaagtcattatagagtgagttcatgatcagaatgttcctgcaggcatctggtataaatcccgctgaagacctctggaagactggtttgacataccccccactggagggaaacaagccagggcatatattaccaactcccactaattctctgagtgctgttcctagaggctttaagtctccagcccagagtttgctcctttatccagagaaagtcctcaggtagagagttccaggtgcctgctctaaggaaccattttcctatgtttgaatggagagtgctgataggatagaggtggagcccctgatatcayctgctgtggtcttctccctctgcagggaagaacatcagaaaatttgacaggtaaggatgagaattcaagaaggaaaaatgagacacaatgcccgtatattatttgt

SEQ ID NO: 112045 - DNA, 602 bp, Homo sapiens
aatttgggtgaaatgtcccaagggtggcatgcgaaacttcttagaataagtatgcacagacactcaagtacagtcattggctttggagagagttatggtgctctgaagggtccaaagatgatatggaagacattgtggtgaaacccaaggtagacataaatttatgaatgggaaagtgtgactgcagttattattctgtggtcacatcagctttatctaaatgcacagtagagatggattttaagtgaatgaaacattgacttagttgatgtttcattcacttcaaagtctctcagtattatttgcccatgctaaatatatagctttggaattgctcaagcctttctagctagtaaaactaagcaagatagaactccagaaaggcaacaatagatgcctgttttgattaaagaagtaactgaaataagagttttaattcccatgaactctgttataacagtcccatctggccagtgagtaasgaagaggttaatcaacaagcttggtgattaaacaagttggttccaccaattgtttcagctgcaccacctaagtcagaattttacaggaaactcaacaaacctagtaagactcatacgcca

SEQ ID NO: 112046 - DNA, 584 bp, Homo sapiens
gggtaatatctgagtctgggtctcttggtatatatgtacatattatttttttgcttttgcttttgacactttttcatccttctcctcttctgccccacttttccttctcttcctcttctttctccctctcctttatcttcttctcttcttcctcccctctttattctactttaatattaaattgtgcttaaagtgcggtttaaatgcctggagactgctctccactctccactctctactttaagctttcttggaagtttctacctgagagaggttcattatttgtgcttgcatgccccctctggtgggaggtagccttctgtcacytgtttcttggtgtctcagcctggtggcgggggcagaggcattctctatcgtcatctttcatgcttggttgtagacaggcccgatgttcttgggtcttggggtgggactttctcagtgatccgatcactctatagtaataaaggatcagaggatctctagtggtgtcatcccaggaagatttactgctcctccctttctaatttcaatgagtcttcacctaaggtcagcagggtctgtcatttttgttctgtaggaaa

SEQ ID NO: 112047 - DNA, 631 bp, Homo sapiens
ggaggtagaacaaagagaatcctaaattgtatttaatccaatagctttacttcactagttagaaaactgaaacttagcaaggkccaatctttcattggaatgacctttattttgagcttattttaaatgttattatgtgctttgccataatggggaaaggtgaatggaaaattctgccttcgcatattccagagattagggagacaagctaaatatacctaactaacatacggctagttatctatttctgtataacaaagcgaggacttaatggcttgatggtgatttatcacttctcacagttctgtgagttgactaggcaattatgtttgtctcatctgggctcactcatggggttcagatagcttgtggctcgtggctcgagtggggcttgggactctaagatggcttcattcacatgcctagggcctcagtaggatgactggcatggccctgaaaactgcgaagctctctctctgtgcaaactttcacctggactttttatatgattctggaagtattccaagaaggcaaaagtaaaaactgcaaagcgtcttaaaatagaagttcagaagccacattatatcacttctgttgcattctatcaaagcaagtcacaaggacagatcag

SEQ ID NO: 112048 - DNA, 548 bp, Homo sapiens
cggatactttccgtgttttagagggctattctgacctaggtactgcaatactgggtctggctgctattggaaaaattagttcagaaatcatcaggaaatgatcccagcctgtggaggagctgtatagaaagtagctgtttgctggtacatatcatattgtccattgtgmcaggaaataacctttgagagtctagccacagaattctttcttccctttctttaaaagactgtaaagaacactggcaaaaaacaaacaaacaaacaaaaaaaaaaaacaggctctggagccaaacggccttggaaaatccaggctccactaaacaactaattgcaatcttgggcaatgcaattaatctaaccatgcctaggtttccttcttgtaaaaatagtcacaataataacagtacctaccctcatgttgttgtcacaaagattaaataattataaatgcctagaatttaagtgtttaagaaagatgattagtattactattaccaatttacacttctcagttcttccctcgttcaagtattcttacatttttatca

SEQ ID NO: 112049 - DNA, 548 bp, Homo sapiens
cggatactttccgtgttttagagggctattctgacctaggtactgcaatactgggtctggctgctattggaaaaattagttcagaaatcatcaggaaatgatcccagcctgtggaggagctgtatagaaagtagctgtttgctggtacatatcatattgtccattgtgacaggaaataacctttgagagtctagccacagaattctttcttccctttctttaaaagactgtaaagaacactggcaaaaaacaaacaaacaaacaaamaaaaaaaacaggctctggagccaaacggccttggaaaatccaggctccactaaacaactaattgcaatcttgggcaatgcaattaatctaaccatgcctaggtttccttcttgtaaaaatagtcacaataataacagtacctaccctcatgttgttgtcacaaagattaaataattataaatgcctagaatttaagtgtttaagaaagatgattagtattactattaccaatttacacttctcagttcttccctcgttcaagtattcttacatttttatca

SEQ ID NO: 112050 - DNA, 548 bp, Homo sapiens
cggatactttccgtgttttagagggctattctgacctaggtactgcaatactgggtctggctgctattggaaaaattagttcagaaatcatcaggaaatgatcccagcctgtggaggagctgtatagaaagtagctgtttgctggtacatatcatattgtccattgtgacaggaaataacctttgagagtctagccacagaattctttcttccctttctttaaaagactgtaaagaacactggcaaaaaacaaacaaacaaacaaaaaaaaaaaacaggctctggagccaaacggccttggwaaatccaggctccactaaacaactaattgcaatcttgggcaatgcaattaatctaaccatgcctaggtttccttcttgtaaaaatagtcacaataataacagtacctaccctcatgttgttgtcacaaagattaaataattataaatgcctagaatttaagtgtttaagaaagatgattagtattactattaccaatttacacttctcagttcttccctcgttcaagtattcttacatttttatca

SEQ ID NO: 112051 - DNA, 570 bp, Homo sapiens
ttaagaacagcagcaatataaactgtcgtgcattgagcagccacggtatgacaggcactctaccagaagcttaaggagtcagtaattagaccatataaaacaggtggcaaaaaaaaggaagagaaaaggagtgtgaatgaacatgcagaaagattgttttagtttagggtgtgtttgaacaygtttgtagataaaatgggacaacaattatctcattttgtccttacaaccaccctacgtaatacacacgcttattattccccattttattgataagtaaagtaaggctctcagtgcttaagtaactggcccatgattacagaattaattgtgttgaagtctggatataaaccctgattcaggtgagccacagttcacattcttaaccacatagaggccattgttctaagcaaagatgcattttgtatgctataatttttttcttataacttttctttcagtcatctagatttctcagcaaagcttacccagataggtaaacattttggaagatgtagaatagagaagattttttagaaggggagaagtgggagagagctttccatattg

SEQ ID NO: 112052 - DNA, 573 bp, Homo sapiens
gatgatatattctaatttgaggtacatagagaattagagtaacactttcttttttcttttaaagaaatgagacacattcattatcagagacatttccaggtgtgacagttttctaggaagagcatctgggctctatccctgccgagaggtgttcctccactataaccaatgtctttccctctgcctgccagctgaaactgtccagagggaggatgcttctccctcacctaccaatgagcagatgcacttgcatgaggtccaggtgctgccagcctagtgtgcagacycaggacagcatggccttttccttctctgggtctggatctccaacagactcctagcatttcaggcagccccattgcctgattttcagctactcacctgcaaaaaatggagcagtcctcgctgtcctcccaccctcaggacagcaatacccatgctcattgtaacaaggttgactagtctgaggagtatgtcttgcataaatatgagcattaaagtcctatgttccactgctgtattggtagctgaagcagcctcttgttgggaacaattaagatttgtgaagtagtc

SEQ ID NO: 112053 - DNA, 478 bp, Homo sapiens
agcctcatgagtagctgggactacaagtatgaaccaccatactcagcctcgaatactacaaatttcacaggactcttgggagggtaaaatgagatgatttgtgccaagggcttagcccagcacctggttcagtggattytgagctgaagggacacctcctcccccaaaatggaacccaggttctaagatcgattttccccacgatgttgcctttcctgggggaagagggaggcagtgcccttctccctttccatctcctcctcccacgcggggcacggtgagaagccttctggaggctgcgcgtaccttcacggccaagactcctcaccctcagagcccagctcttggtgtcacaggctttgtaactgccatacaggctggcactcagtcaggtgggtagggactgggagaacgagggcagcccacagccccaggaagggtgagaggaaaggctgggggcagaacaagacaagaattc

SEQ ID NO: 112054 - DNA, 414 bp, Homo sapiens
aagtctgaaccaacccccttctagcccccctaccctacacacacacagacacagacacacacacacacacacacacacacactttcttctcttctgacaatgctagggacagaccacaagtccctcatccctcagttctcctgaagtatttatatatctgtgtttgtgctgtgaatggagaggaggaraggggaggaggtaagctggagtggtattttcccttctagctctgaggattcatcttaaggtttgtcatacaaagtgaatggcctcagcatcctcaggactctgaataccacgattcctggctgttttgctaaggcaaacaaaagacctttttacacattcaccctagggcaagtttgccagtctagataggcataaataataaagaacataatgatctgctgaaaa

SEQ ID NO: 112055 - DNA, 536 bp, Homo sapiens
aacctggtaagttgttttaattatgtactagatgcagataaagtctgactttttccattctagttagggcatggttaatttcatatgtccccaggccttaccaagttgtaaagtaggcagcctacaaccttgaaatatttagcaagccttttatctaatttatgtgatttaaacctgctatttacatattgatgatrtttgcattttccaatttgatctttaaaacagtttttatttcttagagtttaaaaacacataaactaaaaggcattacggttttaactttcctctaaaatatttgatttaagtgcttatttttatttaaggcaatcaattggtcctcgttacagacatcacacacaacacatatattgctacacagacaaacagaagaagatccagtagctctaagatttcttctcgtcccatttcctaattgcattactggcttcccagtagagccctttaagaacagggatagcaaaccacgaagtttctagggcctaatcaacttgtatagctgtaagacaaaaaca

SEQ ID NO: 112056 - DNA, 590 bp, Homo sapiens
caaatgagaggaccgacaaagccaaacttggttttctgaaagaccaaaattgataaaccctgacaaaattaatcgatgaaaaagacaaggcatagcaggcacagtggcatgtgacttacgagcagtaatcccagctattccttagcttagggaggatcacttaagcccaggagttctaatccagcttgggcaacataccaagatccctacctctaattaaaaaaaaaaaaaaaaaagataaggcataaataaccaatgtcaggaataaaaaaggggatataactgtagatcctacagacattaacaagactggaaaaagacatgacaaaacaacattatccaaataaactggaaaatttaaataaaatgaacaaatccctaaaaaaagaaaagtagaacatttaaaaaaaatagaaaatctaaattgtctactgaaactrttaagtaaaatctaaatctttaatgttctatatcatcatctaggtagtagttgtaaaaattcaatgaaatatacacgcaatttgtgtattttaatgtattatgtttcataagaaaacaaaagtgaggccaggcacagtgctcatgcctgt

SEQ ID NO: 112057 - DNA, 579 bp, Homo sapiens
gttttctacagcacaatgatgaacatttcaggtgtataaaaaatataaagaaaagattacaagtgaagtctatggcatggctgtactaatccacacacacgtacgctcggcagtgtaaaagttacctcactgatttgcttgaattaacwatttaaaataaaattttatactgaattaatgtttatttttataaaatagcagtgttattagaaagatttctgacaagtagtgtacgattacaaatatcatctaccttggagttaccatgaaattaggagggtaaaaatagtaaataaagatcctattctagacatctggcctatatgcagacaaccaggcagcacaaactcaagagtccgcttgtaattgcttttgaattcagagaaaattaatggtaagttggttggtttacaacacacaattctcttatttgcaaagcaaaactgaaaaatacagatagatagccaggcagggaaaaagagagagagacagactgactcattaaaagagagagagagagacactgactctgatttataggatacttgcttatctattcctgttagaattttctgcttg

SEQ ID NO: 112058 - DNA, 643 bp, Homo sapiens
cttatatgctgtatctacaaataccgtcccttggcaatataattttagagttccttttctggaactacttaaggactgttttatgatcctcagcagactgttatattattttatagccataccttttatttgctgagtaattgtactcaataattgtttgtaattgaatgaaacaattcatcagatgttgggcactgaatggctttggattatttccaaaaatttaaaggataaagatttgctgccttcaaagctatgtacaaaaatatgatagaatgctagcgggatatttgtttaaaatacaacctttattacattggggcctgctcataatatatatgtggcacattttatttaaaatattaaagttcctggtgggacatgtccccataatcccagcactttgggaggccgaggtgggggtgggaggatcactagaggccaagagtttgagaccagcctgggcaacatagtgagataccatttctacaaaacatwaaaaaaaaaaaaaaaaagccaagtttgtagtcccagctacttgggaagctgaggcaagaggatttcttgaacctaggagttcagttcaaggctgcagtgagctatgatcatgccagtgtactccagcctgggtgacgtagtgaga

SEQ ID NO: 112059 - DNA, 373 bp, Homo sapiens
gccacgtgagtcaaatgagactctcaggggaatcatccccatctgaacactccttcaaccactcacagactttaccctcagctcccaagaatcccttctttctgggaccttagtgattctcctttggtgtcaaactgaagccaccttttctcctggctacttcaggacttttgagggctaggggagaagctaattcatctttgcatcttctgtgctgaayacatctgggacttgtaaaagttttcagaatgaatggatgctctgtctgaacctgtcctccgtcctgtcagctcttcctagagccccttctgcctcttctttgcagtacttgctactgaggttttcccacttgaatcaatttagcctgaattct

SEQ ID NO: 112060 - DNA, 370 bp, Homo sapiens
gaattctttatccaggcctggagtggtggccgtggaggaggcttgcagtcttgcactcctgcaaaccatgctccagggctgcctcgtccccgcttccccaacacctgtgtgctgggtgccagggagcacgcaccttctgcgctttcagatgcggccaaatgtctcccgaatttctctatagaaatttaagctgcaccgcagggagagtttgaacagggcacatcctaggccttkctgggtgccatcgattggtgtgaagaggcatctgctgttgtctagagatagacaaccagtgaatgtgcgcattctcaggcgtctcctctgcgtggagggctgccccatccctgcccctttatttccctgggtgcct

SEQ ID NO: 112061 - DNA, 571 bp, Homo sapiens
tatgctaacactatgatatgaacaaagcaatttttggactttaagggggtactggtgatgcatttcttgggataaatttgtggaaataaagagacctaaccttcaaagcttgcaatcaagtcggaggattagaaccccttgcattctaaccaaatggggtgctgtgatggagaacttccctttgagttgtgccttcgcctgtgtcaattggtgctactctaacagaataccacagactgagtaatttataaagaacacacgtttattttttacagttctggagtctgagaaggccaagattaagataccaacaggttttgtcgtctggtgaggtcagcctacgcttccaagatggtggcttgtatgctgtgtcttccagacgggaggaacaccgtgtacctcacgtggcagaaggcagaagggcaaaaggaacagactctctctgccaagtcctttaaaagggcacctaacctcattcacaagagtggaggtctcctgacctatcgtctcttaaagaccccacctgttaacattatgatrttagccattcggtttcaacgcatgaattcct

SEQ ID NO: 112062 - DNA, 619 bp, Homo sapiens
ggaagatggaaggataagaagtaatgctggagtatagaaaccacacagcaaaatacaccttcaaatagtgattcttaaactgtattgaattaggacccctttggaaaaaatcctgacccttttcacagaaaaatacatgtgcacatgcatgcgcacacacacacacacacacacacacacacacacacaaacacaccattttgccttcaatttccagggttcataatatccctataatctatccatggatcctaggttwagaaaccccaggaatctgttgactgcttggttttgttgtcaatgaaatctttgaccctcaaattattttcctatgattactgctccctcctaaaaattgaatagagctaatatttttctgaaaattgaagcttctgattaatcaagatttcactatctttatcttgttatgtatacatttctttatcgctatatagccagtagtttctcaggaagacaaaagactgtaagcattagccaacaatctgcaatcctccagtcattgcccatgggagtgaggagaacttgagtaaaggaagaagcgggacctgttgggaagggacagggaggccatgaagggagttcagttcatgtacctgga

SEQ ID NO: 112063 - DNA, 619 bp, Homo sapiens
ggaagatggaaggataagaagtaatgctggagtatagaaaccacacagcaaaatacaccttcaaatagtgattcttaaactgtattgaattaggacccctttggaaaaaatcctgacccttttcacagaaaaatacatgtgcacatgcatgcgcacacacacacacacacacacacacacacacacacaaacacaccattttgccttcaatttccagggttcataatatccctataatctatccatggatcctaggtttagaaaccccaggaatctgttgactgcttggttttgttgtcaatgaaatctttgaccctcaaattattttcctatgattactgctccctcctaaaaattgaayagagctaatatttttctgaaaattgaagcttctgattaatcaagatttcactatctttatcttgttatgtatacatttctttatcgctatatagccagtagtttctcaggaagacaaaagactgtaagcattagccaacaatctgcaatcctccagtcattgcccatgggagtgaggagaacttgagtaaaggaagaagcgggacctgttgggaagggacagggaggccatgaagggagttcagttcatgtacctgga

SEQ ID NO: 112064 - DNA, 619 bp, Homo sapiens
ggaagatggaaggataagaagtaatgctggagtatagaaaccacacagcaaaatacaccttcaaatagtgattcttaaactgtattgaattaggacccctttggaaaaaatcctgacccttttcacagaaaaatacatgtgcacatgcatgcgcacacacacacacacacacacacacacacacacacaaacacaccattttgccttcaatttccagggttcataatatccctataatctatccatggatcctaggtttagaaaccccaggaatctgttgactgcttggttttgttgtcaatgaaatctttgaccctcaaattattttcctatgattactgctccctcctaaaaattgaatagagctaatatttttctgaaaattgaagcttctgattaatcaagatttcactatctttatcttgttatgtatacatttctttatcgctatatagccagtagtttctcaggaagacaaaagactgtaagcattagccaacaatctgcaatcctccagtcattgcccatgggagtgaggagaacttgagtaaaggaagaagcgggacctgttgggargggacagggaggccatgaagggagttcagttcatgtacctgga

SEQ ID NO: 112065 - DNA, 528 bp, Homo sapiens
tatctggtcacatcctgggcagtgccaagaagaggctgcttctatcttcctccgactttttgaggttctagtcacaaaattgtttttcttgctcacaaayggctctgtcctatgcaaagtgctgaacaaataaaatggaagttttaaagttcacactgaccttttttggtgcttgggacaatgcaatcttttcagttcgtaatggaaaatagattaagctacctgcctggtttgctttttaggaagttgcagccttcccatttttaatgccctgagatctttgctcaaactgtcttttttggtacaacccatgggcattgtgcatagtcaaggagggcttatttgtaacctggtttgggttttacttctctcccaaagcaagtcaccagctttttgttttaacgtaatctcccattttctccagttccttaattcacatcataaaagttcactttctttagctactgacaattgaaatcagaacaaagggcccagagaagtatatatattataaacgtttttaaaagg

SEQ ID NO: 112066 - DNA, 554 bp, Homo sapiens
tattttgtaacttgttttaatcatgtccttactcatattggagttatactgctggtacgggactcctcatcatttaatttaatagtacatattttacttcattggctttgtatgccaggctatgtaatgcagtagtctaaagggggcttgggtgataaaattcttgggttcaaaccccatccctaatatccaactgctgtatgatctcatgtgtgttgcttaactccttctggttttaattttctaattttaaaagtgaaggtaagtaatgctgatgccttcataagagggctatttaaagattaaacatgataatacaggtaaaactaggataatgtcttaagcacagtaattagtcatcaagcgataactgttattgttataagaaactgaattatcatggatataagagtcagttttccatctctccattttgttacatttgttatatctgaggtttaaagtcatgggytatgaatcattgaaaaacacaaaggaagaacaccagattgttctttactcagatccagattatcttacgattttgtagaaat

SEQ ID NO: 112067 - DNA, 621 bp, Homo sapiens
aggatccaggaaatgtcaatggccacagaccaaagaaagcaccaagaaagaaagcaccaaggattctcttgaccaagactttctctagccaaaggaccaggaaaggagtagcctagaaaaacagtcaacttttagacaatccttcctagaaccttcagaccatttaaatccttgaatctccctgaggaattgtttgctaggtacattatgcttacagtcacaattggggaagccacaagggaatgaagtaatttttactggagttgagggagcttatcaagattgagttcccaggagctgcaaagaagctataaattttaatgtgagggagtcctttgatcactctagctctcactgcaccagatataccctgcccaagaatcattccatccctcacccttgtgcctcccagggggaagggcaacattctcccctttttgtattttccattccctctgagtgagacttggaaactaacatscctgcctgagagcactgatatgagcatctggtaagtacaatgggaagtgagcaggcttggagaaacaaggagaaagcatgtcttaaacaagtttaggcttcactcaaggtcaacaggcattgcctaaaatatagtaggta

SEQ ID NO: 112068 - DNA, 476 bp, Homo sapiens
tggtcatgatgaatgatttttttaatgtgatgttgaatttggcttgctactattttgtggatttttgcatgaatgctcatcaggaatattggcctgtagtctttttttgatatgtctttggtagcaaagtaatactggccttgtagaatgagtattcctcccagctctattttttgggatagttttaggaggattgatgttaagttattctttagatatttggtaaaattcagcaatgaagccaattgactgtatgttttcaaatatcccatcttcaagctcactaatactttcttatgctcgatcagttctgctattaagagattctgaygtaatctttattatttcaattgcatctttcagctccagaatttctgcctgattcttttaaattatttcagtctgtttgttaaatttatctgacgggtttttccttgtttggagacttcttattaaagcttcagtctccttacttg

SEQ ID NO: 112069 - DNA, 171 bp, Homo sapiens
ttatgtcacctgcaaacagagacaatttgactccctttatttccattttggatgccttttattgcattctcmtatctaattcctctagctaggacttgtagtactgtgatgaatgaaagtggtaaaagtagccacacttgttccagatcttagaagaagagcttttaactt

SEQ ID NO: 112070 - DNA, 171 bp, Homo sapiens
ttatgtcacctgcaaacagagacaatttgactccctttatttccattttggatgccttttattgcattctcatatctaattcctctagctaggacttstagtactgtgatgaatgaaagtggtaaaagtagccacacttgttccagatcttagaagaagagcttttaactt

SEQ ID NO: 112071 - DNA, 636 bp, Homo sapiens
tacaggtatttttctccaattctgtagatagcgttttaatgtctatgatggtcttttgctatgcagtagaaactttttagtttgatgtagtcctacttttttttcttgtgcttttggtgtcaaatacaaaaaaaactattgctaggatcaatgccaaagaattttgctcagtgttgtcttctagaagatttatggtttcaagtccaatgtttaagtctttaatatattttaagttaattttatgtaggwtgtaaaggttgggtgcaatttgtttttgcatatggatatcccattttcccatcaccatttattgaagagtttattctttcaccattatgtgtttatatgcctttgttgaaaatttgttgaccatacacagatggatatattttatacatatctaagctctctattctgttccattggcttatgtgtttgtgtttatgccaatattttgcagttttgatgaccacagctttgctatatagcttgaaattaggcagcatactgcttctagctttgtccctcttgctcaaaattgctttatttgaggttttttgtaattccatacaaactgtggattttaatttttgttgaaaatgctattgaaattccgatagaaattgctttaaatat

SEQ ID NO: 112072 - DNA, 568 bp, Homo sapiens
gaaaactgacagagtatcacaataacagctacaatatcccagatctaaaacaatttaaaaatatttattagggtgattcatttctttatttctttcaaaacatgtttacraaaacatgttttgaaaacattaaatatctttgatatagtttagtaggaaaatactcaaaatcaaaattgtaaaaacaatgtttcttatacaattaaactgcatttgaagtagatggtaatgtaataccaatcttgaaaagtttttcttttctaaaacaaggtgccaatgatgtactacactgtaattaacactgaaattctgggaactacttcatcatttccagtcactatagttgcaaagctgggaagtaaacactgtacatcagatgattgctttcccatggaatacaacaggctgaagttcccttcattatacaaattaataaaattcaaactatataaaatatatattagtcatcgatgattaattcacccatatctgggtaccaaaggtctggactacttaaaccatgtagattcaaaattctatattgggaaaaattataaggaaaacccga

SEQ ID NO: 112073 - DNA, 568 bp, Homo sapiens
gaaaactgacagagtatcacaataacagctacaatatcccagatctaaaacaatttaaaaatatttattagggtgattcatttctttatttctttcaaaacatgtttacaaaaacatgttttgaaaacattaaatatctttgatatagtttagtaggaaaatactcaaaatcaaaattgtaaaaacaatgtttcttatacaattaaactgcatttgaagtagatggtaatgtaatacmaatcttgaaaagtttttcttttctaaaacaaggtgccaatgatgtactacactgtaattaacactgaaattctgggaactacttcatcatttccagtcactatagttgcaaagctgggaagtaaacactgtacatcagatgattgctttcccatggaatacaacaggctgaagttcccttcattatacaaattaataaaattcaaactatataaaatatatattagtcatcgatgattaattcacccatatctgggtaccaaaggtctggactacttaaaccatgtagattcaaaattctatattgggaaaaattataaggaaaacccga

SEQ ID NO: 112074 - DNA, 580 bp, Homo sapiens
agttatgtttagagggagttgggctaaacatacagcattcatttaaaatgaaggcctcccgtcacactttgctgatggtatttaagtattgaaagccaactttttctacctgcttactattatgtcatagtagcatgatttcccagacagcagaaactttgtctttttgtacatagctaggcatttgatgcttgtaacagtgacttctcgataattattcattgccaggaaagataattactttaaaaatttatttaggamattatttagcaaatagtaaataaacagtattagctggttgctattatttctgaatatcagtttccctaaattttctcatctgaaaaatggagatatgtatttcacagcagcattgtgagagacaatagagtcaatatagataaaattctccaaagaccaaaactttatctagctcatatgttctgcatgagtattcatttttttaattactgtatctttttaactcattatgactaaaattaagtatttttttctctttcaagaccttatgcttctcctatgttcccaatatgctggacatcaggtgtgggtaataata

SEQ ID NO: 112075 - DNA, 533 bp, Homo sapiens
agtacaaagcagtgtgcacagaagatattcactaaattcttactaaatgagtgaatttcataggaaattggaaaatggatgatcataaaattacatctggaaggaaatcatgcccagaaaatttatctgatgactgcacacacaatttttgctaacattatgctgaaggaaacaagtgtatgacagtaacatgaaacacaacaatggttggtttacacttcacatcattcacttggtattctggtgtggagaaataatatttgatcaaaacttaatagcatttaaaattgtttatttgatctttattctaactagtgatatggatcacacaaaaggtgtttaggctctttcttctatggcatgagaatatttttaaaaatatatttagctactcaaaaagtacaatgatataaacagaatatggaaaactcaggagaaaaaacaggaattataattartgacataatataaaccaaaaatgaagtgccaatctcaaatcattttttaaaatgtgtggtctgaaatattcaaaa

SEQ ID NO: 112076 - DNA, 529 bp, Homo sapiens
gaaagaagaaaggagagagagagaagtacagaaaaagttacaataatcaaaataaaaatcaagagaaaagggaaaagaaagactagcagagacataaatggaaagatagtcgtatgacttaaaaaaaaaaaaaaaggtgaagagacagagagatactagtccacgaggagagcaagaccatcyagaggcagaactccttatctaaggaattcagaagtaattagacatccctattatgtaaagctggcatctggtatgagatttcttttccaaaaatttgtgagtaaccagaatttctatgcatctctggaatgcatgtattctaaactcattgtgcaacccttgctgacatcaaggcaccaaaatgtctataaatgtaattgtttaccatgacctatgtggctaatatggtaaaaattacccttaagctcccactttaaggtccataaataccctaaggaaaaatctagtgcagtggcgtactcagtcctctcttgctgaggagccctgctgcactcctctgcagcat

SEQ ID NO: 112077 - DNA, 529 bp, Homo sapiens
gaaagaagaaaggagagagagagaagtacagaaaaagttacaataatcaaaataaaaatcaagagaaaagggaaaagaaagactagcagagacataaatggaaagatagtcgtatgacttaaaaaaaaaaaaaaaggtgaagagacagagagatactagtccacgaggagagcaagaccatctagaggcagaactccttatcyaaggaattcagaagtaattagacatccctattatgtaaagctggcatctggtatgagatttcttttccaaaaatttgtgagtaaccagaatttctatgcatctctggaatgcatgtattctaaactcattgtgcaacccttgctgacatcaaggcaccaaaatgtctataaatgtaattgtttaccatgacctatgtggctaatatggtaaaaattacccttaagctcccactttaaggtccataaataccctaaggaaaaatctagtgcagtggcgtactcagtcctctcttgctgaggagccctgctgcactcctctgcagcat

SEQ ID NO: 112078 - DNA, 529 bp, Homo sapiens
gaaagaagaaaggagagagagagaagtacagaaaaagttacaataatcaaaataaaaatcaagagaaaagggaaaagaaagactagcagagacataaatggaaagatagtcgtatgacttaaaaaaaaaaaaaaaggtgaagagacagagagatactagtccacgaggagagcaagaccatctagaggcagaactccttatctaaggaattcagaagtaattagacatccctattatgtaaagctggcatctggtatgagatttcttttccaaaaatttgtgagtaaccagaatttctatgcatctctggaatgcatgtattctaaactcattgtgcaacccttgctgacatcaaggcaccaaaatgtctataaatgtaattgtttaccatgacctatgtggctaatatggtaaaaattacccttaagctcccactttaaggtccataaataccctaaggaaaaatctagtgcagtggcrtactcagtcctctcttgctgaggagccctgctgcactcctctgcagcat

SEQ ID NO: 112079 - DNA, 597 bp, Homo sapiens
ataaatgcacagtctacaaatccatataaccacaaaaagaaaacaatgataaagagagctgcacaaaggaaaatagagaaaggaagcaaaatgaatgaggttagatacgttcttaggtggaataacaaccccatcttggagtaggttagtcttgccaccaaaacttttaaaaacatgatttttttcataattgtgcatataatccaggatcttactcacctcttaatgttcactctaatacataagataaaattaatytgaagatctaaaatagtcctcaaaatggagactttttaatccttctaggaaagttttatcaccttggatagattttttcctctagataatcttgaattaattttacaatgaaaagtattactggtattttattaaattgtattcaatttatgcattggcatgtatatattcaataatattacttttaaccaacaaaagagtttgtctctgaatttattcatttttttctcaaaaaatattaccactttttatatgaacagatacttcccaaaagaaaacatgtatacggccaataagcatatgaaaaaaaaaatgctcagcttgactattcattagaga

SEQ ID NO: 112080 - DNA, 597 bp, Homo sapiens
ataaatgcacagtctacaaatccatataaccacaaaaagaaaacaatgataaagagagctgcacaaaggaaaatagagaaaggaagcaaaatgaatgaggttagatacgttcttaggtggaataacaaccccatcttggagtaggttagtcttgccaccaaaacttttaaaaacatgatttttttcataattgtgcatataatccaggatcttactcacctcttaatgttcactctaatacataagataaaattaatttgaagatctaaaatagtcctcaaaatggagactttttaatccttctaggaaagttttatcaccttggatagattttttcctcyagataatcttgaattaattttacaatgaaaagtattactggtattttattaaattgtattcaatttatgcattggcatgtatatattcaataatattacttttaaccaacaaaagagtttgtctctgaatttattcatttttttctcaaaaaatattaccactttttatatgaacagatacttcccaaaagaaaacatgtatacggccaataagcatatgaaaaaaaaaatgctcagcttgactattcattagaga

SEQ ID NO: 112081 - DNA, 597 bp, Homo sapiens
ataaatgcacagtctacaaatccatataaccacaaaaagaaaacaatgataaagagagctgcacaaaggaaaatagagaaaggaagcaaaatgaatgaggttagatacgttcttaggtggaataacaaccccatcttggagtaggttagtcttgccaccaaaacttttaaaaacatgatttttttcataattgtgcatataatccaggatcttactcacctcttaatgttcactctaatacataagataaaattaatttgaagatctaaaatagtcctcaaaatggagactttttaatccttctaggaaagttttatcaccttggatagattttttcctctagataatcttgaattaattttacaatgaaaagtattactggtattttattaaattgtattcaatttatgcattggcatgtatatattcaataatattacttttaaccaacaaaagagtttgtctctgaatttattcatttttttctcaaaaaatattaccactttttatatgaacagatacttyccaaaagaaaacatgtatacggccaataagcatatgaaaaaaaaaatgctcagcttgactattcattagaga

SEQ ID NO: 112082 - DNA, 565 bp, Homo sapiens
tgttcagttattatcaatgtatctatgcataaaggattgaaaatgattcttcatgccataatttatctaaatattcattcctttggaacactgttttccaccaatagtaacaagacttggaacaaaataaaatagcaatatcatgtgcattttctatttctgcacttttccacttctggaaatagtcatagaatcattttgtgacagattaatatcatccatgatcctaagtcactaagaataagtgttagattctttgggttaaattgccataaggactaaatttatttttttaaccaattccctaaagaatcaactgattttagttttacagcatatgtatgacstctccatccattttgccttaattctagttctttttatccttcagtggtgagaatgagaaaacctggatgcatatggctatggttgatttgaaaagtactttttaaacatttggaagtttttcaaaaccaaaagcatatttgccaagtgatcttttccccctacattttaaatccatgtgcaacctaagagaaatttagaccatatgctagttcagatt

SEQ ID NO: 112083 - DNA, 565 bp, Homo sapiens
tgttcagttattatcaatgtatctatgcataaaggattgaaaatgattcttcatgccataatttatctaaatattcattcctttggaacactgttttccaccaatagtaacaagacttggaacaaaataaaatagcaatatcatgtgcattttctatttctgcacttttccacttctggaaatagtcatagaatcattttgtgacagattaatatcatccatgatcctaagtcactaagaataagtgttagattctttgggttaaattgccataaggactaaatttatttttttaaccaattccctaaagaatcaactgattttagttttacagcatatgtatgacctctccatccattttgccttaattctagttctttttatccttcagtggtgagaatgagaaaacctggatgcatatggctatggttgatttgaaaagtactttttaaacatttggaagtttttcaaaaccaaaagcatatttgccaagtgatctttyccccctacattttaaatccatgtgcaacctaagagaaatttagaccatatgctagttcagatt

SEQ ID NO: 112084 - DNA, 618 bp, Homo sapiens
gcattaacgttttagttcataaatctgaaggaaaataaagagaaaataaaggtattaagagatatgaaacaatgtaaaagaatgaatatttcttttatgaatccttgtgaatatatgacagtatacaagctacagaaaactagtttactgggcggatcacgaggtcaggagatctagaccatcctggctaacacggcgaaaccctcttctctactaaaaaatacaaaaaattagccaggagtggtggcgggcgcctgtagtccmagctgctagcgggggctgaggcaggagaatggtgtgaacccgggaggcagaggttgcggtgagccgagatcgcgccactgcactccagcctgggctacagagagagactcggtctcaaaaaaaaacaaaaaaaaaaaagaaagaaaaaagaaaacagataaaggacaagcaaatagagagggggaaagcagccaccaccgtaatttgaacagtaaaactgagaggaactttgaagtggaaaggagtgtagtctttatttcatccttggggatttgtcagggctggaggatgcacacaacaaataaataatttagagcgctctgaaatatggtcagacagcatatgccttgcagt

SEQ ID NO: 112085 - DNA, 613 bp, Homo sapiens
cgaaaccctcttctctactaaaaaatacaaaaaattagccaggagtggtggcgggcgcctgtagtccaagctgctagcgggggctgaggcaggagaatggtgtgaacccgggaggcagaggttgcggtgagccgagatcgcgccactgcactccagcctgggctacagagagagactcggtctcaaaaaaaaacaaaaaaaaaaaagaaagaaaaaagaaaacagataaaggacaagcaaatagagagggggaaagcagccaccaccgtaatttgaacagtaaaactgagaggaactttgaagtggaaaggagtgyagtctttatttcatccttggggatttgtcagggctggaggatgcacacaacaaataaataatttagagcgctctgaaatatggtcagacagcatatgccttgcagttatgtctacactttgtgcttgatccaagcatacatattattggggcaatatctgactgataccttttaaacacacacacacacacacacacacacacacacacacacacacacacgatgttttatagaaaatatatctgggcctggctacatttccagagtgtcccatttctcttggttcaaatttccatc

SEQ ID NO: 112086 - DNA, 651 bp, Homo sapiens
tatacagaattatgctgctgactggccatgaattccagaggacacaaaaaaagatttgcggagtcagaggaattggaagataagtctatctggatagccatatcaggacagacatggctgagaacaaagcattgtctgtaatagaacatacaaattcttccttagaatgtagtaaagggactcctttattcatatgcagttcctgccacaactctgaatgcatagattcttttgacttkacataaatgccacagatttgtttttattttaatgaagcccaatgacaggagatccaccaataaactggaggtagcaagtagctattgaaagttaagaagtttatgaaattattagaaaatgccttattgaaactttctgttacccatctcctagcattcaatatctaccctcatcaaattctattagtaaatttaataatcactttttgcacaatcaaatttttattatgctggttgttaagtgggacatacaccatggttccaaattttctatactttaaaattcattttcttcatttatacttcataccattctactaattttcgtaattggttgaattcattgcttcaatttctgattaatttctcatattatataatccttgagagaaaatatgtccttcaaactcaa

SEQ ID NO: 112087 - DNA, 651 bp, Homo sapiens
tatacagaattatgctgctgactggccatgaattccagaggacacaaaaaaagatttgcggagtcagaggaattggaagataagtctatctggatagccatatcaggacagacatggctgagaacaaagcattgtctgtaatagaacatacaaattcttccttagaatgtagtaaagggactcctttattcatatgcagttcctgccacaactctgaatgcatagattcttttgacttgacataaatgccacagatttgtttttattttaatgaagcccaatgacaggagatccaccaataaactggaggtagcaagtagctattgaaagttaagaagtttatgaaattattagaaaatgycttattgaaactttctgttacccatctcctagcattcaatatctaccctcatcaaattctattagtaaatttaataatcactttttgcacaatcaaatttttattatgctggttgttaagtgggacatacaccatggttccaaattttctatactttaaaattcattttcttcatttatacttcataccattctactaattttcgtaattggttgaattcattgcttcaatttctgattaatttctcatattatataatccttgagagaaaatatgtccttcaaactcaa

SEQ ID NO: 112088 - DNA, 651 bp, Homo sapiens
tatacagaattatgctgctgactggccatgaattccagaggacacaaaaaaagatttgcggagtcagaggaattggaagataagtctatctggatagccatatcaggacagacatggctgagaacaaagcattgtctgtaatagaacatacaaattcttccttagaatgtagtaaagggactcctttattcatatgcagttcctgccacaactctgaatgcatagattcttttgacttgacataaatgccacagatttgtttttattttaatgaagcccaatgacaggagatccaccaataaactggaggtagcaagtagctattgaaagttaagaagtttatgaaattattagaaaatgccttattgaaactttctgttacccatctcctagcattcaayatctaccctcatcaaattctattagtaaatttaataatcactttttgcacaatcaaatttttattatgctggttgttaagtgggacatacaccatggttccaaattttctatactttaaaattcattttcttcatttatacttcataccattctactaattttcgtaattggttgaattcattgcttcaatttctgattaatttctcatattatataatccttgagagaaaatatgtccttcaaactcaa

SEQ ID NO: 112089 - DNA, 598 bp, Homo sapiens
aaactatttcaaagtaattgaagatgagagaattcgtccaaactcattctacaatgctggcataactgatacaaaaaccagtcaaggacacaacaaaatatgaaacgacaggacaatatctctgataaaaatagatgcaaaaatatttaagaaaatactagcaaaccaaattcaacagcacattaaaaagatcattcaccatgatcaaatgggattcattctagataatacaacctacataatacaataaatgtgatatagcacattagcaggatcaaggacacaagctaatctatcactttgataaacagaaaaagtatttgacaatattcaacaatgctgtttgattaaaactctcaacaaaatgtacctcaacacaataaaggccaaaaatgataaactacagctaactggagaaaagytgaaagcttttcctctaagatctgaaacaagacacagatgccaattttcaccacttttattcaacatagtactaaagttctagccagataaattaggcaagaaaaataaataaaaaggatctatttggaaagaaggaagtcaaattgtttatttcatgattttatacatagatttt

SEQ ID NO: 112090 - DNA, 598 bp, Homo sapiens
aaactatttcaaagtaattgaagatgagagaattcgtccaaactcattctacaatgctggcataactgatacaaaaaccagtcaaggacacaacaaaatatgaaacgacaggacaatatctctgataaaaatagatgcaaaaatatttaagaaaatactagcaaaccaaattcaacagcacattaaaaagatcattcaccatgatcaaatgggattcattctagataatacaacctacataatacaataaatgtgatatagcacattagcaggatcaaggacacaagctaatctatcactttgataaacagaaaaagtatttgacaatattcaacaatgctgtttgattaaaactctcaacaaaatgtacctcaacacaataaaggccaaaaatgataaactacagctaactggagaaaagttgaaagcttttcctctaagatctgaaacaagacacagatgccaattttcaccacttttattcaacatagtactaaagttctagccagakaaattaggcaagaaaaataaataaaaaggatctatttggaaagaaggaagtcaaattgtttatttcatgattttatacatagatttt

SEQ ID NO: 112091 - DNA, 471 bp, Homo sapiens
tcttagcatattaatattgactatactttaaaatattagtatactgatattttaaaatttttgacattcgtccacccatgtttcactgacataatgaaatcttttttagtgtaccttgaaaacttttattgaagaaggaatgaaatattgcattttcaaagacggataagttagaatacaggattagataaaattgcattatctattataattaaattattatcaaaactagataaatattcaaatatataaagtgaaatattcaaatgtgtaatataacaagggaattcatgtagttttacatgtggaaaaagcaatttaactaaaaaaawgatttagatgcatatagatttataaatgcctgatctaacactatatttttttacttaattaattttggtctcatcaaattttccagtaacctggacaaatttccagttacgcagctaaaatttctgtagtcaaaggctt

SEQ ID NO: 112092 - DNA, 471 bp, Homo sapiens
tcttagcatattaatattgactatactttaaaatattagtatactgatattttaaaatttttgacattcgtccacccatgtttcactgacataatgaaatcttttttagtgtaccttgaaaacttttattgaagaaggaatgaaatattgcattttcaaagacggataagttagaatacaggattagataaaattgcattatctattataattaaattattatcaaaactagataaatattcaaatatataaagtgaaatattcaaatgtgtaatataacaagggaattcatgtagttttacatgtggaaaaagcaatttaactaaaaaaaagatttagatgcatatagayttataaatgcctgatctaacactatatttttttacttaattaattttggtctcatcaaattttccagtaacctggacaaatttccagttacgcagctaaaatttctgtagtcaaaggctt

SEQ ID NO: 112093 - DNA, 471 bp, Homo sapiens
tcttagcatattaatattgactatactttaaaatattagtatactgatattttaaaatttttgacattcgtccacccatgtttcactgacataatgaaatcttttttagtgtaccttgaaaacttttattgaagaaggaatgaaatattgcattttcaaagacggataagttagaatacaggattagataaaattgcattatctattataattaaattattatcaaaactagataaatattcaaatatataaagtgaaatattcaaatgtgtaatataacaagggaattcatgtagttttacatgtggaaaaagcaatttaactaaaaaaaagatttagatgcatatagatttataaatgcctgatstaacactatatttttttacttaattaattttggtctcatcaaattttccagtaacctggacaaatttccagttacgcagctaaaatttctgtagtcaaaggctt

SEQ ID NO: 112094 - DNA, 471 bp, Homo sapiens
tcttagcatattaatattgactatactttaaaatattagtatactgatattttaaaatttttgacattcgtccacccatgtttcactgacataatgaaatcttttttagtgtaccttgaaaacttttattgaagaaggaatgaaatattgcattttcaaagacggataagttagaatacaggattagataaaattgcattatctattataattaaattattatcaaaactagataaatattcaaatatataaagtgaaatattcaaatgtgtaatataacaagggaattcatgtagttttacatgtggaaaaagcaatttaactaaaaaaaagatttagatgcatatagatttataaatgcctgatctaacactatatttttttacttaattaattttggtctcatcaaattttccagyaacctggacaaatttccagttacgcagctaaaatttctgtagtcaaaggctt

SEQ ID NO: 112095 - DNA, 358 bp, Homo sapiens
gtgtcttctgactctcgcatttatttagatgtaattggggtcccatgaggagtaccagataaatttaaagccagagatcaaatagctgcaggatttgagtcaatattttggtgggtgacaatgaataaaaacatagattggataaattacatttattacaaccaacagcagtttattaactacactaaagatgctgttaaaggaatagctgagcaattrgggcctactagccagatggcttgggaaaatggaatagccttagacataatattagcagaaagaggaggagtctgcatcatgattaaaactcaatgttgtaccttcatcgcaaacaacaccgccccctgatggaagtaca

SEQ ID NO: 112096 - DNA, 589 bp, Homo sapiens
cttatgtaaactacattctagttgggattttaacactctttaaacaattataacaattattttattaaacttcatttgacaaatgtctattaggtgcttattgtgtgctgagcatccagcatttctggatgctggggatgcaaagatgactaaagcagcccccagaagaaagmtcatggaaaatagaagccttaagtattagtattaatcttttaatggtaatgtgggatttgtacaaatccttacaaatctttgagccacagtttcctcatcaaacttttaaggtttatatttctgtaaacccttaggtaatgaatatatattaaacattactggatttataaaaggtaattcagaacttcctcttgaaaacggtaaagtgggcacgctatccttcctttttcagaaatcaaccaaaagtagcaaggagatagaaaaccagattcccaaactccattttttataagcaaggagacttcggaaatccaaagcacaaacaaagagaaggaagctggcagaatgatacttgctaattaaggcctgggcaaattattgatacaagatcaacaaacagatgcaccattggcag

SEQ ID NO: 112097 - DNA, 579 bp, Homo sapiens
tagctgcaactacattaagcattaaaaataaggtgctctaaagggagttatacaacaatgtaagaacaagagcaatttgcttaaaaataagttgagaaaattgtttattcctaacactttattggtcaatttaattgttttagatagacataagtttatatagaaaaccccaacaatagctcaatcacaccaagacaggcatgctaggaggatattgtgatggtatgttaactgtaaaatattttgttacttaaacacaaattatatatatagtatatttttatggctactaattgattaagaccatatattagagcagtgtttctcaaactgtgttccttcaaaatgtcatagaagaggttgtcgtttttggatcatgtgagaaaaaggatgaaacaacaatgaaagaagatgaggctgcataacttgtgcctttgttcacccagttcaggtctatttttatccattgtttatattgagatttgtggtcagttttcactggagaacagggctccataactaaaatatgacatacaaaactttggaaaataaamtaagtatttacaaacaatagatgta

SEQ ID NO: 112098 - DNA, 577 bp, Homo sapiens
ggatggttaatgtgtatgcaaatatagtcagatacaataaataatatctattatttgatagcatagcagggtgactacagtcaataataatatatcatacatttaaaaataaccaaaagagtataactggaatgttcataccaaaaagaaatgataaatactcgaggtgactaccccatttatcctgatgtgattattacacattctatgtgtatataaaaatacctcatgtaccccataaatrtatacatccactatgtatccataaaaataaaagtaaaactttttttaaaaaaggagacaaaacaatccaaaatttgtgtgtacctaaaacagtttcaatatgtataaagcaaaatcttactggactaaaaatttttaaaggctaagtcaatcattgtagtcagagatttttaacacacctctctcagtagatgtataggattatacatctatacatttgagcaacaagaattataaatctgacttaagtttatgttttcagacccagattaaattaatgtagataccaataacaaaaatatacctagaacacaggctaatttttgaaattaaa

SEQ ID NO: 112099 - DNA, 573 bp, Homo sapiens
atactttatctttggttctgttccrcttgtccgaagggtagcaacacagccattttgaaaagtaaatgtaatcatttggctgtttttactcacaggcagcacctatgcaaaatggcaacaacagcttaattatacttggcatctttttcattttctttcattttcaagaattgtaaaatatagtccacttatatgaggtatctaaagtcgtcaaatttacagaaatagaaattagaatggcagttgccaaggcagggggtatagggagttattgcttaaaggatagagagtttcagtttagcaagatgaaaaagttctagagctctgtcgcacaacaatataaatatacttaacactaccgaactatacacttaaaaatggttaagatagttaatttttgttatgtgtttttttaaccacaattgaaaatttaaaacatattttaaaagaattataaaatacaaatgaagattacctatatgtaataattcataaacataccatttactgaatagttaaggcatggggttatatacctcaatgcatgatctctgggcctcaacaataatcctg

SEQ ID NO: 112100 - DNA, 443 bp, Homo sapiens
caaccaccttcttggccttggcatgttggtcatcaccaaccttctcagtggcaattgccaaagtcaggcagcactgtatgtcatgttgtggaagacaaatgctctataaataaattgacttgaaacagtctcaaatacacataaaccacaatggctttaaatgtaactcttgacttttttctcattttctttctcttctaagagaggtcagcaaggaaagttctgcaagagaggctttacggaaatccaacctaagaaacctgggaggacttttatgtatctgttttaacaaacatatttcacacctaaatatttgtttaaaagctcctggaggctttaaactccagagatggatacatacatctctgagcaygcacctgtatttcagacttaacgatgcacttgttatatgctagacatccatctttttaaaaattcatttt

SEQ ID NO: 112101 - DNA, 591 bp, Homo sapiens
tctcttgcagtctagtctcatcaaagtagccagaggaaacttttacaattgtaaatcacacaacatatgattcttctctcaaaactctgcaatggccattctgattaaaagtcaaaattcttatatgcaactagagtctagatcttggtttctaataccattctcctagcaaaacatagggcccttgggagaaatggctgattctaggacygggacaggaaataaacaagatgggcttgcagcatcttctagtgccaaaaagcatggaaatatgcaaaataaacacaacaatgggtgtatgtcaaagcaacattgaagccaattgaaagagcttttaaaggccaaatttagaacattatgagcacaaaatatatattagtattgtagtataacctaaagtttaaaaatgatccatgagttcatattgatgcaaataaatgtttaaataaataaatacatgagaaagaataaatcagtcactcatgccaaattccaaataattcaggcccatgattgagtctgaaattctaccacttacgtcagatgatgaagttctgctctgcctgcccaaatttatggtttggtggatca

SEQ ID NO: 112102 - DNA, 591 bp, Homo sapiens
tctcttgcagtctagtctcatcaaagtagccagaggaaacttttacaattgtaaatcacacaacatatgattcttctctcaaaactctgcaatggccattctgattaaaagtcaaaattcttatatgcaactagagtctagatcttggtttctaataccattctcctagcaaaacatagggcccttgggagaaatggctgattctaggactgggacaggaaataaacaagatgggcttgcagcatcttctagtgccaaaaagcatggaaatatgcaaaataaacacaacaatgggtgtatgtcaaagcaacattgaagccaattgaaagagcttttaaaggccaawtttagaacattatgagcacaaaatatatattagtattgtagtataacctaaagtttaaaaatgatccatgagttcatattgatgcaaataaatgtttaaataaataaatacatgagaaagaataaatcagtcactcatgccaaattccaaataattcaggcccatgattgagtctgaaattctaccacttacgtcagatgatgaagttctgctctgcctgcccaaatttatggtttggtggatca

SEQ ID NO: 112103 - DNA, 593 bp, Homo sapiens
aagcattgggtacacgtggacacaaagatgagtaaaattgacactggaaactccacaatatgggaaggaaggagtggggcaagtgctgaaaaacttttggatactatgctcagtgcctgggtgatgggatcagtcacaccctaaacctcagcatcatgcaatatactagttgcatgtattggtattgagatctagcagaaakaagaaattttggttgtgctagagaaatctggggtcagtgatcagaaatctgtgatcagaggagaagcttgacccatttcatgatcatgtactagagacatgacaagatcatgtccaagaaacatggcaaaaatggggcatcaaaggaaaatggttctgggtctgagggctcccagccttgcctgtcattcccttacccaaaacatggagcacagacacaacagaggaatcagacttacaggagccacacaagttgtggaaatggacattcagacattctaagagataaccaagggattaatttatccccatccccaggaatctggtatgatgtaagactgagcccctgacaatgctggaggaggagaacaacacagcagaaagggtttctt

SEQ ID NO: 112104 - DNA, 605 bp, Homo sapiens
actcttttgttgttgaattctctgatgagtgtttaggtttttgacattctgtgtatagatgaaaggaaatttcaaattcttcaggtttcagactgtgatggttaatattgagtgtcaacttgaccggattgaaggatgcaaagtattattccaggatgcgtctgtgagggtgttgccaaaggagattaacatttgagtcagtggactgggagtggtagacctaccctcaatctgggtgggtaccgtgtaatcagctgccaatgcagctataataaagcaggcaggagaagatggaagagcagacttgctgagtattccggccttcatctttctcctgtgctagactcttcctgccctcaaacatcacactccaacttcttcagcttttggacttttggacttacaccagtggtttgccacggggcttttgggcctttggccacagactgaaagctgcgctggcggcttccctacttctgaggttttgggactcggactgatcaccactggcttccttgcacctcaacttgcagacagcctactgtgagactttaccttgcgattgtgtgagyccattttccttaataaactccctttcatatata

SEQ ID NO: 112105 - DNA, 399 bp, Homo sapiens
ctgaattctcacaattcagtaacaaacagtaaacagaaaataaacatttctatttacaagaatgtaggggaactaccacctagctataaatataatggatatattaggtcagtatcatagattacaagagtgctcgcttcaggagcacatttaataatagataaaacgatttaaagagaaaacatttacgataaaaagaatcctctcttaaaaatgaaaactaaattayatttatgtgtatataacaaccgtcagagaactctataggaacagcatgttttcaaaactacaaaaaccccaaactattttaaatcaacctagtaataattctatggccaacatttgaaaaataaaccaacaaaatgtacagtatctattaaactatctcttaaaatccta

SEQ ID NO: 112106 - DNA, 474 bp, Homo sapiens
aacttctttgtgatgtgtgcattcatctcaagaagttaaacctttattttcattgagtagttttgaaactctcttttgtagaatctgcaagtggacatttggagtgctttgaggcctatagtgcaaaaggaaatatcttcacataaamactagatagaagcattctgagaaacttctttgtgatgtgtgcattcatctctcagagttgaagctttcttttggtggaacagttttgaaatactctttttgtaggatctgcaagtggacattttgagagccttcaggcctaaggtggaaaaggaagtatcttcatataaaaactagacagaagaattctgacaaacttctttgtgatgagtgcgttcatctcacagagttgaacatttcttttgattaagcagtttggaaacactctttttgtagaatctgcaagtggacatttggaaagctttgtggcctatggtagaaaaggaa

SEQ ID NO: 112107 - DNA, 471 bp, Homo sapiens
actttttcttgtgtgcattcatctcacagagttaaccatttcttttgattgagcagttttgaaactctctttttgtagaatctgcaagtggacatttggagcactttgaggcctatggtgtaaaaggaaataccttcacataaaaactggatagaagcattcagagaaacttctttgtgatgtgtgcattcatttcccagagttgaaccttttttttgatggaccrgttatgaaataatctttttgtagaatttgcagttggacatttcgagcaccttgaggcctatggtggaaaatgaaatatcttcacataaaaactaaacacaagtattctgagcaacttctaggtgatgtgtgcgttcatctcacagagttggacctttcttttgatagagaaatttgtaaaccctctatttggagaatctgcaagtggacatttggtgtgctttgccacctatggtagaaaaggga

SEQ ID NO: 112108 - DNA, 528 bp, Homo sapiens
actggcaggaggttcattttctttattgctacttccccagccataaaactaaaagctttttacctaaatcacgttagccatctcgtgasagtaggagatcatttccttcagagtctttcccgattggagtctagtcctagggtggtttgaacggtccgtttgaatttgaagagctttctaattgatgcttctcatcccctctccaaccagtcttatttggtgtcatctgcctttccccttcctccctaccaaacctcagagtcttgaaacaaaaatctttgtattgtaaacttcatcatgttaatttcatcacttcaaatgaaatttcccttgtttgagtttcctccaactgtgtgacttagggctgttgaactctttcaaatacacaggaaaacggaaacctcttttgctgtctattgattgtataataatacattttcagatgctaatcacatgctttgagcttggttaatgaatgaaattctaaggatattcttatttgaaaggtttacaaatataataactgtc

SEQ ID NO: 112109 - DNA, 618 bp, Homo sapiens
ttgttaatgttagtatattttatgtgtggcccaagacaattcttcttattcgaatgcagccagggaagccaaaaggttggacacccctgcctacacagactttagacaaggttttattaattcctatggctttagataccattgatatgcatatggctcctacagacctctcctcccaagctccaaaacatgtgcwcctgccatcttgaaatctccactgggattttcacaggcattcctaaaatcagaatacaaaactcttgagttctgcccccacatctatgccacttcctcaatcatttcccttttgttagtttatttcttcttcagccttatcattctttataaaaatcgtctccatttacccattggcttcttccagaaagcatcatcatccttgatgctttcttcttcctgcaaccccccctaccatcacaacttgcaaccaagtactgttatttcactttcaaaatatgtgctaaaattatccgcttctgtcatccgcatctttcagctgatctgcaaacatatactcctctatccaactttttgcctctccaataccttctctatggcacacccagagaggttcttcaaaaatttgaattagatcatgta

SEQ ID NO: 112110 - DNA, 618 bp, Homo sapiens
ttgttaatgttagtatattttatgtgtggcccaagacaattcttcttattcgaatgcagccagggaagccaaaaggttggacacccctgcctacacagactttagacaaggttttattaattcctatggctttagataccattgatatgcatatggctcctacagacctctcctcccaagctccaaaacatgtgctcctgccatcttgaaatctccactgggattttcacaggcattcctaaaatcagaatacaaaactcttgagttctgcccccacatctatgccacttcctcaatcatttcccttttgttagtttatttcttcttcmgccttatcattctttataaaaatcgtctccatttacccattggcttcttccagaaagcatcatcatccttgatgctttcttcttcctgcaaccccccctaccatcacaacttgcaaccaagtactgttatttcactttcaaaatatgtgctaaaattatccgcttctgtcatccgcatctttcagctgatctgcaaacatatactcctctatccaactttttgcctctccaataccttctctatggcacacccagagaggttcttcaaaaatttgaattagatcatgta

SEQ ID NO: 112111 - DNA, 618 bp, Homo sapiens
ttgttaatgttagtatattttatgtgtggcccaagacaattcttcttattcgaatgcagccagggaagccaaaaggttggacacccctgcctacacagactttagacaaggttttattaattcctatggctttagataccattgatatgcatatggctcctacagacctctcctcccaagctccaaaacatgtgctcctgccatcttgaaatctccactgggattttcacaggcattcctaaaatcagaatacaaaactcttgagttctgcccccacatctatgccacttcctcaatcatttcccttttgttagtttatttcttcttcagccttaycattctttataaaaatcgtctccatttacccattggcttcttccagaaagcatcatcatccttgatgctttcttcttcctgcaaccccccctaccatcacaacttgcaaccaagtactgttatttcactttcaaaatatgtgctaaaattatccgcttctgtcatccgcatctttcagctgatctgcaaacatatactcctctatccaactttttgcctctccaataccttctctatggcacacccagagaggttcttcaaaaatttgaattagatcatgta

SEQ ID NO: 112112 - DNA, 642 bp, Homo sapiens
ctacatggtgacaagtgtcaaatgacaacattctagtggtggcattccaagatctgcttccgtcgaatgaacttggctgtgctgagtttccctcagttcttaccttgcttctccaacatcttcaatgattttgtgaactattcaatatcctttcattgaagtcctgttttgcttaagttgtctagaatttgttattttcagtgaaaaatataaaccaattatcccctcacattaaaacacactcctcttaggcatctcctctgatctcactggagaaaactctggacattatttgtaatttgactcagaatcataggattagtttggtactagtaacaatggagataagtaactaactttttgtgaaacttcttcctggggtgaaacaaaatctattgkggaaactctttccaattatctctggaaatttattaagtgacctagtatataatgataatttaccatgatatttgataaaatagttttgtgtgttcagaataatttcttttttctttacctttgaaaataatgcattgataggtaattttctcctaaattggctgtttttatttccataaaaggtatttattgaatgtctccttacttttaatataactaggcattgtgtgatcaaagtaaaat

SEQ ID NO: 112113 - DNA, 555 bp, Homo sapiens
taccttgcttctccaacatcttcaatgattttgtgaactattcaatatcctttcattgaagtcctgttttgcttaagttgtctagaatttgttattttcagtgaaaaatataaaccaattatcccctcacattaaaacacactcctcttaggcatctcctctgatctcactggagaaaactctggacattatttgtaatttgactcagaatcataggattagtttggtactagtaacaatggagataagtaactaactttttgtgaaacttcttcctggggtgaaacaaaatctattggggaaactctttccaattatctctggaaatttattaagtgacctagtatataatgataatttaccatgatatttgataaaatagttttgtgtgttcagaataatttcttttttctttacctttgaaaataatgcattgataggtaattttctcctaaattggctgtttttatttccataaaakgtatttattgaatgtctccttacttttaatataactaggcattgtgtgatcaaagtaaaataaatatgttcttg

SEQ ID NO: 112114 - DNA, 407 bp, Homo sapiens
taagaattctgtaaatatacacaatagggtaggaatgagaaaatctttagaggaaatattcaagtacgtttgatttctagcaaatccagatagacagttttgktaacaaccaagtcataattttaagtcttgttataggagctagaattttattcaagggacaactgatttgattagattagatgctgtgcactgcatgtttccttcaacaaatgcacaagttgaaactctaacaatagaatggcattagaaggaggacctttgggaagtaatttggttttgatgaggatggagtccccacaatggggttagcatcctaataagaagagtaggagactagagccctcttctctcagccatgtgaagataaaacaagaacacctgcaaaccagtaagagggccttcac

SEQ ID NO: 112115 - DNA, 419 bp, Homo sapiens
taggaatgagaaaatctttagaggaaatattcaagtacgtttgatttctagcaaatccagatagacagttttgttaacaaccaagtcataattttaagtcttgttataggagctagaattttattcaagggacaactgatttgattagattagatgctgtgcactgcatgtttccttcaacaaatgcacaagttgaaactctaacaatagaatggcattagaaggaggacctttgggaagtaatttggtkttgatgaggatggagtccccacaatggggttagcatcctaataagaagagtaggagactagagccctcttctctcagccatgtgaagataaaacaagaacacctgcaaaccagtaagagggccttcaccagacactggctctgctggcccagattttaatctttgaatt

SEQ ID NO: 112116 - DNA, 428 bp, Homo sapiens
gaattctgtaaatatacacaatagggtaggaatgagaaaatctttagaggaaatattcaagtacgtttgatttctagcaaatccagatagacagttttgttaacaaccaagtcataattttaagtcttgttataggagctagaattttattcaagggacaactgatttgattagattagatgctgtgcactgcatgtttccttcaacaaatgcacaagttgaaactctaacaatagaatggcattagaaggaggacctttgggaagtaatttggttttgatgaggatggagtycccacaatggggttagcatcctaataagaagagtaggagactagagccctcttctctcagccatgtgaagataaaacaagaacacctgcaaaccagtaagagggccttcaccagacactggctctgctggcccag

SEQ ID NO: 112117 - DNA, 546 bp, Homo sapiens
gctggttgaacactaaaaccttggaatgctacatcattattctaaaggatagtcattttttaaaacattttggaagttcttttgaaactgactttttagattatgaaaatatctcagtgataggttttgattttccaagttagaccttattttattttagaaaccgtcaaagttatacaaaaccaagcatgtgtctctgcgcattttgttttctctcctcccttaatggtaaggaagggtttcatctcttttataggccaaatgctccacaaatgaatgtgttaacgaaygaacaaattaataaatggcaagaatgagagctcaaactgcataaaagtatacttacttaaaaacgagatgtgacgattgctaacatgtcataaccagactctgtcctgacttcggcaagccacaactttgacaataaagaggaaagaggatcaagtccctaaataccgcaggtgcactaagaccttctcacgtgcccgaagaagatacacttgcagaggagaaatgatgatgcagaggcctgctccgagatgcagg

SEQ ID NO: 112118 - DNA, 546 bp, Homo sapiens
gctggttgaacactaaaaccttggaatgctacatcattattctaaaggatagtcattttttaaaacattttggaagttcttttgaaactgactttttagattatgaaaatatctcagtgataggttttgattttccaagttagaccttattttattttagaaaccgtcaaagttatacaaaaccaagcatgtgtctctgcgcattttgttttctctcctcccttaatggtaaggaagggtttcatctcttttataggccaaatgctccacaaatgaatgtgttaacgaatgaacaaattaataaatgrcaagaatgagagctcaaactgcataaaagtatacttacttaaaaacgagatgtgacgattgctaacatgtcataaccagactctgtcctgacttcggcaagccacaactttgacaataaagaggaaagaggatcaagtccctaaataccgcaggtgcactaagaccttctcacgtgcccgaagaagatacacttgcagaggagaaatgatgatgcagaggcctgctccgagatgcagg

SEQ ID NO: 112119 - DNA, 546 bp, Homo sapiens
gctggttgaacactaaaaccttggaatgctacatcattattctaaaggatagtcattttttaaaacattttggaagttcttttgaaactgactttttagattatgaaaatatctcagtgataggttttgattttccaagttagaccttattttattttagaaaccgtcaaagttatacaaaaccaagcatgtgtctctgcgcattttgttttctctcctcccttaatggtaaggaagggtttcatctcttttataggccaaatgctccacaaatgaatgtgttaacgaatgaacaaattaataaatggcaagaatgagagctcaaactgcataaaagtatacttacttaaaaaygagatgtgacgattgctaacatgtcataaccagactctgtcctgacttcggcaagccacaactttgacaataaagaggaaagaggatcaagtccctaaataccgcaggtgcactaagaccttctcacgtgcccgaagaagatacacttgcagaggagaaatgatgatgcagaggcctgctccgagatgcagg

SEQ ID NO: 112120 - DNA, 504 bp, Homo sapiens
gtatgttttcaaatttaaaattgtgagccatctaattttgttcttcctttcaagattattctgtacattcagaggattttcaaattccataagaagttttaaatgarttattttgtttttgcaaaagaaaagttggaaaaattaaaaattgggattacagtacatctgtacactactttgggtagtagtattgtcatctgaacttcattaagtcttccggttcaggaacatggaatttgttgccagttatttaactcctttttagtttttttcataaatattctgatcctgtattttttattgtacaaaatatgtaccttcttattaaatttatttctaagaattatattattttaatgttgttgcaaacaattgttttattaatttactgtcaaattgttcatttttggtatatggaaatgcactttatgtttctgtgttgtaaaaataattatttcatctctcaaatctagattagcaattaattcagaataaatatgccat

SEQ ID NO: 112121 - DNA, 504 bp, Homo sapiens
gtatgttttcaaatttaaaattgtgagccatctaattttgttcttcctttcaagattattctgtacattcagaggattttcaaattccataagaagttttaaatgaattattttgtttttgcaaaagaaaagttggaaaaattaaaaattgggattacagtacatctgtacactactttgggtagtagtattgtcatctkaacttcattaagtcttccggttcaggaacatggaatttgttgccagttatttaactcctttttagtttttttcataaatattctgatcctgtattttttattgtacaaaatatgtaccttcttattaaatttatttctaagaattatattattttaatgttgttgcaaacaattgttttattaatttactgtcaaattgttcatttttggtatatggaaatgcactttatgtttctgtgttgtaaaaataattatttcatctctcaaatctagattagcaattaattcagaataaatatgccat

SEQ ID NO: 112122 - DNA, 504 bp, Homo sapiens
gtatgttttcaaatttaaaattgtgagccatctaattttgttcttcctttcaagattattctgtacattcagaggattttcaaattccataagaagttttaaatgaattattttgtttttgcaaaagaaaagttggaaaaattaaaaattgggattacagtacatctgtacactactttgggtagtagtattgtcatctgaacttcattaagtcttccggttcaggaacatggaatttgttgccagttatttaactcctttttagtttttttcataaatattctgatcctgtattttttattgtacaaaatatgtaccttcttattaaatttatttctaagaattatattattttaatgttgttgcaaacaattgttttattaatttactgtcaaattgttcattkttggtatatggaaatgcactttatgtttctgtgttgtaaaaataattatttcatctctcaaatctagattagcaattaattcagaataaatatgccat

SEQ ID NO: 112123 - DNA, 546 bp, Homo sapiens
gctggttgaacactaaaaccttggaatgctacatcattattctaaaggatagtcattttttaaaacattttggaagttcttttgaaactgactttttagattatgaaaatatctcagtgataggttttgattttccaagttagaccttattttattttagaaaccgtcaaagttatacaaaaccaagcatgtgtctctgcgcattttgttttctctcctcccttaatggtaaggaagggtttcatctcttttataggccaaatgctccacaaatgaatgtgttaacgaatgaacaaattaataaatggcaagaatgagagctcaaactgcataaaagtatacttacttaaaaacgagatgtgacgattgctaacatgtcataaccagactctgtcctgacttcggcaagccacaactttgacaataaagaggaaagaggatcaagtccctaaataccgcagktgcactaagaccttctcacgtgcccgaagaagatacacttgcagaggagaaatgatgatgcagaggcctgctccgagatgcagg

SEQ ID NO: 112124 - DNA, 574 bp, Homo sapiens
atttatttatttatttattttagtgacagggtctcaccatgttgcctatgctggtcccgaacttctgggctcaagcaatcctcagcctcccaaagtgctggaattacaggcgtgcaccaccacgcttggccaattttgctttttgtcctcactgaacagcagttttttttttcctacttactgaaatgtgtctgtttctaaaatattattacttgtatgggattttaaaaacagatgcctgtttttttctggttctaaatttgaaggtattattttctttttcaattgaaccctgggtggccctatctaacacttttggatttcaactggcttttatttctattgtatttgaatgaagaatcaggaaattctattgggattacatattttatggttatgttgagattatgagagataccacctmcactactgcatatatttcaaaatgatgtttttaggttttctgttctttgtgagcctcttcatgtgtctctttcatgacttgcatatgagacagctgaggaagaaacaatcagtctatacttcctttggcatttataccatgcataaatat

SEQ ID NO: 112125 - DNA, 620 bp, Homo sapiens
ctgacatttttctaatattggtatggtttttcctacactttatgtcattaaaaattatgcatgcctcaacaacagcatatcccaattgagtcatatcaatgtaaataaaaatgcaaagaggcgaagttgataatattaccaaaaaattggtgtttagggtataatatggagattcagtctgcacagatgttcagcagaaataagatctgcacctcaattgagtaagagtattacctgttttattgctctgtctatgtacagcaggcaagggtagagagactgtgaccttgaatgcatcacaraaaaacatgctgctttagaaaaaagaaaaaaaaatcactactccaaggtatgttcaaacagttgaaaaacagtaataataaaaaaagttaaaattataaaaacattaaaccaacaaacatgacaatatctagtgtttacatttatggtggaagctgtgaacacataattttagacaagataaaaaatggaaaaagagaagctattttattttctcatttagacaggggattcaaagaatgaatcactacctacaattcctatattgtatgtaaccagataacgaagggctataatttgcaacatgattattgtgcatt

SEQ ID NO: 112126 - DNA, 587 bp, Homo sapiens
gagaaggagggagtgggaagttatggtctactgggtacagagtgtctgtttgggatggtgaataagttctggagatggatagcaatgatggttgcacaacaatgggaatgtacttactatcactcagctgtatacttaaaaatggttaaaatgatcagtttcgtgtatatatatatgtaactacagaaaaatatgtatagttataatgtatatataactacagtaaaacatgtataggcttctaaacatttttaaagtatgaataataaaaatatttggaaaaataaatgcttttctattttattgtattaaccctatcatttasagagaagaaagcttgtctttgagggtattaaagttttaaaaattattttattttaaaactattaaggctcattaaaattttgagaagtgtggaagagcccagagtgaaaataaaagccctctccccctctttgatgctctccaaagtaactactgatatactttcctctgtatcctttcaggcattctttctgggtgcacacgcacaggcacacacacacacacacacacacacacacacactctctctctctctctctctc

SEQ ID NO: 112127 - DNA, 587 bp, Homo sapiens
gagaaggagggagtgggaagttatggtctactgggtacagagtgtctgtttgggatggtgaataagttctggagatggatagcaatgatggttgcacaacaatgggaatgtacttactatcactcagctgtatacttaaaaatggttaaaatgatcagtttcgtgtatatatatatgtaactacagaaaaatatgtatagttataatgtatatataactacagtaaaacatgtataggcttctaaacatttttaaagtatgaataataaaaatatttggaaaaataaatgcttttctattttattgtattaaccctatcatttacagagaagaaagcttgtctttgagggtattaaagttttaaaaattattttattttaaaactattaaggctcattaarattttgagaagtgtggaagagcccagagtgaaaataaaagccctctccccctctttgatgctctccaaagtaactactgatatactttcctctgtatcctttcaggcattctttctgggtgcacacgcacaggcacacacacacacacacacacacacacacacactctctctctctctctctctc

SEQ ID NO: 112128 - DNA, 577 bp, Homo sapiens
aagtaatgaaaagttaataaagccattataaatataatcaaaactataactttgctatagaggtaaataattaattgcttgtgaaacactaaattgtaattcagtggcatttatgaacaatataaatgtataaaattcaaataaatgaaacatcaataaatgtgatctattgctggcaacttgaggagggaataattaatagcatctttttttttctgcccaagttgggaaccaattaagaaacacagrgatcagacagatagagatcaaaagagcatcgagaatactgataacacctaaattagagaatgtgtctttcagtctattagccatgttggctagctcagactataacctgaagttgaacttgctcactcagttccaagtattgctgggaatttacaagatgtctcaatggggtcctgctcttttaaggatctaaggaatgtgatgcagagagtatgtgctttttgctagtaggcatattccagtgaggaagaggctgggtcacacttattatcttctctcaatatcacccatgggaaaagttacttctctcatgggcaagagtgaatat

SEQ ID NO: 112129 - DNA, 435 bp, Homo sapiens
gattagcgagtgggcatttttggtgaggggaatattattatgtctatggcaccatcataaatttaggtcagatttaagatatagtataggtatagtataaatatatattttatttgccatgggtgaacttygaatacattggaatctctagtaaaattaatgtatattttatatcattccccatttttatgtcttaaaaatttcttaagttttttagtataatagttatacaggtctcaggtctatgatagctttcttttttttttttttttttttgctttgtaacatattatggttatttctattacaggaggtatacactgagttccaatcctggttagggttatagccagtattacaatgtgcttctattagattacagtgttcttaataagaaatgtgttctaagacagagacttccagttagacactgat

SEQ ID NO: 112130 - DNA, 578 bp, Homo sapiens
ttcagacttatagaatatgcatatatctttcagaatgcagaagtcttgcacagtgtgatatgcgctttgggcatggatcaaaaagaatttccaaattctatattggcatgtggaaggggagggtgaattattagtgatattgaggtattaattattcagtcttactgccatgcattatgaataatgtacatggcattcaatagcagaacagcagttcccatcagtatgcaatggtctataaacatatattgggacaccagagcattagtactgtaattacttggtcctggatcttagtatgaatacttcatcttcatcaggattagtaggacaggcctttgtttccatataactctggtgttgacccagcgggtagcatgagatgaaataaagttatgcttggcaaagtggattaattctsttgggaaatagcgcttagaaaataaactgtgatatgcagcaaactaaggtagagaaaaagaggtagagaatatttctttcttttttctttttttttttgttttttagttcttgtttcccttccatccttccttccgtccttccttccttccttcctt

SEQ ID NO: 112131 - DNA, 578 bp, Homo sapiens
ttcagacttatagaatatgcatatatctttcagaatgcagaagtcttgcacagtgtgatatgcgctttgggcatggatcaaaaagaatttccaaattctatattggcatgtggaaggggagggtgaattattagtgatattgaggtattaattattcagtcttactgccatgcattatgaataatgtacatggcattcaatagcagaacagcagttcccatcagtatgcaatggtctataaacatatattgggacaccagagcattagtactgtaattacttggtcctggatcttagtatgaatacttcatcttcatcaggattagtaggacaggcctttgtttccatataactctggtgttgacccagcgggtagcatgagatgaaataaagttatgcttggcaaagtggattaattctgttgggaaatagcgcttagaaaataaactgtgatatgcagcaaactaaggtagagaaaaagaggtagagaatatttctttcttttttctttttttttttgttttttagttcttgtttcccttccrtccttccttccgtccttccttccttccttcctt

SEQ ID NO: 112132 - DNA, 635 bp, Homo sapiens
gtcctactttttttatatatagaaaaaaaatctagttacttgttcattttatagcatatataaattccttgactccaggtttctctcatttaaaaaaaattattccctttaaatataagttttccatatctcatttgttgtcttaacacataaagcacttcacagattcttttgcttcttggaggcaccttagctatactcagtttcacaaataaacaattcctttgtctcctaatatgtctatatttcttcattcaaataatgcatgtttctcatgaattcaaaacagttttaatcattttgagcaggaaatcatttgtacccatttcatccactttcccactaaggtcttagccagatacctcggaaatttgagtttatgacctaaagatatcaattcatcaaggtttcatatatgtttctgaatgaacaaaatggcaaagtgaatgtaggagtggtagtttgctcactcatatgtacaagaatattgtagtaccattatttttcacctgtgggatagtaattgtctagtatattggaagcaaaatcatgcagctrtaatgtaccacacattgaaatgtgtctttacttcaatttgccctctatttttgtccagacacaaagattgagaatgt

SEQ ID NO: 112133 - DNA, 647 bp, Homo sapiens
agtataaggttaagagacttgagatggggagattagcctggcttacccgggtgagcccagtctagctatattggatcaccatcttcttaaaagtagagaatcttttctggctgaagagggtcaaagaaatttagtaagaacagcctgatacttcatcatttgttttaagaatggaggaaggaaggcagaagccaaggaatgtrgcagtctttagaagctggaaacagctctcaatctagaagctaggaaaaaaaaatggggactttaactgttacagggaaatgaacagaaattgtattctttcctggagacctcccaaagaagcacagccttgcagacaactatattttagcctatttacacaaacgttctacttctggcccacagagttgtgagaaaaaaaaaaaaagtattgttttaagccactaatttgaggtaatttattgtggcagcaattgaaaaacctaataaaggtgtctgtttacaccatcttcatcttagaagccaattttaaaaaactaaatataagtgttaaagttcatagatattcatgtgtgacataactggacacctgttaagatcttcacattcacatagaccaaagcatcatatcactttccacatatacaagtttagaaaatacccta

SEQ ID NO: 112134 - DNA, 603 bp, Homo sapiens
aatatgtaaaaccctcagaacagtgtcttgtacatggctttaaaaaaagtatatgtgttagttattttcattagtattttattagtgtatgtgtctctgttcattttgcattgctataaatgagacaggatattttataaacaaaaaaggcttgtgtggcttatattctcctggctgaaagattgttatctgtagtgtccagccattcatgcctcagctgttatgaattcctcccagttgtggctccagtttcttcctgatctttttcagagcctgtttctctggtcatcacagtgataatgtgaaacaccaaatatctattttacaaatcacagcttcattgagatataaatcatatactatgcaattcatagttatgcaacaattatcacatcaaggttataatatttttatcactccaratagcaacactacacccattagcagtcactccctattttccccaacccttccacccacagccctaggcaagcactaatctactgtctgttactatacatttgccttttctggctatttcgcatacatagaagcgtatcatatgtgatattttgtgattggcatctatcacttagaatatag

SEQ ID NO: 112135 - DNA, 575 bp, Homo sapiens
ttttagtactctagttccagtggaaacttttcaaacaagcagtttttaggagtaaagaaaattattaaaatatgtaaaagccagccttctcttcttttctgtgtgtgtgtgtgtgtgtgtgygcgtgtgtgtgtgtgtgtgtgtgtgtgtgtatgtaggtatgcacataacctctttactacctatgtgaacaagacctaccttttaaaatcatttgatcatcatcttgaaaacttaagccaggccactgataaaggaaaaagtcaactttaaataaattctcctaaatttaccaaccttttccagaaggaaatagactatgaacttttgccagaacattctcctatgaatctgtgatgatctgagactgtcttgcaccattaaccaattcacaaaatagccctccgtacaaatatatctcctctgcattctttgtggtttcagaatggacatttatttaaatgcaacctactgcagttatttaatgaaattattcactatttgttaggtttttaaatttttattttatcttcttatgagaagaaaaccaaaattatctgaccacttatcatatc

SEQ ID NO: 112136 - DNA, 636 bp, Homo sapiens
gtgactccgtctcaaaaaaaaaaaaaaaaaaaaaaaaaagaaagaaagaagagaaaagcctgcagggtttgaaagtcacagaaaaggctgctcttcctttccttcaccctacccaagcactgagctcacatctgatcagcatactgcttttctttccagggcgacttgcctccccactggtactgtgggtcataccccactgatatgttaayacagtatgcagaaagttaactctaaaatcatgatcagaaatgttcaaagtaaggcactggttctttctccagaacaggagcctttatgagatggaaattgggtcattttcctttgcataagaaaggaaatttgagtaaatcaaaagaaaaattgtaggcccttcataaaaccacagtctcacagtggtctttttccatttttaaatggtgctagttgcatttactctgactttgaaaacaaagaaggataagttatctttgtgatctctgtaaagaggctggtcaaatagtgaggtggggaaaagagaagttgtatattttcctatggctttgcatttaatgaatttgtaatttgcaagctgtttccaagcatttttgtacgctccagagtctgaaaggtacacaggaatgagatcatgagtcc

SEQ ID NO: 112137 - DNA, 636 bp, Homo sapiens
gtgactccgtctcaaaaaaaaaaaaaaaaaaaaaaaaaagaaagaaagaagagaaaagcctgcagggtttgaaagtcacagaaaaggctgctcttcctttccttcaccctacccaagcactgagctcacatctgatcagcatactgcttttctttccagggcgacttgcctccccactggtactgtgggtcataccccactgatatgttaatacagtatgcagaaagttaactctaaaatcatgatcagaaatgttcaaagtaaggcactggttctttctccagaacaggagcctttatgagatggaaattgggtcattttcctttgcataagaaaggaaatttgagtaaatcaaaagaaaaattgtagrcccttcataaaaccacagtctcacagtggtctttttccatttttaaatggtgctagttgcatttactctgactttgaaaacaaagaaggataagttatctttgtgatctctgtaaagaggctggtcaaatagtgaggtggggaaaagagaagttgtatattttcctatggctttgcatttaatgaatttgtaatttgcaagctgtttccaagcatttttgtacgctccagagtctgaaaggtacacaggaatgagatcatgagtcc

SEQ ID NO: 112138 - DNA, 636 bp, Homo sapiens
gtgactccgtctcaaaaaaaaaaaaaaaaaaaaaaaaaagaaagaaagaagagaaaagcctgcagggtttgaaagtcacagaaaaggctgctcttcctttccttcaccctacccaagcactgagctcacatctgatcagcatactgcttttctttccagggcgacttgcctccccactggtactgtgggtcataccccactgatatgttaatacagtatgcagaaagttaactctaaaatcatgatcagaaatgttcaaagtaaggcactggttctttctccagaacaggagcctttatgagatggaaattgggtcattttcctttgcataagaaaggaaatttgagtaaatcaaaagaaaaattgtaggcccttcataaaaccacagtctcacagtggtctttttccwtttttaaatggtgctagttgcatttactctgactttgaaaacaaagaaggataagttatctttgtgatctctgtaaagaggctggtcaaatagtgaggtggggaaaagagaagttgtatattttcctatggctttgcatttaatgaatttgtaatttgcaagctgtttccaagcatttttgtacgctccagagtctgaaaggtacacaggaatgagatcatgagtcc

SEQ ID NO: 112139 - DNA, 598 bp, Homo sapiens
gcccacccttctaggcaaaagccactgagtccccaggatgagtaaactagggcagttttttcagattcacccttgggagagaacctacagactagacagtgaatcagtcacggagaacaaactcttggagaagctaagaaaaactcttggctcataaactctcacttgtctcataaacggccccaatccctccctaccatggcaatgtcaagtctagcccctcccctaaaaggtacatgaggtcttgtttttttacgaggaacatgcaagatcagggtcatttttaacttgaaagagagttttaaccagatcaaaaatgttaaagtggaagaaaggtgcttgttttaattatctattgcttcaggacaaaccgccccccaaaaaaagtggcttaagtaaaaaataactagttctcatgattgagtggggtgatgasgttcagctggacagttttactccctgagatgtcagctgggttctgtggtcatctgaaggttcatcttgactggacgtccctggtgacttgctcacacactggcactcggtgctggctgttggctgggagctcggctggagacatcaatagaagcacttcagt

SEQ ID NO: 112140 - DNA, 435 bp, Homo sapiens
ctcataatgttaattattatcctcacactgtttgatgttctaaaagctctgtaaggatggctgcattcccaggatcatttgttgacaatgctcatatgaaccaagatactgattctgctgaatgaatgtgacatagacctgtcatgtcgcccagatatttttgtatagttatttctcaatttttttatttaacagcaattcttcatatgaagtcttatatggaacatccatatgtgaagtaaatatacatgaagtggttttgatataaatagggtaaggagttctggttgaaatctatatttttggccaggtatggtggctcacgcctgtaatcccagcactttgrgaggccgaggcgggcagatcatgaggtcaggagatcgaaatcatcctagctaacacggtgaaaccctgtcttcactaaaaatacaaaaa

SEQ ID NO: 112141 - DNA, 646 bp, Homo sapiens
gtcataacaatagctaaataccataaagagaatattaatcaggctatgttgaagtcctaaacttaggtttaaacatcacattatatgattatagaaatagacatctataattcaagggaatgagatataacttagtaatctgtgaatgatacttttcactgaatgtgagaattacatatagcttgtattatcctgttatcatgctgttaaaaggacatacccacaactgggtaatttataaaggaaagaggtttaattgactcacagttctgcgggctggggaggcctcaggaaatttacaatcatggcagaatgggaagcaaatctgtccttcacatggcaacaggagagagaatcaccaagcaaagggggtaaagccccttacaaaaccatcaaatctcatgagaactcactcgctatcatgagarcggcatagaggtaactgcccccatgattaaattacctcctacttgatccctcccacaacacatggggattatgggaactacaattcaagatgagatttggttggggacacaaagccaaataatatcattccacctctgacccctgccaaatgtcatgtccccacatttgaaaacacaatcatgcctttgcaatagtccccaaagttttaactcattcc

SEQ ID NO: 112142 - DNA, 584 bp, Homo sapiens
ggtaatttataaaggaaagaggtttaattgactcacagttctgcgggctggggaggcctcaggaaatttacaatcatggcagaatgggaagcaaatctgtccttcacatggcaacaggagagagaatcaccaagcaaagggggtaaagccccttacaaaaccatcaaatctcatgagaactcactcgctatcatgagaacggcatagaggtaactgcycccatgattaaattacctcctacttgatccctcccacaacacatggggattatgggaactacaattcaagatgagatttggttggggacacaaagccaaataatatcattccacctctgacccctgccaaatgtcatgtccccacatttgaaaacacaatcatgcctttgcaatagtccccaaagttttaactcattccggcgttaacccaaaagtccaagtccaaagtctcatctgagacaaggcaagtcacttccacctataagcctgtaaaatcaaaagcaagttagttacttccaagatacaatgggggcacaggcactgaataaatatacccattccaaatggaagaaattggacaaaaga

SEQ ID NO: 112143 - DNA, 596 bp, Homo sapiens
caggctggagtgcagtggcacaatctcagtttactgcaacctccacttcccaggttcaagcrattctcatacctccgcctcccaagtagctgggattacaggcatgcaccaccatgatcagctaatttttgtatttttagtagagacatggtttcaccatgttggccaggctggtctcaaactcctggcctcaagtaatccacctgcctcgacctcccaaagtgctgggattacaggcctgagcgccacttcgcctatttacatggtagcctaaatgtcagctctgcctctagaaataaagatggaattcatagatgcccagtttctgtgcctatgggaagtcaattctatctccacagctgaggtgtattcccagccgcttgtccttccctggtcacccctggctccatactccatttttcagagtgcagttatggattttctcaagtcttttgggcattgaccgtgtgaaaccagctggaaattgtcacttttcttcacactcgtgatgatacacacaaacaaacaaaaactcctgtgcaagtactgagagtagcagatttatctgaatatttataggggcagaggatcagaag

SEQ ID NO: 112144 - DNA, 555 bp, Homo sapiens
aagaccttgctgctcctcagatgaactggatctagaccatgaataaataggagcacttttttattccatggtggtgtctgcaaagcaccaaggttccctgcattgctcatgttggcctgtggacttaaaatatttggtaagaatcttctggtckgccaggtgtggtggctcatgcctgtaatcccagtactttgggaggctgagataggcagatcacttgaggtcaggagttcaagagcagtccgtccaacgtggtgaaacgctgtctctactaaaaatataaaacttagcagggtgtggtggcacacacctgtagtcacagctactcgggagactgaggtgggagaattgctacaacccaggaggcagaggtcgcagtgagccaagatcgtgccattgcactccagcctgggcgacagagggagactccatctcaaaaaaaaaaaaaaaaaaaggagagagaatcttctggtctttcccctactccactatctgttggtgtttattcatatatagttgtcttctcttattttcgtcttgctccacgtaagacag

SEQ ID NO: 112145 - DNA, 593 bp, Homo sapiens
ttccatcaacccaaaaaatattctgtgtcattgcagaggcaattcccctctaagaaacaaccactaaccctgttgtttatcactatatgacagttttgcatattctaaagattcatttaaattaaattatataatacgtcatcttttgcatcttctttcattcagcataacatttttgagaatgatttatgttgctgcagatatcggtagtttatccattttatttatgagtagtattctattacaggaatatttgtttgcttatccattctcctattgatgtacatstaagattttttttgctttgggcctattatgaaaaaaagttgctatgaacatttttatatggttttttgtacacataagtcttcttttttcttggataaattctaggagtggaattgttaggtcataggggaaatgtgtgttaaacttttaaagaaactgccagtttcctaaaatgattgttacatttcgtattcccaatagcaatgtatgagagtttcagttgctccaaaatttgatgatgtcaatattttacattttacccattctagtaggtgtgtcgtgtagttcattgtggtttgcacttg

SEQ ID NO: 112146 - DNA, 624 bp, Homo sapiens
agaacttagcaactttgcaatgggcatcaaatatgcctgttgttaatcaggcatttccctggcttagaggtaaaagtatatcatgttctaacctggatagaatttggggctagggatgttgagagacttaatttatcaacattgaccaaaaaagtgaaccgtacaattcatgatgaattcttaatgctgtgaagctgcatgctcgttttagtctcatcttattaaaatatgttgccacagtagctgacatttccttatttgaagaagaacacatggactttgaagaaaaacctagattcacgtcctgccctcccccattatttgctgtgttttgttggccaagatagcaagctattcygagtctcagctttgtcatttgtataggattaagtgatgaaaatatggtgttctcaatgtttgggttctggcatccaacacaggacagaatgaaaatacttcctacttgtttagatgtaagtcttttttcagaactttttaatcaatttattaattttgttattttttccctgagcttattttatgttatgaaatatgatagtcaggtaccaacctaaactgacaagtacaaaaaaagggaaaaagcaattaatttgctggtacaag

SEQ ID NO: 112147 - DNA, 577 bp, Homo sapiens
ttttatggatgagaaaactgacagtaagttcattagtctaaggttccacagatagcgcagagcagcccctgggtttcaaccatttccacctggccctgaagtgcattctttgaaccactatactttattgcctctaccttgaagtgggcagctaaacgtaaccacaaaggagggtcacttatagatagctggcatatttaaaccagtatctattaatcttatgcaattcctatttagaaagggggtgtaggttgtatggagtgtacggcagactttgttttgcacacatttggcaagaggaaaaagtcttagactttacatttatctctcctgcaaataagaactgttcctcwaggggaagccatcttttgaggcaagtaatattttaaaagaaatcaatctccaaaaggcaatttattgattgaggagctgagcaaggagcaaaggaccatttccacttgatatcagggaagggattatttcccacctctctgaggactcaataattcctctgagataacctgttttgattaaataaactgatgaatccagtctctaatctcaatagatatcatcc

SEQ ID NO: 112148 - DNA, 427 bp, Homo sapiens
atttatggaatgcagtgtgatactttgatacatgtatactactttgatacatgcaaacaatgtgtaatatcaaatcagggtaattagcaaatttatcacctcacaactgtattttgtctttgtgttggtaacattcaaaatattatcttgtagctatttgaaaaaatacaatgaattgttgtttacccatagagctacctaaggctagaacttatttcccctatcttkctataattttgtatctgttaacctctccctatccaccctttcacctacccttcctaacctctagtaaccactattctactctctacttttatgagatcaactttttgagctcccacgtatgaatgagaacatgtattatttctctttctgtgcctggcttatttcatgtaacatgatgtcccccaggcttatccacatt

SEQ ID NO: 112149 - DNA, 664 bp, Homo sapiens
tcctggttactgaaactccctggggagaggattgaggacatttgtgttcctttgaaaaattcatctttaagaaaaataaggagaatttttaaagccttttccttcttccctattggtagcaataatctactaagtcactatatttagggatgatatttcctaaattccactagctagttttaagggaggagaccacctctcatattgtcttctgcctaatttctgcctctaaggaaagagaaagtaggagttaaagaaaaggcagaagtgaaattcaatagaaagacagcctggtgccacattccgggcctggtagttaaagatcaacccctgacctaatcacttatgttatctatagattccagacattgttgaggaagcattgtgtaactccctgtttkgttcagttctgttctgatcactggtgcgtgcagccccaatcacataccccctacttactcaatcaatcatgaccctttcacacggaccacttagagttgtaagcctttaaaaggggcagaaatttctccctcgggagtgcagtttttgagatgtgagtctgccaatgctctgagccgaataaagccttttccttctttaacttggtatctgaggggttttgtctgcagctcgtcctgctacagttttgtttagtaagaaattt

SEQ ID NO: 112150 - DNA, 619 bp, Homo sapiens
tgctgagcactgggtccataggtccagcagccaaaaataagtgcacttccatctggatgtcccacaggcacttctaatatgttggaaacaaaattcataatttagctctctccctgcctaaaaacaaaacaaaatgccttgtactctttctgtattccctattttaatgcataatactgcattctattactaaagcaagaaacctaggaatcatccccgaatcgttcctttatctaatacaacatccaggtggggactaaggttccataaagtaaacttcgttgtatttgtattatgtctccttcttcttttcctccacttttgctaatttagttcagattctgccatcattcctcacctggacagtggctctttactaactaatctccctgcatgtaactggagagcatccagtctaccctctataaaatgcattgagtgatggatctaaaacagtgcttccccaaccttaatgctatccaagaygtaacctgatttgccaaaacacgggcccctttcctggagactcttactcagtagctctgggtggggtctgataatttacacttctaataaagctccaaggtgatgctaacacagcaaaaatacaagccacacc

SEQ ID NO: 112151 - DNA, 619 bp, Homo sapiens
tgctgagcactgggtccataggtccagcagccaaaaataagtgcacttccatctggatgtcccacaggcacttctaatatgttggaaacaaaattcataatttagctctctccctgcctaaaaacaaaacaaaatgccttgtactctttctgtattccctattttaatgcataatactgcattctattactaaagcaagaaacctaggaatcatccccgaatcgttcctttatctaatacaacatccaggtggggactaaggttccataaagtaaacttcgttgtatttgtattatgtctccttcttcttttcctccacttttgctaatttagttcagattctgccatcattcctcacctggacagtggctctttactaactaatctccctgcatgtaactggagagcatccagtctaccctctataaaatgcattgagtgatggatctaaaacagtgcttccccaaccttaatgctatccaagatgtaacctgatttgccaaaacaygggcccctttcctggagactcttactcagtagctctgggtggggtctgataatttacacttctaataaagctccaaggtgatgctaacacagcaaaaatacaagccacacc

SEQ ID NO: 112152 - DNA, 588 bp, Homo sapiens
gtgtgccatttcaatatactgtcttacaaagctcccatagagactgggcctttgttatggaaaagcatgcaaagtatttaacatatatcacattttgcatactgttggtcttcaaatattgataataaattgggtaatgggcaattgcaaagtgttttgagaatatggggttgctgaaatatgtatagaaaatgggcgggccctgttagattaagtaatgatattttaaaagtgttatctgactccagtaaaatgcattggcaaaagtatactctgaactgtatgtgatgtttcccgcttgggctatatttcgtgttgccttttcttaattctgtcagtaacaataacagtatcaaaaaggtggaggatttcaggacataccctaaagtcacaaaagcatttttaattttactattttattttaaaagtctgggcagctagaggcatattttgtgacattttgtaaagttgaagcctccagagatccttaagttctaccctcattttggacaagctctgracctattaccaaattcttatgtaaactgtttttgatagtttaagttttatatttctacttagctcaag

SEQ ID NO: 112153 - DNA, 639 bp, Homo sapiens
ctttctgtcctttgtttcccagaacaattggacatgtattttgtttctgcagcactcattcacctaaacttcatgagcacctgtcatgtgccaagcactgtgaacacaaaaacgtgtaagacaaaattgctgtctgcaagaggctcacagtccagtaaaggaagtaacatttgcagcaaaaaaactacccaaagggtatggaagatgtgctgtggagggtgacttggtggggagaggaaataccatttcacatggagagaacagctcaggtaagcctggggagacttgagatgcctgtggttgcatttctggcatcaccggtatttcaatgggtaactgtcaacctcattttcagttcttggaattaaactgattcatctgtcatataaaccaggggtcccccaacccccaggccatggaycggtattggtccgtggcctgttaggaaccaggccacatggtaagagatgagcagtgggtgagtgaatgaagcttcatctgtatttacagctaatcctcactcggattaccacatgagctctacctcctgtcacatcagtggcagcattagattcctataggagcacaaaccttattgtgaactgtgcatgtgaaggatttaggttgtgagctccttat

SEQ ID NO: 112154 - DNA, 623 bp, Homo sapiens
aatattatttactcaatcaataagccagtcaataagtatttattgaatgataattatgttctaggcataggggatattacaggaagctaattagacaygagttacataaaacaaatgtcaaattgtaactgtaaagagggctaggaaagagaggtgccctggaccacaagagctattatgagggttcagcatggccagagagagcttgttcggtgatctgagggacagagagttcaaccaggtgaaaggagataggagcattccaggcagagggagcagcttgtgcaaaggccctgtggaggaaaggatattggtgataatgaggggggaatggagacctttgtggttcaagttgggagagaggggactggaagacaagttaattttgaaggagtgggcaggggtcagtcatgaaaggcatccctataaaaatgagaggagcctggcttatcattgtctttgttagaatgtgtgtatccccttctattcctcctcagcttagtaccatagttaagagcctgaattctggagtcaggctgccatgattagataccagctctcctacttaaaagctttgtgaccataagcaagttacttaacctctctgtgcctcagttgcctta

SEQ ID NO: 112155 - DNA, 542 bp, Homo sapiens
gtgttttgtcgaggattttttgcatcagtgttcagcagggatattggcctgtagttttctttttttgattttttttttttwaatcagggtaatactagccttgtagaacgagtttgggagtattccctcctactctattttttctggaatagtttgagtaggattggcgtcggttctttaaatgtttgctaacattcagccatgaagtcattgggtcccagacttttctttgctgggagactttttattacagctttgatattggtctattacttgttattggtctattcaggttttggatttattcatggttcaatcttagcagtttgtatgtgtctaggaattcatgtttcttgtaggttttccactttattggcatgtagttgctcatagtagcttctaatgatcctttgaatttctatggtttcagttgtaatatttctgttttcatctctgattttatatttttgtattgtttctcttttttttttttttttttttttgctagtctggctaaagctttgtcagttttccttcttagg

SEQ ID NO: 112156 - DNA, 663 bp, Homo sapiens
acgcccatgctggaagactgtgggtttatgggaatgacggcaaggaacacctggcctgcccagggcggaaaactgcttaaaggcattcttaagctacaaacaatagcttgagctatttgtgccttatgttcctgttgcagttaactagcccaacctattcctttaattcggcccatcccttygtttcccataagggatacttttagttaatttaatgtgtgtagaaacagtgttaatgactggcttgctgttaataaatacgtgggtagatctctgtttggggctgtcagctcagaaggctgtgagacccctgatttcccacttcacacctctatatttctgtgtgtgtgtctttaattcctctagtgccactgggttagggtctccccgaccaagctggtcttggcagactgtatgcatacctcagtctactgttgatgggcagtgtgactcaagaggttaacatgatggtagatctaggagttcctgagatttcttttggagttgaaaatggcttgtggttttctaaagtcttttaacccatataggtatagtaataatctctgcttcattgcagaagtctttggaacatgtagaaatcagtgggaactcaaaataaaggtgggcagtctgccttggtgtggaagggattgcttgaaatgt

SEQ ID NO: 112157 - DNA, 566 bp, Homo sapiens
agagattaatgaatctgctctaaatttcaaataatgatagcttttgttttctggtaactagccatgagctttatatgttttcttataaataatgtccttatttgaatatctgcctatactgccatgttgaaataagattatctctgaattagcgtgtttgccaatttccaggcataacgcattcttgaaaatgtgcatgaaagatgaatgcataaaagatgatcaatggacttgaaaatttcaaggtgccatggggtgggatggatagctagtgctagagagctaaaaatgtattctaaaatcctaattactccttttagatatcctattcattgatatatttgtctcatttcatatacattctttaatttttttctttcccattaaatacatgattgacaagtttaagttccatcatgtcttgattgaaagttaggagtttccacttttgggagagctaagaatttgcttctttgtctctcttgtatgattttgatgagatcttcatttattatcrttaattttagcatatgaatttatttttgtctcattttggctttacaaaa

SEQ ID NO: 112158 - DNA, 578 bp, Homo sapiens
tctatcactgcatgcaatcccagcaaggtttaaaaaaaaacacgagaattgtatctcattatgtagactttaaggagcatatcagcgcaacaacaaacacacatgttagttttaaacaatacactgcattgaacatttctataagtgtaaaagtaactttagagtataagcatcctgttccaaaaaataacatttctttctgtgcaattccagtgtgtgtatatgttcatatgatttaataaagtattagcatttttattatataaaatcccactcagacattatagagtcatgcttggcagatatttttaaaatcttttaattttgcaataattttagatttatagaaaattgcaaagatagtacatagaattcctgtgtactctccatttaatttcccctagtgctgacaccttacataagcatggtacatgtgtgaaaattaagaaatttacataggaacaaaawaattaatagacttttttcagaattcagcatgtccttttcctatcttatcatcaaatccagtgtaccacaatatatttaatctttgtctatttaatccctatggcaattcc

SEQ ID NO: 112159 - DNA, 356 bp, Homo sapiens
atgtacaaagccctgtgttctgtctccatgatgcagggctcccaaaatcatggcaggtgcaaatgagattgtattttcaactagcctctggcacagatggatggagttgcccatcagagcttcagcctccaggtgaggacagtctcaaggcaatttagcacgaacttaaaaggtggggggaagagctacttcgttttctccagctacatgctttttctcagaaacctagagctgagagattttcattttaaggcagatcttttaaaaatgttttaagagaaaggcaggaasttggacataatatatctttctgaatctcagatttcattccagaaaaatgaagctgaaagaaattc

SEQ ID NO: 112160 - DNA, 577 bp, Homo sapiens
aagctacaatgggagtttctaaattgttgcagcctgttgctggatgtggacaccagtctacaaaaatcagaattgggcaaaataagctttttcttcctctttgaaatcttaaagttttactctctgaaaatactaaaaactgaggttatactgaacaaacaattttgatatagatccagtggaaaactcatctaaattcaatacattgatcataaaatactaactataagccaaattagctcttcttgaagactgtaaaatccaattatgtgctgtattagaaagtattcagattctctgtcraattgtattttcatatctctgtggcactaggatggtaactttttaaaaaatgtcccatgtttcttttttgtaggagggaaggaaaggagagagcaacaacctctggaagaaatggaagtggttatcactaatgcaaacatattacattgaatgaaagaatcttctttcacagctttgcagcaaacacacagaagacatgaagaaaataagtccacagcccaaattatcacaatgagtttggaacttaggatatccttcattttggctaatcaga

SEQ ID NO: 112161 - DNA, 577 bp, Homo sapiens
aagctacaatgggagtttctaaattgttgcagcctgttgctggatgtggacaccagtctacaaaaatcagaattgggcaaaataagctttttcttcctctttgaaatcttaaagttttactctctgaaaatactaaaaactgaggttatactgaacaaacaattttgatatagatccagtggaaaactcatctaaattcaatacattgatcataaaatactaactataagccaaattagctcttcttgaagactgtaaaatccaattatgtgctgtattagaaagtattcagattctctgtcgaattgtattttcatatctctgtggcactaggatggtaactttttaaaaaatgtcccatgtttcttttttgtaggagggaaggaaaggagagagcaacaacctctggaagaaatggaagtggttatcactaatgcaaacatattacattgaatgaaagaatcttctttcacagctttgcagcaaacacacagaagacatgaagaaaataagtccacagcccaaattatcacaaygagtttggaacttaggatatccttcattttggctaatcaga

SEQ ID NO: 112162 - DNA, 564 bp, Homo sapiens
cagtaactagaaattaggtatccagaatccctagctggtgagaataatgacggcatgaaccatgcttctcatggcacagtcccctgtctttccacatgggctcctcatcagtaggaggcagcagaatcaaataaaaacagagcctttatggagtcacccagagccaagcatttcatatcagttgattaaatggagtargagccttctatctaatttcagtagaaattccagttccttgagctttctattttcatgcagtatattatttgcaatgagaaattcagtaggcaggaactgaattttgttgagccctgaggcctggattttaaatttttattaagtatatatgttgccctcccacatcaagcacagatagttaaattctggtttggaaaatttgctggcatttgttgggcacatatgaactgcattgtatcctctagcacagatagcttagtttgtataggttattctcccctatttataatttttagtgatgttgagaatagatttagaatttagcagtttaatttcccacattagctgaaaacacatttggtagaa

SEQ ID NO: 112163 - DNA, 540 bp, Homo sapiens
attcccttctctataattaacagaataagtagactagaaataactaagaagacttgaacaccaccacatgctagacctcaccaacatttgtagaacactacaccccaaaatggcaaaacacacattagaaaatgggcattgaatatttaccaagctagcccatgtaaaaaatattaataaatacaaagagactgaaattgtaagatgcatattctctgaccacaacacaatcatagcagaaaacaataattaaaagatatctggaaaatctccaaaaatttggaaattatgcagaacatttctatatcaygggtcaaaaagaatcacaagggaaattataaagtactttgtactgagtgaaaatgaaaatacaacatatgaaatgtgcagaatgtagtcaaacatgccttagagggagatatgcagcataaattacttgtaatcaaaaacacgaaaaatttcaaatcaagtctcaacttacactttaggaaacttgaaaaagaaaaattaaaaccaagccaaagaaccaaaaaaggaagt

SEQ ID NO: 112164 - DNA, 590 bp, Homo sapiens
gaatatgaatattttaggaattcagagacaggagagattagcaaattctggagtaattgagaaaaaaactatgaggaaaatgtagcttgagttgaatcttaaaatatggatacatttgggttcatggaaaggaaacataatatttatataataaaatcacagaagtgaaaataaacatggtgtgtatcatgcacagtaaggacatccttctaatgctgagctgacagaaaaatgcactaaagagtattgtaatttcctcctgtcagagttaaagaatcttgagattaaaaaattccaaagtactacatgatattttgaagagcrcagatcctcggtattctggtgactcaaaagagtaggcaaatggggaaactcatgctggggtttggcttggttgagatgctcgggaggtgaactgtgaggatgggtatgaggtctggagtccaaggatgtggtagtcattggcattgctacaaaacagccccaattgtctatgtttatttgtgctttatttcctctcttggaaagacacttttatgtgttaccctttatattatgttttagctgaatttgacattctgtgacattgg

SEQ ID NO: 112165 - DNA, 602 bp, Homo sapiens
tgtagtgactgcagtgttggaacagcctaggtattttgtgcacaattgatcactgctggttagaaaacaagaagtaaatgaacaacatcatattctggctttattaattgtataaaccstacttaagctcatgcttattgtttttgagtccagcttttggaaactgtctgtgtgtccttaacttcctaatgcctttctaaacatttttaatagctgctctcttaaaaagtgtcaaaggaggacttatctgtaatgcatgggatctgaagaattaaacatgtcagagcatcaatactagaaaagcctcttgacattgatttttcctctctgtgaaatggggataagtggatcatctcctagggaagtgcacctgagttgcagcaaataaaggtgactggaaagcaatgtaggactcacagcgagtgtatcagtagtctttcctgagtaacaaactatcccaaagcttagtgatttaaaacgcaaatcattgttgtcaatttcagactgggtttgttaaggaaattcttttgatggtttttttctcaggctcactcatatgtctatatatagtgcaaaaggcagataggtttgaggctggatgg

SEQ ID NO: 112166 - DNA, 561 bp, Homo sapiens
aacagctctctgactatttggagctcacaatctggccagtgagacatatagtaaactatattgtaacaaggcacatactatctacaacattagaagtgctagaagttatgggggcaaaaggtagggtaggctatgatgaatagaaagcagagttcataggtctccttgaaaagctgacattagagaagaggtttaaaggacctcctttacatccttgaaagtagtcagagcaaagracccaatctagaagcatgcctggcatgttggagaaaagtgtggtaggaactgacagaatgaggagttgaggagtaggagataaagttaggaaatggggtttacatatgtggggacttgtaagtcactgttcaaacttcgattttattttatgggaaataagttttcagggtttgagcagagaagtgatattatttgagttttaaaagaatttaaaagaatgtgtttctaaaagtcttttaaaagcattttaagaggatttgcttggcagctgggttgagaatagtggggactatattgggaggcaaacagggtggaacagagaga

SEQ ID NO: 112167 - DNA, 523 bp, Homo sapiens
tcattcagtgtcccctgcttgcacagcctgtgcacagccttgctccaggcatccatccttccatctgatactatttatccattaacaacaaagataatatggcctcaaaggtgctcaaagttttaacagtttaaggtcgcactgtcaaatttgctgcctctttagggaactctttgttgtcttttaggctttgcttcaataccttaacaatttattagaactctcaatgtgacagagttaatgtacatttaagataatttgactagtactatgttaagtattttgaaggctacatagctataagagggaaacaaatagacaattaacctcgatgagttcaaggcaaggttattmatagaaaataaactatatccattatttctgtccagtggaagaattagttttcaaaacacatccagcaacaatttgatatacatacttttctttctaaaagtagcagtagggacagaacaaacaacagaacacagagagaggaacaggtagatatacatatggaaagaac

SEQ ID NO: 112168 - DNA, 574 bp, Homo sapiens
tccttctgctttaaatttcatgagcatttaagattgaattggaatgccatgcaagtttcaagrcaattatttggacttcacctgcatcagcccatgcccatagtgcttctctttctataaatacaaaacaattgaacaaaaacaacaataaaaggaaaatacttatcatctttttagaaagcaacattaacaacaacaaacacatgctgtccctgtagaatcaaccatggaattattcctcagagacagtatgctattattagtgaatatgcatggctttctatgtttggctaagataacaatgaattaatgacattatactctgtcatctcttatatagacaggaccctggtatttgtgttattttcccaattgtcatggtcaagctctaaggagctgcgggattcatttataagataagttctctcacccataaaagagaaggttgtgggaaggattaaatgtcattttgaaaatctctagcctagtacctgtcacagagtaaatgttccgtaaatatttgttaaattaaaacatgattccctttaggatactttcaatccaaatagggtct

SEQ ID NO: 112169 - DNA, 574 bp, Homo sapiens
tccttctgctttaaatttcatgagcatttaagattgaattggaatgccatgcaagtttcaagacaattatttggacttcacctgcatcagcccrtgcccatagtgcttctctttctataaatacaaaacaattgaacaaaaacaacaataaaaggaaaatacttatcatctttttagaaagcaacattaacaacaacaaacacatgctgtccctgtagaatcaaccatggaattattcctcagagacagtatgctattattagtgaatatgcatggctttctatgtttggctaagataacaatgaattaatgacattatactctgtcatctcttatatagacaggaccctggtatttgtgttattttcccaattgtcatggtcaagctctaaggagctgcgggattcatttataagataagttctctcacccataaaagagaaggttgtgggaaggattaaatgtcattttgaaaatctctagcctagtacctgtcacagagtaaatgttccgtaaatatttgttaaattaaaacatgattccctttaggatactttcaatccaaatagggtct

SEQ ID NO: 112170 - DNA, 643 bp, Homo sapiens
agcagtagggacagaacaaacaacagaacacagagagaggaacaggtagatatacatatggaaagaacgctcttgttagctacatttaggacctacacaagtgtagataacatatggatgaacaattcaattacgttcttatatcagttagaatctttggcaggcaactgaagccagagctggctaaaggcatttgaaagatgaatacaggatagaacayacaattaaagaaaataattttttaaaaatcatctcaaacagttttggaaaagcagctacaggaatctggaatcagaaactgctgaacagtctctttaaaaacagaagcaatcagctgtcaccatgtttattcttttggttctcagcttaggaatctaattctaagatgagaaaatctagctggcttaacttggatcattggccctttgccttgagaagggcagggcccttgatgaatggttactttgcatcatatccaatgggataggctccttaaagcaaaatcacctccatgctatcaataggaagaggaagagatgtcgaaaatgcaaaccaaccaatgtccacaacatacttcagaacagacttagataggaacaaaataagaaaactaggataatttaagatgtctaaagtggaacag

SEQ ID NO: 112171 - DNA, 553 bp, Homo sapiens
aattaatttggaaagttaattgaccataaatttgtacatttatttctagattctagccttttccactgatctatgtatatctttatgccaacacttcactgccttaattactatggacttaaattgtgaaattacatagtgctttttatccttttctttcttactttaaagattgattctgctattctattatgtttatattaccatataaattgtagaataaattaatcaattttaacaaaaattctgcagagatcttgattgaaattgcattagatctatgtatctgtttagaaaaaaagtcaggtattaaaaatattgagtcttccaaatcatgaacwtgacctacttcttcatttataagattttcttgagttactctcattaatattttgttgtttttattgtacagattttgtacacatttttaaaatgtatgactaagtattttattgttgatgtcactttaaatgacattgtttaattttcaaattatttattgctaatatatacaaatactgtctatgtttgtatattgaacttatatactagt

SEQ ID NO: 112172 - DNA, 553 bp, Homo sapiens
aattaatttggaaagttaattgaccataaatttgtacatttatttctagattctagccttttccactgatctatgtatatctttatgccaacacttcactgccttaattactatggacttaaattgtgaaattacatagtgctttttatccttttctttcttactttaaagattgattctgctattctattatgtttatattaccatataaattgtagaataaattaatcaattttaacaaaaattctgcagagatcttgattgaaattgcattagatctatgtatctgtttagaaaaaaagtcaggtattaaaaatattgagtcttccaaatcatgaacttgacctamttcttcatttataagattttcttgagttactctcattaatattttgttgtttttattgtacagattttgtacacatttttaaaatgtatgactaagtattttattgttgatgtcactttaaatgacattgtttaattttcaaattatttattgctaatatatacaaatactgtctatgtttgtatattgaacttatatactagt

SEQ ID NO: 112173 - DNA, 626 bp, Homo sapiens
tataagtgaaacataaacattgagtacatatggacacaaaaagggaacaacacacaccgggccctacttaagggtggagggtgggaagagggtgaggattgaaaaactacctattacctgggtaacaaaataatctgtacaacaaacccccatgacatgcaatttaccctgtaacaaacacatacgtgtacccctgaacctaaaataaaggttagaagaataaaaaataaaataaaatctaattattttaaaaaagaggcctcagagagttgttttgccccttccaccatgggaggatgcacagagaaagtcctccctgtgaaggtgaaagcagaccttcaccagacctactgatgctttgatcttggagatcccagcytccagaaccgtgagaaataaatttgtgttgtttataagctagccagtttatggtattttgttatagcagcccagatgaactaagctaacccataaaaaaaatttcaaaattctgcataattgaagaaagtgcttatggggtaaacacttagtttactccattgtattttagagttatctaaaaacttaccaaaaaattaattctcttctcacttacgtgcttccttataatgctttttatcaattaa

SEQ ID NO: 112174 - DNA, 599 bp, Homo sapiens
atatatatatattccgtaagttggtaagaaaaatgattagaatatagatcatattccctgatgataacaaaggtacacatagtggttaccatagtttcaaaatcagtttattggatctttaaggatcccaaaatatttataactgtatttttttccagataactacaaggtcataacctgagcttaaaggcttggaaggaccatgtgctaagttctgatacatttaatatactttggcaaacagaggttgagwtaataaggggttggatacttgggaagtgttgtagatcctacagccaggatacaagagactcaggtttgatctgagaacagagccgtaaaggtggcagaatactctgtgggcagaggaggtgatgtttcaagctcctctctcattgtcctcctctcaatcgtaaactggtttttaagagattgtctatctatatctgaaaagctattgcttactggatatggtctattatccatacttttataaatgaataagaaataatttgaagacctttgtgctttgcagcccatgatgctttgcaattctgttcctcttgatcatttatataacctgtatttgagttgtttga

SEQ ID NO: 112175 - DNA, 631 bp, Homo sapiens
ttacaaatcttagctttccagagccagaaagaaccttcaaaactatctattccaatctcagcattttgtacaaagtcacagatcatgaaagagttttttatccctgaattaatatgttatatgtttttgtatttacagagttctttaaaaygaccgaagaactgtcacaaacgtagcaaaatggtcttcatatgtgatacagccgcctctccagaagtcagctttcttactctattattgattctaaccttgggaaagccttcctattatccttcaagttctgctgaaaatgaagtacttggggtcaagggaaaaaatacctactagtaatgctcagacttcaggaataaatgatctccaggatgacattagcacagtccttcacctgggagacagcaagaactaagagaaaggaaaaaagtacccaggttcaaatgatgacttttagaataattttctgatctggccaggacagattttactgtaatgatcatgctaatctagtcttgattagcatgaccatgaaaataattatcatttatatgtaattttaaatcttaaaagcctttgttaaaatgttctttcctgctataatagcacatgcagtattgactagagtaatgaattcatt

SEQ ID NO: 112176 - DNA, 647 bp, Homo sapiens
ttattaatagatgtgcttcttggtaccaataaaatatgatcacatttactgatgtaccacatcaatttgtgggcaagtgaaaagaacagaaattaaagaaaaaagaatcaaacacagaattttctacggagaatgtttgtttttaatagatagaaaataatgacatctatttaagtgtttatcagaacccagaacatatttccaatatttagctattttattctacgcttataacttatatgctgccagggaaatatcatgtatctttttattttaaaaataataagcagtagtagtgaataggcatgagaattctaaaattgaactctacatgggcagaaattttatagatattttctctaagatcagtagttyttttctgtcaaaaatttcattgaaaaactgcatcttaaagcatagctgggataaataatttttaaatgatttcttttaaagaaatcacctattttttaaaaattaagacaaaacatgatacatgatcactatttgctcagtagtggtgaataggcatgaaaattctaaaaccaaactttatatgggtatgaaaaaatattaaggtaaagaatatttaagatctgtggaggaatatgatcactcatggaattagtaatgtgttgctaatagca

SEQ ID NO: 112177 - DNA, 533 bp, Homo sapiens
aatctggttcaacatttgcttccatggcaggatcagaggtgtgcacaacccttaagtagggaaggaaatctcaaaaatagttactaccttcttgccacatgtccctgtcaagatgtagtgtagttctcacagatgttttgtgtttttagcttgatgtgtgtatgagaaaaaccacaccaaactgaaatgtagcaaaatttcagccttgaactagaatcactgagtagtctcagccttctctgccctttatgtgtaacccaaggcagccaaggtactgagggcagatgttttcctgggtgccaaggggagggtcggggaaaggtcaaatatggtggtatactgcgttttctgtctgcyttagctcactgattttagacggtcagaggctttgaggtgatcagtgactctaaactgccttaattgtgtgtgttaaggtttgttgagacagtgttccggagcaccccgagtatctagaccatccttgtaagcagaatggctggtctcttagagtcttcaatacatctgagaaggtc

SEQ ID NO: 112178 - DNA, 595 bp, Homo sapiens
actctttcatttagcccttccatcaatgcaatagagggaaatctgacacctatctatttgacccctccacatgaagttggggatatgaaacaggttcgagcaaaaggcaaccacagccattctctggttatccatgtagtgrgacctcattcaccatttttttctttttttttttttgagacagagtctcactctgtaacccaggcaggagtgcaatggcatgatctcggctcactgcaacctctgcctcccgggtgcaagggattctcctgcctcagcctcccaagtagctgggactacaggcgtgcaccactacacccagctaatttttgtatttttattagagactgggtttcaccaggttggccaggctggtcttgcactcctgacctcaagtgatcctcctgccttggcctcccaaagtgctgggattacaggcatgaaccactgctcctggctcattcacccttcttaagtactcctcccccatctcagatcctatggcaatcgtatatagagatgtgatcaacttgcttttgtgattccaacatctgtctttctcctctgtcctgctcttgacactgaagctgatgtg

SEQ ID NO: 112179 - DNA, 595 bp, Homo sapiens
actctttcatttagcccttccatcaatgcaatagagggaaatctgacacctatctatttgacccctccacatgaagttggggatatgaaacaggttcgagcaaaaggcaaccacagccattctctggttatccatgtagtgagacctcattcaccatttttttctttttttttttttgagacagagtctcactctgtaacccaggcaggagtgcaatggcatgatctcggctcactgcaacctctgcctcccgggtgcaagggattctcctgcctcagcctcccaagtagctgggactacaggcgtgcaccactacacccagctaatttwtgtatttttattagagactgggtttcaccaggttggccaggctggtcttgcactcctgacctcaagtgatcctcctgccttggcctcccaaagtgctgggattacaggcatgaaccactgctcctggctcattcacccttcttaagtactcctcccccatctcagatcctatggcaatcgtatatagagatgtgatcaacttgcttttgtgattccaacatctgtctttctcctctgtcctgctcttgacactgaagctgatgtg

SEQ ID NO: 112180 - DNA, 595 bp, Homo sapiens
actctttcatttagcccttccatcaatgcaatagagggaaatctgacacctatctatttgacccctccacatgaagttggggatatgaaacaggttcgagcaaaaggcaaccacagccattctctggttatccatgtagtgagacctcattcaccatttttttctttttttttttttgagacagagtctcactctgtaacccaggcaggagtgcaatggcatgatctcggctcactgcaacctctgcctcccgggtgcaagggattctcctgcctcagcctcccaagtagctgggactacaggcgtgcaccactacacccagctaattttwgtatttttattagagactgggtttcaccaggttggccaggctggtcttgcactcctgacctcaagtgatcctcctgccttggcctcccaaagtgctgggattacaggcatgaaccactgctcctggctcattcacccttcttaagtactcctcccccatctcagatcctatggcaatcgtatatagagatgtgatcaacttgcttttgtgattccaacatctgtctttctcctctgtcctgctcttgacactgaagctgatgtg

SEQ ID NO: 112181 - DNA, 605 bp, Homo sapiens
ttgttgtaatagacacacttaaattattaattaattatttttaattaaaaaatttaaatgtctttaaatattgcttaggatctagagctcaaatcaataagggtaacatggtggaaacatcgtggcagctggggtagacgktatagcatggattccctactctgcctttccttagttgattgacctcgggcaagtaatttaactttgaatctgtttttgcgtctctaaaatgatgattacaaacacttagctttcgttattgtgtgaccactgagattatgcagagtcacaaaagctgagatgtattggcatcagctgacttaaagaccatggagagtcctggagacacagggtgtttccaacacagggtgtttccaacacaggctgttggagatgagctgggagatgtttgtggagaaagagcggggaaagctggcgctacaaccaaagcagctgagtcctagagtaagtcagagaggaatttctgaaaactttagacttagaggcacataattatacttaaaaacaaaaaagatgaaagtataatgtgtgataccattttattgtaaagattttcttgattatttcttaactttatcacactg

SEQ ID NO: 112182 - DNA, 551 bp, Homo sapiens
tctgtgctacaaccttcttaggcctagattaagactgtcctggaatgctaagctcagatttccatggggaaggtcttccttaggtcaggagctactgtcggatgggaaactatttctacagagtcacccacccctacacactctttccactctttcacacacatctttcacacacactgtgcatacaaccacgtgccaatcctgcccccataaacattgcttttggatttggagccaaacatcctggcacctggcagctaggagtgcaggtatttagaggaatggcttgaagcagctccatttctgtgtcccaggtagtgtaacaataagacattttaaattctcagagaaaaacctgaccctacgcaaaatctcccagtgggtgargcctattctcagcctcctctctctgtgcatctttttccttccttggagattgttcccttctctcctgttccccctcttcagatcctgataccttcccaagctcttccatgttcctctttgccaaaactggttaaaggagaacattcactatcactcattattca

SEQ ID NO: 112183 - DNA, 632 bp, Homo sapiens
gctggagcatgtgcttagcaatggtgaccaaggaaaaggtagaaaggcagaaattttatgtttctgtccacgtctarggagtctcaaaagggcacatagcttcttggggcagagttttaccggtttaaagcacattggtgtgcatgatttcacttgttccttacaattagcccagatagggaagcagaagggtactattgctcccactgagtggtttgccccaagcagggataggtctaattctcaggactatctgaagtgatgtcattcttatatgtccttatactgcctggtgctgttcttgggcttgtggcctgactggcgagtggtagcaccaaggtttccatggtgcccacttcagcagaatgagagcaacgttccacctttatgccattactacatgcctttgatatcacctggctcttctcttgtgctaatgacccttatttccacactcttcaccctggatgctctcacttggagaccagttcttccccatcccttcttctctcatattaaagccagaagaatgatgacctacaacatcataactgaagccaattagtgggaaagaccctgatccatacctgaagccactgcacatgagagtgtgtggcctactctggtgtgcc

SEQ ID NO: 112184 - DNA, 632 bp, Homo sapiens
gctggagcatgtgcttagcaatggtgaccaaggaaaaggtagaaaggcagaaattttatgtttctgtccacgtctagggagtctcaaaagggcacatagcttcttggggcagagttttaccggtttaaagcacattggtgtgcatgatttcacttgttccttacaattagcccagatagggaagcagaagggtactattgctcccactgagtggtttgccccaagcagggataggtctaattctcaggactatctgaagtgatgtcattcttatatgtccttatactgcctggtgctgttcttgggcttgtggcctgactggcgagtggtagcaccaaggtttccatggtgcccacttcagcagaatgagagcaacgttccacctttatgccattactacatgcctttgatatcacctggctcttctcttgtgctaatgacccttatttccacactcttcaccctggatgctctcacttggagaccagttcttccccaycccttcttctctcatattaaagccagaagaatgatgacctacaacatcataactgaagccaattagtgggaaagaccctgatccatacctgaagccactgcacatgagagtgtgtggcctactctggtgtgcc

SEQ ID NO: 112185 - DNA, 500 bp, Homo sapiens
actaaatttgttgaatcactatcctgctatatgaaatctacaaataccagataaaatgtacatgtcatttttcaaaagtatattactgacttgaatagaaattaaggtgaaccacataggccaagcataaggagaatacataaatccagagaggtatgcagacccccaaaccagaagcttccataaggacagtcctggccctagtaccctgagcttcaatttttatgaccacctgggatatgggagagtgtgagacaaaacctagtgcctgcccagtatagcagtcttacaggagaaaactgctgaaagccasagatatgaaggactataatttcagtgaaaggataaactagataaaaacctgttcctcagggggagacaaccaggaaattttcctgcctcaaactcggtgctatttagaggaaaaattagaaggccatcttcacatgaatttgtggtttaaattttcactgtaagtataattttaaaaaaacccacac

SEQ ID NO: 112186 - DNA, 540 bp, Homo sapiens
tttagaaataaaaaatataatgaaaattaaaaactaaatggacaggttaaacacaatattggatagaaccaaaaagaaaataagtgagttggaagttagactaaacaaattatgctgaagacagtacagaggaggaaaggaaaatggatakgtgaaatagaggttgaaaaattagagtatctaatcatatctgcaaaagaaaaattgaattgggggaaggttatatttaaggttatatttaatatctgagggcttttcatcattggaatttattaatgttcaaggaaacctggaaagttttctaacacattaaaggagctttaattataagttccaaattcttcttagaagaagagaaccagcaggcccagacatttttactggtgagttctatcaaatgttttcaagaaattgattatttccattttataaaaacaactccagaataaaaaaaggtccatttgtttgttcattttatgaggccagtacaaccttgataccaatgttatatgagaaatgtgtaagacaggaaaattacat

SEQ ID NO: 112187 - DNA, 540 bp, Homo sapiens
tttagaaataaaaaatataatgaaaattaaaaactaaatggacaggttaaacacaatattggatagaaccaaaaagaaaataagtgagttggaagttagactaaacaaattatgctgaagacagtacagaggaggaaaggaaaatggataggtgaaatagaggttgaaaaattagagtatctaatcatatctgcaaaagaaaaattgaattgggggaaggttatatttaaggttatatttaatatctgagggcttttcrtcattggaatttattaatgttcaaggaaacctggaaagttttctaacacattaaaggagctttaattataagttccaaattcttcttagaagaagagaaccagcaggcccagacatttttactggtgagttctatcaaatgttttcaagaaattgattatttccattttataaaaacaactccagaataaaaaaaggtccatttgtttgttcattttatgaggccagtacaaccttgataccaatgttatatgagaaatgtgtaagacaggaaaattacat

SEQ ID NO: 112188 - DNA, 588 bp, Homo sapiens
tttcatcattggaatttattaatgttcaaggaaacctggaaagttttctaacacattaaaggagctttaattataagttccaaattcttcttagaagaagagaaccagcaggcccagacatttttactggtgagttctatcaaatgttttcaagaaatkgattatttccattttataaaaacaactccagaataaaaaaaggtccatttgtttgttcattttatgaggccagtacaaccttgataccaatgttatatgagaaatgtgtaagacaggaaaattacatgccaactttcctcatgaacctaacggcaaacattttaaattaaaagttagcaaattaagtttagaaatctgtaaaaaagataatatagtatgaaaattgtgtttgttccatgaatgcaaggatttctaacaatagaaaaaaaactatgtataattcatcacattaacaagttaaaggaggaaaagcaaatcatcattgtagaagaggcaaaaagtgaattcaataaaataaaatatttaactttgacaaatcttgtttagcaaacaagaaatagaagagctttcagtgtttgcttataaatc

SEQ ID NO: 112189 - DNA, 506 bp, Homo sapiens
tacagaggaggaaaggaaaatggataggtgaaatagaggttgaaaaattagagtatctaatcatatctgcaaaagaaaaattgaattgggggaaggttatatttaaggttatatttaatatctgagggcttttcatcattggaatttattaatgttcaaggaaacctggaaagttttctaacacattaaaggagctttaattataagttccaaattcttcttagaagaagagaaccagcaggcccagacatttttactggtgagttctatcaaatgttttcaagaaattgattatttccattttataaaaacaactccagaataaaaaaaggtccatttgttygttcattttatgaggccagtacaaccttgataccaatgttatatgagaaatgtgtaagacaggaaaattacatgccaactttcctcatgaacctaacggcaaacattttaaattaaaagttagcaaattaagtttagaaatctgtaaaaaagataatatagta

SEQ ID NO: 112190 - DNA, 592 bp, Homo sapiens
aataattgcacatgtttatggggtacagtgtggtgctttagtgcatgtgtacattgcgtaatggtcaaatttaaaaattaaatgtattgatagaaaaagtgtttggatatttgtatcctaaatgctaacagtgatgatatctggaatgtggaactgctggtaatttttccctttttcttttagagatttttgtacttatttttaataataaacatatactaattttataataaaaataacaatgaagtcctttccattttgaaaaattaattccaatagaaaaataytgtacttgagccactttccagggttttcttattcttagtgctggtataaggtaccagtgatattatattttcagatatgtttggcttttctgccttatggttgaagatgagcttaggaagtattgctgcctaattttcaggcttttgagccaatgcttggtgcacaaaaagcaccacatcaactttaaacagaatattctgcttctttagactgtatttcctactttttatagtatttattagcgccagaactctgtgactgtttcccaaagaacaagagagaaagatcaaggaaagtgagaagc

SEQ ID NO: 112191 - DNA, 592 bp, Homo sapiens
aataattgcacatgtttatggggtacagtgtggtgctttagtgcatgtgtacattgcgtaatggtcaaatttaaaaattaaatgtattgatagaaaaagtgtttggatatttgtatcctaaatgctaacagtgatgatatctggaatgtggaactgctggtaatttttccctttttcttttagagatttttgtacttatttttaataataaacatatactaattttataataaaaataacaatgaagtcctttccattttgaaaaattaattccaatagaaaaatattgtactygagccactttccagggttttcttattcttagtgctggtataaggtaccagtgatattatattttcagatatgtttggcttttctgccttatggttgaagatgagcttaggaagtattgctgcctaattttcaggcttttgagccaatgcttggtgcacaaaaagcaccacatcaactttaaacagaatattctgcttctttagactgtatttcctactttttatagtatttattagcgccagaactctgtgactgtttcccaaagaacaagagagaaagatcaaggaaagtgagaagc

SEQ ID NO: 112192 - DNA, 497 bp, Homo sapiens
gggtgtagagagacaggacaaagtacagattagggcttgaagtgcccctgaccagtcgacagcaaccacatggaataatgactcatgtgcattaatgatcacactaaatgatatttgttttttacctagtccttcaactgacagcttaaagaacttcaggttgttctgattcttgagyctcctctacagcttcagagaggactttcattttattttggatcaaatgctccacaactagttgaaactggaattaaattttatatgaagttcctagatgatttaaagctgtaagaagaagaataatgaatcataagaaaacttgctgctacagatatcaaaaaggaatgttaccatccctcatgctaatccttttcattttaaataaacaggatctaaaaaaaataatgctgggaagtcctaaccacatcaagaatgcctcagatcagtgacccaaggaaccttccagaatggatgaaatagacccaaagctgaattca

SEQ ID NO: 112193 - DNA, 480 bp, Homo sapiens
aaaagatgccaatatatccatgaccacacaaaagagtgtctagtcatataataaagggtgtacatatgcaggcaactcacatcctgccaaatattaaatttctaattttattataatttctaataaaacattagatttattattatacagagtcatactccttgattgggaaactctcaacwcaataaacattctttagtctcatgtcttttctaaaggaaagaaattaatattatattcttgggtgaaaaaaatgtgaggtctcaaaagagtataatacaatttggggatgcatatatattttacatgtatatagacacataaaaatctaaaagcataaattttaatatgttaacagaagacagaagtcatgtattttttactttcttctttttggcatatctctttttctaactttttttttttctttttacaaaaaacaattgttatttgtgtacttttaaaacctcacagtaatat

SEQ ID NO: 112194 - DNA, 635 bp, Homo sapiens
tgttatttgtgtacttttaaaacctcacagtaatattttcacactaccttcttggctgaaagttcacactcggaattccagagcagtccatggccaggcccactgggctccccttgctctctccttggctttggtaaccactggccccagggactcagcctgctttcctatccatcccctcagtagctgtcaccatgcaggttaccccttctgtttcttctaccactaactccatgtctgactgcaagtgaaaggaacagaagcccaaacctttgggttttaaggagtttattgctaatctgtaaaacagaaagagacaggagataagcatgacaaaatatagggaagaaatgacttttgcctaaacttccmaattgtgtacaattgaagcctctgctttatagctcttagcacacctctcaaataagaaggcagtactgggaaggctctgaacctgtggcagaaccactgatagctgtggagctattccaaggagtctgggaatcagggggattatcaagatcattgttagaataaattaatcttactgtatatatagcagaagttttcaaacatatgtaaatgttactaataaccaaataattacaccttgtttttctttaaactgtaactct

SEQ ID NO: 112195 - DNA, 635 bp, Homo sapiens
tgttatttgtgtacttttaaaacctcacagtaatattttcacactaccttcttggctgaaagttcacactcggaattccagagcagtccatggccaggcccactgggctccccttgctctctccttggctttggtaaccactggccccagggactcagcctgctttcctatccatcccctcagtagctgtcaccatgcaggttaccccttctgtttcttctaccactaactccatgtctgactgcaagtgaaaggaacagaagcccaaacctttgggttttaaggagtttattgctaatctgtaaaacagaaagagacaggagataagcatgacaaaatatagggaagaaatgacttttgcctaaacttcccaaytgtgtacaattgaagcctctgctttatagctcttagcacacctctcaaataagaaggcagtactgggaaggctctgaacctgtggcagaaccactgatagctgtggagctattccaaggagtctgggaatcagggggattatcaagatcattgttagaataaattaatcttactgtatatatagcagaagttttcaaacatatgtaaatgttactaataaccaaataattacaccttgtttttctttaaactgtaactct

SEQ ID NO: 112196 - DNA, 513 bp, Homo sapiens
attgttagaataaattaatcttactgtatatatagcagaagttttcaarcatatgtaaatgttactaataaccaaataattacaccttgtttttctttaaactgtaactctcaagtatgtctctacataattttttgattggtagtgtctgcatgctcaaaaagcttgaaaacactactggagaagaaggtctcgggagtgtgatgaaatacgtttacatggcagcttcatcatttgattggtgaaagtgactatgtgtcttaaactctctgagcctcagtttgcacatccaaaagcaaggatataattccatgaacctttccacctcaagtccacaaggcagaatagcaagatgttaactgccactctgaggaccaccaaataaaaggacaatttattaggccacttgccagcatggacacaatcgactcttggcatttcttattatccacagaaaaattaaaagtataaatgtagaacaaaattatcgtgttttttttaatagtaacatgt

SEQ ID NO: 112197 - DNA, 526 bp, Homo sapiens
tattttcagaaaataaaaggtcttcgtcattaggtacaaatcataaagggattatctacggttactacactgtaacaactttttacatattgtattatagaacaagcttttgagaagacaaagcaacacatcagcagtttaaccaattgtctttctcttttaacaggctggtctacattagattagatataaaaggcccaggtattacttgtgttcgatcttagccamatggctgagaaacatccaggtacatttaaatcagtgacaaaagaaaacattatcccttagtaaaattacataaaataggaaacatctcttactttaagagcaaccatggtacttgttcctatggtgaaaactgatgttatctcgattagttaattattcatcccaacacctggtcttgctcccttttccacctctagctatgttaacactagagttcagtaatttgttgataaagaatcttaactgcagtatctaacagatcttagtgattaagcatatgacttaccctttgtacaga

SEQ ID NO: 112198 - DNA, 472 bp, Homo sapiens
aattacataaaataggaaacatctcttactttaagagcaaccatggtacttgttcctatggtgaaaactgatgttatctcgattagttaattattcatcccaacacctggtcttgctcccttttccacctctagctatgttaacactagagttcagtaattwgttgataaagaatcttaactgcagtatctaacagatcttagtgattaagcatatgacttaccctttgtacagataagtaaactgaggccaaaagaactgaggtatcttattaaaaatcagagagctagttagttgaaaagtccacctgtccttcctttccacatgtctcaccagaaaaacagcaatggtgaaaagtcaactctgtttttaatgggccactttgtatattttaactgttaaaataatccaagaagatagtagtcatatacgaagatcctttagatataatgtgtaggaccagcattaattt

SEQ ID NO: 112199 - DNA, 472 bp, Homo sapiens
aattacataaaataggaaacatctcttactttaagagcaaccatggtacttgttcctatggtgaaaactgatgttatctcgattagttaattattcatcccaacacctggtcttgctcccttttccacctctagctatgttaacactagagttcagtaatttgttgataaagaatcttaactgcagtatctaacagatcttagtgattaagcatatgacttaccctttgtacagataagtaaactgaggccaaaagaactgaggtatcttattaaaaatcagagagctagttagttgaaaagtccacctgtccttcctttccacatgtctcaccagaaaaacagcaatggtgaaaagtcaactctgtttttaatgggccactttgtatattttaactgttaaaataatccaagargatagtagtcatatacgaagatcctttagatataatgtgtaggaccagcattaattt

SEQ ID NO: 112200 - DNA, 342 bp, Homo sapiens
tttcattttaactctacttcttaaattcacaattggatttgggtttgtttcaagttgttcacaatttactaacgaaatgtgcatctctcattcttcccccaaaagaaagaagtcatccactccagctacatataagtctccaatttctgtcttacaactaaacgtgaaaaccgaaataccactcattgaaaaaaaawatatacagagaattggcaggctgcatgtttatgtgaaccttcagaaaacatggaaatacgcagccccaactcaccaggaaaattaacacttgtgatcaaactattttgtgacattttatgtcttttatacatttcacttcatatc

SEQ ID NO: 112201 - DNA, 432 bp, Homo sapiens
ccttcccccgcccggaccaaccgccgtgggggrccgagggtgccggggacggccggagagcgatcaccggctgggcggcgggagccgacgaggggcgagccccgctccggctcaagcgcgcacacccctcacggcccgcactccggccttccacacccgtgcacactctcgcccgcgggcggcggcagccgtgcccaggctgctgcagcgccacccgcccgccgcggaccctccgcgccctccgcctagtcacccggcccggccgcgggccgccggggctcgcagagtgtcagccatcccaggcaggcgtcgcgtctccccaccccgacctccactcgcgccgggagctgagcggcagtgtaggtagtgaagactccctggggctcccagccttccctctccgcgctctccccccatcacttttatgaattc

SEQ ID NO: 112202 - DNA, 432 bp, Homo sapiens
ccttcccccgcccggaccaaccgccgtgggggaccgagggtgccggggacggccggagagcgatcaccggctgggcggcgggagccgacgaggggcgagccccgctccggctcaagcgcgcacacccctcacggcccgcactccggccttccacacccgtgcacactctcgcccgcgggcggcggcagccgtgcccaggctgctgcagcgccacccgcccgccgcggaccctccgcgccctccgcctagtcacccggcccggccgcgggccgccggggctcgcagagtgtcagccatcccaggcaggmgtcgcgtctccccaccccgacctccactcgcgccgggagctgagcggcagtgtaggtagtgaagactccctggggctcccagccttccctctccgcgctctccccccatcacttttatgaattc

SEQ ID NO: 112203 - DNA, 546 bp, Homo sapiens
gtttaatctctctttcatacaaaaaaaaatattctttgtggctttctgagggtccaatatggagaatcctaagttaatttgaggtcaaaaagacttaacttagaatgtgattttgggaagattgtcaaaaatgtcaaaaagtttaaaacatttaaaacaaatatgaccatagttatctatttaataaaagctccattaaaagattttaaaggcaaattcagattacatagttgtgaacaagaacttagctcctttaatattgagaagactcacttttcttaagtaaccaaaacctaataaaacaayatgaaactcaagaaattatcttgatgaaacagtctctgtttctgaggccaattacttaaaaggaaaaaaataccctttacattctcagaccaacattccaagaaaactttaccattttaacggagaagatcaaattctacttttgaatcaatgtattactaaaactaagttttaataaaaccttataaataaatctatccaatctcagtcagcttagaccatacaagataagattttcac

SEQ ID NO: 112204 - DNA, 571 bp, Homo sapiens
ttaatgcagctgaaagtgccctattccagggggaaaaataaaagccacaaaggtcatttattagtaaggaagagaagcaagcaccaagatttaaggcaggaagggataggctaactctactgctttgtgcaaatgtagtcgggtttatgatcagggctgcccttaactataaagctgctaacccctgagtcttgaaagggaaaagagaaacactagttgccagtcttttggttgtacaacaagaaggcstggactatgagaatgctttttctggattagttccatcagtgctttgtccctgaagtcagaagtaccttgccagtaagggactgctttttaaagttttttgttgttgttgtttaattggaaaatgccccctggccacccagaaccccatgagttcaacaccaaaggcactgaagtgttctccttttcccccaaacacatctctacttcagcctctagataagggagtcataaggacctttaaggctctacatatggcactctatggaaaggtttgtcaacattgcaaaagagaaacccaatacagagaacatcatggaagtct

SEQ ID NO: 112205 - DNA, 571 bp, Homo sapiens
ttaatgcagctgaaagtgccctattccagggggaaaaataaaagccacaaaggtcatttattagtaaggaagagaagcaagcaccaagatttaaggcaggaagggataggctaactctactgctttgtgcaaatgtagtcgggtttatgatcagggctgcccttaactataaagctgctaacccctgagtcttgaaagggaaaagagaaacactagttgccagtcttttggttgtacaacaagaaggcgtggactatgagaatgctttttctggattagttccatcagtgctttgtccctgaagtcagaagtaccttgccagtaagggactgctttttaaagttttttgttgttgttgtttaattggaaaatgccccctggccacccagaaccccatgagttcaacaccaaaggcactgaagtgttctccttttcccccaaacacatctctacytcagcctctagataagggagtcataaggacctttaaggctctacatatggcactctatggaaaggtttgtcaacattgcaaaagagaaacccaatacagagaacatcatggaagtct

SEQ ID NO: 112206 - DNA, 579 bp, Homo sapiens
gcagacatttcctgaggctgtggtcgatatgattaggagatagtgggtaaaaatggcctttaaactatatacacatgagaagatagatgtgaaagcccattgcaaaggcaataaaattatgcaaatataaaatatcactattaaaatgtatgatgaattgacrtgccatgaaaacagttccagtgctgggctagaaatcaggaaacgtgggcttttgatttctcaccattaaaatgaagaagttggatttatacccaagggtaccttgtgggctgtatggcttctaagtaactggtcataacaaaagggacacaatcaggtcagtttcaaaccaagaataaaatgggaaattaaagaactgaattggctactttctgctcaaatgattgttaaaaataaagtttaaaaaaagccccaaggactatgcagtgcagtgagcagaggctcccgatattaaaaagaaaacaaggaaaatggattcctggtgatagaagtggtgtgggggaagacaaatagtgtggctgcaaatggaacaatatgcaaaagaaaagtagctaaatatagctcttttttgggaaa

SEQ ID NO: 112207 - DNA, 604 bp, Homo sapiens
ggtatacaaatactgagattgacttgctgaggcagtggtctccattggtggtgaccttcagaagagacctgtgtttccacatggcctagacacctggaaggcagagatcctaacattccatgacacccccaccttctaattctgattgtgactccagaccattacctggcactgggtcttacctctggcattcctatcagagcctgaaccacagacagtaccttagagtctaagcttagatacctttgtcttgtttttgtggctaaggattctcagagttgcgggatgctgatgaaatttatcccaaaagtaagttatgaaycagatctgctttcttttgactcatttaaatcctttgtttaatgtaaagaaactttattgaggtataatttacatactataaaatttacccattataattgtacagttgaataatttttagtaatttacccaagtagtgcaaccattaccataatccatgcatttgtttttaatttattatttgtctgggttctgattctacttccaccacaagcttcagcatggcagtatctgccaccacttgttttggtccaagggcagaaatgagcatcctggaaaccaa

SEQ ID NO: 112208 - DNA, 579 bp, Homo sapiens
gcagacatttcctgaggctgtggtcgatatgattaggagatagtgggtaaaaatggcctttaaactatatacacatgagaagatagatgtgaaagcccattgcaaaggcaataaaattatgcaaatataaaatatcactattaaaatgtatgatgaattgacatgccatgaaaacagttccagtgctgggcyagaaatcaggaaacgtgggcttttgatttctcaccattaaaatgaagaagttggatttatacccaagggtaccttgtgggctgtatggcttctaagtaactggtcataacaaaagggacacaatcaggtcagtttcaaaccaagaataaaatgggaaattaaagaactgaattggctactttctgctcaaatgattgttaaaaataaagtttaaaaaaagccccaaggactatgcagtgcagtgagcagaggctcccgatattaaaaagaaaacaaggaaaatggattcctggtgatagaagtggtgtgggggaagacaaatagtgtggctgcaaatggaacaatatgcaaaagaaaagtagctaaatatagctcttttttgggaaa

SEQ ID NO: 112209 - DNA, 579 bp, Homo sapiens
gcagacatttcctgaggctgtggtcgatatgattaggagatagtgggtaaaaatggcctttaaactatatacacatgagaagatagatgtgaaagcccattgcaaaggcaataaaattatgcaaatataaaatatcactattaaaatgtatgatgaattgacatgccatgaaaacagttccagtgctgggctagaaatcaggaaacgtgggcttttgrtttctcaccattaaaatgaagaagttggatttatacccaagggtaccttgtgggctgtatggcttctaagtaactggtcataacaaaagggacacaatcaggtcagtttcaaaccaagaataaaatgggaaattaaagaactgaattggctactttctgctcaaatgattgttaaaaataaagtttaaaaaaagccccaaggactatgcagtgcagtgagcagaggctcccgatattaaaaagaaaacaaggaaaatggattcctggtgatagaagtggtgtgggggaagacaaatagtgtggctgcaaatggaacaatatgcaaaagaaaagtagctaaatatagctcttttttgggaaa

SEQ ID NO: 112210 - DNA, 534 bp, Homo sapiens
cataaaatatttagatataaatactacaagtgcaaatgaatttttttttctacttctgcattcaacttttctcttctccctttagggaaaacacttttgtgtaaaggcctccaaaatatatgtagagkcgtatgtatgttaaaaacatgtatacatataatgcataaccaaacaaatgaaatatcctaaacatatggacctgaaaattgcttataataaatttgaactgaacatataggcataaatgtggttcagaagtgtccagttgaagcaacttcactttgttaggtcaacaaaagttggggacactaagatctactcctctgattttgttctagcattatcttaatggaaatgtttactgaaatggaaatacatgtagtggacatcgtggtggtgtctcaagcattcagtgttccctgctctcacacactcctagccaaataatgaatttctcagcttcacaatgtttaagtgacatgagtcccatgcccaattcttggtcactgtaattggtgcatgaaggaacgtgtg

SEQ ID NO: 112211 - DNA, 534 bp, Homo sapiens
cataaaatatttagatataaatactacaagtgcaaatgaatttttttttctacttctgcattcaacttttctcttctccctttagggaaaacacttttgtgtaaaggcctccaaaatatatgtagaggcgtatgtatgttaaaaacatgtatacatataatgcataaccaaacaaatgaaatatcctaaacatatggacctgaaaattgcttataataaatttgaactgaacatataggcataaatgtggttcagaagtgtccagttgaagcaacttcactttgttaggtcaacaaaagttggggacacyaagatctactcctctgattttgttctagcattatcttaatggaaatgtttactgaaatggaaatacatgtagtggacatcgtggtggtgtctcaagcattcagtgttccctgctctcacacactcctagccaaataatgaatttctcagcttcacaatgtttaagtgacatgagtcccatgcccaattcttggtcactgtaattggtgcatgaaggaacgtgtg

SEQ ID NO: 112212 - DNA, 534 bp, Homo sapiens
cataaaatatttagatataaatactacaagtgcaaatgaatttttttttctacttctgcattcaacttttctcttctccctttagggaaaacacttttgtgtaaaggcctccaaaatatatgtagaggcgtatgtatgttaaaaacatgtatacatataatgcataaccaaacaaatgaaatatcctaaacatatggacctgaaaattgcttataataaatttgaactgaacatataggcataaatgtggttcagaagtgtccagttgaagcaacttcactttgttaggtcaacaaaagttggggacactaagatctactcctctgattttgttctagcattatcttaatggaaatgtttactgaaatggaaatacatgtagtggacatcgtggtggtgtctcaagcattcagtgttccctgctctcacacactcctagccaaataatgaatttctcagcttcacaatgtttaagtgacatgagtcccatgcccaattcttggtcaytgtaattggtgcatgaaggaacgtgtg

SEQ ID NO: 112213 - DNA, 617 bp, Homo sapiens
ctcttcctctgaaaatgcttcttggtacttaaagtagtaaaactataaaacagtaaacatccagtattgggagatgatatgatagggcattatgaattcctatgggtatctaaattatgtatgtcagttggacattgtagaaggtatgtaaatcatcatggttatgtataacttaaccttgatttataaggtcttaattcagattatgactattcgttgacatctcatgagaagctttagaaaactttctatttttaaacaccatttatatgtggacttctgttgtcactgactttgggctttatattttcacagagtctttatggaaaaagtagaatttattttccactcttgtagctatagctgctgcacattttcaycctgatttatttttttgtttcttacctttgatgttttcaaaccaaggattgtgattttaggttagaattacatattagaagcattaagactatgtctttggatcagaatgctttagtgattaacctactttgaagacatactcttaagcaatctggatcttaaatttatgtgaatacatttttagaaaatgataaagaaaaatggaattacttcaaagtgtttcttgagtcattgat

SEQ ID NO: 112214 - DNA, 617 bp, Homo sapiens
ctcttcctctgaaaatgcttcttggtacttaaagtagtaaaactataaaacagtaaacatccagtattgggagatgatatgatagggcattatgaattcctatgggtatctaaattatgtatgtcagttggacattgtagaaggtatgtaaatcatcatggttatgtataacttaaccttgatttataaggtcttaattcagattatgactattcgttgacatctcatgagaagctttagaaaactttctatttttaaacaccatttatatgtggacttctgttgtcactgactttgggctttatattttcacagagtctttatggaaaaagtagaatttattttccactcttgtagctatagctgctgcacattttcatcctgatttatttttttgtttcttacctttgatgttttcaaaccaaggattgtgattttagkttagaattacatattagaagcattaagactatgtctttggatcagaatgctttagtgattaacctactttgaagacatactcttaagcaatctggatcttaaatttatgtgaatacatttttagaaaatgataaagaaaaatggaattacttcaaagtgtttcttgagtcattgat

SEQ ID NO: 112215 - DNA, 621 bp, Homo sapiens
gaaggtagactttaggctagggttagggttggaaaaatcaaaacacgttgttctctttagagtgagaaattggtttatcccagactttgaaagataatataatctataaccctctggttacgggaaagaagagacctacatgtggccatcttgggagcaaggcagagagcaggctggaagatcttctaggatggatatggacttgtgaaatgcagtagttaaacaaagttttctcagagttacatttgccttccatcattcctgaacactcatgtcatcatgaaattagaagagctgatccaatactattgataaggaaagagactctcctttccccaaagcgagagatagcagcaataatcagataatggcccagaagatggatgatcatacacacggcttgtgtgaggcttatggaagataaaacaaccacaatatttcagaaatgtttatatrttgtttacagttctaccactacaaagccttctagaatgtgagacagaatggtgtgatgattattcttagtataaccagattaagtaagatttcacaggtggagttaagaattaagaatttttgattcaagagtctcattcaccctcttccttctttgttaatagt

SEQ ID NO: 112216 - DNA, 409 bp, Homo sapiens
catttgccttccatcattcctgaacactcatgtcatcatgaaattagaagagctgatccaatactattgataaggaaagagactctcctttccccaaagcgagagatagcagcaataatcagataatggcccagaagatggatgatcatacacacggcttgtgtgaggcttatggaagataaaacaaccacaatatttcagaaatgtttatatattgtttacagttctaccactacaaagccttctagaatgtgagacagaatggtgtgatgattattctyagtataaccagattaagtaagatttcacaggtggagttaagaattaagaatttttgattcaagagtctcattcaccctcttccttctttgttaatagttctgttaggatctgcctttaatttgtcttt

SEQ ID NO: 112217 - DNA, 575 bp, Homo sapiens
gcaatttaattgaggttagtttaattttctactttaatgaacatgagaacaacccattttctttcttcttaatctacctttaatctccaattaaatttacaaattattaaatttgtaaaaactaaataaaacactctgaattcttagtgttgagggaaaaaataccttgcagaaattcttaatataaaaacaaagctaataagttgccaagaaaaacatacaaataattattttgtaaagaattgtgacatacaatatttggttttgtctattaacatacccttaattagcaatattggttaaatcttgcacaaagtttctttaataaaaacatttactttttgtgactatgtagttatttatattggttcaataagaatttgtcctcccttctacctgaatatattactaattagaaattttttttttttttttgagatggagtcttgctctgttgcccaggctggagtgcaatgrcgtgatctcaactcactgcaacctctcaatcttgggctcaagcacttctcccacctcagcctcccaggtagctgggattacaggcacccaccatcatg

SEQ ID NO: 112218 - DNA, 632 bp, Homo sapiens
gccatgtgttaattttactatttcttagccattttttcctcaatagttttaaattgcatcyctgcttactctcccttttactggacgggcttcctctgtttactaatacaattccccaaattgattcatccacttgttgaaatacctaattttaggccctgcactgacagcttgcctaggcttatacttgtgtttggtgttgcagtcttcagattctaaaaacaccatctagaccttacattacctccagccagggctattcccccagggcctgccttaagaagcagatttcttttcaagtttcatcttcttcccatttatttcatttcatgacagttagagaagctgtatactaacgtgacaaatggtaagttagcagagaaaaacgttatttcaggataagttcagggaaagctttttggaggaaagtcagctcacattagtcctgatgatggatagtgtatagagactacagatgatggaacgatgaagtggaaactcgagtggctacatacggacattccacatagaagcagtgtgagcaaaaccaccaagacaggaaatgagatggaattgataaggcaatgcaaataattcaggttatttagatcatcagtgttgggggaagctgg

SEQ ID NO: 112219 - DNA, 632 bp, Homo sapiens
gccatgtgttaattttactatttcttagccattttttcctcaatagttttaaattgcatccctgcttactctcccttttactggacgggcttcctctgtttactaatacaattccccaaattgattcatccacttgttgaaatacctaattttaggccctgcactgacagcttgcctwggcttatacttgtgtttggtgttgcagtcttcagattctaaaaacaccatctagaccttacattacctccagccagggctattcccccagggcctgccttaagaagcagatttcttttcaagtttcatcttcttcccatttatttcatttcatgacagttagagaagctgtatactaacgtgacaaatggtaagttagcagagaaaaacgttatttcaggataagttcagggaaagctttttggaggaaagtcagctcacattagtcctgatgatggatagtgtatagagactacagatgatggaacgatgaagtggaaactcgagtggctacatacggacattccacatagaagcagtgtgagcaaaaccaccaagacaggaaatgagatggaattgataaggcaatgcaaataattcaggttatttagatcatcagtgttgggggaagctgg

SEQ ID NO: 112220 - DNA, 632 bp, Homo sapiens
gccatgtgttaattttactatttcttagccattttttcctcaatagttttaaattgcatccctgcttactctcccttttactggacgggcttcctctgtttactaatacaattccccaaattgattcatccacttgttgaaatacctaattttaggccctgcactgacagcttgcctaggcttatacttgtgtttggtgttgcagtcttcagattctaaaaacaccatctagaccttacattacctccagccagggctattcccccagggcctgccttaagaagcagatttcttttcaagtttcatcttcttcccatttatttcatttcatgacagttagagaagctgtatactaacgtgacaaatgstaagttagcagagaaaaacgttatttcaggataagttcagggaaagctttttggaggaaagtcagctcacattagtcctgatgatggatagtgtatagagactacagatgatggaacgatgaagtggaaactcgagtggctacatacggacattccacatagaagcagtgtgagcaaaaccaccaagacaggaaatgagatggaattgataaggcaatgcaaataattcaggttatttagatcatcagtgttgggggaagctgg

SEQ ID NO: 112221 - DNA, 632 bp, Homo sapiens
gccatgtgttaattttactatttcttagccattttttcctcaatagttttaaattgcatccctgcttactctcccttttactggacgggcttcctctgtttactaatacaattccccaaattgattcatccacttgttgaaatacctaattttaggccctgcactgacagcttgcctaggcttatacttgtgtttggtgttgcagtcttcagattctaaaaacaccatctagaccttacattacctccagccagggctattcccccagggcctgccttaagaagcagatttcttttcaagtttcatcttcttcccatttatttcatttcatgacagttagagaagctgtatactaacgtgacaaatggtaagttagcagagaaaaacgttatttcaggataagttcagggaaagctttttggaggaaagtcagctcacattagtcctgatgatggatagtgtatagagactacagatgatggaacgatgaagtggaaactcgagtggctacatacrgacattccacatagaagcagtgtgagcaaaaccaccaagacaggaaatgagatggaattgataaggcaatgcaaataattcaggttatttagatcatcagtgttgggggaagctgg

SEQ ID NO: 112222 - DNA, 545 bp, Homo sapiens
ccatcatttcataacattgtgctgggccagaagaaccataagcaggtcccttcccataccaaagccgtaactattttggaaaagcctccttcatattgcagccattggacatgataatacatgtgatgtgctggcatttgttgagaatcatgtgaaaattaagcttccaccccatcacactaacgttccagccctccacggtctttctccctaggctaagatagagaggaagaacatgaaatgtgcagaaagcattctcttaagcaaaygtgtataacttgcataaattgtaataatttcctggaacaggatgcacctctaacctctacaggcaaatcatagattccattgtccagctgtataatgaaaacagagttctcagagaagaataccggagactcccccgacttgcctgaatcaaatttccagaggtaagtggtgaaaggccacaatatgaagtcactctcagatgggtcccttctcttgccacactccactgtagaaataaaagaggacggggaggccagagctgctcaaaaccttat

SEQ ID NO: 112223 - DNA, 545 bp, Homo sapiens
ccatcatttcataacattgtgctgggccagaagaaccataagcaggtcccttcccataccaaagccgtaactattttggaaaagcctccttcatattgcagccattggacatgataatacatgtgatgtgctggcatttgttgagaatcatgtgaaaattaagcttccaccccatcacactaacgttccagccctccacggtctttctccctaggctaagatagagaggaagaacatgaaatgtgcagaaagcattctcttaagcaaatgtgtataacttgcataaattgtaatwatttcctggaacaggatgcacctctaacctctacaggcaaatcatagattccattgtccagctgtataatgaaaacagagttctcagagaagaataccggagactcccccgacttgcctgaatcaaatttccagaggtaagtggtgaaaggccacaatatgaagtcactctcagatgggtcccttctcttgccacactccactgtagaaataaaagaggacggggaggccagagctgctcaaaaccttat

SEQ ID NO: 112224 - DNA, 545 bp, Homo sapiens
ccatcatttcataacattgtgctgggccagaagaaccataagcaggtcccttcccataccaaagccgtaactattttggaaaagcctccttcatattgcagccattggacatgataatacatgtgatgtgctggcatttgttgagaatcatgtgaaaattaagcttccaccccatcacactaacgttccagccctccacggtctttctccctaggctaagatagagaggaagaacatgaaatgtgcagaaagcattctcttaagcaaatgtgtataacttgcataaattgtaataatttcctggaacaggatgcacctctaacctctacaggcaaatcatagattccattgtccagctgtataatgaaaacagagttctcagagaagaataccggagactcccccgacttgcctgaatcaaatttccagaggtaagtggtgaaaggccacaatatgaagtcactctcagatgggtcycttctcttgccacactccactgtagaaataaaagaggacggggaggccagagctgctcaaaaccttat

SEQ ID NO: 112225 - DNA, 510 bp, Homo sapiens
aataatctctaaaacctgttagtgttctccagattgaagccttccctctaactgctcctaaatctgtgatgtagtggaaaargtttgaggccttgattctcatcccgggtttttcacctacagatcatatggccttagcctcttgacaccattgtctccttatggccaaagatggaactgtacttgggtggtatctgagcaccctgttggctttgacattctagggctcttcccttggcaccactctcttatttaaaaggaataggatgtggacttagaagggttatttctctgcaaactatcctctctttcttatgacaagctatttctgaatgtgcacatttgaggctaagcaaatcccttcctgggaggtgtgaaagacctttatttctctccagaggagtattatggatgtggtagagacctggctaactcatctgcagcggctttgagcaaggcttttagaaccataaggtggctggggtcctgtgtcctacaccacaggccagc

SEQ ID NO: 112226 - DNA, 522 bp, Homo sapiens
ataatctctaaaacctgttagtgttctccagattgaagccttccctctaactgctcctaaatctgtgatgtagtggaaaaggtttgaggccttgattctcatcccgggtttttcacctacagatcatatggccttagcctcttgacaccattgtctccttatggccaaagatggaactgtacttgggtggtatctgagcaccctgttggctttgacattctagggctcttcccttggcaccactctcttatttaaaaggaataggatgtggacttagaagggttatttctctgcaaactatcctctctttcttatgacaagctatttctgaatgtgcacatttgaggctaagcaaatcccttcctgggaggygtgaaagacctttatttctctccagaggagtattatggatgtggtagagacctggctaactcatctgcagcggctttgagcaaggcttttagaaccataaggtggctggggtcctgtgtcctacaccacaggccagctagttcatttcag

SEQ ID NO: 112227 - DNA, 576 bp, Homo sapiens
aagtaaccatgacaaattgtccttaaaagtctacaggaaaggatggttatattgggtttaaaaatgaagaatatcagccttacggccagaaacgccaccttccagtaattcgccaaaatgacaaacacaaagggaaagaggagaggcacccgatacatgttctctaggccttttaaaaaacatggagttgttcctttggccaygtatatgcgaatctataagaaaggtgatattgtagacatcaagggaatggatactgttcaaaaaggaatgtcccacaagtgttaccatggcaaaactggaagagtctacaatgttccccagcatgctgttggcattgttgtaaacaaacaagttaagggcaagattcttgccaagagaattaatgtgtgtattgagcacattaagcactctaaaagccgagatagcttcctgaaacgtgtgaaggaaaatgatcagaaaaagaaagaagccaaagagaaagttacctgggttcaacggaagcaccagcctgctccacccagagaagcacagtgtgtgagaaccaatgggaaggagcctgagctgctggaaact

SEQ ID NO: 112228 - DNA, 401 bp, Homo sapiens
aaatagtaagtaaggagagcaaaatgggggaatcactgtgcagggaaacagaaagtacktactaggcatgagttcctgacatagattctagttcaaatgttaaccagttgtgctatgtcaaagaagtcattcaacctcccagttccttagtgttttgcatgtaaaatgaggggagggagccaggtgatcttgggatctgtgccatcactagactgctaaggtaaggcttaagtgatcttgtcaccattttacattttgttcattgattcttattcaaaggagtcatatgtagaaccatttgaaaatattggctatagatagcttaggagttgaaggaaagtgttaaaaatagaattaaataaatggattttctctgagcaaaaggctgtcacagactctga

SEQ ID NO: 112229 - DNA, 629 bp, Homo sapiens
aatgaaaagaattaattatatttttatgagcattttagtttaaaataagggaagtgagatatatatatatatatatacttcttataaaagagcctgattttatttctaatgcaagggaatctatgacatgaacatttaatatataatatttaaatctctaacctagcacctttcttccagtcaagtgtcacattcctgtaacccattcttaattttaaacttatgtgcgtaatgcattgtttcttcatctctgattagttctactgccaagaattacccaggggtatgtcagcaactacagtttataagttgtgtaatttcagatttagacatgatagatcatcttcttctgtcgggactgatctttaacagttgtgatgaacagaggaaaaatatttccaatctttcttggtgaaatacaacttaacctttcataatgtaaatgatgtgtcagattaagagtaaccgtagtctaagaattttttccaagtctaagataatttctcaaaatataatttcattgaatttatagtgagacggtcaagtggctagagaatgtcacattttctcttgatttttaayaagactgtagacaaacattcaaatgttcagttaattctcctaacata

SEQ ID NO: 112230 - DNA, 604 bp, Homo sapiens
aattatgtctgcaattttttctttccctttttcctcccatcctcccaccactcaccctcattgaaaatatcatctactcagaaccaaagatacatgaatacatgaaataaaatcctggatagactatttcaatggatcataattgaaaaggttttattgccaatataactcattaaagacatgatacatggatttctacaaaattcgttaatgaatcatccccaaattgtttccagaagcataataatttcttagagtttgatttatttttgtatataactacagtaatttatgagaaaattccactgtttattgtttctaaaatatgtatacgtaagcaaaaaagccaccaatgagagaaatttatggaaataaatacaaactatggatagatggttattttaaaatatctaaaatattgaagagcagtattcttattttagaaaaaaaagatcatgcttattttccatcagagctttatctytgcttcaaaatatatctatcattaaaatagtggtaaactgtcccaagagtgaacccaatactgggttattattcatttcttcacactgatgagtttggcagattaagctcaaggcaagaa

SEQ ID NO: 112231 - DNA, 550 bp, Homo sapiens
tgtgcaagcaaattgaataatgaattgaaagaaaaataaagacttgatatacaagaaataagaaagtgcaaaccgctaagaattgtgattaaatatattaataatgaaatttctatgtaaatattgacaaaatcaaaatgcacaatacaataaatactaaaaatggctgaccaaaagtaattctttgtaaactaattttgtacaaaatatttaaaaattctgaaagtaaagatcatttacaaattaacgtggaaactgattacagtttaaggcagctcttacaratatttgaggagtgaattagaggcagaagaaagaaatttcattcatcatacatgtctttgttgtttgaatgttcacaacaagcatatatcactgtgtaatttctttttttttaaattatacacagctgtggccataggatgggactcccacatttattatttacctaagcaaataattaatagaataagatactaaagaattatttccctgccaattacagaattcagtttaaagcaaaccagcttactgtcaagcattaaacatg

SEQ ID NO: 112232 - DNA, 528 bp, Homo sapiens
agccccacagctcactgtcattcatttccaacattctgcttcatcagtttagcacctggtgactctcaatcccatttctgtccattcatctagtctggcacccttgtacccacatctctcagtttggaaatttcagctgtgaattctcatgtgtgagtgaacacaaacatcatcatttcttgtttktttctaacaacaatggctttattacggaagccatctggctcctggtctttggtttttctcttgtttttactaccatagtatgttctttcagcattacctcttctaattgctctccatctcctggctttcctaggaagactggcttggattcatgcttatgcttttgatgtttgaaccactatgccaaagttctagaggagcagcccagggctgcatctgcaagatggcaccttggactgttgtgcccacgttcctgaaaaaaagacatcttttttctgtggagcattctgtgggagcatatgatttttatccttttgggtacaaaccaaaagagtaagggag

SEQ ID NO: 112233 - DNA, 528 bp, Homo sapiens
agccccacagctcactgtcattcatttccaacattctgcttcatcagtttagcacctggtgactctcaatcccatttctgtccattcatctagtctggcacccttgtacccacatctctcagtttggaaatttcagctgtgaattctcatgtgtgagtgaacacaaacatcatcatttcttgtttgtttctaacaacaatggctttattacggaagccatctggctcctggtctttggtttttctcttgtttttactaccayagtatgttctttcagcattacctcttctaattgctctccatctcctggctttcctaggaagactggcttggattcatgcttatgcttttgatgtttgaaccactatgccaaagttctagaggagcagcccagggctgcatctgcaagatggcaccttggactgttgtgcccacgttcctgaaaaaaagacatcttttttctgtggagcattctgtgggagcatatgatttttatccttttgggtacaaaccaaaagagtaagggag

SEQ ID NO: 112234 - DNA, 658 bp, Homo sapiens
gtgtgttttaggaggatctgtttgatcatgtgcaggaattctaaggcattataagtagttgttccacaggacaagtgctgcccttgcaaygatatactcttgatatatttgacaagtctttagtcttcaaatgctaccagccatagggagacattcgtagtctacgggtgggttggctcaaaggtcaaaaacttgtttgaaaaaaagtttatggaatagcaccataagaagtctttcagaaacaaatcttttttttccagcattgtgttttgaaaaaatgaatcccaggaagagaaaaatgaaagagacctttcagttctcacaaggcctacttctgcttcatttcaattttaaaaaatagattaaccatgacaacatcaacaataataatacaacaataacagatcgacaacaaaggaaagacaatagcagcagcagtaacttgagtaatgaaccatccagacagtcattcagaagaatcctgctcacacctcttcggagttttctcataaggttcataagacatcacaggcttcttggatttggtgtgaaaaggcagcacttccaaaaaaaagaactaagtttaccaattcactgggcgttttctgagacttaaagaactgatgtctagaatttaactgcaataattagacaccat

SEQ ID NO: 112235 - DNA, 463 bp, Homo sapiens
taatttagagaataaaaggtttcaaacacacttctcaggaacactttgtagtcagagccccaaagctttttttttttttttttttttgaaaaraactctcgctctatcacccaggctggtgtgcagtggcgtgatctcaggtctctgcaacctctgcctcccaaattcaagcaattctcctgcctcaccctcccaagtaactggcactacaggcgctcactaccacatgtggctaatgttttgtatttttagtaaaaacagggtttcatcatgttggccaggctggtcttgaactcctgacctcaagtgatccacctgccttagcctcccaaagtgctgggattacatgcatgagccaccacacctggccagagccctataactttttaattactggagattaaataaaggcagaaagcctacaatgccccaccaacctatccaagcaagcatggtggttagg

SEQ ID NO: 112236 - DNA, 548 bp, Homo sapiens
gtgttatattcaacatggcttgaaaatttttagagataaagatgagctgtgaaaagctaakaaattatcttcttattcaattattgttccagagataaattttaattaaatttttaactgcaaaaacagtgtctgaacacccaaacaaagattctttgacataattttcagccaaaaaacactcagtcaggcacggtggctaatgtctgcaatcccagaaatttgggaggccgaggcaggtggatcacgaggtcaggagttcaagaccagcctggacaacatggtgagaccccatctctaccaaaaatacaaaaaaattagctgggtgtagtggcgggtgcctgcaatcccagctacttgggaggctgaggcaggagaattgcttgaacctgggaggcagaggttgcagtgagccaagatcgtgccactgtactccagtccaggtgacagagcgagactccatctcaagaaaaaaataaaaactacatagttttactttaagcaaaaatcagtgatcgatttcgaacaaacattcttaactttgtaaa

SEQ ID NO: 112237 - DNA, 559 bp, Homo sapiens
tcaaatacaatcagaaattgcatttgaaagcacctgtcagagctctatagctcattataaaccatcttcaaaaaggattaaaacaagacaacaattgtctgtgaatagcaaaatgtccagggtagttacarttaagaacacaattgataaagaagtttggttatatccatggtttacaataacttaacataaaagttgtaattatgattgatagcatatacttagatattaaaattttagaaatctcacacaattttggaacatatattagcattatttcccaagatttaacctaaagaagattaacattattttggcaatcccatgtacctgaacatggcaaataatcctatttacctcttttttctagacattccaggggccctttgaactatcggaaaagccagatgtcaggaaaaacaattttgaaactgaagtttgatttggggaagccttttaaatatgtttaaagcacttgatattatgaaatagaatttcagattaccataatttatttattttgccaaaatgatgactcagaaattttaaagaaccagaa

SEQ ID NO: 112238 - DNA, 559 bp, Homo sapiens
tcaaatacaatcagaaattgcatttgaaagcacctgtcagagctctatagctcattataaaccatcttcaaaaaggattaaaacaagacaacaattgtctgtgaatagcaaaatgtccagggtagttacaattaagaacacrattgataaagaagtttggttatatccatggtttacaataacttaacataaaagttgtaattatgattgatagcatatacttagatattaaaattttagaaatctcacacaattttggaacatatattagcattatttcccaagatttaacctaaagaagattaacattattttggcaatcccatgtacctgaacatggcaaataatcctatttacctcttttttctagacattccaggggccctttgaactatcggaaaagccagatgtcaggaaaaacaattttgaaactgaagtttgatttggggaagccttttaaatatgtttaaagcacttgatattatgaaatagaatttcagattaccataatttatttattttgccaaaatgatgactcagaaattttaaagaaccagaa

SEQ ID NO: 112239 - DNA, 559 bp, Homo sapiens
tcaaatacaatcagaaattgcatttgaaagcacctgtcagagctctatagctcattataaaccatcttcaaaaaggattaaaacaagacaacaattgtctgtgaatagcaaaatgtccagggtagttacaattaagaacacaattgataaagaagtttggttatatccatggtttacaataacttaacataaaagttgtaattatgattgatagcatatacttagatattaaaattttagaaatctcacacaattttggaacatatattagcattatttcccaagatttaacctaaagaagattaacattattttggcaatcccatgtacctgaacatggcaaataatcctatttacctcttttttctagacattccaggggccctttgaactatcggaaaagccagatgtcaggaaaaacaattttgaaactgaagtttgatttggggaagccttttaaatatgtttaaagcacttgatattakgaaatagaatttcagattaccataatttatttattttgccaaaatgatgactcagaaattttaaagaaccagaa

SEQ ID NO: 112240 - DNA, 595 bp, Homo sapiens
taaaaagggagaacgataccctccttaaaattttcttttgaaaactaaaagtaatatatgtaaattatatagcacagtgcctgacacatagtgagagtccaaaaaatgttagctaagtccaggcttggtggctcaagcctgtaatcccagcactttgggaggctgaggtgggcagatcgcctgaggtcaggagttcaagaccagtctgtccaacatggggaaacccaacatggtcaaaccccatctttaccaaaaatacaaaaattatcggagcatggtggtgtgtgcctgtaatcccaactacttgggaggctgaggcacgagaatcacttgaacccggaaggcagaggttgcagtgagccaarattgtgccactacactctagcctgggtgataaagcaagattctgtctcagataataataaagttagctaatatactaatatgcatagaatgttcaatcttacagccattgctaatattaatattttatatagacagcactaaccaaaaatatatactgtttttttctatgcctgttcctatttccacagaaatttagggaagagccacactcttttccaatatgcacaga

SEQ ID NO: 112241 - DNA, 558 bp, Homo sapiens
aagtcctgcagacactctttgcatcctttttagtattgattattgccctcccctaccccccacacacattttaaaagatgtaacaagtcattagcttatttcatggccctagcatattayaattatttcatgtaatatgtctgaaggcacagataaaatacatttcactttttataattacaaagaactatgcatctccaaatgtatttccttacttaattcctcatatctgaatctccttagatttttatctcacaatatttatccattcaaatggctcttgttctgacattgcacttcattctggataaaataaatgggttccttctcagtctcttagcattcatctattgtatctcttcatagttttttctgtctttcattatgcatgtcagggtgttcgatttctaacattactgaaaatgaggatcctctttaagagttgatgtggtgggtgaagagtctagtttatttctaattttcctctttttaaaacataagcaatgtgtaagatctgagatgagttctttcgtattttaatcttccccaaaagaaggt

SEQ ID NO: 112242 - DNA, 596 bp, Homo sapiens
cctctattgattggttattttctttctttctttcttttttttttttttttttttttttgggacttgaccctgtcccaccttaatgaataagcaagggctcccccctttacaataaaatttcagcttctgcccttattgctctccttaatatggccaaagtcacagaatgaaattgatgttttactctgtcttcccagtaaaatggcaatgctctctgttaaggagagcttcattcattggcttaaccacaactataactgaaagaacagttgttctgcttctgagccacagaccaaaccaatctacagttaaagtaatttctctctcaaaaaaagatagtcattcaaagaaatctttstcattgagatgtattgcttcaaagatgtattgctacaattattacttaatcctcataataattgtagaaagcagaaattaatgcttctattttataagtgaaaaaattgataggtaaggagattaagtttcatttaactaataattggtgggtattaggatgttttgaaatggtcttatttctaagcctgttttttctaatatactatgatggattttttttttcatttttgagagtg

SEQ ID NO: 112243 - DNA, 629 bp, Homo sapiens
agaagtttcacagatagcttccttctagtttttatactggaatattcgttttttcactctagttagcagtggcttcgatatgtccttttgcacattctacaaaaagatggtttccaacctgccaaatgaaaagaaaggttttacactgtgagcttaatgcacacatcacaaagcagtttcacaggtagtttctttgtagtttttatcacgagatatccagttttataccaagaccacagtgagccctgaaatgccctttctcagattctacaaaaagagtgtttctaacctgttgaataaaattaatgtttaactctgtgacctgaatgcatatatcatgaaaagtttcacagatagcttctttctagtttttattgtgggatattctctttttcattataggtctcagtgtgctccgaaatgtcccttcacagattctacaaaaagagtgattccaacctgctgaatcaaaagwaaagtttaactctgtaggctgaatggtcacatcatgaagcagtttcacagataccttctttatagtttttatcacgggatactcattatttcattgtaggcctcagtgggctccaaaatgtcttttcacagattctataaaaggagtgttttca

SEQ ID NO: 112244 - DNA, 606 bp, Homo sapiens
ggtggtggtacaggtggtgcaaggagggctccaggagagaagcaaattggagcaatgcaggcttggcaatgctgtgtagaggtgaagaggaaagttaaaagagactgagaaagagccaccagagtggggagaaaaagagaacttaactggccgaaagaactggtgtaatattttaggatgcaatgtgtgcartaatactctcctctacttttctcaaaagctcttgtaaaaatttacatttggctttgagttcataaaacttcatttgtaagtgttttggggaagggacttgggagtgagttgcagcaaagtgctgagaatagccttggagtaggagcagggctgaagcataagctgccttagggaacacagatataatccatgtacactgacaccaagatgtgtgtttgtccatttagctacctatttatctatttaacacgagtaagaatgaataaagatataaaaactgaactacaataacattttttgctatttacatactatttcaaaagtaaggatcttagaacagtgaatattaacctatcaatccatgatttatttgtagtgaaagaaccagttcaatttcttatttgatttatggaa

SEQ ID NO: 112245 - DNA, 593 bp, Homo sapiens
cagatttccttcttccaagtttctccaaaaagaagagttgtaggttgcaatgtcataatttatgctttttttgtcacactgagttctggctaacaaaaagattctccaggtagtcagtgagtggcagagtggaaagttgactctctggcacctagtctcaaaggaacagggatacagcaaatatagggggctatwtgaataagaacaactgtgatagctactttgagctatcactatgagtatggaatttcagggaaagaaaaaactatttggagtatttataggaagtttttctcatattgcacagagtaaaacccctggcttacactcttttaaactataggaaaaaaatcaacattatttttaaggcttttttgaagtaactccatgcaaggaggaagtcatgcagggtcccagtaataataagtagagttattcttctttagcatttgggaccaataagaagatcttccagtactgaatgctcatcataatgacatttgcagattagcaagcttgaaatttttaaaaataaagccacaaaaaatttgacaagcattagagaaaggctttctaagtaaaaagcaaaaacc

SEQ ID NO: 112246 - DNA, 584 bp, Homo sapiens
gtccaggatagtgagcaaaggggcagcctcaggcaggttggtgtaaccttgcaggaagtctatcatatcatcctccccagatacaaaaaatggaagtgatgctcctcctctttggctttgcacttggcaatgattttctcagctattggctgaatcagctgcttggcttcctgggactctctgtcatcctcagagtctacaaaaaggaggaggcaggggccagttgagmtgcaaagtgttggagtcagagagcttcagcacgggcttgggtgccacgggaactcccagcagtcctcgtcgttaagcacctccactcaccccgccacatgatcacctcaccctgtgggcccagcacaatgagcatggggaatgccttggattctatacagccagatggggtgcgacttccaggccttttcagtatgggggttagtgagccagaacctatcactgaagtactgtttgaaggactctctgatctgtcttcactgactaagataatctcaaagttctggcctgcctccttgatcttctaataagattccaccaggacctgggtgaggctttggcaggatgaacaccca

SEQ ID NO: 112247 - DNA, 569 bp, Homo sapiens
gcgtgtgcctgtgttcccagctacttgggaggctgaggcaggaggattgcttgaatccaggaggttggggctgcagtgagtcatgctytcaccactgcactccagcctaggcaacagagtgagaccttgtctcaaaaaaaaaaaaaaaagttagaaaaaataaataataaataaataagtaaacattttgtattaacatcatgctgacctttttctcattattgattatttagctccttttccttgaaaaactattttggtgaattctgtcattcatataaaaaaattctgaatgcttagtagtaagtagtgcatgactttattttttaattttcccaggagtacatttggaatcacagtatttcaagctagaagagaggttggaggttgtatagtgatagcaaagccttttatatgaggtaacagaggccctgaaagtcaaggatattatccaaggaaatgctgagtcacactttcttttcagacaatgactttctgatctgtgtgttcatttcccatttaagaataaatctctcataaaaggagtaatataatcaacttgggtttcg

SEQ ID NO: 112248 - DNA, 569 bp, Homo sapiens
gcgtgtgcctgtgttcccagctacttgggaggctgaggcaggaggattgcttgaatccaggaggttggggctgcagtgagtcatgctctcaccactgcactccagcctaggcaacagagtgagaccttgtctcaaaaaaaaaaaaaaaagttagaaaaaataaataataaataaataagtaaacattttgtattaacatcatgctgacctttttctcattattgattatttagctccttttccttgaaaaactattttggtgaattctgtcattcatataaaaaaattctgaatgcttagtagtaastagtgcatgactttattttttaattttcccaggagtacatttggaatcacagtatttcaagctagaagagaggttggaggttgtatagtgatagcaaagccttttatatgaggtaacagaggccctgaaagtcaaggatattatccaaggaaatgctgagtcacactttcttttcagacaatgactttctgatctgtgtgttcatttcccatttaagaataaatctctcataaaaggagtaatataatcaacttgggtttcg

SEQ ID NO: 112249 - DNA, 554 bp, Homo sapiens
tagctagaacaattaggtaagaaaaataaatgaaacatattcatattgaaaaggaaaaggtaaaactatctattcacaaatgacgtatatacaaaatcctaagtaacccacaaaaacttattagaactaataccaagttcagcaaggcagcaggatacaaaatcttacaaaaatcaattctatttctatatataattgatgaaaaattaaaaatgaaattaagaaaataattttatttacatcaaaagtaataaaattattaagaataaatttaacaaaactaagacaagacttgcgcaatgaacattataaaacatcattaaaagaaattaaagaagatctaaacaaatgaaaagacattctatgttcatggatcaaaagacaaaatatttaaaamtgtagttcactccccaaactgaactacagatccaatgcaatccccttcagaatttccgctagctttttgcagaaattggcagttgatcctgaaattcgtaaggcatgcaaatcacccagaataagtaaaacaatctttaaaaaaattagaggactca

SEQ ID NO: 112250 - DNA, 620 bp, Homo sapiens
ctgtgagaaatgaatgtatgttgtcaataagccacccagtctgtgatagtgtattataggaacctgaacagacgaaagcaactggcattattatcctggcttagagttgaggagactgtggcccagagaaggggaagaacctgattggggccactcagctgattattgaagagccggaaccagagcccagatctctactgggttcagtgcatgatccttctccacatcatcttgccaggtcagttctaggagcctcactaagctctaacagtggcaagcattcaataaacgcccacccagtagacattaccaagtcctcactctgtgcctgttttcaagagtgtagagtgaagaaagcatgaataaattaagaggcttcttgttaccccagcacccaacacttagttaaaaccagatgtgatagacaaaatatgttatacccacacaaaggaatattagtcagccacgaaaaggaatgaaagaaatactgatacatgttacaacatgattgaccttgaaaacatgctaggtgagagaagccagacrcaaacagccacagattctatggtttcatttgtacgaaatgtttagaataggcaaatccatagagacagaaagca

SEQ ID NO: 112251 - DNA, 607 bp, Homo sapiens
caggaagaattaaataacttctagaaatctgctgtacaacattgtacctatagtcaacaatactatattgcactaaaaaaaatttgttaagagggtggatctcatgttaactgttcttgccaacataaaataaagtttatatatatatatacacacacattttttaaaaaggatgaggtcaggcacagtggctcatgcctataatcccagcacttcgggaggccaaggcaggcggattacctgaggtcagaagttcgagaccagcctggccaacatggtgaaaccccatctctactaaaaatataaaaattagctgggcgtggtggcrcacgcctgtagtcccagctacttgggaggctgaggcaggggaatcacttgaatccaggagatggaggttgcagtgagccaagatccggccactgcactccagcctggatgataaagtgagactctgtctcaaaaataaattaattaattaaaatttaaaaaggatgagacatcagaacaaaacataaattctgttttgtaggtgggttcatgccaagtcaggtataactgtttcactcatacaggtttgcattctgtaggtctgagagggtgtagaaat

SEQ ID NO: 112252 - DNA, 607 bp, Homo sapiens
caggaagaattaaataacttctagaaatctgctgtacaacattgtacctatagtcaacaatactatattgcactaaaaaaaatttgttaagagggtggatctcatgttaactgttcttgccaacataaaataaagtttatatatatatatacacacacattttttaaaaaggatgaggtcaggcacagtggctcatgcctataatcccagcacttcgggaggccaaggcaggcggattacctgaggtcagaagttcgagaccagcctggccaacatggtgaaaccccatctctactaaaaatataaaaattagctgggcgtggtggcacacgcctgtagtcccagctacttgggaggctgaggcaggggaatcacttgaatccaggagatggaggttgcagtgagccaagatccggccactgcactccwgcctggatgataaagtgagactctgtctcaaaaataaattaattaattaaaatttaaaaaggatgagacatcagaacaaaacataaattctgttttgtaggtgggttcatgccaagtcaggtataactgtttcactcatacaggtttgcattctgtaggtctgagagggtgtagaaat

SEQ ID NO: 112253 - DNA, 619 bp, Homo sapiens
aagtttgggttttcaacatacccaatcatattacctgtgaataataacaattttacttctttctcatttgtatgccttttatttctttctcttgagttattgcactggctgagactatccagtacaatatagaatagaaatgacaacaccaagaatccttgtgctattcccaatcttgtggagcaaatgttaaatacagtactataaattgtgtttgtaacagtttttttgtagatctactttatcaaataaagaaaaatctacttcacttcaaaaatgtttctatgttttgtgactatcacattttatcaagcatttacccagataatcatattattttttctcataatctgacaatgtggataattaaactaatattcaaatgttaaaaaccttatgatcctgtattattttttaaattttgcattaaaggcctttattagataaggcactattcatgtattctagttcttcttgtgtcaatttggtaagttgcatttgtatgggcaagtgtccamtgaacctaagtgttcaataataatgccctcttagtcacctctgaaatgaacagagtacattgttatgatccttattagtttcttaatagctagtaatacat

SEQ ID NO: 112254 - DNA, 619 bp, Homo sapiens
aagtttgggttttcaacatacccaatcatattacctgtgaataataacaattttacttctttctcatttgtatgccttttatttctttctcttgagttattgcactggctgagactatccagtacaatatagaatagaaatgacaacaccaagaatccttgtgctattcccaatcttgtggagcaaatgttaaatacagtactataaattgtgtttgtaacagtttttttgtagatctactttatcaaataaagaaaaatctacttcacttcaaaaatgtttctatgttttgtgactatcacattttatcaagcatttacccagataatcatattattttttctcataatctgacaatgtggataattaaactaatattcaaatgttaaaaaccttatgatcctgtattattttttaaattttgcattaaaggcctttattagataaggcactattcatgtattctagttcttcttgtgtcaatttggtaagttgcatttgtatgggcaagtgtccactgaacctaagtgttcawtaataatgccctcttagtcacctctgaaatgaacagagtacattgttatgatccttattagtttcttaatagctagtaatacat

SEQ ID NO: 112255 - DNA, 572 bp, Homo sapiens
gttcatgtcctttgttgggacatggatgatattagatactttctaattttttctttcctcctcacaacaatggtgcacaaaggktgttattatgccatttttccagatactgcctggaaaaagaaagaggaattctgagactcagagattaagaaaagtgcttgataaacaaagttagaaagttgtagagggtataaatacctcacgcaggttctaatatgtcatgtgccctccaatgaacctttttcttcttaggcttagcaaattactctcaatattaccttatgggcaaataagaattttgacaatttctgcacctcaggtatgtcacctctgttttttttactgtataaatctgtaaactatcaccaaatgggtttctctaaaatgacttcatgcttagtgaaatatactatatgattcattattcagaagtagaaactcatgtcctaagaaaggctttttctctttgtacaattgtttaagtctctgaagggctaaatataaatgatccttgaaaatgaggatagaagaagggatttttttaaatagtatttttaatctgttagtga

SEQ ID NO: 112256 - DNA, 562 bp, Homo sapiens
ttttctttgctttcattctgttatttttcaatgaaaaagtttaaagtctaaaatttctagattgatgtgtaagcacagagaagggtttggacaaatatgcctcaaattgttaaaaggttatggggagtgtattaagaaggtgatattaagtttattttgaacatttatacatttttaatttataactataaatttgtatggttttctttgacaaacatattaaatacattgtgtatatcatgtatagtatatatttgatattttgtatatatcacatatataaatttgatatgcactaatctctatcattagtttattagctcatggtcctcgaatcacattaatatatggtcataagaaactttagaattaaatgctttttagactcaactgaggatccgartaatgtgctaggtctgcatggtacttcctttcttaaatgctggcaagccagcatctcactctgtcccatgctagatgcggcttcttgcctcttaatcttgatttaaaacaatttccccaacactataatttgcaggggggtgtcatcgtggttatttcc

SEQ ID NO: 112257 - DNA, 572 bp, Homo sapiens
agcaaggtcagagcaataccacgttaaagagacttgacttgcctttgctagctctgaagataaaggaagggggccacaagtgaggaaatgccaatggcctctagaactggaaaaggcaaggaaattgatccttcccagagcctatagaaaggaatacagccttgcctacactttaattttagcccactggaatccgtgttagacttctgacctacagacctattttaagtcaccaagtttgtggtaatttgttatgacagcaatagaaaacatacagtctttatctgagattactattttattattttaaggctactattttatttctctgattcattttgtatttcagagtatcaaatttgtaggctatatctactacttctattaatttttaatttattttctcccttcttaatgtgaactttttattttcacactcaataaaaatcattctcttataarcctttaaggacagttttcttaccaatctgatggaagcttcttcctttgacatcttcagaattttttattctgttgacttccccttctgtgtagaaattacttccatcctt

SEQ ID NO: 112258 - DNA, 616 bp, Homo sapiens
atatgaagacatgaatttgattggcttcaytaattaaaacagtatgaatataagaaaaagtaaaacccttctccaaatattcattcagaaacagctcattcatgtcttttattgcaatacatcaatttcttcgataattaagactttccaaacatacgctaaacattgcaaggcaaaattctaggggaaaaacatataaattatatgaaatagttattttaagtaaaatatcattaataccacaaaataaaggagccctcatttctgacattgttgatacaaatagcaaatctcttaaatactaacaaatagtattaaatcatcagatgatataactataaatgctaattgagaactgaaataattaactcaaagtacatatgacagacaatggttctttaaattttatggactacaattcattctgaaaacggtatgtagggtaaatgcacaaaagtacatgtgatattttacatatgatttttagtggttcacaggaatccctgcatccgtcactgccactccctatggtgatatgtaccttggagtaagaagccctgttaatacagtctaaattatttccctggattaagtcatgttatcaaagatgagtgta

SEQ ID NO: 112259 - DNA, 633 bp, Homo sapiens
gttggaaacacttaatggaacacacaattaagtaattttttctttattaccttgaaggtatattggaattcacatgtcacttattcgcacactgacatttactgctattttcacatattgctcctgcacatgtggctaaaaagaaggcactctatcatgaaaacatcacacatattttctaatatcataattaaatattagaaaatatctaatattctctattaatttttagagatgtacttttagcctttaaaatcatatgaatatttttcaaaacccaaagttaattttcataaaaacattgaaatcttttaatatagattaagtatgcactggatatacaggctttgaaaaaaaatcacaatagaatgaagttaacaaaatgatcagttatttcaggtcaagttccctttctctcaaaaatgcagacacgaaaacttaatggctgatcaaactgttcargaaattttgtggtcagtaacatgggagagtttaagcatgtgtcatctaggctctaggattgagaacgaagtgggaattggagaggccttcttctgattaattactggtttttggaagtagccacacttcagtttgttcaaaacctatgggagaaacagcaagcacagcagt

SEQ ID NO: 112260 - DNA, 635 bp, Homo sapiens
ttgaacaatgagaacacttggacacaaggcagggaatatcacacaccagggcctgtcatggggtctggggatgggggagggatagcattaggagaaatacctaatgtaaatgatgagttaatgggtgcagcaaaccaacatggcacatgtatacatatgtgacaaacctgcacgttgtgcacatgtaycctaggacttaatgtacaagaaatgaaataatgctatagcagtgaatagaagattgttaatgggagcatggaccagggtggtatttgtgaaagaaataagaaattatccaatcagaaatatatcctgaaagtagcacaaacaaaggcttctcaaagagtagatatgaagtataagacaaatgagaagtcaagtacaaatgtttggtgtttggccatagttactgcataattgaagttgcaatcaactgaaatgtggaagaatccaggtacaggaagtttaaaagtgatcaagaactcaatttgaggcatgctaaatgtgatattttttgttgaaggtctcagcagatatatagagaagtcatttgtatatgcagcctgaagttcacaagaggcattttattggccttatgaacttagagaacattgacacaaagttggcatttggag

SEQ ID NO: 112261 - DNA, 635 bp, Homo sapiens
ttgaacaatgagaacacttggacacaaggcagggaatatcacacaccagggcctgtcatggggtctggggatgggggagggatagcattaggagaaatacctaatgtaaatgatgagttaatgggtgcagcaaaccaacatggcacatgtatacatatgtgacaaacctgcacgttgtgcacatgtatcctaggacttaatgtacaagaaatgaaataatgctatagcagtgaatagaagattgttaatgggagcatggaccagggtggtatttgtgaaagaaataagaaattatccaatcagaaatatatcctgaaagtagcacaaacaaaggcttctcaaagagtagatatgaagtataagacaaatgagaagtcaagtacaaatgtttggtgtttggccatagttactgcataattgaagttgcaatcaactgaaatgtggaagaatccaggtacaggaagtttaaaagtgatcaagaactcaatttgaggcatgctaaatgtgatattttttgttgaaggtctcagcagatatatagagaagtcatttgtatatgcagcctgaagttcacaagagrcattttattggccttatgaacttagagaacattgacacaaagttggcatttggag

SEQ ID NO: 112262 - DNA, 674 bp, Homo sapiens
ctgtactctcatgcaggctcaggaaggttcagaagcaaactttgggtgcagcagtaattcacaaaactttttgaactctttcaccaatttaaaggacacttgtcctgtgccaggtcactgaaatctataaaagcatatccttgctcttggctatcccagaaatgaattacctccccatccactcatgctgatgaattctctagaaggcctgctctccttcacttctcatggttaagtttttcacagattcttagagggtcagctcaacgtckacctcttctatgaagcctcctccaattactccaggcctcacccagggccttttcttctgaacaccaaaggcaagtctcatctttatcagacagcctaatctcaaatcacacatacctgctagtagagctcaatagtttcagatacccaaagacacagttggatctcaattaaggcctgtttaaaccaccgacagcaatctcataagtggcatcggtgggcccaacaatgaggtggttattttagattccggaggggttccttgttactgttcctcatggcaccacacaagagaaaaaccagattccattctttttcagacacatgtctgaagtccgcttccaaaggagccttgtttctttattacagcacttcaaatacaaagcccaggatagcaggcacag

SEQ ID NO: 112263 - DNA, 597 bp, Homo sapiens
tggaaaaacagcacaaatgatttcacatcagcctagatgctctgtttatgattcgcccaacttgggagaacaaaaaaagcttatcccgacaggaaccactgcctccgcacaggcctctttccaggagggcactgccatgcatatccatccacgctcactaaagctcgcctaccagctgggcgctgtgggccatgtgttgcaaacatctagcgggcgcaccccctatgccaggctctctgctgaaagtttaacttccatttcctcactgagcctccacaactttaagaggcagatacacatgaagataccgaggctttgaggggttgagacgcatgctccatctcatgcagctaagaggtggagacagcggcatcccaccccacagcccyggctctcagctgccacagtctgtggtctctttcactttcattgggatgccagtcctgctgctgtgggagcaccgcacttttagaagtttatcatttggtgtttggatgaccctctacctggcatcagaatatgagatcttaacattttgctatattcacttcagacaccagaatctatcccctctcagaatctatcctcactcagata

SEQ ID NO: 112264 - DNA, 565 bp, Homo sapiens
gacattaccagtcacggcacatgagcttatttaggaagaaatgatacttacacttagacaaagcaattcaaaccaaagattgggatgcacctacagccactgttttactacacagtgtctcttggctgggcccagggacgcagggctggagattggaattaggtagcttcaaattgattcttctgccttgagttttcttttgcaatagcagtagcatttgtttgttaggtcccatgaccacctctcatttcattctcaaaaggagcctatgattcaagagaacagaggctcaaaggggtttaacaaccttcccaaattcacacagrgaggaagggacagagccaggactagaggttgggtttcctgattgctgacccacagcagctgctgcttcttgggagcctgtggcttccccgggggacgtgtccttccccaggagagtgtgggcatgaagggattcttcccgggacagaagagcatcatccatgtgttcagggagctccttccgctcctgcttctgtatctgcttctgctctgggagggcagggtctccagcgccgtgctt

SEQ ID NO: 112265 - DNA, 589 bp, Homo sapiens
gagctatgggaggtagggcagctctgagatcctgggcaccaattctctttcatttttttctctcctgcctgatttttcctgcatgcccaggaacaaagctttcagaagcagctctgaggtcaaatccctctcagcttccaaaaaagaaaataaaaagaagttcttccctgctggctccatttagaaaaattacgcagaagggctttagcctggtttgagacacttgtccatccttggcccarttgcttatttgggggctggggtaggcaggaaggcaggaaagagcggaggagtcagggaacagaaaccagtccaggcagggtctcctgtttcccattcccctggtaagagcatggaggtgctctgaatatacagttggccagattgcaaaaggccaaattgtttaattatttatttattattattatactttaagctttagggtacatgtgcacaatgtgcagtttggttacataggtatacatgtgccatgttggtttgttgcacccatcaactcgtcatttacaattaggtatttctcctaatgctatccctcccctagcccccaacaggccccagtgtgtgatgt

SEQ ID NO: 112266 - DNA, 589 bp, Homo sapiens
gagctatgggaggtagggcagctctgagatcctgggcaccaattctctttcatttttttctctcctgcctgatttttcctgcatgcccaggaacaaagctttcagaagcagctctgaggtcaaatccctctcagcttccaaaaaagaaaataaaaagaagttcttccctgctggctccatttagaaaaattacgcagaagggctttagcctggtttgagacacttgtccatccttggcccagttgcttatttgggggctggggtaggcaggaaggcaggaaagagcggaggagtcagggaacagaaaccagtccaggcagggtctcctgtttcccattcccctggtaagagcatggaggtgctctgaatatacagttggccagattgcaaaaggccaaattgtttaattatttatttattattattatactttaagctttagggtacatgtgcacaatgtgcagtttkgttacataggtatacatgtgccatgttggtttgttgcacccatcaactcgtcatttacaattaggtatttctcctaatgctatccctcccctagcccccaacaggccccagtgtgtgatgt

SEQ ID NO: 112267 - DNA, 507 bp, Homo sapiens
ttccctagagccataactcagagacacagacagtggggctctttccttctgaagatgatatcaccaactcacctacacaaaatgggtaggaatagtccatgcctggctggagggggtcctctgctttcagcttcagcacaggaatggtagacctggcccaaagttgctagttatttttttactgcacaacctcactgtcccctgtaaccttgccccatctcactggacmaaatttcccaccagggcaggcatcatgtttgtctccactgatgtttcccttgcacctagcacatggatgtctggcttgtagaggacctcactctattacatttaatgacagtctactgatatgtggctgaattcttgaaggtgctaacttgaaagtttgctatgagatttcactgcattaaaagtcttctaatgatatcgtggcccctgagaagaaaagtgcagtatcactttgatatacatggatcagtggaaatgagaaatatttatgtataactg

SEQ ID NO: 112268 - DNA, 587 bp, Homo sapiens
gtattcaccttactcagtactagtcagtcatgaagggctggccaatctaaccctaaaatacatttcaaatgtctgctctcctctctcttccttccattactatcttagtttaggctttatttgttttacttgaaatattccaataaccttcagtttctcttcattctaataaaaccattcatactcatgatggcaaacacattagattgtgaggttgctgagagcaacrtgtgctttgcactgtctacttaatccagatggagtccatggttcccaaacttgactgtgcatcagaattttgggtggcattttttaagttacagattttcaggctcctgaccatgtctattgaatcagaatctgtaggcatgtgggctaaaatattggtatttttaatatgttcacaagttgatcttatgagcagtatacatcgttgcttatttttgcccatctttttattaataatcatgtgacagtgtcttccaccattgttagctcagtgtttagtactatgtcattcattatcacagtagtttttggaataataaatttaattacacttttttgaagtaaaacagtgattcttt

SEQ ID NO: 112269 - DNA, 537 bp, Homo sapiens
gtcccaaggcaagaccctacaattattccaaccaaaagatgtatttttagagtttgttcatctttttgttgttaaaacatttggctgggcatggtggctcacacctgtaatcccagcactttgggaggcagaggcaggtgaattgcctgactccaggagtttgagaccagcctgggcaacatggtgaaaacccatctctacaaaaaattagcccggtgtcatggcacatgcctgtagtcccagctacccaggaggctgaggtgagaggatcacctgagctcaggaggcataggctgcactgacctgtgatcatgccattgcmctccagcctgggtgacaagtgagactctgtttcaacaaaattttaaaatggatatttggaccttgattttatcatctaatgtattttctcaccttccctagctcatgtaacctatgacctatttttaataggcatgccttctcatagctttatctcagtcactgatatgttcacattagacaaggccaaagacaaaggtctgtggtatacccctt

SEQ ID NO: 112270 - DNA, 537 bp, Homo sapiens
gtcccaaggcaagaccctacaattattccaaccaaaagatgtatttttagagtttgttcatctttttgttgttaaaacatttggctgggcatggtggctcacacctgtaatcccagcactttgggaggcagaggcaggtgaattgcctgactccaggagtttgagaccagcctgggcaacatggtgaaaacccatctctacaaaaaattagcccggtgtcatggcacatgcctgtagtcccagctacccaggaggctgaggtgagaggatcacctgagctcaggaggcataggctgcactgacctgtgatcatgccattgcactccagcctgggtgacaagtgagactctgtttcaacaaaattttaaaatggatatttrgaccttgattttatcatctaatgtattttctcaccttccctagctcatgtaacctatgacctatttttaataggcatgccttctcatagctttatctcagtcactgatatgttcacattagacaaggccaaagacaaaggtctgtggtatacccctt

SEQ ID NO: 112271 - DNA, 565 bp, Homo sapiens
caatgctttgatcttcaaattcttcctttgtctaggagtgaagggtgtacatcctgcctggggctgcagtgagcatcagtggagagagcatccctaaggcatcaagtactcaacctggaacatgttaggcacctaataaacattgggatttctagctcacaaaagctctaaaaactggcctttaaaccctttcatttgagtgaaatgaatggagggtgattgtgagaattcaattctcttttactactttctgcctctctcattaatctttaaaatcatatgcacaaaaaagatgatgggaccacatgcctctggttcactcatgctcaggttagcaggcgttgtgtggtcagggaccttaggcaggcttcctcctccatggccttgacttccttggccctgcagaggtggaggttcccttttccctaatccagatgcactcctacattgaatcaaaaacagggcacttacccaaactcacctggaaaaaaagaagattaaacctytacctctcatctgtgcaaaatacactatatctcaggttgctggcagctgggtcctgact

SEQ ID NO: 112272 - DNA, 387 bp, Homo sapiens
gagctatctcctctccaagctccagactggtcactgcagggckgccccagggactccctaagctcccagctccccataggtctgctgagcacgtaggcctgagttggtgggctctggtgggtgctcagtccatttgattgtagaaggtctgggtggcagaagatcctactagggctatggggaaaaatcaggttctactccaggggacctcaggcaatcaacctgaactcgcccagtgccagctttgtgactttgtgattttgtcccactgagatgggagaatgataatgtgcacctggtaggtcggaagtgagggctatgtaaggtaatgccgtgaaatggcttggtgcttggcacatggaggccttctgtgagcggattagctgg

SEQ ID NO: 112273 - DNA, 387 bp, Homo sapiens
gagctatctcctctccaagctccagactggtcactgcagggcggccccagggactccctaagctcccagctccccataggtctgctgagcacgtaggcctgagttggtgggctctggtgggtgctcagtccatttgattgtagaaggtctgggtggcagaagatcctactagggctatggggaaaaatcaggttctactccaggggacctcaggcaatcaacctgaactcgcccagtgccagctttgtgactttgtgattttgtcccactgagatgggagaatgataatgtgcacctggtaggtcggaagtgagggctatgtaaggtaatgscgtgaaatggcttggtgcttggcacatggaggccttctgtgagcggattagctgg

SEQ ID NO: 112274 - DNA, 582 bp, Homo sapiens
aatgtaattacccttccatggaatgtaggagctggcaggaagttaaacggcagtggcaggggaggcgtgactcacttcaggagccactcgcttaccctatggatgggaacttcatctcccccttgttggtcatcaaaataaaaagtgaacatcatgccacaaatgagatatgcacagagctgtggtgcaggatgctgtccaggccacttctgtgccagcatcagggctggtgggcacctggggccataatcttcttatttccaatccttccatcttattctttgcaagtccctcrtcattggactgaacaattagccactgcctatgaatcagatttttgcctctggccattttcccatcgcagctaggtggacagagagatgtgccacttgaagacctgcccaccgggaggacttctctttctccctgtcttaggtccctctggattgttgcagagtcccctctggccagtctaaatatgtcagctgatgtgggtcaatcggttcctcttctccctctgcaaaggtgtgcccacccagacatcagaatctgagcttatttggaataaggatctttgcagac

SEQ ID NO: 112275 - DNA, 591 bp, Homo sapiens
cctatgtggtcattgtaggaggcccagctgcagtcagagctcccagtgggtgagggctttgggaattaccaacagggagggataatagaggttgtcaagagatcagaaaggcctctagaggtctctataacctaggctgttctaggtggggtgggrggcacgggggagggatcttaaaaagtagaaaaactatagttcctcccaggttcttcaggaaggacacaaatgctaacaaaggcctcagttggaccagattatgagttttcacacactctatcagccctgcgatgtaattattctcatgttataaatgaggaaactgaggctcagagagggagtgacctgcagaaagtcatgcaacccaaatttgaactcaggtttgtattactagctctgtaaggctgtctgagcaggacaagttttgaggttttctataccatggaatccagtctgttcccagaagggaaaccattattagagaaatggtatgtagttccgtattaggaagaattctcatccctactttggtgctgcaataactcccaaatgccttgatagatctgtggtactgaagcctctagaagaagactc

SEQ ID NO: 112276 - DNA, 428 bp, Homo sapiens
ctgttctaggtggggtgggaggcacgggggagggatcttaaaaagtagaaaaactatagttcctcccaggttcttcaggaaggacacaaatgctaacaaaggcctcagttggaccagattatgagttttcacacactctatcagccctgcgatgtaattattctcatgttataaatgaggaaactgaggctcagagagggagtgacctgcagaaagtcatgcaacccaaatttgaactcaggtttgtattactagctctgtaaggctgtctgagcaggacaagttttgaggttttctataccatgraatccagtctgttcccagaagggaaaccattattagagaaatggtatgtagttccgtattaggaagaattctcatccctactttggtgctgcaataactcccaaatgccttgatagatctgt

SEQ ID NO: 112277 - DNA, 585 bp, Homo sapiens
tccactatatgaaagtcagctacttcatctcttaactcaactgaacaaattgtttaggtgccaggggaaaactctctttgttggaggttttaagacacaatactttggtctttaatctggcagattttcttagctagttgtgaatctacttacttttggcttacacactaacttcaaggttttaccaccacataaaatcttaccacctggacatttttagataattaggttctcacaaggcctactgcttgtacagtccagaaggtatgtttcacattatgttcaatgaaatgaagtggcctggagggtgcagatggctgtacaatgaacatgataaatytgcttgtcttaattaggagaggtgatacctgaaatataattttagaattcatgtagttacttattacatatgtgtcaaccatctattatgtgtcaagcagtgttctggacactgagacattaaacatttgttgacaagaacctagtagccatctaatcaagttcctaacttatacttgaattctccacatgaattctctagtgataggaaagtcacttccacaaggaaagtgacacttccattga

SEQ ID NO: 112278 - DNA, 585 bp, Homo sapiens
tccactatatgaaagtcagctacttcatctcttaactcaactgaacaaattgtttaggtgccaggggaaaactctctttgttggaggttttaagacacaatactttggtctttaatctggcagattttcttagctagttgtgaatctacttacttttggcttacacactaacttcaaggttttaccaccacataaaatcttaccacctggacatttttagataattaggttctcacaaggcctactgcttgtacagtccagaaggtatgtttcacattatgttcaatgaaatgaagtggcctggagggtgcagatggctgtacaatgaacatgataaatttgcttgtcttaattaggagaggtgatacctgaaatataattttagaattcatgtagttacttattacatatgtgtcaaccatctattatgtgtcaagcagtgttctggacrctgagacattaaacatttgttgacaagaacctagtagccatctaatcaagttcctaacttatacttgaattctccacatgaattctctagtgataggaaagtcacttccacaaggaaagtgacacttccattga

SEQ ID NO: 112279 - DNA, 633 bp, Homo sapiens
tgctctggtttcatacatcatctgtgaccaaagtaataaaattctgtagaatcacacactaaaaaaatcaacagagttgatttggccttctctaatgcttgtcactgtttagcttctaggtcatcgcttcatccatttgatgatcacgtgattaagactttctctaaataaactttgaaagttcttgttttttgctcagccaaaaatattcataactgtttcagacaatagccaatgtctatacaactctttagcatggtatattttgttttctgggggctgccataacaaagtaccacaaattgagtggcttaaaataaatctactctctcatagttctagagcctaggagtctgaaattaaaatgctgacaaggtcatgatcccttggaagggtctacagaggaatcttccctgcctctttcagcttctggtggccccaggcattccctggtctgtgacaacacaaytcctatctctgcctgcttctcctttgaccattttctttctggttaggacttactcaaatgcagtaggatttcatcttaactatttacttctgcaaaactcttatttccaagtaaagtcacattctgaggctctggtggacatgatttggggaaatactattcaa

SEQ ID NO: 112280 - DNA, 572 bp, Homo sapiens
gacttagttgatacgtgtgattaaaaaataaagatgagtccattcattatgcttgcatttaaaaaaatacattcamattcagttgatccagtatgggggtaaagtagactgaggtatacaattatttgagttacagttttgccaggctagtatgcacacaagagagaagcaagataacggaaagtatttgtaaggaaatggttgtactgagtatattgatgatgaaaaacctaagttgggaggagaggaaatgaggattaaaaatggaatatgaacatggaaaaattcacttgaatgtggtaggtagattctcaagatggtctccttgagttactctggtgctatggttgtgttaaatgacaaaaaagattttgaagatgtaattaaggttggtgagccattgacttttaagatagaaagattgtccaggtgggcttaagttaacttcatgagtcctttaaaagcagagttttctctgaggatgtagaagtttgagagattccaaggacgagaaggatttcatgcaccataataggcttggaaaaacatgttatgaggaatgtgcacagcct

SEQ ID NO: 112281 - DNA, 592 bp, Homo sapiens
tcagtgaaatcaagaacaagccaggaggcatgcaatcatctttagggtttaatatgcttctgtggaaatcctaactagaaaaattagaaaaaggaaataaaatgaaatataaaatactgaattgggaaaatatacacaaccctacaggcaactttcattttttgawgatgtgagggccaagagccttggccttggttcactgaaaaactgagacagctgagtataaaggggtccccagagaacctccgaccagcctgcgcatggggagaacgggatggagcctcagaaagtttgtgccattgttttgcagtggggaggagcctggcctctcctgttctggggtggagtctcgctttgctgagagtccttgtttcccttttgttcccttttcacccagtaagccctgcccttctcacccttcagagtgtctgtgagcctgatctcttatggttgtataagaacccggcttttagctgaactaagaagaaagtcctacagcaaaatcactgacatgaagcagattgattaataagtgatgacaaggcacagaaatgtacttaatgacatctacacgagagccttcacaagggag

SEQ ID NO: 112282 - DNA, 577 bp, Homo sapiens
atacatattatgagtattcaaaatgtatctcagaagaataataaaatagtccaaaggtatgtgttgattattatcaacttcttggtctatgttattagcgatagaccatgaaatkgagttaataacaaagcagaaaaacacaaaatgtgactatactagggaaatggatctttgtccttaacagattctcaatgccaggagattaattttgtaagcactaaaggacctcttgtgacactaggttaaactgactttatggaaataattcctatccagttttgtaatagaaggtgatttatgctaatgtaatccaactctatggctctccagcacaaactctgttggtcttattaatgatatggcccagttaataaccactccctccagctagggtcacactttccatttttatatattccactgcattagaggggtaccatctacttttcccctgctacttgatagctataccttttcatcaccttaagcatctttgctaatgagtctttaatacaagaaaaatgctatggaaaaacacatcatgattttattaaaataggtgttacacctgagacag

SEQ ID NO: 112283 - DNA, 624 bp, Homo sapiens
tccacttttagagaatggaaggaaaacaagtgccccatagagatcatatggtctactgggagtcatgtctttgaaccattaccaaaatagacgtaacattgttacccaggtgcttggggcagcacatttttaggataaaatgctttctttattgaatagaaaaagcaccagggaaggtttttcaagggcacaatctctgtagactctaacatggatcaaagactttgttgggtgggtgatcatagccaacaacaatgaactaagtaactcaatgggagggcctggaaattagagaggttttcctccagcaaataaagcaaataagttatttagaatgatgttgacttgtttttcaagatataaaccagagtcacttagtgaaatcaaggttattatccgtatgtgtcaaggcaactttattgaaagaaaatatttgtgaaagagaccccrtttatcagaaacaatttctatacacttcagctgaaactatatcatttgtgaagatgctaggaccactgatttccatccattcatggtgaaatttttatacatatgttgtatttgctgtcgctctgggaagagtcctttaccccagtgtagtcatttctttacttttcatgtcat

SEQ ID NO: 112284 - DNA, 624 bp, Homo sapiens
tccacttttagagaatggaaggaaaacaagtgccccatagagatcatatggtctactgggagtcatgtctttgaaccattaccaaaatagacgtaacattgttacccaggtgcttggggcagcacatttttaggataaaatgctttctttattgaatagaaaaagcaccagggaaggtttttcaagggcacaatctctgtagactctaacatggatcaaagactttgttgggtgggtgatcatagccaacaacaatgaactaagtaactcaatgggagggcctggaaattagagaggttttcctccagcaaataaagcaaataagttatttagaatgatgttgacttgtttttcaagatataaaccagagtcacttagtgaaatcaaggttattatccgtatgtgtcaaggcaactttattgaaagaaaatatttgtgaaagagaccccgtttatcagaaacaatttctatacacttcagctgaaactatatcatttgtgaagatgctaggaccactgatttccatccattcatggtgaaatttttatacatatgttgtatttgctgtcgctctgggaagagtcctttaccccartgtagtcatttctttacttttcatgtcat

SEQ ID NO: 112285 - DNA, 530 bp, Homo sapiens
ttttattttaattttttccttagaaatggcatctcactatgttactcaggctgttctcaaacacctggccccaagtgatcctccagtttcggcctcccaaaggactaggattacaggcatgaaccactgtgcctgggcctacgctttagtttttaattttgatttctcgtctacctaatactgtgatgtgatttggagcaagtccattcatctctaagagtctccattcctgtatcttcaggggaccagttagactatattctttcttaacccttcaaatctgaaattatatatattttattaaaaatgatataatgcctatagaaacattattccaatatatgacaccaagagacttataattacaatgatgatgatgatgatgatgatgatgactatatcaatgaagytggaactaccataggagctctggtttgatagctatggataatgagatgttctatttgtgaattttgtcttaactgaaaattcttctaatgcttttcatcttcctaggggagcaagaaata

SEQ ID NO: 112286 - DNA, 547 bp, Homo sapiens
acagttggggcttttaaaatagyagaagtcctgacattcctgtcaaagggctctgtaatgtttcctgcttccaaaaccatttccatatcactctcttctaatggcatgattcatattcatgtcaacttgaaaaagcactgaagccaaagtaaggtaaaaacaaatttatgttgtggataatcagctgaaatccatcacacctgagggtcagttactactgtgctggggctgtgcagtctacttgggtaaggctgagtggcagtggcaggtcctgatatttgttctagtagccacaaagccgcactggctctcaaaaagcacaatctgccattcacttaagtctggtttgccagcaagcccaaggatggactccccactagtaccatcaggctcagggaatttggctagcaccgggcacctcagacttctgccagctaattggctttggggaagccgctgacctactctccactgagtggcttttgtgaacctggaacctagcctgcttctcatcattgatcaacacttggccaaccagctggcttgt

SEQ ID NO: 112287 - DNA, 514 bp, Homo sapiens
tacatattaacttcacctattattttaaggatcataccaacatgacaaaatagagaagttcaaaaaaatacatgtttaagatgctamttttaaacgtgtattttctattaaacatgtattttctatttttaaacatgtattttctatttttcgatgaaaatacaccttccattttcaaagaaattaccttctttcaatcccaaaatacctgcaatagtaatggcccaagggtgcatgtacagctgtgcaagttgtatatggagcaaaaatgaggagttccacttacagaaactacagacatactgaccccggcagagatgagagaagtgggtcagagagaaaatagcaaggggtaagggatatgggaaaatggaaaatacatgttaccaaaaggtggcatccaccactcatctctctcactaatgaaaatctcatgcaagaccttgcacgcagaattgtcagatttttcaatttttcaagagtagctaaacatctggatttttaaataaaaaat

SEQ ID NO: 112288 - DNA, 514 bp, Homo sapiens
tacatattaacttcacctattattttaaggatcataccaacatgacaaaatagagaagttcaaaaaaatacatgtttaagatgctaattttaaacgtgtattttctattaaacatgtattttctatttttaaacatgtattttctatttttcgatgaaaatacaccttccattttcaaagaaattaccttctttcaatcccaaaatacctgcaatagtaatggcccaagggtgcatgtacagctgtgcaagttgtatatggagcaaaaatgaggagttccacttacagaaactacagacatactgaccccggcagagatgagagaagtgggtcagagagaaaatagcaaggggtaagggatatgggaaaatggaaaatacatgttaccaaaaggtggcatccaccactcatctctctcactaatgaaaatctcatgcaagaccytgcacgcagaattgtcagatttttcaatttttcaagagtagctaaacatctggatttttaaataaaaaat

SEQ ID NO: 112289 - DNA, 345 bp, Homo sapiens
tgagacttgctggcttcaggtgagactcagcacatttccagctgtggtggctgtggggccaaactcctcgtgcttgagaaaagtagagtgcaaagtaaaggagactttgtttgactccttaggtactgatgcggaagcagggcagggaggtgctgggaggagaagggctagtccctggcaarggctccacccctaggcctgtgcccatggacctaggtgaagatgagcactcctgccttggagtccaaatgttgcatttcccaagaccacctggcctgtcaagtccccatcatgtgcctataaaaaccctgagaccccagcaggcacacacacaggcagctggac

SEQ ID NO: 112290 - DNA, 615 bp, Homo sapiens
actatgcagcttgctgtccccatagtcctgattacaatgcatattagcataataaaaatatgataaatcttattaggaaaattgctttttaaaaataacttattttttcagtcacttgaacacaagatcctatatcttattcatttgcgtgcattatgtaatatctatggtagttatttagaacttgagtacttggaaaaatatagactcagcccattccctgtatccaaaaggctcttttctctttcatctatgttaaaatgggccttcatttatgctcattttctggagccatgaaacatcgaagtaaaggaaagaagtacatgaataacttcaattctcagaatgcccatgcatttgagaacttttcctctttctgccaaatctactttgcactgtaagaaacattattcccattaagcaatgtgccaattccaatctactcygcaccaagttcgacaaacttgttttattgttgttttgttttgtttttttcaagcatttctgcctctcaatggcatcggaaaagaagactgattagagggaagaggaggaatctactagctgccttaaacaagtggccacaaagtaaaataatagaggtcttttattctg

SEQ ID NO: 112291 - DNA, 431 bp, Homo sapiens
tcttccctcctgtacaggaggaaagactcctgagttcaggagcttgagatcagccagagctacatgctgaaacctcatttctactaaactacaaaaagccaggcatccagcctgggtgacagagtgagactccatctcaaaaaaaaaaaaaaaaaaaaaaaaatgtatatayacacacacacacacacacacacacacacacacatacacggcactaaaaagaaacaaatcctaaatttatcacagtgaactccagcaactgagaagacccaagtgagcccttcccaaaacagcctctctcctgtcacaggtaaccaccatcctgacttgtcatactgacttctgaatgttacagagatgggctcagacaagtatgtttttgcctagattattttgctcaactttgtgtttataaaattcatcaaggtttt

SEQ ID NO: 112292 - DNA, 581 bp, Homo sapiens
gaattctctaaagattggttaagttattataaaaagccatttatcaaaattttggagaagagtcttcaaaatataaaaaaagaaaagatatttacatttcagaaagtttgggaaaactaaagtttaatgtggccaaaatatttgtctaattttctgaactgttcttagctagctgtctccttcagtcttttattcttacccttaatttttttttttttctcccactacctgtggaacagagttgctaaagaaaaagatgctggaaggatttcaagagtcagaccttatttccattctaaacttctaactttagccattcgttagttcatcttctcagatggcagagaaaagcyaaactgttgatgataataatagtaataattataattaaaggctctaggagaggaagagtatcaccacataaacctgtgactttggataaggcacaaattctggacctcagttttttcatgtctacatggagaggctgcactacgtgtaacattccttctcactccagcattttgattcgaactcagtatttccaatgactggatgagtcaaataatttgctaggtgta

SEQ ID NO: 112293 - DNA, 600 bp, Homo sapiens
cctctaaaatttgctttgcctacaaaattcccagaatyagaaaatactactaccatctatccagtcaccaaaaccagagacctggtgttgaatatggggggtctctgggttaaatttgtctcccagatctaattctcacaactatatctacattcaagtttatctacctagatcactctcctgctctagccaagcaaaattattagcagttttacatgattcttctgtgcctttgcacgtgtttttctcaagaatgcgctccagctgtttccctttggctggcattcttcttcctacttattcttgaagaccagttcaaggtgcacttactctgtgaaatgtcttttcccacttttgtccccatactttaattatacctacctcaaaaattataaatacctcaaatacagttatttcttaaatgtgtatttgttgatttttaagtctgtcttctctactgaaccttaagttcattgagagcgcagattattatccccagctgctaacataatttgaacctttgttcgcctatttgggccttggttctatctgtaaaacaggaacaaaaaaaaaatctactctgcaaaattattgtgagga

SEQ ID NO: 112294 - DNA, 543 bp, Homo sapiens
gtttacaataactcacactccattcttcctgatctcattttcttcctcagtatactacactgtacattagatctgttttagcagcatacatacacttaaattccttcctttttttctgagtgtttagcccaaaataaatgagatttactgatatatatgaatagtcttcaacttacatatctgaatgccacaaatacattttaaaaacacttgttagattacaattctaggtgcctggtaataagctaaagcttgtttttgctataatatatccaaattgcaattttggtactattagatgaagttctcactcctgggaccagggagccatgattttttttcctctgccctctataaaatgaaaactacacacaaaaaatttgaaataatatctatctttggcattcttggccttctaaagtgcttcttcaaaatttttattttttctctagttaaaaaccatttactcaatttatttggtctcagaaaatagttaaaggcagctgcrataactcacagctaggtacaaatgacaatctcaaa

SEQ ID NO: 112295 - DNA, 463 bp, Homo sapiens
aaaaaaatgaaatagatagggtgaggtggctcccagcactttgggaggccaagatgggagaatcatttgagcccaggagttctagacccatttgggcaacatggcaaaaccctgtatctacaaaaattacaaaaattagccagatatggtggcatgtgcctgtgatcccagctagttgagaagctgtggtgggaagatcatttaaggccaggaggtcgaggctacagtgagtcgtaattgcaccactgcactccagcytgagtgacaaaatgagactgtctcaaaaaaaaaaagcaaaattatgatattgatattcttatatgacactttgaaataagttttattgctttatgtcactgagtgtgtttcatctatttcgttagattgattcttgtcgtcagggagatgtcttgtatattagtttcacttcagtgttagcaaacatttgataaattggcttagg

SEQ ID NO: 112296 - DNA, 584 bp, Homo sapiens
ggattggctcacacgattacaaggcaaagtcccacaataggctgtctgcaaactggggaggagagaagccagtagtggctcagtctgagtctgacagcctcaaaacaagggaagccaacagtgcagccttcagtcaatggctgaaggcccaagatcccccagcaagccactggtgcaagacccagaatccaaagaccaaagaacctggactctgatgtccaagagcaggaggagcagaagaaagcatccagcacagaagaaagaaggaagccagacaactcagcaagctaggatatcccaccttctttcacctgctttgttctagctggcagcccattggatggcacccacccacattgagggtgggtcttcctctcccagtccrccaactcaaatgtaaatctctggcaacatactcacaggcacacccagaaacagtactttgccagccatctaggcatccttcaatccaatcaaattgacacctaatattaaccatcaaaatgtcatagtgcaatatattactcacatgtttgtagtgatgctggtgtaaatggcctactgcactgccagtcatataaaag

SEQ ID NO: 112297 - DNA, 584 bp, Homo sapiens
ggattggctcacacgattacaaggcaaagtcccacaataggctgtctgcaaactggggaggagagaagccagtagtggctcagtctgagtctgacagcctcaaaacaagggaagccaacagtgcagccttcagtcaatggctgaaggcccaagatcccccagcaagccactggtgcaagacccagaatccaaagaccaaagaacctggactctgatgtccaagagcaggaggagcagaagaaagcatccagcacagaagaaagaaggaagccagacaactcagcaagctaggatatcccaccttctttcacctgctttgttctagctggcagcccattggatggcacccacccacattgagggtgggtcttcctctcccagtccaccaactcaaatgtaaatctctggcaacatactcacaggcacacccagaaacagtactttgccagccatctaggcatccttcaatccaatcaaattgacacctaatattaaccatcaaaatgtcatagtgcaatatattactcacatgtttgtagtgatgctggtgtaaayggcctactgcactgccagtcatataaaag

SEQ ID NO: 112298 - DNA, 567 bp, Homo sapiens
gttggtttaggtccttctgtgaccattcctttcatgtatataagtagttacttctaggtaatgaaccgaaatacctatttgttgactccagtcgctttccaatcctggtagagtttttattttggtgggcatcagcttgtcccagtttgatttgtctttttaattcccataaaggtagtatctcaggcaacaagtactygaatcaactatttttgcattaattaatcactggtcatgaattggtatcaaccaatgtgatctggccttttatgtcctcaatgtcttccataatagctgagaaaacacattaaagtttaccctattgaattcctttagtcttatattttcccatgaggatctgccacaactttccaggtagagtagtaaccattcatttatgaactgccatcagaaagacaggataatcatctacgctctggcagcaggtgttctaatggagaatccctttaaactcttccttcagtagcctaagacagagcttcagcagtctctagagtgagtcccagaaaaagaggaggtatttactcatgaatatgaccaaggcca

SEQ ID NO: 112299 - DNA, 567 bp, Homo sapiens
gttggtttaggtccttctgtgaccattcctttcatgtatataagtagttacttctaggtaatgaaccgaaatacctatttgttgactccagtcgctttccaatcctggtagagtttttattttggtgggcatcagcttgtcccagtttgatttgtctttttaattcccataaaggtagtatctcaggcaacaagtacttgmatcaactatttttgcattaattaatcactggtcatgaattggtatcaaccaatgtgatctggccttttatgtcctcaatgtcttccataatagctgagaaaacacattaaagtttaccctattgaattcctttagtcttatattttcccatgaggatctgccacaactttccaggtagagtagtaaccattcatttatgaactgccatcagaaagacaggataatcatctacgctctggcagcaggtgttctaatggagaatccctttaaactcttccttcagtagcctaagacagagcttcagcagtctctagagtgagtcccagaaaaagaggaggtatttactcatgaatatgaccaaggcca

SEQ ID NO: 112300 - DNA, 573 bp, Homo sapiens
taagaaactggaccattatggtaaacaatttataccttttctggtgcttctgttggtttaggtccttctgtgaccattcctttcatgtatataagtagttacttctaggtaatgaaccgaaatacctatttgttgactccagtcgctttccaatcctggtagagtttttattttggtgggcatcagcttgtcccagtttgatttgtctttttaattcccataaaggtagtatctcaggcaacaagtacttgaatcaactatttttgcattaattaatcactggtcatgaattggtatcaaccmatgtgatctggccttttatgtcctcaatgtcttccataatagctgagaaaacacattaaagtttaccctattgaattcctttagtcttatattttcccatgaggatctgccacaactttccaggtagagtagtaaccattcatttatgaactgccatcagaaagacaggataatcatctacgctctggcagcaggtgttctaatggagaatccctttaaactcttccttcagtagcctaagacagagcttcagcagtctctagagtgagt

SEQ ID NO: 112301 - DNA, 466 bp, Homo sapiens
aggtatttactcatgaatatgaccaaggccattgctgtaccttcttgtagaattttccttcatataaaatttccatttaataatggaactcttttgggtattctctttttttttggtgtgtttttcagacaaaaccctgacactttggacatttcaaaagttraaataattgtatacccttcaattattggaaccatttcaatcaatgccctatactatgccaaatgacaggtaatttgtttcttctttttttcttcattgttcttgctagaaatatatcatttattcttctcaaagaactaactttgattggttttattcattctttgagaagattaagaaaacagttttttctatattgcacttgcttcattgatttatacactaatattcatgatttcctaccttcttaagttggaacttaggttagtgttttgagatatttcttcttttctaatataccatt

SEQ ID NO: 112302 - DNA, 558 bp, Homo sapiens
aatgaaagagtaatgttttatttctctacctaggtagcgctcacccatgtttttgacagttttctgcctgtttctttaagaaaagttttaaaaacaagtctgtgatattttctgtaatttcatagaagactgataatttgacccttgttaaaattcttgcaagagaayctttaggtgtacaccagattgaagataaataagaatctgagttaagtgctcaaatcacattttttaggttgttcatctaaaataagtataataaataactggatttcataagatgcagctgagggagctcatcaactaataaaggaaaggagatggaagaacttcagaggtcacagacactcattgagtcatctcccttaaacatatgaattcaaggtgaagattaggataatcagacactacacgtaagagtcacaattctcactatgctgttgacattaatgctgtgttaaataattttcaacagttaacataatgataggtaaaaatgtgaattgctagttctgaaagcaagatcactgctgttagcttagcagtgtaggagtggca

SEQ ID NO: 112303 - DNA, 558 bp, Homo sapiens
aatgaaagagtaatgttttatttctctacctaggtagcgctcacccatgtttttgacagttttctgcctgtttctttaagaaaagttttaaaaacaagtctgtgatattttctgtaatttcatagaagactgataatttgacccttgttaaaattcttgcaagagaacctttaggtgtacaccagattgaagataaataagaatctgagttaagtgctcaaatcacattttttaggttgttcatctaaaataagtataataaataactggatttcataagatgcagctgagggagctcatcaactaataaaggaaaggagatggaagaacttcagaggtcacagacactcattgagtcatctcccttaaacatatgaattcaaggtgaagattaggataatcagacactacacrtaagagtcacaattctcactatgctgttgacattaatgctgtgttaaataattttcaacagttaacataatgataggtaaaaatgtgaattgctagttctgaaagcaagatcactgctgttagcttagcagtgtaggagtggca

SEQ ID NO: 112304 - DNA, 563 bp, Homo sapiens
aaaaaattcaaatttacagaaggtgagagtagagtggtggttaccagaagctgaagggatggcggtgtttctaggaggtgttggtcaaagggtataaattttcagttagactagaggaatacattttactatctatttcacagcatggtgttcacacttaataataataatagtgataatattatatatttcaatattgctgagtacatatattctatttaatatatttaagcctagcctttctaactactacagaaagagaagctaaatgtctgttgtaagtatgcttatcttacaaaaaataagttcatttgayattcatgtaataaatctaatctttgttttattgattttcagattaacaaagaccttatctgaatactctttacaacttttatgtaaatctaaaattattccataggagaaattttatgtaaaaaaagataaaagtatgaagcatgtttcagtttgggtatttcactttgtattcactgaatattgaaaaaattaaaatactatcaactaatacataaagtcatataaactcctaaataaccgctgag

SEQ ID NO: 112305 - DNA, 464 bp, Homo sapiens
aacaccccatcactccccactagaaaatcacactagctcaccagcaatggatccaaaccaagaagaaatccctgatttacctaaaaaatgattcaggaggttagttattaagttaaccagggaggcaccagagaaggtgaagcccaatgtaaggaaatmaaaaaaatgacacaggaagtgaagggagaaatattcaatgaaatagatagcataaataaaaaacaataaaacttcaggaaacaatggacacactcatagaaatgcaaagtgctctggaaagtctcagcaatagcattgaacaagtagaagtaagaaattcagaggtcaaagacaagcttcttgaattaaccaaatccaacaaagacaaaaaagaataggaaaatatgaacaaagcctccaagaagtctgggattacgttaaatgaccaaacctaagaattaccatcattcctgtagaagaaaaga

SEQ ID NO: 112306 - DNA, 566 bp, Homo sapiens
ctaggtcattataatgattaaacgagatgatacatgtgaagagctaagcattaatccctagaacttaataaatgttagctgctatcagtagtaatattagacttgttttttaataatctctcactcccagatgtttctctgagagaggtataattgtacagaggagggtcagatgtctggagtttgaatcctatctgacctcaggcaaattatttaatctacaatgactttcagttccctgagctataaaaaggaagaataatagctaattctttgcatcatggtggcaattaaataagttactcgagacaaatacttagcaatatatccataaatgaatctaaaataaagagcactagacagtctctgccaactctacaattgaaacagaaacacactttaagcaattatctggtattttaaagcagtacagacagtcctgctttttaacagactgccttatgagaatctgtagcctaartcagtggttctcaaaactagtggtacatcagaatcacctacagagccttgagaatataaaaattttagaccccttgctatagttt

SEQ ID NO: 112307 - DNA, 601 bp, Homo sapiens
ggttcaagtgattctcctacctcagactcctgagtagccaggattacaggcgcacaccaccacacctgactaatttttgtattctgagtagagacagggtttcaccatgttggccaggctggtctcaaacacctaacctcaagtgatccrcccacctcggcctcccaaagtgctgggattacaggcataagccactgtgcctggctgtaatttacatattctatacaatactctgtttctgtaatagcaataactcagatttttatgttatactaaacttatgcatgatgttaacattgcagaagcctggaccaaggctgcatgggccctccctatatacctctttggaacctcctgtgaattcatcttgtgaatctataattttttttagcttaaaaatgggggatggaaacagaaaagaaggataactcaattaaaacaaaagatatttaggaaaagaaaattatcactaaaagtttaccaagaatgttggaaccagatgtgttgttttcccccaacagaaagctctgggagagagactaatactaatctataatattacatgcataaacagaaactttcctcttgaaaaatttgcttc

SEQ ID NO: 112308 - DNA, 526 bp, Homo sapiens
ttttacacaagttataaaaataagaggccctgtttacacagtttgcatttttatgaaatttgcagtttgaaaaaaaagctttttaaaaagtggtaactaatgcttttctttgaatatgctgtaaccttagaatttttttctgaaatagtttctcaatttaacccactaaacatttgaagatagagtttttatttagcactagagtaaaacatactaagcattgaagaaaagtaagtttgtttctttttcttctggttccacttaagtttctttaatatgtggcaccccctttatgacagctatcaatattatatttaaattttatatattgacaaaatgcaatctacctctgtaagcattgtgccattcaacaatactactattaaatttacataccacagtttaaattayatccatttcaggaatggtaaaatgctaaaactcaagtgtctaactgccttactggaatgagagtacaatttacaaatacaataattacattttaaaaccattaacaatattacac

SEQ ID NO: 112309 - DNA, 548 bp, Homo sapiens
aaataccagagactgggtagcttataacaacagaaatttatttctcacggttctggagcctgggaagtccaagatgaaggtgacagcatggtccggattctaggacctctctctgtgtcctttcacagaagatggggcaagctggctctctggggtctstaaggtcatcaatcccattcatgagggtcctgccttcatgacctattcacctcccaaagaccccatctcctaatttcatcaccttgggggttaggatttcaacataggagacacaatatgtaattttccgctctgagttttaatttctccatctatgaggagataataatctgtgttttataatgttattgtgaagcaaaatgagttaacacaagtacagcacctagaataatatataattcaataaataataaattaacaatgtcatgaacaagggattagaaaatattatttttggttgggactagctactatggatgactcttctgtataactcttaatctcaaaaccatccataaatttgcactgctgtcgtctttttctttcct

SEQ ID NO: 112310 - DNA, 473 bp, Homo sapiens
gggtaagtctgtcaaatgtgagggtttaacaggggacttttatccataatgtgatattttggctccaattcatcatatttacccttatcatatttttcaattaattcagaacagggtgaggaaaagggatgcaattgtttggctattctcagagaccccagtagagaacaacctatgaagccttccttggcctctactttagcttcartgggcccaatacaattacagcataattgagtcacaaaagcagtttattcttcctcccttctcctcacttgtcaaaagtatctattagtgacttatttattaactgagagcatccagagacaacctgtgcatgagatgctgtttggcccctaccttgcaattaaaaccacaaacttttctaagcacaaaactccttctagttatatggtacaacaatggttctcaaactttaccctgcaacagaatcacccaagggcttagcaata

SEQ ID NO: 112311 - DNA, 595 bp, Homo sapiens
gaaatgtggcaggttcaaggacagaagagcatatcaaggataactccagggttccgggacttcactaatatgctgagtggcagggccatttactaagaggggatggggagcaggagcagttttgagaaggtaggggaaaggaaaaagaattccatcgtggactgatgtttgctgtgtttattacacatccaaagggaggtgttcagaaaggagcctggggtgcagaggagaggtcagggctggagacttaatttggccactgtcagtctatgagacatgttgaaagatacaggactgactsagtgcacctgagtgagggaggcagagaagaccagaatttctaagtcaaggaaatgcaaacatattcctaaatgttgtcaaattgttcttgaaaaagttttgccaacttatacttaccaataccccaggagaaggctgactccatacccaggggtgaaaaataaactattgtttccatttaaatttgtatttatttactatgaattaaaatgctgcacatttccaatgtttcattggccctttgctccattttatcctgtgatatgcctcttcatgccgtttgcccatctgatca

SEQ ID NO: 112312 - DNA, 600 bp, Homo sapiens
tgctagggttgtactgacttagcttggttggtagggtgggtattcatacgcttttttttttttttttttttttgagatggaggctagagtgcagtggcgtgatctcagctcactgcaacctctgcctcctgggttcctaggttcaagccattctcctgcctcagcctcccaagtagttgggactatactacacctggctaatttttgtatcttcagaggagacagggtttcactgtgttggccaggctggtctcaaactcctgacctcgagtgatccatctgcctcagcctcccagagtgttgggattacaggtgtgagccaccatgcccagtccacacttttttattttttttaagagacagggtctcactttgtcttccaggctggagtaagtgatatggcttcctgcagcatcaacctcctgactcaagggatcttcccacctcagcctacccaagtgtagctaggactacaggcccaggctaccacagctggctaaactaaataaaaatwtttttgtagcgaatggggtcttgctatgttgcccaggcaggtctcaaaatcttggcttcaagcgatcctcccacctcagcctacca

SEQ ID NO: 112313 - DNA, 407 bp, Homo sapiens
atttgaaaatccagttgtcttctataaatccagacattaaagagacttacaaaaatttaaaacaaaaacactattctcagtaattcttttgttttggaagatatttctcacagaaaaatgttagcataatagttgtcattttaaaatgaataaaccttcataattttctgtttaacttgacatatgatacawaatgattgctataactcatataaacaaaagctctctgcggttctcaataatttttaagagtacaaagggaccctgaaaccagaaagtttgaaaactgctgatctattttagtaatctcatcaggtctaagaagaagctattattattcctatttttcaaatgaagataatgaggatcttagacatggaacaactaatctaacatggtcattctgc

SEQ ID NO: 112314 - DNA, 525 bp, Homo sapiens
atcagccaagatttcagcacctcgttgatttgtccttttggaaaggcccacaaaaaattctctgcctgtaatagatgtcatggaacayagtgagcaggtggcaccagtgactgtacatcatttcttttatctataaataatgaccttaaagcatcacacagttctctcttaccacagagaacagcttcactaaagagactacaaaaaatgatttcaaactactgcccttaagaataaactttttcaaattcaaaagggcagaaagcaggatggtggtttccaggagccatggggaagggtaaatggggagttattgtttaatggataggaagtttcagtttgggaagatgaaaaagttctggagatgcctggtggtgatggttgcctaacactgtgaatgttcatgcctctgaactgtacacttaaaaatggttaaaatggtaaattttatgttatgtatattttactacaataggaatgaaatttttatttaggcaataataaacacattgataatctctgatc

SEQ ID NO: 112315 - DNA, 611 bp, Homo sapiens
agcccatttactggactatcttctttattttttctctcgccattttacataccattcctcaaatatattcctaacagttaatcagcgtacctgattgtctgatactgtgctctttgtaagttggttatgtagcccagtacttttaaacatattttatggagacattaacttttttttwaattcaaacatagccatgtcacatatgggtaaacaacagtgaatcacttaaagaagactgccacatccaccgtctttccaatcgctctctctgtggctacgattagtgcctttacttcctctctgcgtgcctgaagacactttttcattccctgtgagtaaaaattcgagaagtcctcccaacattgaagcaaactgctgctaccctactcacaaggaacctcaaactaaaggcaactcttctgagaaaggtcgattgtaaaatcacagggacaaaaggctgacccaaagactcgggcccctttggatagcaccacaaaggccccctcagacagcacctgccaggactctcaccaaatttactgccaccctctgagtagctatttacctgcttccatgtctccctggggcttgggtgctgcgcagtaacagca

SEQ ID NO: 112316 - DNA, 583 bp, Homo sapiens
tagtttgccttattttgttcatctttttttttgtgctgatagccaaatagttttctaagtttcacatgaggctgtggcagaaacacatgtgaatttggggagtgtctgggaagctgatgagcacatctatgtattggaccttttactctaaacaagcggaaaggatttctttcttttggccagagtacatccttctgttttcaagattttagttcactgcacattgtgtatttctttttagtaaacatttctttattgaaaaagtaatacagattcatatggacaacttagaaaatagaaaggcagaaagaaaggaacaaaaattgcccataaatgaaccacccagggataatcactattataaatattttagtatagaaattaggagcctttattgatctgtacacatacatgtatgaccacactcccccacacaactatcacataccctttttaagccaaaatgagattatactatacttagtatggttttttacttcatgtatcttttcatatcattaaatattcaattacaagattattttaatrgtgcatattattctattgtatgagtttccatgac

SEQ ID NO: 112317 - DNA, 513 bp, Homo sapiens
tcaatttttgggtgcaaatmaggcctgccaaataaatttccttatgaaaacacaggtgcaagtgaaatggaggctctcttcttactgctgtgtcacttgcaagcaaggtgtgatgacatgcctgtggcattcagactcctcatagtcttgacaggtgtgagccagtggtggtggcagcagcagtagcagtgttctagtgtcagcttcccatcccagctgcagtgtatgttagtcagaataaactagacttatgctgtagtgacaagcatcccccaaaatctcagtggcttcatataataaaagttgctttctcacagacaaaatgtttcctgcaggtgtgggcagttgctctccatgtgctgacttaagaaatctgggctgcttcaatcttgtggctgctacatcttaacccaaggtctcctctataactattgtggcagggaagaggtagtctagagaactgctcaaaggcttttcactgtttcatcctggaagtgacgtgttacttctcac

SEQ ID NO: 112318 - DNA, 513 bp, Homo sapiens
tcaatttttgggtgcaaataaggcctgccaaataaatttccttatgaaaacacaggtgcaagtgaaatggaggctctcttcttrctgctgtgtcacttgcaagcaaggtgtgatgacatgcctgtggcattcagactcctcatagtcttgacaggtgtgagccagtggtggtggcagcagcagtagcagtgttctagtgtcagcttcccatcccagctgcagtgtatgttagtcagaataaactagacttatgctgtagtgacaagcatcccccaaaatctcagtggcttcatataataaaagttgctttctcacagacaaaatgtttcctgcaggtgtgggcagttgctctccatgtgctgacttaagaaatctgggctgcttcaatcttgtggctgctacatcttaacccaaggtctcctctataactattgtggcagggaagaggtagtctagagaactgctcaaaggcttttcactgtttcatcctggaagtgacgtgttacttctcac

SEQ ID NO: 112319 - DNA, 513 bp, Homo sapiens
tcaatttttgggtgcaaataaggcctgccaaataaatttccttatgaaaacacaggtgcaagtgaaatggaggctctcttcttactgctgtgtcacttgcaagcaaggtgtgatgacatgcctgtggcattcagactcctcakagtcttgacaggtgtgagccagtggtggtggcagcagcagtagcagtgttctagtgtcagcttcccatcccagctgcagtgtatgttagtcagaataaactagacttatgctgtagtgacaagcatcccccaaaatctcagtggcttcatataataaaagttgctttctcacagacaaaatgtttcctgcaggtgtgggcagttgctctccatgtgctgacttaagaaatctgggctgcttcaatcttgtggctgctacatcttaacccaaggtctcctctataactattgtggcagggaagaggtagtctagagaactgctcaaaggcttttcactgtttcatcctggaagtgacgtgttacttctcac

SEQ ID NO: 112320 - DNA, 513 bp, Homo sapiens
tcaatttttgggtgcaaataaggcctgccaaataaatttccttatgaaaacacaggtgcaagtgaaatggaggctctcttcttactgctgtgtcacttgcaagcaaggtgtgatgacatgcctgtggcattcagactcctcatagtcttgacaggtgtgagccagtggtggtggcagcagcagtagcagtgttctagtgtcagcttcccatcccrgctgcagtgtatgttagtcagaataaactagacttatgctgtagtgacaagcatcccccaaaatctcagtggcttcatataataaaagttgctttctcacagacaaaatgtttcctgcaggtgtgggcagttgctctccatgtgctgacttaagaaatctgggctgcttcaatcttgtggctgctacatcttaacccaaggtctcctctataactattgtggcagggaagaggtagtctagagaactgctcaaaggcttttcactgtttcatcctggaagtgacgtgttacttctcac

SEQ ID NO: 112321 - DNA, 640 bp, Homo sapiens
ttctaagcagtttaggaaggaagtgggtagagaacaattaggagccaacgcccaaaagcactagaagcatatttgacttctttaaaaatataaccctatgtcactcttttaaatcaagagtgctayctcttggtttaaaagaatatttgatcctagcaaattgtgtcattctaaataacagagagggaaattctctaacagaaaatgatatttattcagaaatgggcattgcaataggaatatgggtgccattgtaaactatgtgtgtattcagggaggtaaaggaagacaaaggtcttgtaagaaaaaaatgaggaggattacataatagttttgagataattatccttggctacaaggataagtaacaaaggtggtgtcagtccaagtttggaaaggcaattgctgggcagatgtcctcaaagaagtgttttctgtgtaaggttgtgatggcctttgtgtgaagttgtagtttttgcagaattttttgtggtagttttgttatcaagaacttgtgcgtgagaatcctccctttatggccttcccaagcactgtttttcagctgtttttggttttgtttttttcttgttgacacaagtgactctattttgattctgataactttcacatttcccccctt

SEQ ID NO: 112322 - DNA, 589 bp, Homo sapiens
gcagttagtgaagatgagtacagcctactatcggggcacagaggaggggtacttggctccgttttggtagagatgcaaagtcagaaaagtttccttggagaaccgaacccactcatgtgcaaagcactggccacaattcctgatacttagtgaatgctcaacaaatgctagcttttaatttaaaaaaataagtgtttttattttcagcaatcaccaacttacagaagggttgtgaggacaaagaactttcagaaacacttgggaataagttgctaattggatgcctctttactccagaaycttttagtgtcatttcctacaaacaaggaaacaagcatatcctccatcataatgatatccttggacccctacaaatttcaactgaattgtcccaattgactcaataatgtcctctgaagtcaatgggtcaagttcaggatcatacattgcctttagttgccatgtccttctgctttccttcagtatagaacagtttctgtgggtttccttgacacatttgaagattatgaatagttattttgtagaatgtccctcaatatgttttattatcttatttttttccttagct

SEQ ID NO: 112323 - DNA, 595 bp, Homo sapiens
cgttgtaagcttcactgatccttaattatgctgcttgactatcagtaagccttcttttttccagacaaggtagttctcatttcggagctagctctgcttccatccagtctcctggttcttctcttctactttcctccacttccctgatattctgaatttgcttccttcatttgcggtctgtgattcagactgtccattgcaacagcagcccttccagtcaccacgtcaaaagagctttcacacttcacattctcttattctccttttggccaagtggagaaagttcaaggctgtaattaatcttttttttttttttccatagagcttatgcttcccacattgttttcagtagagcataatagttttcttaaatgtcaggctttatgtagctgataacattttaaaggtatttctcccacgtttttcattctgaattatcatagtttcccatacatgaggaatgcttaatgcaaaaacaacaacaacaacaacaacaaaacaaccaaaagaaygaccaggttcttttacatggctttgggtttctcagatgttaaagatttagtggcaaagactacctgaatgctgaaaataactt

SEQ ID NO: 112324 - DNA, 550 bp, Homo sapiens
cctggtttagtcttaggaggatgcattcatccaggaatttacccatcgcttccagattttctagtttgtgtgcatagaggtgttcaaagtagtctccgatggtaatttgtacttctgtggagtcagtggtaatatcccctttgtcatttctaattgtgtttatttggatcttctctctttccttctttttcagcctagctagtggtctatcttaataattttttcaaagaaccaactcctggattcgttgatctttcatatggttttccatgtattaatctccttcagttcagcactgattttgattacttcttgtgttctgctaactttggaatttggttttctcttctctagtttttctrgttgtgatgttacattgctaatttaagagatttctaactttttgatgttgatgttttagtgctataaatttccctcttaaaactgccttagctgtgtcctagagattctggtatgttgtatctttgttctcattaatttcaaagaaattattgatttctgcatcaatttcattattcacccgaaagtc

SEQ ID NO: 112325 - DNA, 449 bp, Homo sapiens
gtgtggagcatgggcgtgaggattcagtttactcctgactgggtttagtttcttctaataagcttcttcctggggtcctgaagatagaattgtgcatgccgtatgctgaatatttacttgggacacagattataaaccaacatcaaaagactatgccatgagctgtgttagcacctcattaacactccctacacaagaatcmcaggcatagaacatatcctgtcaggtctgctttctgcatgtagacataaccaatactcattctgagctaaatgagtctttgttttctttggaatcttatgttttggaaggaaaggaggaaaagagggatgcaggatagttagtggtataaaagggtgatccaatttgtttcttatttgactcttctgtatctatataagaacattgttttaaatgtgcagtactgatttctttcagagattttttaa

SEQ ID NO: 112326 - DNA, 528 bp, Homo sapiens
ttctaaggccttgtgtagttccactcatgtggctttatagggtttgggcagcacagttgctcttaatgtcttttgttgctcttgagggggcccatggcttttctaggtgcagggtgcaagcttctggtggatctaccattttggggtctagaggatggtagtcctcttctcacagctccactagtcagtgcccccgtgggtactccgtgtgtgggctccaaccacacattttccctctgcactgtcctagtacagattgtctgtgattctccacccatgcagcaggctttggtctgaagttccagactttttgatacmtcctctgaatcctggttggaggctcccaagcctcctctcttgcaatttgttcacctgcaggcttaacaccacatgaaagccttcaaaattcacagctttcatcatctgaactgtactttggccttttttagtcacagctggacctgaaatggctgggatacacacaacagtgtcacaaggctgctgagggcaacagggtcctgggactgg

SEQ ID NO: 112327 - DNA, 528 bp, Homo sapiens
ttctaaggccttgtgtagttccactcatgtggctttatagggtttgggcagcacagttgctcttaatgtcttttgttgctcttgagggggcccatggcttttctaggtgcagggtgcaagcttctggtggatctaccattttggggtctagaggatggtagtcctcttctcacagctccactagtcagtgcccccgtgggtactccgtgtgtgggctccaaccacacattttccctctgcactgtcctagtacagattgtctgtgattctccacccatgcagcaggctttggtctgaagttccagactttttgatacctcctctgaatcctggttggaggctcccaagcctcctctcttgcaatttgttcacctgcaggcttaacamcacatgaaagccttcaaaattcacagctttcatcatctgaactgtactttggccttttttagtcacagctggacctgaaatggctgggatacacacaacagtgtcacaaggctgctgagggcaacagggtcctgggactgg

SEQ ID NO: 112328 - DNA, 528 bp, Homo sapiens
ttctaaggccttgtgtagttccactcatgtggctttatagggtttgggcagcacagttgctcttaatgtcttttgttgctcttgagggggcccatggcttttctaggtgcagggtgcaagcttctggtggatctaccattttggggtctagaggatggtagtcctcttctcacagctccactagtcagtgcccccgtgggtactccgtgtgtgggctccaaccacacattttccctctgcactgtcctagtacagattgtctgtgattctccacccatgcagcaggctttggtctgaagttccagactttttgatacctcctctgaatcctggttggaggctcccaagcctcctctcttgcaatttgttcacctgcaggcttaacaccacatgaaagccttcaaaattcacagctttcatcatctgaactgtactttggccytttttagtcacagctggacctgaaatggctgggatacacacaacagtgtcacaaggctgctgagggcaacagggtcctgggactgg

SEQ ID NO: 112329 - DNA, 649 bp, Homo sapiens
agaatgggcacaaacagtgttgccaaactgttgaatccaaagaaagttataactctgtgagatggatgcacacatccaaagcagtttctcattaagcttctttctaatttatctgaagacaaagcctttttcaccatctgtcttaatgcgctacaaaatacctcttctcagattctaagaaaacagtttttccaaatgtctgtttgagaagaaaagtttaactctgtgagatgaatgcwcacatcataaagtggtatctcagagagcatacttctggtttttatcctgggatatgtgctttttagccattggcctcaatgagctccaaatgtccattcgcagaatggacaaaaacagtgtttccaaactgctgaatccaaagaaagcttcaatgctgtgagatgaattcacacatcaaaaaacagtttctcagaaagcttctttctagtttttatctgatgaaaattcctatttcaccataggcctcaatgcactaccaaatatcttttcacagattctaagaaaacattttttccaaatgaccgaatgaaaagaaaagtataactctgtgagatgaatgcacacatcacaaaccggtttctcagatagcttctttctagtgtttatcctgggaaattcactttttcgc

SEQ ID NO: 112330 - DNA, 571 bp, Homo sapiens
ttccaaactgctgatctaaggaaagttttaactgtgtgagatcaattcacacatcacaaagcagtttctcacagagcttctttttaatttttatatgaagatatttcgtttttctccataggcttcaattccctcccaaatatcacttggcagattcttccaaaacagtgttaccagactgctgaattgaaagaaggttttagttctgtgagatgaatgcacacatcacaaagcagtttctcaaaaagcttctttctagtttttataagaagatatttccttttccaccatagaccttaatgtactcacaaatataacttcgcctaatctacraaaaccatgtttccaaattgtggaaagaaaagaaaggtttatcttggagagatgagtgcatacataacaaagtggtttctcagataacttccttctagtttttatcctgggatgtgcgctttctcgcctttggactcatgaagctcccaagtaaccctttgaagattgtacaacaacagtgtttccaaagtgctgaatccaaagaaaactttaactgagtgagatgaatgcacacatc

SEQ ID NO: 112331 - DNA, 484 bp, Homo sapiens
ttccctttttcccttttagcctcaaagacttatcaaatatcccttcacagattctaaacaatgagtgttttgaaacttctgaatccaaagaaaggtttaactctgtgagacgaatgcacacatcacaaagcagtttctcagaaaggttctttctagcttttatctaaagatatctcctttttcaccataggcttcaatgagctcccaaatatcccttcatagattttactgaaacagtgtttccaaactgatgaatgaaaagaaaggtttaatcactgtgagatgaatgaacacatcacaccatggcttgtatgatagcttccttctggtatttatcctgggctrttcactcttttggccatggcctcaatgagatatcatatatccctttgcaaatcctacaaaagcagagttaccaaaattctgaacccaaagaaaagttttaactttgctatgtgaatgcacacaacacaaagctgtttct

SEQ ID NO: 112332 - DNA, 505 bp, Homo sapiens
tacgaagtaggtgtcagtgcattccagktccaataaagggtatatgttacagaaaaagtgataaatgacattggggccacagaaagggagactgtacacaactaaaatttgaaacacagaatgcagaaaacctccagtcacagccaccaccaacagaaggatgcaaacctgtcaattcatgatggtcaaatagcgcagtggcttacaggtggccacgtagcgatcataggccatcaccaccagaaggaagacgtcagtatcaccaaacaagtgctctataaatagctgacccatgcaagctgggaaggaaatagtctttttatcacagagtaagtctacaatcaatacaggagaaatggtggtggaatacacagcatctataaatgacaggcaggcaaggaagaagtacactggggagcccaaaaagggactggcaataatagacaccacaatgagcaggttccccaccatagtcacaatatatatgagtaaaaacatgacaaat

SEQ ID NO: 112333 - DNA, 496 bp, Homo sapiens
cccatgattcaattacctccacattttctctccctagacatgtggggattatggggattacaattcaagatgagatttgggtggggacacaaagtctaatcatatcattctaccctgggcccctcccaaatctcatgtccctttcgtcttttaaagagacagttatgccttcctaacagtccctcgaagtcttaattcattccagcattagcccaaactccaagtccaaagtctcatctgaaacaaggcaaaaaatgtacttcaaagcatttaaaaaactaacaaggaacaaagaaggatatggtggcatgtttctctgtcctagctacttggaaggctgaggtcggagtatcacttcagcytaagagtttgagtttagcatgggcaatatagcaagagagaagagaagggaaggtaaaggagaagggaaggcgtaagggaagggggaatttaagtctttaatccattttaattagatttttgtatttggagaaaa

SEQ ID NO: 112334 - DNA, 574 bp, Homo sapiens
ggaacactgaatttcaacaactaattgcacacacacaaaagcgcaacsataacaacagaaaaccgggtgagcaatccaagtacctggttttaacttcacatcattgaatgaaacatacttaagagggtaggaaagacagtctcaaatcaccaataacacccctcctaaattccacagcagtggctgcatggtgcaaagagataatctgtgcacttgaggaaaaaaagagtatagacatggggtttggcattgaactcagtactaccttgtcacagcagagagcaaagccatgctgagctcaactgtcacccacccatggagactgcatttggaccagctctagacagaggggaatcactcatcacagaagtcaaaactagaatttcttggcaagtctcaccactgtgggctaaagtgctctgggctcttaggtaaacttcaaaggcagcctaggacacaaggcctgcaattcctaggcaagtcctagtgctgggttggacttagagccagtgcaataggggagcacatgacctatggagacaccagccagggctgccaaggaagtgcttgtgcc

SEQ ID NO: 112335 - DNA, 574 bp, Homo sapiens
tgtttttgtaaaatagacacagggatatttgggagcacattgaggcctatggagaaaaagaaattgtcttcagataaaagctagaaagaagctttctgagaaactgctttgtgatgtgtgcattcatctcasagagttaacttttcttttgatttagcagtttggtaacactgtttttgtccgttctgtgaatggatatgtgggagctcatataggcctatagtgaaaaagatattatcttctgataaaaactagaaaaatatagctgaattctttttctcagcaaggaacatccctgagaaagggaatatgttttcaagaggaggtctctgaaatggctgctttgggaaggtctatcttttatggttgtagataagggatgaaataagccccagtctcccatcatgctcccaagcttattaggatgaggaacttccagcctaataaattttggtcagactggttgtctgctctcaaaccctgtctcctgataagatgttatcaatgacagtgcgtgcccaaaatttcattagcaattttaatttcaccccggtcctatgatctcaccctgcct

SEQ ID NO: 112336 - DNA, 367 bp, Homo sapiens
ctaactgagaaaccactttgtgatgtgtgcattcacttctcagagttaaacctttctttttattcagcagtttggaaactctgttttgttagaatctgtgaaggaatatttgggagtgcaatgaggtctatggtgtaaaaggaaatatcttcagataaaaactagaaagcttgattgcactgtggtctgagagttagtttgttataatttctgttcttttacatttgctgaggagagctttacttccctgtatgtggtcacttttggaataggtgtggtgttgtgctcaaamaatgtatattctgttgatttggggtggagagttctgtagatgtctattaggtctgcttggtgcagagctgaattc

SEQ ID NO: 112337 - DNA, 562 bp, Homo sapiens
tgagtatccacatctaagtaatccacattaattacaatggcagaaactgtaataacttttgcaccaaactaatagaaccctgggtttataaccacttagctaagcattgtcactcaagctttaatgagtttataaaccactcggtaattttaatctctttctgtgtaatgtgattcttcaggttttcaaagagtacatgaatgtgtgttttaaataagtcccctgtcaatgcggatgatgctcccccaggctcattattagcattagttagagaaagcaggcacagcacagagtcccttatacttggcactgttgtcacaacacaaatacttctggcacaaatgaagacaactaatctccatcctaaagcatcaaattcttcgctggctctttaaagtttacagaggcaacaaaargtagcagtgcctgaataagcctgcatttggaaaacaacatgtacacatggactaatgcaatgtttactaagcaggtactaggtaagcaagagtatgttgcagagcactgcgctagaaataatgcattatgtgatttaatcctcata

SEQ ID NO: 112338 - DNA, 582 bp, Homo sapiens
agatgaatagtggtgatggtttcacaacattatgattgttttaattatatccaactgtacatttacagaaagaaaagaaaagatactgccaaactcttgtccaaagtggctatgccgttttacatacccatcaacatcctgtcaacaatgtatgtgttcccatttatccacatccttgtcaacatttgttattgtctatctttttaattattaccattctagtgaatgtgaaatggcatctcattgtggttttaatttgcatatccctaataactaatggcgttgagcattttttcatgtgcttgttggtcatttgcatatcattgtagctgaaatgtctattcgaatatttcgcccattttaaaattaggctgtttatcttcttattgagttgtaagagttttttttcagttctttataaggtgtgtgatttgcaaatattttctaccaatctgtggcttgtcttcattttcttaatgataccgtttgaagagcaaaagttyttaattttgataaactccagtttattaattttaaaaattgtgattgtgtatttggtattatatcaaagaaattttaacc

SEQ ID NO: 112339 - DNA, 530 bp, Homo sapiens
aatgacaatccagagaggagatgccagcatctaagaaaatgaaggagcacaaggatggaatgattaactgcctagggagattggggacacttcacagcaggtgactgctaaagtaaaccctgtacaacaaacacaaagtgggtgaaggggaggcattccaggcaaagggaaaatgcatgcaaaccaggraagcataaaagagggcactgattggtctgaggtgcctgacttgatcacgttacacttcttctggagcttcctgccaaagcagcctgaagaataaaaatgaacgaagctggacctctcataaaggtctcccacctgccatccccaggaaagcaaacctttctttcaagagcttcccccgacccccagcttcccacacctggtctcccttaccctctcaagaaagggcccatcctgtctcagtcaagtgacaacctctgcacccctggccgggtcttttccctcctgtgtctcagtctcctcctctgtggagtggggaaagaaccctgtctgcatccatgtga

SEQ ID NO: 112340 - DNA, 530 bp, Homo sapiens
aatgacaatccagagaggagatgccagcatctaagaaaatgaaggagcacaaggatggaatgattaactgcctagggagattggggacacttcacagcaggtgactgctaaagtaaaccctgtacaacaaacacaaagtgggtgaaggggaggcattccaggcaaagggaaaatgcatgcaaaccaggaaagcataaaagagggcactgattggtctgaggtgcctgacttgatcacgttacacttcttctggagcttcctgccaaagcagcctgaagaataaaaatgaacgaagctggacctctcataaaggtctcccacctgccatccccaggaaagcaaacctttctttcaagagcttcccccgacccccagcttcccacacctggtctcccttaccctctcaagaaagggcccatcctgtctcagtcaagtgacaayctctgcacccctggccgggtcttttccctcctgtgtctcagtctcctcctctgtggagtggggaaagaaccctgtctgcatccatgtga

SEQ ID NO: 112341 - DNA, 505 bp, Homo sapiens
caacagtaaaactaaaattagtttctaaaatgcttttgatcaacaactgcatcactggtgtgagttatctcctcttacaagggtaaactgtgtgaacatttgcaaatagaaatacttatgatatattacaaatacattaagattttatatagtatttgtgaatttatgtgtttttataagtctagataattgtccaaataaaaactcacacattcatttgctagggctgccataacaaaattctaaaaattgagtggcttaaaacaacagaaatttatcttgtggtcctggtggtagaagtctgaaaccaagatgttggtgtggttggctctttctgaggcctgtgaggaaaggctctgttcaaggcctttctcyttagcttgttatggctgccttcatactcacatgtcattctccctatacacatttctgtgtcaaaatttccctttttttataaggacatcaattattttggattagggttcactcaaataatctcatttta

SEQ ID NO: 112342 - DNA, 459 bp, Homo sapiens
gaacctagctcttttccacctgaatttacaaatatctaaataaacaaaatatgtaaatatatcagatacctaaaggtagcagtcagggccctgctgtgtcttgtcttctctctactaaatttattctctgaggatatgatttcaaattgcataaccatttgggctactctcctttgaacaggccctgcttggytgcatttgatattggtcttgccctgtcacccaggctgagtgcagtggtgcaaacttcgctcacttcagcctcaacctcttgtcctcaagtgatcctctgccacagtctcccaaggagctgggtgcacaccaccatgtctagctaatttttctttttctttttttttttttttttttttttactttttgtagagacagagccttattatgttgcccaccctatgtccaacatttaatgtagcccagctgtagtctgcagaagtttga

SEQ ID NO: 112343 - DNA, 370 bp, Homo sapiens
atgaaatgctaaatctagtgggttctgaggagtaaccagatatttacagagcctcaaagtatctccatacaaaatacggttgaactacaaaaagaaaattgtaacattagcatggacaaacctggcaggtactccttaactctcctaagtaataaaaactgtaaaatgcaaataagccttygatgacctttactaacctttactaaagtatcagtgatgacttggttgtttaaacagctgacatttgggcaatttgagtatgtcaaactcaataatactggttttcatttgcaagatccacttaaaacttaaggaggccaaaaaacatcatttaaaataccctataaattataatcgtacatgtgataca

SEQ ID NO: 112344 - DNA, 492 bp, Homo sapiens
agaaggtattttaattcattccaagattccttaaaattctgtaattctatgtcctcttgattctgtctatagaaaaacttggaatacataggcagcagagtttgaaaaaataatagaacaaaagaaacaccaagaaaaacagagaagaaagttttaaaaaatgaagacaagattatataaaagtcatggaaaaagcaacaagactaaaraatgtattatggaagtaagcagaaatacttgcctaaatggaaaaccaaactgggaagtcaaataatttgtctctaagacttgcctaaacttgctttggtaaaacttacagtcctatggccaaagctaagtcagatctgccctagagcctttgaaggtaaaaataagatactggttaccactgaaatcgtcaaatttattaggactaaccacattctaacaataaacttaaatgagagttcaaggtatttaaactctcattaatttagaagttaatcaaattaa

SEQ ID NO: 112345 - DNA, 327 bp, Homo sapiens
catgcttaggtaagaaaatattgataaaaatgattgaatattttatcttatttcataattctaagcagggctttagcacaatatgaaaactagattattcatgtaatccaaataaaagacaattttyattctaattttaactcagaaattattttgcttatttaacaattttactgaaaggtaaatgagataaataggacagattataattacctaacattgctatggtaacttatgtacaaatagctgttcgtcactgaaagtcaaaaaagtaaccagcgctgcaacttaagatggatcatacaacagaaattagtaccaagttac

SEQ ID NO: 112346 - DNA, 497 bp, Homo sapiens
ggccaaaaaacatcatttaaaataccctataaattataatcgtacatgtgatacaaaaatatcctacttcagtaaatattggaatgttatatattttatgagaaacaattaaaatgtgtaaatagcccagtaataaagttttataatcttttaaatcatcatagaatttttccttaagactttatggttaaatattctcttcattagatgtggcttacccgtggattctagagaagaaagcagatgggagcaagtgtacaatacagcaacggctggaaagaaaaataaagaattttgttctttacctaaaacacttcagttaactaagtrtgagtttaaaaactaaagacttgagaactttatcagagttaataagaatgagatatgtatgtacatttacaatacaaaattactatttaataatttacacatggcattaattctaattgtgtttaaatatcagagctttttcagtcttcattcatgtaatcaacagc

SEQ ID NO: 112347 - DNA, 327 bp, Homo sapiens
catgcttaggtaagaaaatattgataaaaatgattgaatattttatcttatttcataattctaagcagggctttagcacaatatgaaaactagattattcatgtaatccaaataaaagacaattttcattctaattttaactcagaaattattttgcttatttaacaattttactgaaaggtaaatgagataaataggacagattataattacctaacattgctatggtaacttatgtacaaatagctgttcgtcaytgaaagtcaaaaaagtaaccagcgctgcaacttaagatggatcatacaacagaaattagtaccaagttac

SEQ ID NO: 112348 - DNA, 327 bp, Homo sapiens
catgcttaggtaagaaaatattgataaaaatgattgaatattttatcttatttcataattctaagcagggctttagcacaatatgaaaactagattattcatgtaatccaaataaaagacaattttcattctaattttaactcagaaattattttgcttatttaacaattttactgaaaggtaaatgagataaataggacagattataattacctaacattgctatggtaacttatgtacaaatagctgttcgtcacygaaagtcaaaaaagtaaccagcgctgcaacttaagatggatcatacaacagaaattagtaccaagttac

SEQ ID NO: 112349 - DNA, 593 bp, Homo sapiens
ttgttctttacctaaaacacttcagttaactaagtatgagtttaaaaactaaagacttgagaactttatcagagttaataagaatgagatatgtatgtacatttacaatacaaaattactatttaataatttacacatggcattaattctaattgtgtttaaatatcagagctttttcagtcttcattcatgtaatcaacagccacatgctaaggtactagaaccagcactggaattacaagatgaagatggcatggtccacctcccaacagtcataarctctaacctaaaaaacagacaggcaggcaatgtccatatagagtcatagataccatgacaggtatagagcagggcactactggaacacagagaagggacatctatccacttttatgtcaatatcatgggctttctggtggaggagataacataggttgatacctgaaggacaaggaaaagcttcccagatagaggaaagaggcaaaggcaaagagcctgaggtgaggaagagccctgcagagttccactccatccagtttggtgctagaacaaagggcagagtgcagtaagcggtgagaaacaaggctgagtaa

SEQ ID NO: 112350 - DNA, 593 bp, Homo sapiens
ttgttctttacctaaaacacttcagttaactaagtatgagtttaaaaactaaagacttgagaactttatcagagttaataagaatgagatatgtatgtacatttacaatacaaaattactatttaataatttacacatggcattaattctaattgtgtttaaatatcagagctttttcagtcttcattcatgtaatcaacagccacatgctaaggtactagaaccagcactggaattacaagatgaagatggcatggtccacctcccaacagtcataagctctaacctaaaaaacagacaggcaggcaatgtccatatagagtcatagataccatgacaggtatasagcagggcactactggaacacagagaagggacatctatccacttttatgtcaatatcatgggctttctggtggaggagataacataggttgatacctgaaggacaaggaaaagcttcccagatagaggaaagaggcaaaggcaaagagcctgaggtgaggaagagccctgcagagttccactccatccagtttggtgctagaacaaagggcagagtgcagtaagcggtgagaaacaaggctgagtaa

SEQ ID NO: 112351 - DNA, 593 bp, Homo sapiens
ttgttctttacctaaaacacttcagttaactaagtatgagtttaaaaactaaagacttgagaactttatcagagttaataagaatgagatatgtatgtacatttacaatacaaaattactatttaataatttacacatggcattaattctaattgtgtttaaatatcagagctttttcagtcttcattcatgtaatcaacagccacatgctaaggtactagaaccagcactggaattacaagatgaagatggcatggtccacctcccaacagtcataagctctaacctaaaaaacagacaggcaggcaatgtccatatagagtcatagataccatgacaggtatagagcagggcactactggaacacagagaagggacatctatccacttttatgtcaatatcatgggctttctggtggaggagataacataggttgatacctgaaggacaaggaaaagcttcccagatagaggaaagaggcaaaggcaaagagcctgaggtgaggaagagccctgcagagttccactccatccagtttggtgctagaacaaagggcagagtgcagtaagyggtgagaaacaaggctgagtaa

SEQ ID NO: 112352 - DNA, 603 bp, Homo sapiens
tatgaacagtatcacaggggagtgtatacttcctactatattgggagtaatatcatcctgtcgtcttctaaatattatgaacaatattacaggggatgtaacactccctgcgatatgtggagtaatatcatcctctccttccctaaatattgtgaacaatatcacaggaggttgtacacaatctgcgatattgtttgtagtatccagtgggaaagagsatgctattactccccatatcacagggggtgtacacccccactgtgatatattcaataacatccagaagtaatattactgacaaaattgcagggggttgtaaaccccacctgtgataccgttcctaatatcccggggaagagaggatgatattattcccaatattgcagggggtgtacacccaccctatgatattgttattaatacccaggaggggagacaatggtattactcacagtatcaaagaggttgtacagccctcctgtgatagtttctaatatccagggggtgtataccacccttgtgatattgtttctaatatgtagggggaaggacaatgatattactgtccgtatcacagggggtgtacaacaagccccccgggat

SEQ ID NO: 112353 - DNA, 603 bp, Homo sapiens
tatgaacagtatcacaggggagtgtatacttcctactatattgggagtaatatcatcctgtcgtcttctaaatattatgaacaatattacaggggatgtaacactccctgcgatatgtggagtaatatcatcctctccttccctaaatattgtgaacaatatcacaggaggttgtacacaatctgcgatattgtttgtagtatccagtgggaaagaggatgctattactccccatatcacagggggtgtacacccccactgtgatatattcaataacatccagaagtaatattactgacaaaattgcagggggttgtaaaccccacctgtgataccgttcctaatatcccggggaagagaggatgatattattcccaatattgcagggggtgtacacccaccctatgatattgttattaatacccaggaggggagacaatggtattactcacagtatcaaagaggttgtacagcccycctgtgatagtttctaatatccagggggtgtataccacccttgtgatattgtttctaatatgtagggggaaggacaatgatattactgtccgtatcacagggggtgtacaacaagccccccgggat

SEQ ID NO: 112354 - DNA, 603 bp, Homo sapiens
tatgaacagtatcacaggggagtgtatacttcctactatattgggagtaatatcatcctgtcgtcttctaaatattatgaacaatattacaggggatgtaacactccctgcgatatgtggagtaatatcatcctctccttccctaaatattgtgaacaatatcacaggaggttgtacacaatctgcgatattgtttgtagtatccagtgggaaagaggatgctattactccccatatcacagggggtgtacacccccactgtgatatattcaataacatccagaagtaatattactgacaaaattgcagggggttgtaaaccccacctgtgataccgttcctaatatcccggggaagagaggatgatattattcccaatattgcagggggtgtacacccaccctatgatattgttattaatacccaggaggggagacaatggtattactcacagtatcaaagaggttgtacagccctcctgtgatagtttctaatatccaggggrtgtataccacccttgtgatattgtttctaatatgtagggggaaggacaatgatattactgtccgtatcacagggggtgtacaacaagccccccgggat

SEQ ID NO: 112355 - DNA, 499 bp, Homo sapiens
tactcctataatccttttgtatttctgtaaagttggtagtaatggctctgctttcatttattattttaataattagtcttccatcttttgctcagtcaatatagtgaaaggcttgatctttcaaagaatctamattttttcattctactgctctccaaccttctatttgattgatttatgctctaattatgctctttattatttctttccttctgctagctttggatttagtcttccacctggatttattttgggagtgatattgatgtaacttcatggaaataatactagatagaaagttagcggatagattctctatctgatgagagtttggggcaagtcgagtaccaggttaccaagttttatttttttctctgacccaaaaaacaatttggcagccggtgagaaactctcacagctctggatgtgagtttaggacactgcatttctaccattcaatttcttactacttttttgcacagggatcatggcacaagtt

SEQ ID NO: 112356 - DNA, 499 bp, Homo sapiens
tactcctataatccttttgtatttctgtaaagttggtagtaatggctctgctttcatttattattttaataattagtcttccatcttttgctcagtcaatatagtgaaaggcttgatctttcaaagaatctaaattttttcattctactgctctccaaccttctrtttgattgatttatgctctaattatgctctttattatttctttccttctgctagctttggatttagtcttccacctggatttattttgggagtgatattgatgtaacttcatggaaataatactagatagaaagttagcggatagattctctatctgatgagagtttggggcaagtcgagtaccaggttaccaagttttatttttttctctgacccaaaaaacaatttggcagccggtgagaaactctcacagctctggatgtgagtttaggacactgcatttctaccattcaatttcttactacttttttgcacagggatcatggcacaagtt

SEQ ID NO: 112357 - DNA, 499 bp, Homo sapiens
tactcctataatccttttgtatttctgtaaagttggtagtaatggctctgctttcatttattattttaataattagtcttccatcttttgctcagtcaatatagtgaaaggcttgatctttcaaagaatctaaattttttcattctactgctctccaaccttctatttkattgatttatgctctaattatgctctttattatttctttccttctgctagctttggatttagtcttccacctggatttattttgggagtgatattgatgtaacttcatggaaataatactagatagaaagttagcggatagattctctatctgatgagagtttggggcaagtcgagtaccaggttaccaagttttatttttttctctgacccaaaaaacaatttggcagccggtgagaaactctcacagctctggatgtgagtttaggacactgcatttctaccattcaatttcttactacttttttgcacagggatcatggcacaagtt

SEQ ID NO: 112358 - DNA, 499 bp, Homo sapiens
tactcctataatccttttgtatttctgtaaagttggtagtaatggctctgctttcatttattattttaataattagtcttccatcttttgctcagtcaatatagtgaaaggcttgatctttcaaagaatctaaattttttcattctactgctctccaaccttctatttgattgatttatgctctaattatgctctttattatttctttccttctgctagctttggatttagtcttccacctggatttattttgrgagtgatattgatgtaacttcatggaaataatactagatagaaagttagcggatagattctctatctgatgagagtttggggcaagtcgagtaccaggttaccaagttttatttttttctctgacccaaaaaacaatttggcagccggtgagaaactctcacagctctggatgtgagtttaggacactgcatttctaccattcaatttcttactacttttttgcacagggatcatggcacaagtt

SEQ ID NO: 112359 - DNA, 556 bp, Homo sapiens
ctaaactacaatcaattagagagtaagccaaagcatctcaaagtatatcatcagttatcaggcaataacatgcaatttctaaaacctaacttaaatgcagcttttaaagacatttcaaacrtgtcagtttagtcacatttattgaataaagttagcaaatggatatctcttgaaaatgagagctccagggaattaaaaaatgtaaagttcccatttcctttctgtgttaacacagctaattatgatctttacttcacatgcaaaagtcaacagaacaactcagtatttcaccaaattataaacaagaattacgctagagaaatgaaaccctaaagagaaacggtcatataactaacctcagtcaagtagttctggcagttatttgaagtctgaggtttgaagtaggaattcttacgggcatttggggaatatattttctgttgagtcctatactagtaagattttcaacacaaggtgactctcgacctcgccttgtaggaagagtgctgagaaaatatttcacctgctctttctccataaagagctgatactgatc

SEQ ID NO: 112360 - DNA, 578 bp, Homo sapiens
gcttttaaagacatttcaaacgtgtcagtttagtcacatttmttgaataaagttagcaaatggatatctcttgaaaatgagagctccagggaattaaaaaatgtaaagttcccatttcctttctgtgttaacacagctaattatgatctttacttcacatgcaaaagtcaacagaacaactcagtatttcaccaaattataaacaagaattacgctagagaaatgaaaccctaaagagaaacggtcatataactaacctcagtcaagtagttctggcagttatttgaagtctgaggtttgaagtaggaattcttacgggcatttggggaatatattttctgttgagtcctatactagtaagattttcaacacaaggtgactctcgacctcgccttgtaggaagagtgctgagaaaatatttcacctgctctttctccataaagagctgatactgatcattgctattttcttattcgatctgtaaagatagcaaagacaaatgcttaatatttcatttttccttaaatgattcttaatgacttgcagtttttaaaaacttaccctgagagtaaaccaaa

SEQ ID NO: 112361 - DNA, 337 bp, Homo sapiens
ctttctttaactatgaagttcgcgtgtccaaaatctgtggtagttgctgtctgatttttgatcactgatggtgatacagatayttatcatcaactcacaacttcccaaatctttgaaaagtcttactattgatggttcaactagtagaaacatgatgtaaaatatctgaaaataaagtttttatttattagaatgtaaataataatacaaattgtaataacgtgtaaaagttctttcttcactgaagcagtaccatgttgtcctctaccccacaaatgcactactcccccgtggtctaatgtattttaaaagtcctgtaattgctattaactcagac

SEQ ID NO: 112362 - DNA, 337 bp, Homo sapiens
ctttctttaactatgaagttcgcgtgtccaaaatctgtggtagttgctgtctgatttttgatcactgatggtgatacagatacttatcatcaactcacaacttcccaaatctttgaaaagtcttactattgatggttcaactagtagaaacatgatgtaaaatatctgaaaataaagtttttatttattagaatgtaaataataatacaaattgtaataasgtgtaaaagttctttcttcactgaagcagtaccatgttgtcctctaccccacaaatgcactactcccccgtggtctaatgtattttaaaagtcctgtaattgctattaactcagac

SEQ ID NO: 112363 - DNA, 337 bp, Homo sapiens
ctttctttaactatgaagttcgcgtgtccaaaatctgtggtagttgctgtctgatttttgatcactgatggtgatacagatacttatcatcaactcacaacttcccaaatctttgaaaagtcttactattgatggttcaactagtagaaacatgatgtaaaatatctgaaaataaagtttttatttattagaatgtaaataataatacaaattgtaataacgtgtaaaagttctttcttcactgaagcagtaccatgttgtcctctaccccacaaatgcactactcccccgtggtctaatgtattttaaaagtcytgtaattgctattaactcagac

SEQ ID NO: 112364 - DNA, 575 bp, Homo sapiens
tattctctatttatttttataaagattatagtctttatctaactcttcttagttcatttgaactaaatcaatgaatttgtcaacagaacaaaccttaccagtggctttagaggaagagcaagaaaggtgtgaaagaagtgaaaagaagcaatcacaggtatatgaaaatttaagttcttgtttaatattaggttttttttttttgctttactaacaaagcatagtccaaatgacatgacctttcagactatacctttagaayccaatagatcataattttatatgtaatttttaaaacatcataaccagttatgaaacttaagatattcttactatctcgagtaactattagttattctagtaattcttagtatctctagtaactcatagctgtctttacccttggaattgaggcaagaaattttcagaattatcttgctgttttatttatataaccttactcataatacacaaggtaacatgaagtattgggtcatattactgaggaatagaaattatgaacagtttaacaacaatggccactgagttaaactagtgttaaaggagtcatcatt

SEQ ID NO: 112365 - DNA, 575 bp, Homo sapiens
tattctctatttatttttataaagattatagtctttatctaactcttcttagttcatttgaactaaatcaatgaatttgtcaacagaacaaaccttaccagtggctttagaggaagagcaagaaaggtgtgaaagaagtgaaaagaagcaatcacaggtatatgaaaatttaagttcttgtttaatattaggttttttttttttgctttactaacaaagcatagtccaaatgacatgacctttcagactatacctttagaatccaatagatcataattttatatgtaatttttaaaacatcwtaaccagttatgaaacttaagatattcttactatctcgagtaactattagttattctagtaattcttagtatctctagtaactcatagctgtctttacccttggaattgaggcaagaaattttcagaattatcttgctgttttatttatataaccttactcataatacacaaggtaacatgaagtattgggtcatattactgaggaatagaaattatgaacagtttaacaacaatggccactgagttaaactagtgttaaaggagtcatcatt

SEQ ID NO: 112366 - DNA, 575 bp, Homo sapiens
tattctctatttatttttataaagattatagtctttatctaactcttcttagttcatttgaactaaatcaatgaatttgtcaacagaacaaaccttaccagtggctttagaggaagagcaagaaaggtgtgaaagaagtgaaaagaagcaatcacaggtatatgaaaatttaagttcttgtttaatattaggttttttttttttgctttactaacaaagcatagtccaaatgacatgacctttcagactatacctttagaatccaatagatcataattttatatgtaatttttaaaacatcataaccagttatgaaacttaagatattcttactatctckagtaactattagttattctagtaattcttagtatctctagtaactcatagctgtctttacccttggaattgaggcaagaaattttcagaattatcttgctgttttatttatataaccttactcataatacacaaggtaacatgaagtattgggtcatattactgaggaatagaaattatgaacagtttaacaacaatggccactgagttaaactagtgttaaaggagtcatcatt

SEQ ID NO: 112367 - DNA, 491 bp, Homo sapiens
gttcacttgctgcttcttttttctctttatcaattatttgatttagtcaaattttctattcaagaaaatctcatgtgtacagttacagcggggttttctaaatgtgtaattatgtgtcaaagtagattagtcctgctatctaaacaamggttctggagaatgttctcataatgtttcttcattaatcaacctaagtctcactctcagtcttccaagtggcatatgagctgggaaactaattcagccatataccatgtgaccttctgaaccagatcaacataaagaaattgctaaagaaataagctttagattctagattcttttttctgtattcatttagagatgaattacatttatttgatgatagaatgggaatacaatgagagggaagcaatgactgagatgagccacaaaaacacgtctagccttgagagttgcaatgaatattcccagccaaatgagtctgtttaatgtgttttcatgcacgccag

SEQ ID NO: 112368 - DNA, 491 bp, Homo sapiens
gttcacttgctgcttcttttttctctttatcaattatttgatttagtcaaattttctattcaagaaaatctcatgtgtacagttacagcggggttttctaaatgtgtaattatgtgtcaaagtagattagtcctgctatctaaacaaaggtyctggagaatgttctcataatgtttcttcattaatcaacctaagtctcactctcagtcttccaagtggcatatgagctgggaaactaattcagccatataccatgtgaccttctgaaccagatcaacataaagaaattgctaaagaaataagctttagattctagattcttttttctgtattcatttagagatgaattacatttatttgatgatagaatgggaatacaatgagagggaagcaatgactgagatgagccacaaaaacacgtctagccttgagagttgcaatgaatattcccagccaaatgagtctgtttaatgtgttttcatgcacgccag

SEQ ID NO: 112369 - DNA, 491 bp, Homo sapiens
gttcacttgctgcttcttttttctctttatcaattatttgatttagtcaaattttctattcaagaaaatctcatgtgtacagttacagcggggttttctaaatgtgtaattatgtgtcaaagtagattagtcctgctatctaaacaaaggttctggagaatgttctcataatgtttcttcattaatcaacctaagtctcactctcagtcttccaagtggcatatgagctgggaaactaattcagccatataccatgtsaccttctgaaccagatcaacataaagaaattgctaaagaaataagctttagattctagattcttttttctgtattcatttagagatgaattacatttatttgatgatagaatgggaatacaatgagagggaagcaatgactgagatgagccacaaaaacacgtctagccttgagagttgcaatgaatattcccagccaaatgagtctgtttaatgtgttttcatgcacgccag

SEQ ID NO: 112370 - DNA, 417 bp, Homo sapiens
atttagagatgaattacatttatttratgatagaatgggaatacaatgagagggaagcaatgactgagatgagccacaaaaacacgtctagccttgagagttgcaatgaatattcccagccaaatgagtctgtttaatgtgttttcatgcacgccagtttatctgcttagctcaaactgtttgaatttatagttccatcatggttatttccaatattttgaaaacaaatatatacatccacatattttaaaaaatcaccactccaatatttctgttgaatcagaccttacattatgttgtttaataaagtatggtaagttttggcatgtatgatttttatcatgtaagaaagaagcataatttcttagctaaaaatttagcctttgactctttagtagaaagttgagttctgtacat

SEQ ID NO: 112371 - DNA, 578 bp, Homo sapiens
agctaatgaatgaatgtgatcatttaaaagaaagtctctttcaatatgagagagagaaagcagaaaragtagtaagtatcaaggaagataaatattttcaaacttttagaaagaaaatttaaacatttggttctggatacatgttgaacttagttgaatataaaaatcaatggataaaaagtgtgtttaccatactgtataattccatttacatgaagcatccagaaaagataaacgtatagggacaaaaagtagactaatgtttgcaaagggctgggtctgaaagctggtagtgactgctaatgggcgtgagggatcttgcagtgatggaaatgctgtaaagttggattgtagagatggctgcacaactcagtaaatggactaaaaaatcttttaactttaagttaaaacagatacattctatagtatgtaaattatatttcaacaaagctgttttaataaaaaaaaaaggaaaaccgtgtttactataccagcttagaaatgtgtctcatttctaggaaatcaaaggtagaggtgagagatgatttactttgagaaaagacattgtgtcacctatg

SEQ ID NO: 112372 - DNA, 578 bp, Homo sapiens
agctaatgaatgaatgtgatcatttaaaagaaagtctctttcaatatgagagagagaaagcagaaaaagtagtaagtatcaaggaagataaatattttcaaacttttagaaagaaaatttaaacatttggttctggatacatgttgaacttagttgaatataaaaatcaatggataaaaagtgtgtttaccatactgtataattccatttacatgaagcatccagaaaagataaacgtatagggacaaaaagtagactaatgtttgcaaagggctgggkctgaaagctggtagtgactgctaatgggcgtgagggatcttgcagtgatggaaatgctgtaaagttggattgtagagatggctgcacaactcagtaaatggactaaaaaatcttttaactttaagttaaaacagatacattctatagtatgtaaattatatttcaacaaagctgttttaataaaaaaaaaaggaaaaccgtgtttactataccagcttagaaatgtgtctcatttctaggaaatcaaaggtagaggtgagagatgatttactttgagaaaagacattgtgtcacctatg

SEQ ID NO: 112373 - DNA, 578 bp, Homo sapiens
agctaatgaatgaatgtgatcatttaaaagaaagtctctttcaatatgagagagagaaagcagaaaaagtagtaagtatcaaggaagataaatattttcaaacttttagaaagaaaatttaaacatttggttctggatacatgttgaacttagttgaatataaaaatcaatggataaaaagtgtgtttaccatactgtataattccatttacatgaagcatccagaaaagataaacgtatagggacaaaaagtagactaatgtttgcaaagggctgggtctgaaagctggtagtgactgctaatgggcgtgagggatcttgcagtgatggaaatgctgtaaagttggattgtagagatggctgcacaactcagtaaatggactaaaaaatcttttaactttaagttaaaacagatacattctatagtatgtaaattatatttcaacaaagctgttttaataaaaaaaaaaggaaaaccgtgtttactataccagcttagaaaygtgtctcatttctaggaaatcaaaggtagaggtgagagatgatttactttgagaaaagacattgtgtcacctatg

SEQ ID NO: 112374 - DNA, 438 bp, Homo sapiens
tttcagagagttatgccgtcatcattacaattaattttagaacattttcatcaccctaaaaacaaaccccacaacatttagccatcttcactagttttcccttcctccctcagccctagggaaccacccaccttctttgtatagatttgcctataagcctctgaaataaaaagcaagtggtctgctgggactggcttatttcacttagcataatttttcatgctgcatctgtgctgtagcaggtattgatgccgggtttttgctccttagttcagctacatctgggttcttctctcatgaccaggaaaaatcaagcatgcagacacattgaggagggcagaatttatttgtgaaagsacagctctcagcaaagagagggatcctgcaaagaggtttccacctcacaattgaataccaggatcacatgagctgaaatgg

SEQ ID NO: 112375 - DNA, 554 bp, Homo sapiens
gttgtcttatgtcataataaaaattaaatttagtagaatgtctgtaacttcaccttttttgtcacaaaggagtctctggccagcttataccttacttcctctaagacatgatcagacgccaggcttacaagacacacttaatttctttttttctccattcaagcctttagtctcttttccattgcctcccactatagttacattttcagtaagttttggttacaggatctgctgacatagtctaatattcagtgcaktatgttttactaactcattataattcatagaaccttccatagatgttcaccatctaggaaggagaagtttaagtctgagccaccagctttcctcagtggaaatcaagtgaagtcatcatcttgcagtttacagaccctctttcctcctggtagctggttctcttgggtagcactgtggctaatccttttcttagtgcagatcttgcattctcagaaaccacagttccctgtattgacctccttttactgaaacagagatgcacagctctgctttctatctcagtagaggattcttgg

SEQ ID NO: 112376 - DNA, 527 bp, Homo sapiens
taagttttggttacaggatctgctgacatagtctaatattcagtgcattatgwtttactaactcattataattcatagaaccttccatagatgttcaccatctaggaaggagaagtttaagtctgagccaccagctttcctcagtggaaatcaagtgaagtcatcatcttgcagtttacagaccctctttcctcctggtagctggttctcttgggtagcactgtggctaatccttttcttagtgcagatcttgcattctcagaaaccacagttccctgtattgacctccttttactgaaacagagatgcacagctctgctttctatctcagtagaggattcttggaataaaacgtttaactcattccaagaaagtcttaggagtgcagcacttcaaaatcaggtaacgttcaggcaatttatcagagacacatagtaaattagtattttgactttcaaaatttcagagccaagttgtgtgctatagagaagcattgtggcataacatagagatgggatggtcttaac

SEQ ID NO: 112377 - DNA, 554 bp, Homo sapiens
gttgtcttatgtcataataaaaattaaatttagtagaatgtctgtaacttcaccttttttgtcacaaaggagtctctggccagcttataccttacttcctctaagacatgatcagacgccaggcttacaagacacacttaatttctttttttctccattcaagcctttagtctcttttccattgcctcccactatagttacattttcagtaagttttggttacaggatctgctgacatagtctaatattcagtgcattatgttttactaactcattataattcatagaaccttccatagatgttyaccatctaggaaggagaagtttaagtctgagccaccagctttcctcagtggaaatcaagtgaagtcatcatcttgcagtttacagaccctctttcctcctggtagctggttctcttgggtagcactgtggctaatccttttcttagtgcagatcttgcattctcagaaaccacagttccctgtattgacctccttttactgaaacagagatgcacagctctgctttctatctcagtagaggattcttgg

SEQ ID NO: 112378 - DNA, 556 bp, Homo sapiens
tgacatagtctaatattcagtgcattatgttttactaactcattataattcatagaaccttccatagatgttcaccatctaggaaggagaagtttaagtctgagccaccagctttcctcagtggaaatcaagtgaagtcatcatcttgcagtttacagaccctctttcctcctggtagctggttctcttgggtagcactgtggctaatccttttcttagtgcagatcttgcattctcagaaaccacagttccctgtattgacctccttttactgaaacagagatgcacagctctgctttctatctcagtagaggattcttggaataaaacgtttaactcattccaagaaagtcttaggagtgcagcacttcaaaatcaggtaacgttcaggcaatttatcagagacacatagtarattagtattttgactttcaaaatttcagagccaagttgtgtgctatagagaagcattgtggcataacatagagatgggatggtcttaacttctccatacaaacaagcttggagtaaggtaaaggagaaattgcatttgtgt

SEQ ID NO: 112379 - DNA, 518 bp, Homo sapiens
ggatttaattcctttatacggtgaatagtattccactgtgtttgtgtgccacagtttttcgtccattcatttggtgatggacatgtaggttgattccatacacaagctgttgtggatagtgctacagtaaacatatgaggacagatatccttttgatctattgttttcttttctattgcctgaatrcccggtagtgaggttgctggatccctcggcagtcccattattagtttttttgagaaaacctcctgttgttctctattgtggctgcactaatttaccttcccaccaacagcatgtaagagtttactgttctctggagcctcaccagcatttgtttttttttttgtcttttcaatgacagcaatttattcaaattgaagcaagattatatcacattgtagatttgatttgtatttccctgaggattagtgatactgagcattttaaaatttatttattggctatttgtatttctttttctaaaaaaaagtatagttagatattttgcccaattt

SEQ ID NO: 112380 - DNA, 518 bp, Homo sapiens
ggatttaattcctttatacggtgaatagtattccactgtgtttgtgtgccacagtttttcgtccattcatttggtgatggacatgtaggttgattccatacacaagctgttgtggatagtgctacagtaaacatatgaggacagatatccttttgatctattgttttcttttctattgcctgaatgcccggtagtgrggttgctggatccctcggcagtcccattattagtttttttgagaaaacctcctgttgttctctattgtggctgcactaatttaccttcccaccaacagcatgtaagagtttactgttctctggagcctcaccagcatttgtttttttttttgtcttttcaatgacagcaatttattcaaattgaagcaagattatatcacattgtagatttgatttgtatttccctgaggattagtgatactgagcattttaaaatttatttattggctatttgtatttctttttctaaaaaaaagtatagttagatattttgcccaattt

SEQ ID NO: 112381 - DNA, 518 bp, Homo sapiens
ggatttaattcctttatacggtgaatagtattccactgtgtttgtgtgccacagtttttcgtccattcatttggtgatggacatgtaggttgattccatacacaagctgttgtggatagtgctacagtaaacatatgaggacagatatccttttgatctattgttttcttttctattgcctgaatgcccggtagtgaggttgctggatccctcggcagtcccattattagtttttttgagaaaacctcctgttgttctctattgyggctgcactaatttaccttcccaccaacagcatgtaagagtttactgttctctggagcctcaccagcatttgtttttttttttgtcttttcaatgacagcaatttattcaaattgaagcaagattatatcacattgtagatttgatttgtatttccctgaggattagtgatactgagcattttaaaatttatttattggctatttgtatttctttttctaaaaaaaagtatagttagatattttgcccaattt

SEQ ID NO: 112382 - DNA, 435 bp, Homo sapiens
aacatttttttttttgtagagatgggggtctcactatgttgctctggctgatctyaaattcctggcctcaagtgatctttctgccacagctttttaaagtgctaggattacaggaatgagccaccatgcctaatatagagtgtaatatcattttcaaagtcttattcctagacccatttattgactttggcctaaataactcaatatgatatctctgaaactttttttgacatactgtggggaatgataatgaaggaagggggttagacactttttactaggagataactttgtgccatttaaggaggaacaaaaatgaattatcagaaaaataaaagtaaaatgaagtacaaaaattctgtggcaaagatgatgatagtaaagaatatatttttatgactcatggtagctttaactttgttcttaaaattctga

SEQ ID NO: 112383 - DNA, 385 bp, Homo sapiens
ccctgaactctgggtacaagccatccttttgcctcagtatcccaactagctgggtctacaggcatgagccaccatgcccgggtaattaaaaaacatttttttttttgtagagatgggggtctcactatgttgctctggctgatctcaaattcctggcctcaagtgatctttctgccacagctttttaaagtgctaggattacaggmatgagccaccatgcctaatatagagtgtaatatcattttcaaagtcttattcctagacccatttattgactttggcctaaataactcaatatgatatctctgaaactttttttgacatactgtggggaatgataatgaaggaagggggttagacactttttactaggagataactttgt

SEQ ID NO: 112384 - DNA, 370 bp, Homo sapiens
atgaaatgctaaatctagtgggttctgaggagtaaccagatatttacagagcctcaaagtatctccatacaaaatacggttgaactacaaaaagaaaatygtaacattagcatggacaaacctggcaggtactccttaactctcctaagtaataaaaactgtaaaatgcaaataagccttcgatgacctttactaacctttactaaagtatcagtgatgacttggttgtttaaacagctgacatttgggcaatttgagtatgtcaaactcaataatactggttttcatttgcaagatccacttaaaacttaaggaggccaaaaaacatcatttaaaataccctataaattataatcgtacatgtgataca

SEQ ID NO: 112385 - DNA, 370 bp, Homo sapiens
atgaaatgctaaatctagtgggttctgaggagtaaccagatatttacagagcctcaaagtatctccatacaaaatacggttgaactacaaaaagaaaattrtaacattagcatggacaaacctggcaggtactccttaactctcctaagtaataaaaactgtaaaatgcaaataagccttcgatgacctttactaacctttactaaagtatcagtgatgacttggttgtttaaacagctgacatttgggcaatttgagtatgtcaaactcaataatactggttttcatttgcaagatccacttaaaacttaaggaggccaaaaaacatcatttaaaataccctataaattataatcgtacatgtgataca

SEQ ID NO: 112386 - DNA, 597 bp, Homo sapiens
accttttctattcgatgtgttagaactaaattagttataaaaagacaaattcaacaatgttggatattatatttttaaggaggaaacacatttttctctctttattcttagatatcggtaaactattccacagctagagttgatcaagattcactatcttgttacaaggcaaatttttgstctatagcacttagaattaaataaaacttcatagtctgaatcatatctgcacatgaaaggataggccaagaaaactccactatctactttgggggagttggccagttagcaacaaatgcacaccaggtaagactgcgtgactgcagctcaatgaaatgatggcctatttttagcttagctctttttctccactctaaaaggcatgactgagctttgtgttcacgttttcataaaatgatggctaaatagcaccagctagagccaagaacagtgaaagtaagcatcgctgtatgtttctgccagaaatgcctctcgaacctttttgaataaatcctgccaaatgttcagaaccatgccaggacagacacaggctcttttataaaccattgacccttcagactcaggtgtatatccatg

SEQ ID NO: 112387 - DNA, 556 bp, Homo sapiens
gataactactttattttgttttgggtaatgagaaatcacatagtaaaatttaaagaagagagttgaaataaatttgtttctttctyattactatccccaaatgcatggctgctcctcttaaaaccctgacaaatcttttgagaagcaattgcttaatctattttattagaagttgacaatggaatagtacattttctcttttagagatatttgtaatttaacaggaggttcttagacattgtttacaatataaacaatctctgttggtagaagttaaaggtactgtaaaagaagtgtaggattgttatttgggtcagggcaatcttcatttatctctcaaataaaaccggtttccacccatgctgcatcttctgtccttctgatctacatgaaaagtttgttctactctgtcaatgactgtgagtctttgcctgttgcagaagatgttattttctctgtgcaagaatccctgacttccttccaggttaagctatatcacaacagatgtttggttcatggtatgtcagtgctgggtggtgtgaaatacaaaccataa

SEQ ID NO: 112388 - DNA, 520 bp, Homo sapiens
tgaacgagctaggaaacgaatcctccccaagagcctccagaaaggaattctgacagcttccttttaactcagtgagactcatatcaggctcttgacctccagaattgtaaaaaataatatttgcatcatttaaaccctttaatttttggcaatttgttatggaggctagagaaaactaatacaccacctgaaaaaatattcttcacataggtaggtaagtgatataagggaatgtatcttagatatgtgaggtggagtttttacatgtaacatagctggaacatggcagttcyatttgaaaaattcagtattgacaggtattcatcctggtttttaagatccctcagaaaatgggtttaagaatcattgttaataatatattctagggaagtaaacactttagaaaaacttagatctggtaagaaggatttcaattctgtgtaattaaatttttcataaaattatagaacatttaagttggaggcaaatttgaagatattcacaatcagccctgtagtcc

SEQ ID NO: 112389 - DNA, 671 bp, Homo sapiens
taaaatcagccaaagctgtacatattcctgctaatgacagtatctgctttaaatcatctggcccattcctcagcacaagcctatattcctgcaggcaaaaatctttacaactatcccgttatttaatatccacaagcctctctaagcctttgaaattgatactgtatttgtaaaacacagatggctcatgtaattgaagttcacagaattttatgttttgctttgtgacaactctgagcctttgtacatgttttcccctctatctaaaatgttacctattttgaatgatagtgcagacattagtaaggaaagcttgctaaatatttgtatcacctgggaagcctgtttttgcttcatcaggggacgttagtttttttcacatcaacctcctgcagaagacaatgctttctgaaagacagagtttgtgtcttattaatgcttgcattcaaatatctgacccaaagcttgtgatctttacatacttgctcagtgaatgacagtgaataactacctggttgtaaagactgtctcaaggggasttttgtctgggaaaagaaaagaaagacaaaaaagaggattgagaagcacccaataaattttcttatgaagttggcagctggggagagaagacagtgaaggatcctctggctcactgaaatacctcctagagg

SEQ ID NO: 112390 - DNA, 619 bp, Homo sapiens
gaacatgtctttgagtaaggtgagcatgctctctggttttctccagatattcatggtttacatctgttttccttagcattattattaatgttaccttcttttactctcaaaaatgttcttgatcaaacaataaattgtttatttttgtttacatttacctatgaagcaacttcttgttatgtaagaaaagagactcttcctaaaacttgctgtccagtggtctcacacccagaatttatgtacygacactctgagaatgaacagctgaccaaaagacctcaactgaagcatgaaataaaatatgaacaatgtcacaatgcccaggctacagattctaagaatctcagcaaaagcagcaaattcttctttagtagaatcccaggctcaattttagataaacacttattggcaaataagtctgatatcactgttcctggctataccctttttctatttcctcccttcctttcatgcttctgtggctttaccgtgcatgtggtgcttttattcttatctgttccccatcctgccccttcctcagccccataatcatgggtctagtgggtcccctcccctctgcatctgcccatgtttgcctaggcttcctgcaaaccttggt

SEQ ID NO: 112391 - DNA, 401 bp, Homo sapiens
gaagatattcagtaaattggctataatctgagaaacatctaaggagaagttatctttacagaacttcagtatttccaatggccatacatttactaaatatagcaataatatttaagaaggctgagaattcactatgcaatctcagaaagaaaatggaaatgacttcctaagattctcattttatgttaagccatttaacaatctggtcctaacgtcttttcctgtacctccctagttgtgggacatctttttacagatactctaatgttactcagatgtttcttctcttctcatcycaggaaataatcactgtcttatttatctggccattgatgaaatgattcttcttgtggatttacttgcttggtttccattgataatttggaggcattgtcctctat

SEQ ID NO: 112392 - DNA, 259 bp, Homo sapiens
agatcttgtcggtagtgtagaagccaactccagcctctaaagaggtatctgagaaatgtcaggaactccccaaatctgatcaggtttgacactagcataaccctagtasagtatgattgtattagcatgtttaataccatagtccagtatttcccattgctccctgtggtaggtcaaatgataactctctccaaagaggttcacatcctaatccctgaaacctatcaacgtgttaccttacatggcaaaaaggactttg

SEQ ID NO: 112393 - DNA, 521 bp, Homo sapiens
ctctgtctacaaactaactttgctaaatttaattaataattcccacagtatgtctgaatgaactcttgtattttccacagaagtatgtcataataaataatggcattttaagtttctttttttccagtctattctcttatcccatttctcaaattattgcactggtcaggactagacatttctatatcatgcccaaattcatagtgaaagctttcaacatttcatagttcaatatgatgtyggctgtgaattgctgtgtatttaacaggtaagaaacttccttctggggaggattttacaggaggtgggaacttgactctgttttctgtgacaacacttgaggccattatttctttgcttcaaccagatttatttgtaaacatactaatgggatttgctaattggaagataaccaggggcatttaggggttgttatgtaataagtccttttataagaatgcttttagcaggatagacctggtttttatttttctagccccaagagactactgaaaactcca

SEQ ID NO: 112394 - DNA, 569 bp, Homo sapiens
gatagcctgtcctcagcgcgcttgtaaatgttcagcagccccactactggggcggcagggtggctgcaagtggcacgcgcttcgttctcagttgcagtaggcagcaatggtggtggctacarggtggggttgtcaatgcggctgccagtgtggagctcaggggctgctgggctggctgcagtgtggtccaggctgtgtgctcaaaatggcgttgtgaggaagctgcttaggactcagggtgtgtgggaggcagcgtgacgtccctctctggatccatgccatcgtgcggtctccaggcagctccctgcattagtgccacagcctgcgagggcctagggggtctgccctggctaggactgcaggggtctggggtgggatgcagacccctgagggtctctgacttactctttccccacactggggagcccctccaggttccccgcctatcctggccgacaggctgcaccatctccctctcctctcttgcctccggtgttgcctgttacttctcagttgaattccagagttctcgcttagattatcccttcagagtgtggttctccactcgc

SEQ ID NO: 112395 - DNA, 569 bp, Homo sapiens
gatagcctgtcctcagcgcgcttgtaaatgttcagcagccccactactggggcggcagggtggctgcaagtggcacgcgcttcgttctcagttgcagtaggcagcaatggtggtggctacaaggtggggttgtcaatgcggctgccagtgtggagctcaggggctgctgggctggctgcagtgtggtccaggctgtgtgctcaaaatggcgttgtgaggaagctgcttaggactcagggtgtgtgggaggcagcgtgasgtccctctctggatccatgccatcgtgcggtctccaggcagctccctgcattagtgccacagcctgcgagggcctagggggtctgccctggctaggactgcaggggtctggggtgggatgcagacccctgagggtctctgacttactctttccccacactggggagcccctccaggttccccgcctatcctggccgacaggctgcaccatctccctctcctctcttgcctccggtgttgcctgttacttctcagttgaattccagagttctcgcttagattatcccttcagagtgtggttctccactcgc

SEQ ID NO: 112396 - DNA, 569 bp, Homo sapiens
gatagcctgtcctcagcgcgcttgtaaatgttcagcagccccactactggggcggcagggtggctgcaagtggcacgcgcttcgttctcagttgcagtaggcagcaatggtggtggctacaaggtggggttgtcaatgcggctgccagtgtggagctcaggggctgctgggctggctgcagtgtggtccaggctgtgtgctcaaaatggcgttgtgaggaagctgcttaggactcagggtgtgtgggaggcagcgtgacgtccctctctggatccatgccatcgtgcggtctccaggcagctccctgcattagtgccacagcctgcgagggcctagggggtctgccctggctaggactgcaggggtctggrgtgggatgcagacccctgagggtctctgacttactctttccccacactggggagcccctccaggttccccgcctatcctggccgacaggctgcaccatctccctctcctctcttgcctccggtgttgcctgttacttctcagttgaattccagagttctcgcttagattatcccttcagagtgtggttctccactcgc

SEQ ID NO: 112397 - DNA, 543 bp, Homo sapiens
ttgcttttgtagccatctgctggttcctgtcagttttgtcactttatcctgtctggaccagatcctgctttggtcagcagagttgtgaccagaaaacaagtgctgctggtctcctacctcacttggacctactctgtaataaaagaggaaaaaacccagtagcaacttaaggttagtttgaagggtttcagaaagcagacgtaaaaaaaaaaaaaaaaaaaaaagcagcagtgattcaaattttgtgamtaacccaaaaagagagagcagttgtgtcacaaagaagtttgctagtctgtcctgagatccaggggtaagaccacttataccaaagctctgagtcatgatgagagttgtttgctttcatcagagctgttagtttgatcagtaagcacttactgagcttctaccttcacttggcatttttgtagatgctgagaatatcatggtaacaaaacaaaattcttatcctcatgaagcatatgcttcatttggagacaccaacaatgcgcgtgtgtgtgtacaagaataagagtaacaaag

SEQ ID NO: 112398 - DNA, 468 bp, Homo sapiens
attttagaaccatgcaaaattgttcaattgaattatatttacagttgaataacttattttattaataaatattaaatgtactgttataatgtgaatgtattttaaatgtaactgaatttttcatataaatgatttcacagtaaaatgaagcctttatttgcaaagttttgtatactttctgagaaattaactctggggtgagttcaaatagcactattagttccagttttctattgctacataaaaagccaccmttaattttacaacttaaagcaataatattaatttagttttctcgcaaacttgcaatttgggtagggttcagcaaggatggcttattcccctcccctcagccccaccccagtggtatcagctacaatagcttaagtgcaactaaaggatccattttcaagaagaccatttacatggctgacaccttaatactggctgctggctggaagctcatcc

SEQ ID NO: 112399 - DNA, 525 bp, Homo sapiens
agcatacaccatgaggcaaatactaaggaatcttcactctgagagcttttgaaactatggtgcagaaaaatgacctccaagcagaaaggaacagtcataggacaggamaaatgaaacaggtattagagtgctggagtttctaagacaagtcagaattaaggacatgatttaatagaggtagatcacatagaagaaatttaaaaaatctgtttaagatgctcttacagacttagcttcttacagactcagcttaaagttgcacatgtgtagtgcaggactctgggaaacataaaagaaacagagattaatgaaggagcagagaattggaaagacctggaatcctggcccatcctaaatggaaaatcttgacgattactcgtgcattcagttagcatcaaagtaggcacacccagcagtaaggagcacacacttggttaggactaagataagaattgaaagaaaccgtcctaacaaaacttaaactccaaaatgaaaaaatcatctgagggcgatttaattgactac

SEQ ID NO: 112400 - DNA, 628 bp, Homo sapiens
accatatgaatgatgtatgtagtctcttactctccctgtgaagaagttgatgctgttcacttaatcgtactacctgaacatccatgcagagtggtttcagaactggtaacttataccccaatgggagacaattttaccaagcaaagtacagtacttaagtataaatactttggcctttaccctcagaatgtccacttatttcccaaattacttaggtccattgctttcctccactttctttagtgaggctattccatacattcattacatagttatattatttttttgggcattcctccttggaaaccctctacctactaaataaggttttaaacttgcataatttagatacactgtttgtgttataaagttcttcaggattcggaaaacattattatgtatccamcattacagtataagagagagtaatttcactgccccaaagaaacctcctgtatttcacgcatcccaccttctctctcccaagctcctcgttaccactgagctctttgctatcactatacttttctccttttccagagaatcatataggtggaattacacagtattttgccttttccaacttatattttttcacatagcaatataccttttagatttttgaagt

SEQ ID NO: 112401 - DNA, 628 bp, Homo sapiens
accatatgaatgatgtatgtagtctcttactctccctgtgaagaagttgatgctgttcacttaatcgtactacctgaacatccatgcagagtggtttcagaactggtaacttataccccaatgggagacaattttaccaagcaaagtacagtacttaagtataaatactttggcctttaccctcagaatgtccacttatttcccaaattacttaggtccattgctttcctccactttctttagtgaggctattccatacattcattacatagttatattatttttttgggcattcctccttggaaaccctctacctactaaataaggttttaaacttgcataatttagatacactgtttgtgttataaagttcttcaggattcggaaaacattattatgtatccaacattacagtataagagagagtaatttcactgccccaaagaaacctcctgtatttcacgcatcccaccttctctctcccaagctcctcgttaccacygagctctttgctatcactatacttttctccttttccagagaatcatataggtggaattacacagtattttgccttttccaacttatattttttcacatagcaatataccttttagatttttgaagt

SEQ ID NO: 112402 - DNA, 628 bp, Homo sapiens
accatatgaatgatgtatgtagtctcttactctccctgtgaagaagttgatgctgttcacttaatcgtactacctgaacatccatgcagagtggtttcagaactggtaacttataccccaatgggagacaattttaccaagcaaagtacagtacttaagtataaatactttggcctttaccctcagaatgtccacttatttcccaaattacttaggtccattgctttcctccactttctttagtgaggctattccatacattcattacatagttatattatttttttgggcattcctccttggaaaccctctacctactaaataaggttttaaacttgcataatttagatacactgtttgtgttataaagttcttcaggattcggaaaacattattatgtatccaacattacagtataagagagagtaatttcactgccccaaagaaacctcctgtatttcacgcatcccaccttctctctcccaagctcctcgttaccactgagctctttgctatcactatmcttttctccttttccagagaatcatataggtggaattacacagtattttgccttttccaacttatattttttcacatagcaatataccttttagatttttgaagt

SEQ ID NO: 112403 - DNA, 653 bp, Homo sapiens
acaagaaatagaaattatattttcatattataatttttttattaatataggcttagttttctaaagataattctgccttcaagcctggttgcaattctgtgataatttcttttcactccacgttctccatcaggaattttatggaaccttgtattctgttgaataccagaattatatcagcaatccccaagtcaccaaatgggcatcatcatgacagcaggtgggtggaatacaaaagaaaaaaatatatatatatgtatgtatgtgtgtctatatatatatgtatgtgtatatatatgtgtgtgtttgtgtgtatatatatgtacatatgtgtatatatgtacatatgtgtatatatatrtatatatatgtatatatatgtgtgtgtatatgtgtgtgtgtgtgtgtgtgtatatatatatgtatatatatatatggtggttggtggttttggcagtttctacttatctggacctggacaaaaaaatcttttcacaccagatttttggcagctgagattccaaataggttttgcacaggcatggaaaacttgatagaggctaaacaacagtccaggtgtggtggctcatgcctgtaatgccagcatattgggaggtcaaagtgggtggattgcttgagtccaggagttcaag

SEQ ID NO: 112404 - DNA, 574 bp, Homo sapiens
acatcctcaacgttggcaagatctagctctaaatttattgagacctgcctcagtcactttttggtttacattttggaaaccacaatgaattctgtgcagagtttggccctttggcctgcagcaactctcctagcagggccctggtacagccaactggaagctttgtattgctctgactgattggatgatttgctgaggtctgggagcctccccctacagagatccctgatctcccaaactttttrctggaggtctgaggtatgttctcttgtagaactccctctctgggagtttgctgcttctgaggaggcagagcgcagtcttccacttgggccagcatctccaagtaaggagctggctgggggtttttaaattggatttggtggctttgagtctagctttcttcttagccagttacaaattcttaggttcaaagatctcaacttatgtaaattgtgcaatcactttttgttactgttttggtaaaaatcactgtttgtctcctctacaaagttttgattggagatacataaaaaagattttagagacctcatattcttaataattgattaga

SEQ ID NO: 112405 - DNA, 574 bp, Homo sapiens
acatcctcaacgttggcaagatctagctctaaatttattgagacctgcctcagtcactttttggtttacattttggaaaccacaatgaattctgtgcagagtttggccctttggcctgcagcaactctcctagcagggccctggtacagccaactggaagctttgtattgctctgactgattggatgatttgctgaggtctgggagcctccccctacagagatccctgatctcccaaactttttactggaggtctgaggtatgttctcttgtagaactccctctctgggagtttgctgcttctgaggaggcagagcgcagtcttccrcttgggccagcatctccaagtaaggagctggctgggggtttttaaattggatttggtggctttgagtctagctttcttcttagccagttacaaattcttaggttcaaagatctcaacttatgtaaattgtgcaatcactttttgttactgttttggtaaaaatcactgtttgtctcctctacaaagttttgattggagatacataaaaaagattttagagacctcatattcttaataattgattaga

SEQ ID NO: 112406 - DNA, 513 bp, Homo sapiens
gaattctgtgcagagtttggccctttggcctgcagcaactctcctagcagggccctggtacagccaactggaagctttgtattgctctgactgattggatgatttgctgaggtctgggagcctccccctacagagatccctgatctcccaaactttttactggaggtctgaggtatgttctcttgtagaactccctctctgggagtttgctgcttctgaggaggcagagcgcagtcttccacttgggccagcatctccaagtaaggagctggctgggggtttttaaatkggatttggtggctttgagtctagctttcttcttagccagttacaaattcttaggttcaaagatctcaacttatgtaaattgtgcaatcactttttgttactgttttggtaaaaatcactgtttgtctcctctacaaagttttgattggagatacataaaaaagattttagagacctcatattcttaataattgattagaaaataaaattttacaaatgacttac

SEQ ID NO: 112407 - DNA, 574 bp, Homo sapiens
acatcctcaacgttggcaagatctagctctaaatttattgagacctgcctcagtcactttttggtttacattttggaaaccacaatgaattctgtgcagagtttggccctttggcctgcagcaactctcctagcagggccctggtacagccaactggaagctttgtattgctctgactgattggatgatttgctgaggtctgggagcctccccctacagagatccctgatctcccaaactttttactggaggtctgaggtatgttctcttgtagaactccctctctgggagtttgctgcttctgaggaggcagagcgcagtcttccacttgggccagcatctccaagtaaggagctggctgggggtttttaaattggatttggtggctttgagtctagctttcttcttagccagttacaaattcttaggttcaaagatctcaacttatgtaaattgtgcaatcactttttgttactgttttgktaaaaatcactgtttgtctcctctacaaagttttgattggagatacataaaaaagattttagagacctcatattcttaataattgattaga

SEQ ID NO: 112408 - DNA, 574 bp, Homo sapiens
acatcctcaacgttggcaagatctagctctaaatttattgagacctgcctcagtcactttttggtttacattttggaaaccacaatgaattctgtgcagagtttggccctttggcctgcagcaactctcctagcagggccctggtacagccaactggaagctttgtattgctctgactgattggatgatttgctgaggtctgggagcctccccctacagagatccctgatctcccaaactttttactggaggtctgaggtatgttctcttgtagaactccctctctgggagtttgctgcttctgaggaggcagagcgcagtcttccacttgggccagcatctccaagtaaggagctggctgggggtttttaaattggatttggtggctttgagtctagctttcttcttagccagttacaaattcttaggttcaaagatctcaacttatgtaaattgtgcaatcactttttgttactgttttggtaaaaatcactgtttgtctcctctacaaagttttgaytggagatacataaaaaagattttagagacctcatattcttaataattgattaga

SEQ ID NO: 112409 - DNA, 431 bp, Homo sapiens
tgaattctgactgccattctttgtactaaatttcttcctgaggggcctagagggaggcaaatccattagccaaagagctaacattttttttctgccgacccccaaattttaaaccaaaccytcttttctttaaccaattacaaatcagaaaacccttgaatctatgtatggcctgtaagcccctgcttcaaaatatcgtgacttttcaggacaaaaccaatgtgtaaactccatgtactgatttataattttgccagtaacttctgctttcctgaaatttacccctgctttaaaaaaacccttacctgcaagccactggggaagtgggaacttaagcattagctgcctcatccgccttgcttcacaatgtccagataaacacctccttttctcccactgcaaatgtcagtgtaggtatctagtcttactgt

SEQ ID NO: 112410 - DNA, 497 bp, Homo sapiens
accacatcaactttgtaaaactaacaaattaaccacaatattakaaagtatggctcaggagtcatacaatcagaggccacaatattaataacctccccaatggctcctataaataacattactattgtaaaacctaagattggtgtttgaggtatttttcataacttgcatcctgacagatcagcgggtgccacccaaaccagtaaactggctcatctggatacgtggcccacacccaggagctgagtcagaaaagaagatggctttgacttcctaagatttcatccctgacccaaccaatcagcatgtccctttctctaacccctgcccacaaaactatctataaaaactctagcctctgaatatttggagaagcagttttgagtaataggaaaactctgctctctcctttagccagctctacatgtataaaattttctctacagcaattcccctatcttggtgaagtggctctatctgggcagcagccaacatga

SEQ ID NO: 112411 - DNA, 604 bp, Homo sapiens
ctgctttcatgcaacacagggacaggcatgtattaaactttatttaataatttaccttctatctgaaatagaaatacaagaaatataatttattctgtgccttaatactaaataatttaaatgtttatctacctataggattcctttcccgtcactcattctttttttttgagacggastcttgctctgttgcccaggctggagtgcagtggcgtgatcttggctcactgcaatctctgcctcccgggttcaagcaatttccctgcctcagcctcctgagtagctgggactacaggcgtgcaccaccacgccaagctatttttttgtctttaagtagaaacggggttttaccatgttggccaggatggtctcgatctcctgacctcgtatgcctgtctcagtcctgtcactcttggaacaagacaaggcttatggcattttttgctaaaatgttgttaatggtgaatattttgtttcattaatatatccagaatttaaaacggttcaatttctccagacccagggactatcatggaagatacgaatgcatgagtttgtaagggctggttcttgtggaataaaattaattcagaccccccaaata

SEQ ID NO: 112412 - DNA, 604 bp, Homo sapiens
ctgctttcatgcaacacagggacaggcatgtattaaactttatttaataatttaccttctatctgaaatagaaatacaagaaatataatttattctgtgccttaatactaaataatttaaatgtttatctacctataggattcctttcccgtcactcattctttttttttgagacggactcttgctctgttgcccaggctggagtgcagtggcgtgatcttggctcactgcaatctctgcctcccgggttcaagcaatttccctgcctcagcctcctgagtagctgggactacaggcgtgcaccaccacgccaagctatttttttgtctttaagtagaaacggggttttaccatgttggccaggatggtctcgatctcctgacctcgtatgcctgtctcagtcctgtcactcttggaacaagacaaggcttatggcattttttgctaaaatgttgttaatggtgaatattttgtttcattaatatatccagaatttaaaacrgttcaatttctccagacccagggactatcatggaagatacgaatgcatgagtttgtaagggctggttcttgtggaataaaattaattcagaccccccaaata

SEQ ID NO: 112413 - DNA, 603 bp, Homo sapiens
ctccctacatgcccacttgtatctggaggcaaaagttttttgctgatgtctttacttgcttacttttcttaaaaaaataataataatattaaaaaacatatttattttgaaataactgcagatttacataaatgcacataggtaagtacagacagtttcatataccattcagctaactagaatgttaatatatattataaccatagcatattcatgaaaactaagaatttaactgtttttcragattattaactgatctacaaacttccttcatattttaccaggttttttaataatcatatacttatctattccaggacctaatccagaataccaccttacaattactgtcaagtatattacttactacttggtgcataacaaattagtacgtaccttagtggctcagaaccacacacatattactcacggtttctctgggtcttcggtctagatgtaggtgatggctcaggctgaggctcagctggggaagggtctccttccaaactcacatgattgttcttaggattcacttcccttccctcatcaggaactcactgatgtgttattaaaatcacagaaaattaatactaatttatcaaa

SEQ ID NO: 112414 - DNA, 600 bp, Homo sapiens
gaaactcatactttatgtgtttctccttcaatcagtatattcctgagggaaaaccaataccaatcctcaaatccaagtacccaaattagggttgagcagagtagcaagggggcagattaaaacattttataaagaccattatgcatctacttctgcagtgactaattatcaagtgatttctatgatcaccgaccatatggttaaaacagcaaatgggaatgaagaaaaaagagttacataaatgttatagctgaaagcatggaatttataatgaagcttacaagggtcattggtcaaattcctaagattgcagtgggaagtttcaacttacagctttttctaggtctttagaaagctatcaytcgagtgaatttttcaagtaactctttataatttctatcttcttcctcaatggatttcttaaaccatagttcataaaactacatttccatgcataacagaataattatagtattccactaataactgtaatgtctctaatagctatgtagaatgtaaatgcacttggtaaacttacatgataagatttaagcatgtttcttcaataacagataagaatacagttgatgagccatcata

SEQ ID NO: 112415 - DNA, 600 bp, Homo sapiens
gaaactcatactttatgtgtttctccttcaatcagtatattcctgagggaaaaccaataccaatcctcaaatccaagtacccaaattagggttgagcagagtagcaagggggcagattaaaacattttataaagaccattatgcatctacttctgcagtgactaattatcaagtgatttctatgatcaccgaccatatggttaaaacagcaaatgggaatgaagaaaaaagagttacataaatgttatagctgaaagcatggaatttataatgaagcttacaagggtcattggtcaaattcctaagattgcagtgggaagtttcaacttacagctttttctaggtctttagaaagctatcactcgagtgaatttttcaagtaactctttataatttctatcttcttcctcaatggatttcttaaaccatagttcataaaactacatttccatgcataacagaataattatagtattccactaataactgtaatgtctctaatagctatgtrgaatgtaaatgcacttggtaaacttacatgataagatttaagcatgtttcttcaataacagataagaatacagttgatgagccatcata

SEQ ID NO: 112416 - DNA, 431 bp, Homo sapiens
tgaattctgactgccattctttgtgctaaatttcttcctgaggggctagagggaggcaaatccattagccaaagagctaacatttttttctgccaacccccaaattttaaaacaactcttcttttctttaaccaattacaaatcagaaaacccttgaatctatgtatgggctgtaagcccctgcttcaaaatatcacgacttttcaggacaaaaccaatgtgtaacctccactactgatttayaattttgccagtaacttctgctttcctgaaatttacccctgctttaaaaaaacccttacctgcaagccactggggaaggcggaacttaagcattagctgactcatccgccttgcttcacaatgtccagataaacacctccttttctcccactgcaaatgtcagtgtagatgtctagtcttactgcact

SEQ ID NO: 112417 - DNA, 596 bp, Homo sapiens
ggacagaaattgaatcctcccaagaatcccaggagcttggaaggggatccttccccagatgagccttcccttgaaatctctgccaggcatctgacccagagaaactgtaagtactgtgtagggctgggttggaaagtctaaactatgtagtaatatattatacaacaatcggtcagttatatgcctgacagtaaatgtaatgtggtatcttggattagaycctagaacagaaaaatgacactagtggaaaagctggtaaaatataaagaaaatcttttccagttaatagttttgtaccactgtcaatttctgagttttcataaatatgctatggtgatataaggtgttaacatttcaggaagctgtaggatatacgaaactctattatctttactactttctataaaactaaaactatgataaaataaaaatatttcttgaaatgtaatattcaggtaccagaaaataaaacaacaataacaaagacagatttaaaccacaataaaaccacagatcagaggatgaatggagatataggagactatggcaaagtagcttgccttattatcccccgttcctacacagggcacctgctt

SEQ ID NO: 112418 - DNA, 596 bp, Homo sapiens
ggacagaaattgaatcctcccaagaatcccaggagcttggaaggggatccttccccagatgagccttcccttgaaatctctgccaggcatctgacccagagaaactgtaagtactgtgtagggctgggttggaaagtctaaactatgtagtaatatattatacaacaatcggtcagttatatgcctgacagtaaatgtaatgtggtatcttggattagaccctagaacagaaaaatgacactagtggaaaagctggtaaaatatraagaaaatcttttccagttaatagttttgtaccactgtcaatttctgagttttcataaatatgctatggtgatataaggtgttaacatttcaggaagctgtaggatatacgaaactctattatctttactactttctataaaactaaaactatgataaaataaaaatatttcttgaaatgtaatattcaggtaccagaaaataaaacaacaataacaaagacagatttaaaccacaataaaaccacagatcagaggatgaatggagatataggagactatggcaaagtagcttgccttattatcccccgttcctacacagggcacctgctt

SEQ ID NO: 112419 - DNA, 617 bp, Homo sapiens
ctgtttcattttctaagtatcggcaagtggggctgacaagagtaacaagaggtcagagcaaggcatttygtgaaaacagcaatgcacaggcatctgcagtccctgcttacagtgagattcacatgaccgtcgttcatgggatacgaaggataaaaggggagggaggaaaaaaatatgcagttgatctggatgaagaatcggatttggaaagcaacttagaataaactctgcttatatttctaagattaaatctcaagatacaggattttctgtcttcagagagttgcactctgctgcaaactttgaagtaacactttaccatttctatcttccttcttatgggatctttgagccacaatttataaaatcacctctacatctcttgtatttttgttatgtctaataatctcttgaggtctctctagggacagtgactataaattatcaccctgcccaacaggactccaggaaactgtgtcctggatgtttacagtgtgcctttcatgggatacttatttatcctggtggataccccaaagcataagtgtacaatctttgacccagcatccttctcacaggatatttgtttatactgtcagacacccttgtggcacttg

SEQ ID NO: 112420 - DNA, 631 bp, Homo sapiens
ctcctaaagtgctgggattacaggtgtaagccaccacgcccaacctgagatatttctttatctttggggagccaccactccagtgcaaactttcaaataatgccttgccatttttagtttccctccctaggattcctggaaccatagttcataaaattatctcacagcgtgtgttttatttttacttctgtttgctttaagtcctctctggatggtggctataacctatagccttgcccactacgactcagggtttggtactggctgtgcctttcatgggatgcttwcttatcctggtcgatggcctaaagcccaactgtccagcttacatccaggtatccttctcacagagtacttgtttatactgtaagacaccctgtggctcctgtctgacctgtgtctagtttattctaccaaggaaaccgctctctaggagagtgctaagtgggagaaaagtgatgtccatgtgtgttcgtaaagtgaaatacagaggtggcaactcagcaaaatgtgtataatgacatgcgtaatgtattactaaccaatcccagtaagaagagggcagcattccttgaagtgctgatggacagagaagagctctccaggacatacactcataagcagcaggggt

SEQ ID NO: 112421 - DNA, 586 bp, Homo sapiens
ggttgggactctgtgaagagttctgaagcctacagggtatcgtatggcaatggagtagagcttgctgacatgcaagatcatgtctcccttcctataagtcactcttctctcataataggctattaatttttatatattaatttattaatccatgaaaggattaattcatttatggggtcaaactcttcatgatccaatcaccttttaaaggtctcacaattcaatactgccatgttagggatgaaatttcagcataaatttgggagggaagcagtattccaaccacagggctccacttctgactctaaaaatcacgccctgtcacttaaaaaagtttatttcattcctatcgttcaaaggcttaaattgttccagcaccaacagaaagttcccaaatctaaagtctcctctgtcagcccatgaaatcaaaacaagttatcttcatacaaaattcagcagttgggttgttaatggccaatgggttcatgttggctgctgcccagttagagccactttaccaagataggkgaattgctgtagagaaaattttatacatgtagagctggctaaaggagagagcagagtt

SEQ ID NO: 112422 - DNA, 580 bp, Homo sapiens
aggtctactactaaaaatgaaagaagtcacaggccctaatggttaacaattgctmataaagtttacttttactgtgtgccaagtccacacaagccctaagatgggccctttatgtggatcagctccttgaacccctccaccagttctataaggactagttattactgttgttagctactgttattctccccattttatggatgagaaaactgagccttagggtgattaatcttaaagttaaaaaaccagaaatggctagaggcaggtttcaaacccagtctgacttcaaagccagccgtctttgaagttctcctcactatgacattctctgtcacaatatgaccaggtgccagaatcacttgaggaatgctgatccccatttcctccaccttctctaccacttcccaacaagattctatttccgaaggcaggttgggttgcaagcatctacacattaaaaaacaagtagcctgcccaggtggttccaatacaaatcagagttggaacaactgactactatagataataatgtaggtcaatagattttgtgaactctgaagcactctatgaatgcttttac

SEQ ID NO: 112423 - DNA, 586 bp, Homo sapiens
ttaaggaagcaaccaaagttattgtaaaaggtacacctattttccacaacattgatgaagaattaaataatcaatataaaatacctagctcagtgcctgatgctgacatcattcagtgggggtagctcccttctcccttatattcagatgcatatacatcatatataattatattaaacatgcagagttataaataaaaattatacataggcttaattataaatatattgcatatgttaaatgtatagcaacataatayagattgtgcttttggaaacttaactgagaacaaaatctacatgcttttaattatagtaaatatgccatgcattaaggaaaattaacatttctcaaaattcatatgcaagagagttgctgcctaagacaatttgctggaaaacgaattgtgatctgtacagtgtctttgtgcttgttgtgaattgcagatatgggagtgttctgagtatttattttatgaacttgtcctaggcattataattacttgtaaactcaatctctatagaccttataaagaagctttaagaaaaaagatcattgaatcagttgacaagaaatgagaattata

SEQ ID NO: 112424 - DNA, 633 bp, Homo sapiens
tgcatctactatatggtttggttttgatattttcctctctctctcattcccataatataggaatgtaggaaattttaagaggacattgacttgttttatgatcatttgagctgtccatagttagcctatccagtggattaaagatgcataaccattgtgtctgggatttgttcagtgccatcttttcaatcattggttacaatgaagctgggagtcccctctgaggttcggckttctgtggctcctctcccctgcactccaactttctcaaagcctgagcctcaagtgatttcccagtagctaagtaaactgcccccttcctccatcttcaccaagttcccaaagcttttcagactcaggcttcaaatctaacaggatgtggctccacacattatatttcagttgttattttttaatgtggaaaataattcaggaaagttttggctaatgcttcaagacatcatgcactttatacacaggatttgttcttaagaaggtagtatagtgacaggaggaacaatttacttcagaatatccattttatgtccaagccatgcaccagccacttttgacagacaggatttgagtatgatgataaaatggggtaagcatatattttaagttctaacatct

SEQ ID NO: 112425 - DNA, 633 bp, Homo sapiens
tgcatctactatatggtttggttttgatattttcctctctctctcattcccataatataggaatgtaggaaattttaagaggacattgacttgttttatgatcatttgagctgtccatagttagcctatccagtggattaaagatgcataaccattgtgtctgggatttgttcagtgccatcttttcaatcattggttacaatgaagctgggagtcccctctgaggttcggcgttctgtggctcctctcccctgcactccaactttctcaaagcctgagcctcaagtgatttcccagtagctaagtaaactgcccccttcctccatcttcaccaagttcccaaagctkttcagactcaggcttcaaatctaacaggatgtggctccacacattatatttcagttgttattttttaatgtggaaaataattcaggaaagttttggctaatgcttcaagacatcatgcactttatacacaggatttgttcttaagaaggtagtatagtgacaggaggaacaatttacttcagaatatccattttatgtccaagccatgcaccagccacttttgacagacaggatttgagtatgatgataaaatggggtaagcatatattttaagttctaacatct

SEQ ID NO: 112426 - DNA, 592 bp, Homo sapiens
tgtgtgattagcagagtgaacctgaatgcggcacttgaagactgaaaaggtgtttgatttctgttcattacattaatggtcttgcagggataatgtggacgtaatttccttctggttcttctctctttttgcaacatttaaatcttyaacccatgcctgcttgtgatgccatgatgcctgatggcgactcctaatcccaggtttcctctgctgaagggagctaatagctggcttcactattcctttcttgcttgatagacattggccaaacatgggatcctactgttcctcagactgcctgtggccctcactaggtcatctgttgtaactcctgtagcaacaagtatccctttgattaaatgaaatacattagaaaggtggttgagattattaacttgcttcttaaaaaaaacagaaatagaaaaacacctccatgatgtcttgaacagtgtttctcaaactttatggagcatacttatcacctggagtccttgttaaaacacaggttctagggtccacccctagagagtcttttcctggagccttggtctggggctagattataatctaacaagatcctagttgacgttaa

SEQ ID NO: 112427 - DNA, 497 bp, Homo sapiens
gtatccttttttccttgttcggtgttggatgaaacttttcaatctgaggacttgaattactcttcaggtcaaggattttttttctgttattttcccacatcctttcccattcctccacttctaccacattcttcatatcttttttacttttccatcrtattttatatccttggctttttgctctatattctaagatatttgcttaattcaatattcaagaatgaatattacttgaattgcattttatccaatctttatatatacatatatattcagtattctgctatttatggaaatcagatcatacttaatggttatattctccccctgaatatctctgaaaatttaatattgacaaatttttcccacacttttcattgtctctgtttcttctggaaagcagaagataaattgtctcaggaaaataaatttgtcctgtttatttattagttcctttttgtttaggctactggtttttttgtttggtttggtttttt

SEQ ID NO: 112428 - DNA, 590 bp, Homo sapiens
gtgttcattaccagacatacctttgtcaatcaaaaaaaatcaatgaaacagtgtttcattcaggattcttggttaaaagcaacagggtggtgggggcggggaacactgagtacttttaaacagtgtgagaatcattgcaagcaaatctggactcagaaaatcagtagaaagctgacatactaagtttggaaaattggcagaagccaaaagagatctggagcatgaacagcaggagccagaggaagggcaygcatcaggaatccgatggtttgcacaccagctaagctgctgcttgaaacctgacctcccagtgtccctctgccactagaatagggttcaacttttcagattaggtcacatggccaaatcctggctgtcatctgtaggtggaaaagggaagaatatgtcttacttttcccaaaagaactaacagcttgaggaagtttggtgtgagaggtgagccccagcaatttccattcaggtaagagtacccaaatgataaaattcttacaaaatagatattggtatagctgggtgcaataggaaaaagtggagtggactataagtcaaactttttaaattaaaaagaa

SEQ ID NO: 112429 - DNA, 612 bp, Homo sapiens
ttattgtacatattatgttgtaggcactagtctaatgttttccatttatataaaccacaaaacaataagggtagaattattgttttcaaaatgcaaatgaggaaaccgagacaatgatagtttagattactatcccacagtcctataagtagaatgaggcagggataagatttgcatgttcatagttggtctccagactccatacttttagcctttacactaatagtgctatgttgagtatggaatcttattttaataacaaataatatctcactttatagaaaaaaaatgtgctagttgctgtaggtgagggaggggaagataatcttcaccgtagattgtgggtagtagaagaagggagggagacactgatagyaatgaaccaaactaaaagaaatgtgcaagttgtcaatttattgcctctcaggttcaaatcctctcttcattcactgtttttgcaaaaatcgagctgcaccttttaaatatttctccttcgttgctgaaactgtgttttcttttgttagtagagtatagagaaacaccaagaacagttttctcttctgattctggtatgctttggtttgcttgtacttgctcctgctgtgtagctgt

SEQ ID NO: 112430 - DNA, 544 bp, Homo sapiens
tgatattgagttgtctgagtatttttgtttctgtttcatgtatcacagcctgagacctgaagaagatggaaacccagaatgagcactgactgaacaagaaaaaagaaagcttgctctctagtcaaagtacaaggaaaggagaagcacagcaagaaagaaaactttttgaaaataacctctctattccagccaaacaaaacggaaaataagttgttgccctactctcacccatcctatttaagaactactagacctagatatccccccacaaawgaatctaacaagttgcctccaaaatctcattgtggtggtatcagagaggactaaatagggagaatgtggtcttctaccccaccaagcaataaggaagttcagcttttcctctcagcttaaatggtgtcttaggaggtctaatgcaaagtcagaacttttgccatcactcagctgtacagaacctgcacccactacgttgtcatagagatcacctgagaaaccaattgccaacactagccctgcagtaaaaaggaaggagctgcccattccc

SEQ ID NO: 112431 - DNA, 519 bp, Homo sapiens
cttgaattctgtctttgggatccagctgctacagtagcttgagtctataggaagaagaggatttgcagggaccattgaagaaaaaaggacactgacccaggactccaagtgacattccagcagtgtctgctccagaaagtatagagaagaggaaagagacgagctcagacacagccttcaccctccggttgattacagctaatggtgggagtgagagaaagagaaataactaaggctgaagggtggtgagatgaacccagcttgggcaaaagactaaggctgtgctcttacccctgagttactgagcttctccctgaaatgttcttcctcttctgcccatcaaggaccacaggatatttacaggtcagttttgaccaccaagaagatacctggatgtgtaagtacttaatagtctgtaaaattytagatagcaagtcatattaattatgatactagatggaataggagtcatgtgctcactgaaagcacatgctatatgctgtgagaacccagagggtg

SEQ ID NO: 112432 - DNA, 565 bp, Homo sapiens
gtggtgcataaatcccataaagctagtcagccattggctaatattctaaaatccctaaagcaccagttagagtgggagaaagaagtcccatttaactgggcatctaagatgctttactgataaagcaggaccaacaactctatctgaggcattgcagcatcgagttcccctgaaactaatgggatcattgtactttattagcctttcttacaaagcgtccgtttaatgaagctttggtaggaattaactttttttttttccttttgatgcccaaagaactatctagttaaggtcattccacttaaaagcattttttctcattactcaaatgaatcaacaaaatagaagtctcaacttcttgcctcaataggatggtccagtcccaaatgggagcactggataaacaatgcatgaagagcacatagaaaatagcagaactttgagtttcctgaagcwactgtaactacagtctcataaagaagaatgattatggaaaatgttcagtcagataaagctggaagctcaaggatgacaattctctttcatacaacattgtacataagtc

SEQ ID NO: 112433 - DNA, 550 bp, Homo sapiens
agagactatcaaaccagattaccgtgacttcagattggaatacgatcaggctgtccacatattgggttttatttttttctttcgcttcagagacagggccttgctccgtcgcctaggctggagtgcaatggcacagtcacagctcactgctgcttcaacctcctgggctcaagcaaccctcttacctcagcttcttaagtaactgtgggtatgacagcaggtgatctaggttattaaagattccaccccctgacccccgccacttacaaaacaaatgaaaacatgaaacttataaaggatgctatagacaaaaggcaatcatgtagaatgctgcaaacagaaaggyctgtggtatgatgcctttttaaccttagctgtgggtatgaccacaagtgtgcgccaccacacctggccagtttttgtgtttttttgtggagaagcgggtcttgctatgtggcaaaggctggtctgaaaatcttcgtctcaacagatcctcccgctttggcctcccaaagtgctggaattacaggcatgagccaccacgccccag

SEQ ID NO: 112434 - DNA, 428 bp, Homo sapiens
tcatcattcagacgccacctcttccattaactatgtggtagtctataattaaaacaacacttaaaccaacacaaaactttccaaaaagagaactyatcatctagaatttaattcactttctgtaagatggattcccatcttcacagcatgttatctatttcataaaaactggggcatgtatattcccttcattaacatgtttaagaattaaaatgacgttttagtgttttatttattattatctttaaaagttgcaagcattaatattgtattacatagtttctacttttagtcacggatttattaaataaaaggcttatacaagtaaattactcagtttttataaccatcaatttatgtgactaaatcttctgatcttataaacaggctatgggcattgtaactctttaacaattgatttttttttc

SEQ ID NO: 112435 - DNA, 505 bp, Homo sapiens
tgtaggaggaaagaaagaatacggtatttttaaaaagagtggtcagggtatacttcattcaatagatgacattttagcatacatttgaatttgttaagggagttarccatatagatatccagatgaacaatatgtcaggcaagggtgacaaccagtgcaaaggccctggggtaagagtgtgacccctaacagagtaataaaatgtataatgtttcccaaactcatttagtacataacaatttttcacaaaatgccttcagtgtagccaagaaatactttgggaaatgttagtgtagatgttgcttactaagtgaagaggggacgaggtaatagatagtgctagggccgaggggttggtgccctggatctcgtaagagcactgaggtggaatgtactgaaacaaactttgaccacagtgcggtcttccaacaaccaaagtgacagtagcttaagatgggcaacttttcctacatttcttccattggctcttcaaagaaggcttact

SEQ ID NO: 112436 - DNA, 569 bp, Homo sapiens
taccaacaacatgcatggcagagatgtgtctagcacatagtatagtatagtatagtatagtatagtatagtatagtatagtatagtatagtaatggtataytgtagtatttctacaatacagttacaatagacctaaataacctcaagagcaacagatgataaagtgtggagaaatcattgggaagtggtgagttttaagtatttgctacctttattttagaaagtatttaatttaattgcaggcttatataatttattttttaataatgtgtgcttttaacagccagctgataaatttcctgaaaatgattggctgttgcaagccagactgagcagactccagcactctgctgattattttcaaggccagagtcaatacgttgctcttatagcatttttagccccaacccagcacttgcatgtaaatatcactcagtgtaattgttgaaagaatgaataaatattcagtgagtctatttgcttaatcctctttgcatcatccaggagtaaaatttcttctctaggtaaaaggggaacattttccacctgccataacttactttattca

SEQ ID NO: 112437 - DNA, 376 bp, Homo sapiens
acccaacaatcccaacaatggatatacccagaacatttctcccatgagttcactaagagacaaatacragataaagctaggcacagtggcacacacctgcagtcccagctactcacgaggctgaggaaggaggatcacttgtgcccaggagtttgagtccaacctaggccacataaggagactccatatttaaacaaaagaacttaattgtggcagcattgtttgtggtattaaatatagaagttacctagtattcaccagagaggaatagatgagtaaaatgtgataagttaatagtctggaattctaagccatggtcagagcaaattaacatgtagtcacatggacagacctaaaagcacagtattgaatgaaa

SEQ ID NO: 112438 - DNA, 554 bp, Homo sapiens
aataaataaataaacagagtggcttgtagtttttctgaaattccccaaaccagtctcattgtgtctactcagaatataccagcactagctggtcaaagcctctttctcagaattttatttcctcctcttaataagctccctcttttagacctaaggcatcattatgaaatgaattgtgccctttcctcaaggcctgcaaccaagttctacagwatctttcttcacaggacttcaggtacgagtaccaaccttatcaggagtccacgttccattttaatgaggtctctcctccaaacttctattattaacagtttcagcctcttccctttttaacctccagccttagggatggtaagtgctttccacagcaactccatgaaaatgtagtgtttccttttgctttttaattaagttgtcaccaatatctaattattaagattagtttatatgaaaatatctctgttcaaacagctggtgtggttcatatttcttgaatagcttctgactaacttacattagattggtcaaagcaaatcacatgaccaagccaatat

SEQ ID NO: 112439 - DNA, 533 bp, Homo sapiens
caggttaaaggagaaaaattacatgaccctatcaataaatcaaaaaaagcattygacaaaatccaataccgattctttccaaattttattttttaagattagtctatatatccaagaagctaaatataaacaagataaagacaaagagatacacacctagacaacatcctagtcaaattattcagagagaataataaagagaaaagcaacaaatctattcataaaagggaaagaaatacaattagaagctaatttattatcataaaaaatggattccagaaggcagtgaaaggtatgtctcaaaatccctgaagtgatatattcagagtgctgaatactttcagctattatttctttaattgttttttcataggtttccaaggctctatttatttctctttactcttcttttttctctgttcttcatattgaataatttttactgatctaactaaaagttcactgattcttttttcctgccatctgaaatctgctattgaggccctctagggaatttttcattttagttattg

SEQ ID NO: 112440 - DNA, 583 bp, Homo sapiens
caatttccactgaatgcttatttcatatatatgggtcaaatgttcttgtttgtctcatactgtttattggttgaatcttttggggtgctgaaatatttttaaactggattatagtaatggttgcacaattctatacactttccaaaaagtttgaattatataaaaattcagtgggtaagttttgtggtatgaaaactatatcccaataaagctgtaaaaaaagaaaataaccagccagtggataggtgaagaggtgtagattaaatcagattagcaatctgctgataattatagacaytgaatgataggtaatgggagttactatattattccctctacttttgcttatgttaaaaaatttttcacaacaacaaagaagggaaaaaagaatcaattggtctaataatcagtaagctgaaaccatggctagtgtgaggcaatattattttcgtttagtgtctggcaatagaatgtagccccaggaaaacataaaataagtattactataaccctagggaaaaaatacaactacgaagaaatgaattaaatccacagaatcaatgcttttgaatgtaaaaaataa

SEQ ID NO: 112441 - DNA, 583 bp, Homo sapiens
caatttccactgaatgcttatttcatatatatgggtcaaatgttcttgtttgtctcatactgtttattggttgaatcttttggggtgctgaaatatttttaaactggattatagtaatggttgcacaattctatacactttccaaaaagtttgaattatataaaaattcagtgggtaagttttgtggtatgaaaactatatcccaataaagctgtaaaaaaagaaaataaccagccagtggataggtgaagaggtgtagattaaatcagattagcaatctgctgataattatagacattgaatgataggtaatgggagttactatattattccctctacttttgcttatgttaaaaaatttttcacaacaacaaaraagggaaaaaagaatcaattggtctaataatcagtaagctgaaaccatggctagtgtgaggcaatattattttcgtttagtgtctggcaatagaatgtagccccaggaaaacataaaataagtattactataaccctagggaaaaaatacaactacgaagaaatgaattaaatccacagaatcaatgcttttgaatgtaaaaaataa

SEQ ID NO: 112442 - DNA, 550 bp, Homo sapiens
agggtttgtttctctcttgttggtttcagtatttttttaaatttcatcttcaaaagtgtatcaaagtataatgttcaaagttcaaacgttttctaaagtatgttgtgttttagtgtggatttgtttagattttttctgtttgagatttgctcagcttcttgaatatttaggtttatawcttttgccatatatgggaagtccagtcattatttctttttctttcttttttatttatttatgtatgtatttatttattttgagacaggatctcactctgtcgcccaggctggagtgcagtggtgaaatctcagctcactgcaacctctgactcctggaatcaagggatctgcccacctcagcctcctgagatgggcaaccaccatacctggctaatttttttgaattttttgtagacatggggtttcaatatgttgctcaggctggtctcaaactcctgggctcaagcaatctgcctgcctggccacccaaactgctgggattacaggcatgaaccaccgggaccagcctcagtaattatttccttgaattc

SEQ ID NO: 112443 - DNA, 316 bp, Homo sapiens
tgtgcatctactttaaatgagtcatcttggggtttttataattcccttaygttcttgcccctctacacttgaaataacaaaatgccttaattttatggattagttctcttatagtagacaggcagctatatgcagcaaaaccaataaagttatttttcaactttcatagttgtaaaatatcttataacagaatacaaaacagctaagaaaacatgccacattttattttagcattttcaaataatttgtttttggtgtaagcacaggataaaaaaggagagcgtcaaagaaaagagacataacacctaacattcat

SEQ ID NO: 112444 - DNA, 316 bp, Homo sapiens
tgtgcatctactttaaatgagtcatcttggggtttttataattcccttatrttcttgcccctctacacttgaaataacaaaatgccttaattttatggattagttctcttatagtagacaggcagctatatgcagcaaaaccaataaagttatttttcaactttcatagttgtaaaatatcttataacagaatacaaaacagctaagaaaacatgccacattttattttagcattttcaaataatttgtttttggtgtaagcacaggataaaaaaggagagcgtcaaagaaaagagacataacacctaacattcat

SEQ ID NO: 112445 - DNA, 316 bp, Homo sapiens
tgtgcatctactttaaatgagtcatcttggggtttttataattcccttatgttcttgcccctctacacttgaaataacaaaatgccttaattttatrgattagttctcttatagtagacaggcagctatatgcagcaaaaccaataaagttatttttcaactttcatagttgtaaaatatcttataacagaatacaaaacagctaagaaaacatgccacattttattttagcattttcaaataatttgtttttggtgtaagcacaggataaaaaaggagagcgtcaaagaaaagagacataacacctaacattcat

SEQ ID NO: 112446 - DNA, 540 bp, Homo sapiens
atttccaggaatttagccatttcttctaggttttccagtttgtgtccatagagttgttygtaatagtctctcagagttttttgcttttctacagggtcaatggtaatatatcctttgtcatttctgattgtgtttatttgggtcttctctctctttttctttattagtctagctagtggtctattaaatttatttgttctttcaaagaaccaacttgtggttttgttgatcttttgtatggtgttttgtgtctcaatttcattcagttcatctctgatttggttatttcttgtcttctgctagatttcgggttggtttgctcttatttttctggttcctctaggtgtgatgttaggttgttaatttgagatctttctaactttgaagcgggcatttagctctgtaaattttcctcttaacactgctttagctgtgttccagcaatcctggtatgttgtatctttattttcattagtttcaaagaatttcttgatttctaccttaatttctttgttgactcagaaagtcattcaggagcag

SEQ ID NO: 112447 - DNA, 540 bp, Homo sapiens
atttccaggaatttagccatttcttctaggttttccagtttgtgtccatagagttgtttgtaatagtctctcagagttttttgcttttctacagggtcaatggtaatatmtcctttgtcatttctgattgtgtttatttgggtcttctctctctttttctttattagtctagctagtggtctattaaatttatttgttctttcaaagaaccaacttgtggttttgttgatcttttgtatggtgttttgtgtctcaatttcattcagttcatctctgatttggttatttcttgtcttctgctagatttcgggttggtttgctcttatttttctggttcctctaggtgtgatgttaggttgttaatttgagatctttctaactttgaagcgggcatttagctctgtaaattttcctcttaacactgctttagctgtgttccagcaatcctggtatgttgtatctttattttcattagtttcaaagaatttcttgatttctaccttaatttctttgttgactcagaaagtcattcaggagcag

SEQ ID NO: 112448 - DNA, 634 bp, Homo sapiens
agttcccctttgtaaattttgtaaatttcagcatgagctcaattcaacaattacttcatcaccaaaaactggagtctcccattaaacagtgaacttgcttctattgacrttaaactctaaagtgaatcacttatatctaaaaataccttgttcaggttgtgtgtaataaatacttatttttgccaaagatacacagagcaaaaaacagaaaataatacctagggaggcttaaaaaacatgtaagctgaacatttggttaaatctcaacttttccttccttagattttttgtttctttgatattcttgattttaaaacttggtcaattcatgttctttccagtctattactgaaaatgttgttgaaaatgaagacagttaattttcctttgagtgcagccttggcagaattttttttgatgcttatggacactcttctatttattgtcatttttcaatagtttgcaactgaaattctgacctccttttgagttattaaattgctcaatttttctgaagtgaaagaattatatattacaagtgtaatgtcgatatgtgaatttctacaaagcctgcatgtctaaggacaggtgacctgggtaaagagtcaaattggtagaaccaacaaagaataat

SEQ ID NO: 112449 - DNA, 634 bp, Homo sapiens
agttcccctttgtaaattttgtaaatttcagcatgagctcaattcaacaattacttcatcaccaaaaactggagtctcccattaaacagtgaacttgcttctattgacattaaactctaaagtgaatcacttatatctaaaaataccttgttcaggttgtgtgtaataaatacttatttttgccaaagatacacagagcaaaaaacagaaaataatacctagggaggcttaaaaaacatgtaagctgaacatttggttaaatctcaacttttccttccttagattttttgtttctttgatattcttgattttaaaacttggtcaattcatgttctttccagtctattactgaaaatgttgttgaaaatgaagacagttaattttcctttgagtgcagccttggcagaattttttttgatgyttatggacactcttctatttattgtcatttttcaatagtttgcaactgaaattctgacctccttttgagttattaaattgctcaatttttctgaagtgaaagaattatatattacaagtgtaatgtcgatatgtgaatttctacaaagcctgcatgtctaaggacaggtgacctgggtaaagagtcaaattggtagaaccaacaaagaataat

SEQ ID NO: 112450 - DNA, 634 bp, Homo sapiens
agttcccctttgtaaattttgtaaatttcagcatgagctcaattcaacaattacttcatcaccaaaaactggagtctcccattaaacagtgaacttgcttctattgacattaaactctaaagtgaatcacttatatctaaaaataccttgttcaggttgtgtgtaataaatacttatttttgccaaagatacacagagcaaaaaacagaaaataatacctagggaggcttaaaaaacatgtaagctgaacatttggttaaatctcaacttttccttccttagattttttgtttctttgatattcttgattttaaaacttggtcaattcatgttctttccagtctattactgaaaatgttgttgaaaatgaagacagttaattttcctttgagtgcagccttggcagaattttttttgatgcttatggacactcttctatttattgtcatttttcaatagtttgcaactgaaattctgacctccttttgagttattaaattgctcaatttttctgaagtgaaagaattatatattacaagtgtaatgtcgatatgtgaatttctacaaagcctgcatgtctaaggamaggtgacctgggtaaagagtcaaattggtagaaccaacaaagaataat

SEQ ID NO: 112451 - DNA, 605 bp, Homo sapiens
tttggtgttgtgatctaagtttctggtcgctgcagctgtatctgcactaggaggcaccccatgcccagtaatgctgaagctattgcagactcttagaggtactaccttggtggtcttggataaaatccagaattctcaggattagcaggcagaagctcttgttctcttcccttactctctcccatatggagtctctctctctctctttctctgtgctaagctgcctggagctgggggtggggtgtgatataagcatctctgtggccaccactactgggaatgtgttgggtcagacctgaagctagcacagcactgggtcttacccaaagctcattgtaactactgcctggccaccacctatgtttgctcaaggtgtagggctcaacagtcagcaggtggcaaagcaaaccaggctggtgaccttcccttcagggtggcaagatcccccaggtcatagtcagatccagagatgctgctgtccaggagccagggcctggagtcagacaccttagaaatctacctgatgctctatyctactgcagctgagctggtgctgaaaccaccagacaaagtccttcccacccttccttcccctttccccaggc

SEQ ID NO: 112452 - DNA, 537 bp, Homo sapiens
tcaactatatttgtatcctatttctaattctcccaacaattatatacactggcaaaaactcttcagatgatatataaggaaaaggtcaaatatactaccaaattcatccagctttccaaagatgctcaaaatctttctgtgtctctcactccctcccttaacccacataccacatctgaaaaaaaatgatatggtgtaacgatgccagtattctaaatgcttgaagggcttatcacatgccctttccaagctgtgacagaagaatgtcccctggaccacggcatcctatcaatctcacctctgaaggtgacccagcctcatacttcactgaaacaaagaccattagacaccaacactcccaacttcttttatttcyactttaacatttctccatatagtaatcctcacttttctactccctgccatctcagaaaaggaattctctctcctcttttccacagttagcttctcaaatttgtacctttaattctacccctcccaaatattgcaagacttgctccactaattatttcctct

SEQ ID NO: 112453 - DNA, 519 bp, Homo sapiens
tctgtctagcacgggtgccagtgactctcccagagtgctccatgcagctggacccacagagtccctctgtgctgtcataccacccactgccttctgtgaatgagatattctgattagaatcctggtggatgctatttgagccagtgcccccacaactcctatgaaagccgaggaccacaggcccctgaagacaatcacaggtctctagactcacagctcatgaccgtcctctgcagacacagcttctccycggatggctgagggttgtcattggctgtgtccttccttgtgcatgacaacaggagacatagaaggtctgtaagcagccctgcaagccaggttctgagcaagccctcctgtgtggggccctcttacctggacataggtgtgtaaaccaaaaatgaaactctaagctccctaaccaactgaatgaactcctcctctcagccaagcacacaccaaaatcaacctgaaatacaatgcagcccatgatcggaacggatgattggatatgcctta

SEQ ID NO: 112454 - DNA, 685 bp, Homo sapiens
gtatcatccccaaatagtgaggtttcattccatgaagactatgcatgtatctcatttgggaaaacagcttttgcaggtgtaaattaaggagcttgaaacagggagatggtcttagattaatcaactgggacttaaatgcaaactcaagtgtcctaaaaaaaacaagaggtagagagagatttagcatagactgaagtggagaaggcagtgtgaacacagagacagagattgcagtgatgtgtccacatcccgggagagagaagccaccagaagctggaaragctaaatcagactgctccctagagcttcagaaggagccagaactgatgactccaagatcttagcccagtgaaactgatctggacttctgaactatgagagattccattcctgttgtgtgaagctaccacatttttgagaactttttacagtagcccgaggacactaacacaaatggggctccgggaaaatccagactaaaggtgttgtgttggtttgcaatctccttgcttaactttctgatactagacgtaaatagattggtgaaacattttgtgattgaaaaaatgtacatgaaacctacagtgtacagagaagcatctgttagttataagataaatattgataattttagttgaaaatgacatatgactgttaatatctcacataacattctgagttactc

SEQ ID NO: 112455 - DNA, 685 bp, Homo sapiens
gtatcatccccaaatagtgaggtttcattccatgaagactatgcatgtatctcatttgggaaaacagcttttgcaggtgtaaattaaggagcttgaaacagggagatggtcttagattaatcaactgggacttaaatgcaaactcaagtgtcctaaaaaaaacaagaggtagagagagatttagcatagactgaagtggagaaggcagtgtgaacacagagacagagattgcagtgatgtgtccacatcccgggagagagaagccaccagaagctggaagagctaaatcagactgmtccctagagcttcagaaggagccagaactgatgactccaagatcttagcccagtgaaactgatctggacttctgaactatgagagattccattcctgttgtgtgaagctaccacatttttgagaactttttacagtagcccgaggacactaacacaaatggggctccgggaaaatccagactaaaggtgttgtgttggtttgcaatctccttgcttaactttctgatactagacgtaaatagattggtgaaacattttgtgattgaaaaaatgtacatgaaacctacagtgtacagagaagcatctgttagttataagataaatattgataattttagttgaaaatgacatatgactgttaatatctcacataacattctgagttactc

SEQ ID NO: 112456 - DNA, 597 bp, Homo sapiens
cttttgcaggtgtaaattaaggagcttgaaacagggagatggtcttagattaatcaactgggacttaaatgcaaactcaagtgtcctaaaaaaaacaagaggtagagagagatttagcatagactgaagtggagaaggcagtgtgaacacagagacagagattgcagtgatgtgtccacatcccgggagagagaagccaccagaagctggaagagctaaatcagactgctccctagagcttcagaaggagccagaactgatgactccaagatcttagcccagtgaaactgatctggacttctgaactatgagagattccattcctgttgtktgaagctaccacatttttgagaactttttacagtagcccgaggacactaacacaaatggggctccgggaaaatccagactaaaggtgttgtgttggtttgcaatctccttgcttaactttctgatactagacgtaaatagattggtgaaacattttgtgattgaaaaaatgtacatgaaacctacagtgtacagagaagcatctgttagttataagataaatattgataattttagttgaaaatgacatatgactgttaatatctc

SEQ ID NO: 112457 - DNA, 685 bp, Homo sapiens
gtatcatccccaaatagtgaggtttcattccatgaagactatgcatgtatctcatttgggaaaacagcttttgcaggtgtaaattaaggagcttgaaacagggagatggtcttagattaatcaactgggacttaaatgcaaactcaagtgtcctaaaaaaaacaagaggtagagagagatttagcatagactgaagtggagaaggcagtgtgaacacagagacagagattgcagtgatgtgtccacatcccgggagagagaagccaccagaagctggaagagctaaatcagactgctccctagagcttcagaaggagccagaactgatgactccaagatcttagcccagtgaaactgatctggacttctgaactatgagagattccattcctgttgtgtgaagctaccacatttttgagaacttkttacagtagcccgaggacactaacacaaatggggctccgggaaaatccagactaaaggtgttgtgttggtttgcaatctccttgcttaactttctgatactagacgtaaatagattggtgaaacattttgtgattgaaaaaatgtacatgaaacctacagtgtacagagaagcatctgttagttataagataaatattgataattttagttgaaaatgacatatgactgttaatatctcacataacattctgagttactc

SEQ ID NO: 112458 - DNA, 685 bp, Homo sapiens
gtatcatccccaaatagtgaggtttcattccatgaagactatgcatgtatctcatttgggaaaacagcttttgcaggtgtaaattaaggagcttgaaacagggagatggtcttagattaatcaactgggacttaaatgcaaactcaagtgtcctaaaaaaaacaagaggtagagagagatttagcatagactgaagtggagaaggcagtgtgaacacagagacagagattgcagtgatgtgtccacatcccgggagagagaagccaccagaagctggaagagctaaatcagactgctccctagagcttcagaaggagccagaactgatgactccaagatcttagcccagtgaaactgatctggacttctgaactatgagagattccattcctgttgtgtgaagctaccacatttttgagaactttttacagtagcccgaggacactaacacaaatggggctccgggaaaatccagactaaaggtgttgtgttggtttgcaatctccttgcttaactttctgatactagaygtaaatagattggtgaaacattttgtgattgaaaaaatgtacatgaaacctacagtgtacagagaagcatctgttagttataagataaatattgataattttagttgaaaatgacatatgactgttaatatctcacataacattctgagttactc

SEQ ID NO: 112459 - DNA, 597 bp, Homo sapiens
tctctcatcttgtaagatggatatgaaagaacattttctgagaaatgaaattattaacacacctgcgaggtggatggaagagaaaaaaaagaataagcagcttgagttcttctccttgataagacaactcactaaaaacataaagagaaaaatacaagtttaaaacaattaaccagaagaagacgactctagagtttttaaattgttgataagattttaatttgctccaagttgaaaataattatattccttgtgttttaaggcacatgatgagcaattacatcacacatgatagtttcagcagtaaaatagtatccgttaacagctggaactcataaaagcatagcacaatgtgaagatggaatttgctaaaataaaccatctgctgaaaactactattctgcacatttaaaagtaaagtctaaatgttatttgtctcatttaataggtctgtgaaaaaatgcgctatttgaaaagtaggtgctaccttaattaattctttatattagatggctggttacagtaatgcacagtraggtgctacatagatatattgctaaattttctgcatatactatgtatttggcttaaattatt

SEQ ID NO: 112460 - DNA, 597 bp, Homo sapiens
accttaatttcacttgaaatctaatttcacactgccgtgcaacctaacatatttgtatgttagactctgggaattaggamatgaaaatttttgggaggccattcttttgcctacagcagacataatctatttacctgcagattaaagcgttctttatttttctgtttccctctcttaatttttttaaactaatatgaattgtagtaaagagaaagaaagaaaacaaagaaagaaaaagaaggaaggaaggaaataaagaaagaagaaagaaaagaaggaggaaatgagggaaggaagggagggagggaggaagggagaaaggcaggaagggagaaaaaagaaagcatgaacacaagaaagaaagaaggaaagaaagaaagagaaagagagagagaaagagagaaagaaagaaagaaagaaaggaaaggaggaaggaaaggaggaagagagaatggcaaaagggaggaagacaaagaaacaaagaaaataaagaggcaaaggaaggaaaaagaggaaaggaagtgagggaggaaggaagaaaaggagggcaggaggaagggagaaaaaagggaagaaagcaagaacgtgagaaagaaa

SEQ ID NO: 112461 - DNA, 597 bp, Homo sapiens
accttaatttcacttgaaatctaatttcacactgccgtgcaacctaacatatttgtatgttagactctgggaattaggaaatgaaaatttttgggaggccattcttttgcctacagcagacataatctatttacctgcagattaaagcgttctttatttttctgtytccctctcttaatttttttaaactaatatgaattgtagtaaagagaaagaaagaaaacaaagaaagaaaaagaaggaaggaaggaaataaagaaagaagaaagaaaagaaggaggaaatgagggaaggaagggagggagggaggaagggagaaaggcaggaagggagaaaaaagaaagcatgaacacaagaaagaaagaaggaaagaaagaaagagaaagagagagagaaagagagaaagaaagaaagaaagaaaggaaaggaggaaggaaaggaggaagagagaatggcaaaagggaggaagacaaagaaacaaagaaaataaagaggcaaaggaaggaaaaagaggaaaggaagtgagggaggaaggaagaaaaggagggcaggaggaagggagaaaaaagggaagaaagcaagaacgtgagaaagaaa

SEQ ID NO: 112462 - DNA, 597 bp, Homo sapiens
accttaatttcacttgaaatctaatttcacactgccgtgcaacctaacatatttgtatgttagactctgggaattaggaaatgaaaatttttgggaggccattcttttgcctacagcagacataatctatttacctgcagattaaagcgttctttatttttctgtttccctstcttaatttttttaaactaatatgaattgtagtaaagagaaagaaagaaaacaaagaaagaaaaagaaggaaggaaggaaataaagaaagaagaaagaaaagaaggaggaaatgagggaaggaagggagggagggaggaagggagaaaggcaggaagggagaaaaaagaaagcatgaacacaagaaagaaagaaggaaagaaagaaagagaaagagagagagaaagagagaaagaaagaaagaaagaaaggaaaggaggaaggaaaggaggaagagagaatggcaaaagggaggaagacaaagaaacaaagaaaataaagaggcaaaggaaggaaaaagaggaaaggaagtgagggaggaaggaagaaaaggagggcaggaggaagggagaaaaaagggaagaaagcaagaacgtgagaaagaaa

SEQ ID NO: 112463 - DNA, 597 bp, Homo sapiens
accttaatttcacttgaaatctaatttcacactgccgtgcaacctaacatatttgtatgttagactctgggaattaggaaatgaaaatttttgggaggccattcttttgcctacagcagacataatctatttacctgcagattaaagcgttctttatttttctgtttccctctcttaatttttttaaamtaatatgaattgtagtaaagagaaagaaagaaaacaaagaaagaaaaagaaggaaggaaggaaataaagaaagaagaaagaaaagaaggaggaaatgagggaaggaagggagggagggaggaagggagaaaggcaggaagggagaaaaaagaaagcatgaacacaagaaagaaagaaggaaagaaagaaagagaaagagagagagaaagagagaaagaaagaaagaaagaaaggaaaggaggaaggaaaggaggaagagagaatggcaaaagggaggaagacaaagaaacaaagaaaataaagaggcaaaggaaggaaaaagaggaaaggaagtgagggaggaaggaagaaaaggagggcaggaggaagggagaaaaaagggaagaaagcaagaacgtgagaaagaaa

SEQ ID NO: 112464 - DNA, 579 bp, Homo sapiens
gacaggatttgtaccttccaatatagttaaattcacacattagaccattttatgttgaaattatattaatttgtgtcmgcttatattcaatgactgttggctagatcattcttaagaaatgggaatacaggaagaatggacaattttacccaactgggaaaaaaaattctaccatcttctaattattctgacttcctcataaaaatgtgttggatgacacaatcagcttttgtttggtgttatttatagaatttctgcctccctacagatcaccccatcctgagatctgctgccttacacagtggaggctgttttctgagtgtcggataactctgttattaaataagtgcatattgagaatactcactccagatgcttagaggcatgttgagaaggacaaagatagtgcctcctgtcaggtcacttacatcagaacttgcaggaaacctgctttatacagcagttgacaggtgtggaaattgaagctcatggaaatgaaagttaatacactaaattttcaaggagttaatgaaaactgacatttctgctaaaaacagcatgttctccctgtgggatttt

SEQ ID NO: 112465 - DNA, 579 bp, Homo sapiens
gacaggatttgtaccttccaatatagttaaattcacacattagaccattttatgttgaaattatattaatttgtgtccgcttatattcaatgactgttggctagatcattcttaagaaatgggaatacaggaagaatggacaattttacccaactgggaaaaaaaattctaccatcttctaattattctgacttcctcataaaaatgtgttggatgacacaatcagcttttgtttggtgttatttatagaatttctgcctccctacagatcaccccatcctgagatctgctgccttacacagtggaggctgttttctgagtgtcggataactctgttattaaataagtgcatattgagaatactcactccagatgcttagaggcawgttgagaaggacaaagatagtgcctcctgtcaggtcacttacatcagaacttgcaggaaacctgctttatacagcagttgacaggtgtggaaattgaagctcatggaaatgaaagttaatacactaaattttcaaggagttaatgaaaactgacatttctgctaaaaacagcatgttctccctgtgggatttt

SEQ ID NO: 112466 - DNA, 579 bp, Homo sapiens
gacaggatttgtaccttccaatatagttaaattcacacattagaccattttatgttgaaattatattaatttgtgtccgcttatattcaatgactgttggctagatcattcttaagaaatgggaatacaggaagaatggacaattttacccaactgggaaaaaaaattctaccatcttctaattattctgacttcctcataaaaatgtgttggatgacacaatcagcttttgtttggtgttatttatagaatttctgcctccctacagatcaccccatcctgagatctgctgccttacacagtggaggctgttttctgagtgtcggataactctgttattaaataagtgcatattgagaatactcactccagatgcttagaggcatgttgagaaggacaaagatagtgcctcctgtcaggtcacttacatcagaacttgcaggaaacctgctttatacagcagttgacaggtgtggaaattgaagctcatggaaatgaaagttaatacrctaaattttcaaggagttaatgaaaactgacatttctgctaaaaacagcatgttctccctgtgggatttt

SEQ ID NO: 112467 - DNA, 626 bp, Homo sapiens
taatcatttttaagtatacatattttttttctgtaccatttaaataaaatatttttataactttcttgtgagttttgttcatgcaaactttggaatgacttctggtttttagctattagcactttgaattaaccatagaaataacaagggctaactctgttcttcaaagactttataaagacagtatttgcactttcaaatgcaaatatatctacattaaatctaaacagcataagcattgtgacagaatgtacctcatgttgattgttttctctgtaaggtgacttctagtaatgatttgacttaatcaccacttgtgtctggttcagatcataccctgccatttactagctgcaagaccttcagtagtacaggtttagtatccctaatttcaaaatctgaaactttttgattgctgatatggcactcaaaggaaatgctcattggagcatttcgggttttggaatacaatgcaartattccaaaatccaaaacacttctggtcccaagcatttcagagaaggggtagtcaacctgtaatcttttttcagctgtgaagtgggaacaatatctgtcttgtagggttgtgggtaatagtaataatgtttgtaaaacaccaattacag

SEQ ID NO: 112468 - DNA, 540 bp, Homo sapiens
ggactgcagtggtcacagggaaggttgttagatggggttgcacttggactaggatacagtacacctgaggccagacggatggagacatgcctgagatcatttgctttgtcagcagaacagagaccacaacccacaggttctgattataaagaagggctctccctgaaacatgatgtcaccctcttcttagatacccatttactccatggtattctgagaccctacagaagtcagtgcacagatattgactacctcttctctgwgcttagaattgcatttaagtggcagatcggctgaaaggaagaaacttccggatatgagcctcctgttattattgttttcatcctcctgtttttccttctgcttcaattctcttactctctgcatttctctctctctctgtaatcttaccactttctagtccccctagaactttctagaatgcttcctcaaatatttgaaagtccccctttttccttccatccttccctctcattctttttctccttcctttctcccttccttccttccctccctccc

SEQ ID NO: 112469 - DNA, 547 bp, Homo sapiens
cactaactctgctccctcctttcttgaaccaattagggcaccaacccagagacttgtaaatcatattttatctgcatcaactttgcttttttctctcttaccttgtttaagctgtgtctctccccattatgcatcrgtggctttaggctaaccttcatgggaatgtattcagaacataaaacatccagcagacctccttgtcagcaagggcttgtccaaatgcttgcaggggcttccccaccactagacaccctgtcctcacaacacccattcagctgttggctaactatgccttacagactctgttcttgacccattcccagatgcttctgaccagtccttttcattttatttgtatatttgtataatgcagtgaagcatatccttgctgggactgcagagcaaattggtggcatgccttctgaggttccaaggttgtcatgggcatgatagcaataccctactctaactaaaagtcagttctaaactcctcagggagctcctgagggtgcatgttcttcattcttttggatactcagcagacaac

SEQ ID NO: 112470 - DNA, 557 bp, Homo sapiens
tatgtaacttaaacatacagtggtggtcacaaacatgaacccacaaaaaaaaaaaatttgcagtaggtatcctcactcctttctctgattaactaaggatcagaagtttttgagcatcttatttggaaatcaaaggagagagggagtattcttaaacaagactaggtttaaggacccacttaatgaagaaccagctcactgatccaccwccaatacttcctcaaggaatttttcaaggtctcagctgacactgatgtgacttcttcatctttgcatctcctagagggcccagcacagcaatttgcctacagcaggcactttgaaatgccagctaaattgtccttgtaaatgcagtagaaggagaaaaagattaagaagaagtaggaaaaggaaaaaacaaaaggaaaggaggaataaagggagtacaacatggtgtttcagagcccatattccaaagtttctgatgttcaaatcccacactactatcttgctatcatggacaagcagtagacactctgaacctctgtttttttatcctacaatgagtgtaacgatac

SEQ ID NO: 112471 - DNA, 616 bp, Homo sapiens
tatatgcctcttacttaaaatcaatatagcaagtaggtgtattggagaaaatgagtagaaaatgtatgcctggaagtgagggaagagaaacatactcaccactaggagcttgtctgtggagagggatgcctctccaacccccatcccagaaccaccatcctccccacccagacctagtctccattatttcatccagccccaccatagtttcacagggagaaactcagaatggagttgagaattggaaaatggtggaggaccctctctttctggttcacttttttgggggattttaaattttgatcaaaggataatgcagccatctattctttttggtgggcatgtacatttgcagcataggatagaaagaaaacatatatacatgtacayacacacacacacacacacacacacaaacacacactcattcatcataaagaaaccatttggatgggactggccatagcacttatcattgtcatttctgccacttagcatgttttgcaacattttcttctccatccacctcttccctttgacattttcataaaactggaccaggggcatcagagtcaaagaaagcttagagtcagctgattattttcattttaaaaaa

SEQ ID NO: 112472 - DNA, 534 bp, Homo sapiens
aaccagttttatgcatttgtaaagaatttaacaaatggagatgttagagacaatttctatggcatttctatatrtcttggactaccttttcaaggatatatgcacagcaaagagcattagaggctagtctgtccctttgggtcagacagcagaattatttattgtccagtataataattacagagaacatctccatctctgaagacattccataataataaagtcttcaacctctcaccagaagaaaacttgtttccatgccaaggtaaagataatgcctatctttgaagaggaggatgaggaagttgccatcagcttctgtatgaatcagaatgtcctaagctcagtgttccttggctgtgaaactgtatgctcagcatacacctggatctactctgcattacccatggacttgggggacaaggagaatcaatgaaaatatggacctcatgttgcctattgtgccctgaacaataaactgtgtaaattcatttggattcctggtttactcatttgccaatgttatgaaagtgt

SEQ ID NO: 112473 - DNA, 534 bp, Homo sapiens
aaccagttttatgcatttgtaaagaatttaacaaatggagatgttagagacaatttctatggcatttctatatatcttggactaccttttcaaggatatatgcacagcaaagagcattagaggctagtctgtccctttgggtcagacagcagaattatttattgtccagtwtaataattacagagaacatctccatctctgaagacattccataataataaagtcttcaacctctcaccagaagaaaacttgtttccatgccaaggtaaagataatgcctatctttgaagaggaggatgaggaagttgccatcagcttctgtatgaatcagaatgtcctaagctcagtgttccttggctgtgaaactgtatgctcagcatacacctggatctactctgcattacccatggacttgggggacaaggagaatcaatgaaaatatggacctcatgttgcctattgtgccctgaacaataaactgtgtaaattcatttggattcctggtttactcatttgccaatgttatgaaagtgt

SEQ ID NO: 112474 - DNA, 534 bp, Homo sapiens
aaccagttttatgcatttgtaaagaatttaacaaatggagatgttagagacaatttctatggcatttctatatatcttggactaccttttcaaggatatatgcacagcaaagagcattagaggctagtctgtccctttgggtcagacagcagaattatttattgtccagtataataattacagagaacatctccatctctgaagacattccataataataaagtcttcaacctctcaccagaagaaaacttgtttccatgccaaggtaaagataatgcctatctttgaagaggaggatgaggaagttgccatcagcttctgtatgaatcagaatgtcctaagctcagtgttccttggctgtgaaactgtatgctcagcatmcacctggatctactctgcattacccatggacttgggggacaaggagaatcaatgaaaatatggacctcatgttgcctattgtgccctgaacaataaactgtgtaaattcatttggattcctggtttactcatttgccaatgttatgaaagtgt

SEQ ID NO: 112475 - DNA, 656 bp, Homo sapiens
aaaattactgtgtgccttttaaatgtcatatgagatcattgtctcacaagctcactctgtgctctaaggggacatatatttactacttataaagttacaatcayttcaaagtagatgctggctttttagaagaccaataagttgcaaaatattcattttattatcaaattgtaagttgtttctgcctagtagaaaggttaagacacataattatggctttattgtcttatggaacattaatcacttgtgcatccatctttgtgaccttattctggctttctattttccgatgaccacgtgtactttcgtctcttgtatcttttctgcactatctttgtcatcttgctggttccctcaatagtgagttaaatggatctttgacaggtgttcactatatacctgcatgacagttatgtttttaacttttcacaaattatgcttggatagagcaatttagtaagaatgcaacaagtctttgatgactcaactagctgactgactcttagaaggaactctgacagggcctcaggtggagaaaattaggtgggcaaaaggaagagaaaaggagaaaagtattgaaaaatatagtcttgttattgggcaatttgctgaagaagaaatttcctacaggagagcaggaaaacttgatgcccaca

SEQ ID NO: 112476 - DNA, 656 bp, Homo sapiens
aaaattactgtgtgccttttaaatgtcatatgagatcattgtctcacaagctcactctgtgctctaaggggacatatatttactacttataaagttacaatcacttcaaagtagatrctggctttttagaagaccaataagttgcaaaatattcattttattatcaaattgtaagttgtttctgcctagtagaaaggttaagacacataattatggctttattgtcttatggaacattaatcacttgtgcatccatctttgtgaccttattctggctttctattttccgatgaccacgtgtactttcgtctcttgtatcttttctgcactatctttgtcatcttgctggttccctcaatagtgagttaaatggatctttgacaggtgttcactatatacctgcatgacagttatgtttttaacttttcacaaattatgcttggatagagcaatttagtaagaatgcaacaagtctttgatgactcaactagctgactgactcttagaaggaactctgacagggcctcaggtggagaaaattaggtgggcaaaaggaagagaaaaggagaaaagtattgaaaaatatagtcttgttattgggcaatttgctgaagaagaaatttcctacaggagagcaggaaaacttgatgcccaca

SEQ ID NO: 112477 - DNA, 597 bp, Homo sapiens
taaatcattaagcctgacacgcgctcagggcccgcgctccgcgctgcaacttgcttcctgccattaacctacacaccctcttttgtaacaacctaatcttgcatacaaaggaagaaggaatataacttcgacctgcgctagatccaagccattcgctttcgcagtgggtaaasaaccttagtgtcaccgaatccacttccctccttaccgttgactccggataacctggagcttctcgggaagtccggaaagaattatttcttggctcaggagtggagagagggagaaaggagttcagaggcttttcagcaataagtaaaaggacctgaggttgcggacgattattacaccacaaaagcatccacagtgttgctttttttttttttaagaagttgcaataactgatgcttcttggagagcactctctagaaaatacaaattaacacaactaagttctagaaatgttgaccagatttaataatttgtccctcccctttgaagtgagtgcataaattgcagagcgaatgaatgggcgaaagaaagtaggggtggcttccaacagcagcagcagctttgctgatcttaacggcaagaccc

SEQ ID NO: 112478 - DNA, 597 bp, Homo sapiens
taaatcattaagcctgacacgcgctcagggcccgcgctccgcgctgcaacttgcttcctgccattaacctacacaccctcttttgtaacaacctaatcttgcatacaaaggaagaaggaatataacttcgacctgcgctagatccaagccattcgctttcgcagtgggtaaagaaccttagtgtcaccgaatccacttccctccttaccgttgactccggataacctggagcttctcgggaagtccggaaagaattatttcttggctcaggagtggagagagggagaaaggagttcagaggcttttcagcaataagtaaaaggacctgaggttgmggacgattattacaccacaaaagcatccacagtgttgctttttttttttttaagaagttgcaataactgatgcttcttggagagcactctctagaaaatacaaattaacacaactaagttctagaaatgttgaccagatttaataatttgtccctcccctttgaagtgagtgcataaattgcagagcgaatgaatgggcgaaagaaagtaggggtggcttccaacagcagcagcagctttgctgatcttaacggcaagaccc

SEQ ID NO: 112479 - DNA, 451 bp, Homo sapiens
aactaaattgagatttcatctccaaagagaaccagrtttctgctttctcttaatcagccataaggtctgtcaatactgggtcccatttcctcaaggcagtgatcaactgaagcagaggagtgagtgcctgccttagaaggcatgtgccctcccgtttgcccaatcctcacccgccccaaggtctccccaacactgagcattgcttgccttttgtcatcacccttgcattactgtttcttatggtggagagatatttatttggacccaagtctctaccagaagtgacgaaataaaagacagacccagaaggctgaatatgtcagaataaaagggagaaggcatatttctctgtggaagaaaataatattcctctgtgtttaagagactgggttctcacacctgatgtatttcattcttctatattcccacctagctctgcaggcatttattg

SEQ ID NO: 112480 - DNA, 541 bp, Homo sapiens
aggcagatttctaaatgtgagataattgctataaaattgtcagaaagttccaaagcagtctgaaacacagtagtgggttcaatcaatgattagtttcatttcttttcaaaggcatcactagattttccttatggctctggagttgttttcaaactaagacatctgaatcacctgaagtacttgatatggtaggaatatttctgtcccctcaaatttcatatgttgaaatcttaacttggtattaggtgttatacctcctataacaatggtattagggagtggtgttttgggaggtggggcttttgctcayaggggtggaacccttctgaatgttttttttttctttataaaagagacctccgagagctcctttgccccttccactatgcgaagacacagtgagaagccagcagtcttacagccaggaagagaaccctaaccagaaccctgatctcagaattctggcctccagagctgtgaaaaataaatttgtactatttataagccaccccatctctgctgatttgctattgcagcctga

SEQ ID NO: 112481 - DNA, 511 bp, Homo sapiens
ctgaaacttatcttgcaatagaatgttacttgtttatgggattccaattgcaatttgagttattttttgacagagcactgcattaatgtcaacacaaaaggccacggtgaaaaatgtcttaatttaattttcttttgtgagttaattctgtaattgcctccgaaccactcagcttggtaaagtgagggacatgaagtacttgctgggggtgctggcagggaaggacattttgtaagcatttttaggcattgatggctgtacacggaacactgtattgccaacaggttatttaagacagcgcaattaaaaagtaattagagtaactaaagcatcgagggttttagatctgtgacaactgcaaaaaaacataaatgggatattataagataagaaaatgattgcamgattatgtgaatttttttctttttttctttttaaacacatctatgtatcaaaagaagtttctagcagggtttgcagccaagctgcttcgtggttattttgtgcttca

SEQ ID NO: 112482 - DNA, 639 bp, Homo sapiens
attgccgctgccaatcgggctagaggctcgccattgttcctgagcggmtaagtgcctgggttcctcctaatcgagctgaaacaagttgctggggttccacggttctctcccatgacccacggcttctaatagagcaataacactcactgtgtggcccaaggttccattccttggaatctgtgaggccaagaaccccaagtcagagaacaaaaggcttgctgccatcttgggagtggcccgccaccatcttgggagtggcctgccaccatcttgggagctctaagaacaaagacctgcccgtagcagaatctttatgaggattctatgagattacagctttgaagtacttggaacatagtagatacttaataaatgacagttataatgataatggtcacgaagaagggatccaggaagtaccttgggttccataaatttggtgtaacagaggaaccattgtcaagtcacacaagttaatgcttttcttatcttgcccaaaatgggcctgtccaacccccgctgttctcacaaatcagtgtagagaaatggagtaccggacagggaaggatagagagacaggttaagtgttcctcacagtaaaatgcctcaggggcagtagatatttgcatccaagggaat

SEQ ID NO: 112483 - DNA, 611 bp, Homo sapiens
aaacaaaggcatttatgaaagcatataaaattgatgtgaacatagaacgttagaccattagtgtgtttaccgtaaaagtctgctgtgtctaagtacatacgcttcagttatagctacattgattaagtttttgtttaatctgctatttccagcagcaagttccttccctgtttcatgccaagttccttttaggatttccatgtgacttgcattagcatttttggcttcagaagtacctctaatgaaccatttatagttttttttttaaagaatgctcaaaaaattaggctgtgacagttatccaaaacataatttgttatgctgtttaattrtttaatggctgtttaaaaatttaaacatggtccctggttgattggttgatataataccattaaggtagattagaagcgccttcaagactataattatctgctgggtccttcatggttcagatttataaattaggttgtgttctaataaaatgttaattcaaaaatgtcagcttcagtgttttaaaaaccagttctttaaaatgttgctaaacacctacatctttagagaaataattactaagctaaggaaatggagtgaaattttctgttaaagtgaat

SEQ ID NO: 112484 - DNA, 476 bp, Homo sapiens
ctgaagttctagagccacagaaagaggtaagagaaagtacgatagaggatagagtggctcaagaggaaaaggaaaacacagtgtgactgtgggacaaaagcaaatctctgttacccttggtcttgagcactccttaagaggcgttcagagagaggaaaacccaagaaggcctaggatgctgctactctggcaggtgggggtgtgcaggcctgactattaggtagttgatataattatgatctcagctatgctaactggccagagaagcctggacatccatgttagtcttgcaagtcctccttttaaaagaaaacaagaagtgtattagtcagttctcatgctgttaraaaagactgcccaagactgggtaatgtataaaggatagaggtttaattgactcacagtttcacatggcagagaacttaacttacaatcagtggaaggggaagcaaacaccttcttcttcacataatggc

SEQ ID NO: 112485 - DNA, 638 bp, Homo sapiens
gggtattgtcgagctcaactattaaggaacaatgtacattttaattaagttgtggaatttcagaccctgaggaaaatctgtatgtttgagaaagaaatatggtgtttcattaaaaacatatatttatttgttgttattggcaatgcttggtttgtaagtcatttttgcaagtaaaccttggggttgaagggaggaagggagaggaagcaagtcctctgaggggaatattccacagatgattgacgtactttctaaaatgaatgttaatggaaagtaaaaagtcagaacagcatcacagaagacagcaggcatggtaaagagtacccaataaattactatctggtattctctaagagaatggaaatttacatggcagaagaagaaaaatttatctgaattcatcctctgtatgaattcaactaaaagctacaaattttatttttccttaagacaataaaagaaaaatgattatctaatcaaacaggaagctacagaattgctttggcattgaaawttaaggatgagtttagattagtcaaagcaaatcaaatagaaatttccaaaatgtgatatatatagaaggctaaatttctggaagaatagcttagacagataccagcatatttgatcatagatgc

SEQ ID NO: 112486 - DNA, 543 bp, Homo sapiens
agtgtatgaattcaataggagaaatgatcagctaaagagagtactagtggactggaagatagaagtgaagaaatcataaattgtaggacagagagagaatgagatggaaaacagcagagactagcaaaaagagcagtcagagtgataaggttcaacttaaatcttgcaagagttccaaaataagaaaataaagaaaataggaaagaggcagtattaaaatagataatggctaagaaatatccttagttaatgaaagaaatcaattttcaggttaaagaagtgtaataaatctcaagtacaatgaataaaagagaaaaaacaaaaatccccaatccaaaagtctaaagtcaaataaaaaaaacaatgaaaatggaaaaatcaagagaaatagaaaatccaaagtggaaaataaaaagatrgagataaatccaaatatgtccattattatagacagtacaaactagttaagaggcaaagattgtcaaactgagaaagtccagttatacattatttaaaagagacacatctaaaacattaagacgt

SEQ ID NO: 112487 - DNA, 564 bp, Homo sapiens
tttaaatggtttcttgatggacatttttctcctcgaaggacatttatatattccatgctaccacctgaacatctattttaactttcatataaataagagtatttttctaagtgagtgaaaggagaggaatraggagttatttttcatgaccagccaagaatagaaccaaatgttctgttctcatctatgtcatctcctgattttgcttcttctttaaaatgtctacaaagaattcagccttttcaggaagaaccagcctgatgtggcagaaagaacacaccatcatccagatgtttgcctttgcaggaagaaccacacccttctggggttggtttattaattgaagaaataagaattagacaaaatcaacatttgatttctcagcattttcctgggtgctaaagctatgccaccagggatttcaggtggcatatgagcagggcatcaaatgacagtgaagtagacactgaaagaattacttcctttgcaactctctttccgtcctttgatactataggggagaaagtctcaatttggtgctggtgggcctctcatatgtttcta

SEQ ID NO: 112488 - DNA, 573 bp, Homo sapiens
caccacccaaaacatttggaagccaatccaatctggtagttattcccatttgaaaataggagcatttttagtcttaaagttcttgcaaatcaagagcagcccactccaccttgaatccccagcagggacagttaacttagagtgtccttcaccagggccacatcttacaggcatggcaataaccatccacctacctttccagcagacagagcacccacagaggagccagtggtcacagctccccctgctgcccatgccaaacacgggagcagagatgggagcacccagactgasggccccccagacagcacctccacctgcctgccaccggagcctgacagccttctggggtgcagcagtagccagagagcagcctctctgggtaagtcctcctgaccccacttctgtgctaggtagggccgagggggcactggggtgtgaactggaacacaaggccttttcttcccagaccccctccgggtcattgcccgcactccatggggagccgtgcatagccagaggtgagcagggtgcctggcccacctcaatgtgaacatgagggatggctggttg

SEQ ID NO: 112489 - DNA, 537 bp, Homo sapiens
gctcaaactctccattccactgctaaaatggccattctcaaggttgcttcaagaacttgctccccccygcactgggccaggcagacacaactggcattctttggggatgacttagctctgagaaagaatagcaactcctttcccttcacacttgctttcctttctcctcgtcctctccctcccctgctttttgttctcctgcaaacagtctacttccttgccgtgattactatcttttcctgacagggttcaataaggctggtccaaaagaagaaaccaccactcagcttccgaaactcttcctgaccgagccctgagaggggcgataaagtgcgagtctggaggggtggaggctggagaaaaactatgaggctccaacctctggttccgccataccaaccccatcatgtcactcatttctcgagagcaaggaaagccggacggtgggaaagtgggtgtttactaaaggaacacagcaggcatgaagagaaccagactttgaccttgggccaccagaggaagagtctgaaatccttg

SEQ ID NO: 112490 - DNA, 537 bp, Homo sapiens
gctcaaactctccattccactgctaaaatggccattctcaaggttgcttcaagaacttgctcccccctgcactgggccaggcagacacaactggcattctttggggatgacttagctctgagaaagaatagcaactcctttcccttcacacttgctttcctttctcctcgtcctctccctcccctgctttttgttctcctgcaaacagtctacttccttgccgtgattactatcttttcctgacagggttcaataaggctggtccaaaagaagaaaccaccactcagcttccgaaactcttcctgaccgagccctgagaggggcgataaagtgcgagtctggaggggtggaggctggagaaaaactatgaggctccawcctctggttccgccataccaaccccatcatgtcactcatttctcgagagcaaggaaagccggacggtgggaaagtgggtgtttactaaaggaacacagcaggcatgaagagaaccagactttgaccttgggccaccagaggaagagtctgaaatccttg

SEQ ID NO: 112491 - DNA, 566 bp, Homo sapiens
gttaatttgacacagtgtcggatgaatcctagtagacaaaaagagaataccactttaattgctgacatgttagaagttggartgctggtactaataaattttctgtacaaatgtcctgtgtggcccatgaaaagggaagtggctcatcaagactacagtagattttccagacttgaataaagtagtcctggccgggtgcagtggctcacagttgcaattccagcactttgggaggccaaggcgggtggatcacctgaggtcaggagttcaagaccagcctggccaacatggtgaaaccctgccgctactaaaaatacaaaattagctgggcatggtggattgtgcctgtagtcccagctactcaggaggctgaggcagtagaatcgtttgaacccgggaggcagaaattgcagtgagccgagattgcaccaactgcactccagcctgggcaacagagcaaaactccatttcaaaaacaaacaaaaaaaaataagctgggcatggtggtgcatgtcagtagtcccagctactctatggaggctgggggcaggagcttcacttgaacc

SEQ ID NO: 112492 - DNA, 598 bp, Homo sapiens
gtggtggggacttggagaatctttatgtctagctgagggattgtgaatacaccaatcagcactctgtatctagctcaaggtttgtaaatgcaccaatcagcactctgtgtctagctcaaggtttgtggttgcaccaatcggcactctgtatctagctaatctggtggggacttggagaatctctgtgtctagctctgggtttgtaaatacaccaatcagcactctgtatctagctaatctagtgggaacttggagaacttttgtgtctagctcagggattgtaaacgcaccaatcagcaccctgtcaaaacggaccaatcagctctctgtaaaacagaccaattggctctctgtaaaatggaccaatcagcaggatgtgggtggggccagataagaataaaagcaggctgccagaagcaagagtggcaactcstccccttgcttgttgtgggagcgttgttctttcactctttgcgctaaatcttgctgctgctttttctttgggtcctcactgcctttatgtgctgtaacactcaccacgaagatctgaaacttcactcctgagtccgcgagaccacaaacccaccagaaggaagaa

SEQ ID NO: 112493 - DNA, 598 bp, Homo sapiens
gtggtggggacttggagaatctttatgtctagctgagggattgtgaatacaccaatcagcactctgtatctagctcaaggtttgtaaatgcaccaatcagcactctgtgtctagctcaaggtttgtggttgcaccaatcggcactctgtatctagctaatctggtggggacttggagaatctctgtgtctagctctgggtttgtaaatacaccaatcagcactctgtatctagctaatctagtgggaacttggagaacttttgtgtctagctcagggattgtaaacgcaccaatcagcaccctgtcaaaacggaccaatcagctctctgtaaaacagaccaattggctctctgtaaaatggaccaatcagcaggatgtgggtggggccagataagaataaaagcaggctgccagaagcaagagtggcaactcctccccttgcttgttgtgggagcgttgttctttcactctttgcgctaaatcttgctgctgctttttytttgggtcctcactgcctttatgtgctgtaacactcaccacgaagatctgaaacttcactcctgagtccgcgagaccacaaacccaccagaaggaagaa

SEQ ID NO: 112494 - DNA, 576 bp, Homo sapiens
ctctctctctctcaatgtatctatcattatctctcaatctctactttcccaggagtccagactgcagaagcacatacaacataagttcagtggttttaaaatatgtccacaaattcttcaatacccatccctttaaatgtgaagcccaattcctcgtcctgtcagcatggaccagatttagtgactcacttctaacaaataaaatatggtagaaatgattaggtcatgagtggcattgtggcattgtggcctcgtccctgctctctcttggatcactcactctgggggaagcctataggctttgctcacaatgtgattacttaagatacctcaggagccaagcattgtatttgaaaacggtctagcaaagaagataattaacagatgaaaagtaggaggttgaatttaaaaagaggttacatacttaatggttccaactctatgacattctggcaacggcaaaactatggatacagtataaagatcagtggttgccaggtgttatgggagaaggaggtagagcacagaggatttttarggcagtgaaactattctgtgtgatacagtaatggtaga

SEQ ID NO: 112495 - DNA, 616 bp, Homo sapiens
caccattaaattatgctattgatgttacactaaaagccyagactttaccactatgcaatatatccatggaacaaaattgcatttgtaccccttagatttataggaataaaaaaagaacagaacaaaagaatttaaaaaagaataaggagccagccaagcctgaaagggaaagcattaagtcataagactatgcaaaagccttgagatcagaaactacagtttcaattttcatggaatctagcttatcttagtccaagaaaatcactctatagaatgttaccatacaactaaacagcttacttctttgtaaataacacatggtaaaccagtgggaaatggcatacaactaacgatggatcctgcggtattgatccatgatgagggatgaatgaatgaacatatacctagtgcctactaaatgctttgcactgataaaggttcttttatattctgctcactttgaacaaatgcatccattatttatttaacaaatttgtattgagctcctctacatacttggtatggtacttggcattaaattcaattatgactccattcagtacttcttgcagggtgcgtatgctcaattaagggtgcacatgctcaattaagacaa

SEQ ID NO: 112496 - DNA, 545 bp, Homo sapiens
tctactttgcctactttattgctggacttgcaaccagcttctcttactaaaaaaaaaaaattctgcagtaatcatgtaagaacaaaggggggaaaaaatcactctaaactacgacagcagaaatatgcccagacatatacatactccaaagcaaaggaagttctgtactgtttcaattactaatcatttaacacaacaaattccaaagaaaacacaacctacatattgaatatattctttagttatgggaagatttaggacaaactctgtaagctaaataacttgaaagtgaactttttgtatgaccttttctttaaaatatttattattttaatgtagtctacatgtagactcctaatatttatttataataaatgtactataggagcataaatcctgatttatttattttaatttacaaatacatcaatctgattaatggagtcatttttctgtcctrtcacattaaattacatccatagccaaacccctaaagtaaattataggcttattcagggaacatcctgtcaagaaactatttggca

SEQ ID NO: 112497 - DNA, 576 bp, Homo sapiens
ttgaggtggaagggagcctccttctggtcaatcacatagaagcgaattttgtttttcactgaaagttctactttgcctactttattgctggacttgcaaccagcttctcttactaaaaaaaaaaaattctgcagtaatcatgtaagaacaaaggggggaaaaaatcactctaaactacgacagcagaaatatgcccagacatatacatactccaaagcaaaggaagttctgtactgtttcaattactaatcatttaacacaacaaattccaaagaaaacacaacctacatattgaatatattctttagttatgggaagatttaggacaaactctgtaagctaaataacttgaaagtgaactttttgtatgaccttttctttaaaatatttattattttaatgtagtctacatgtagactcctaatatttatttataataaatgtactataggagcataaatcctgatttatttattttaatttacaaatacatcaatctgattaatggagtcatttttctgtcctatcacattaaattacatccatagycaaacccctaaagtaaattataggctt

SEQ ID NO: 112498 - DNA, 576 bp, Homo sapiens
ttgaggtggaagggagcctccttctggtcaatcacatagaagcgaattttgtttttcactgaaagttctactttgcctactttattgctggacttgcaaccagcttctcttactaaaaaaaaaaaattctgcagtaatcatgtaagaacaaaggggggaaaaaatcactctaaactacgacagcagaaatatgcccagacatatacatactccaaagcaaaggaagttctgtactgtttcaattactaatcatttaacacaacaaattccaaagaaaacacaacctacatattgaatatattctttagttatgggaagatttaggacaaactctgtaagctaaataacttgaaagtgaactttttgtatgaccttttctttaaaatatttattattttaatgtagtctacatgtagactcctaatatttatttataataaatgtactataggagcataaatcctgatttatttattttaatttacaaatacatcaatctgattaatggagtcatttttctgtcctatcacattaaattacatccatagccaaacmcctaaagtaaattataggctt

SEQ ID NO: 112499 - DNA, 617 bp, Homo sapiens
gagaaacctgtaagatgtttccccaacaagggaagagtaagtaaggctttgtgtggtttctaatctctgtagtttttctgataaacagcacaattgttaaagaggagtgggatgagttagtgtcactcagcagtggcaaggtgctacccagggaagaagatgggaagaaggagaaggagtggtgctcttgatctgagaggcagcagacaatctgagaccagttctgggattcacccagggcatgggaaatgtgcaggcatgaacagtgggaaggactgcaactgccacaaataagacgattctgtagtgaccccctgctgaggacagcccagaggaccctccctgtgccttggtttagaaaaagggactcagccttctgctctrccactcacacgaattccctagtcacctcctgcagcacaccccatcgttatctctcctggagaatatgcttcttcccatcaacacctaacagggagggaaggagttgtacatcacagctgtagctctacctgtcaaaggatgagaaagaaagtccaggactttagggccaaactcaggacatttgtgtaccccaaaccaagggcagagaggagtgaaaaccatgattatactct

SEQ ID NO: 112500 - DNA, 675 bp, Homo sapiens
ggtgtgagtagtgaggggccacacccagaattgcataagatgcagggaatgatgctggagcctctgtggttctttggatcaacatctagggtcaccattccttgggatgagcctggtcctagctcacaccttcatggcttagcgagtctgacacagaaatgggaccacaaagttctctagtgtgaagggacaaaggatgtatctctgtgatccaccatttgccaagtctgaccagcgtggaatcacataaagcaggtgtcaccctgggaaagccccgcagggtttggccgttccttacaaagtaggggagggggccagattatgaacccacccccaaagagcagacctaaagcttataggggatggaggtgggaaatggtagaaagcaaaccacacctacttcataaccaaccygaggcagagcacctcctatgcgggatctgggaacaatctcccagtctctgtctgcctcctgggtgaatgaacagagaagtcttggctgaaacaggtcagaccatgtcactcaagactgagcaggtccggggcattgggtatcccagtccttgaggacacaggtgaggtccaggagttgggtctgacttagcataaggataactcagaactgccccagcacaggcctgggcctgactcagcacctcctgggcctctatgctg

SEQ ID NO: 112501 - DNA, 622 bp, Homo sapiens
tttccccagcggtctgcatttttttccaatggtattcccccttggaaacaacagtaccagctgacagtgccccttcctcagaaatcagggatccagccaatgggagcccttttctgaactcagaatcactagccaagtttcagtttcatggggcccctcctttaactttctaagttttagtaattctaatatcttccctttagtccctaatcctaggactggtagtagcgtgtttagttgctacctttgagataaccggtttcgacaaacaactgcacgccagcctcggcaacagaatgagactccatctgggggagaaaaagaagatagagacaggatgaattatgtattttatgggacttaatatgtttaaagtatcctcgtttcaacatgcaatcagattaaaataaaaaaccatgaatggsaaattttacattctctttttaagtcttcaaaacccagtgagcatttcaaaaccctgtaagtcttcgacacccagtgagtatttcatacacgcagtacatctgaatggggactcgacacacttcaggtgcttaatgtgtccagtagttgccatattggactgcacagcacagctctaaagcctgactacccaggttca

SEQ ID NO: 112502 - DNA, 608 bp, Homo sapiens
ggaaggcaagcggtgtacttgccaatcccctaccaagctggtatctcctggttttcttctttcctgctcagctgcttcagccagaggaaggccgttgccacaggcgtctgtcccctaggtcatcaccagggagctccctagtatcactaggtgtttgtccctgcagtgtcctgtgtccctgtttagatcccgccagggggtgatctggctccttctggactgcccttgaaaattccagtcacactgacacaacaaatatttactgagcatcactctctagcaaggctctgggctgggcaaaccctcaacctccaggagcttaatatctcagtggcatctccatgtggtagaagatgagagataagaaaaacaaaaacataaacaaaaaatcttaaccactggcctgttcctaaagaggtctaatggtaagctggarccagcactcatgggcttgcaagaatcagctgaaaaactttcaagaatttcgtgacttagttgtgaagccatcggtaggttaagattggtcatggtgagaatatctgcatggagaaaatcagcaaagactagaatcaagctccctcacaccatcaagtttaccagcacaccac

SEQ ID NO: 112503 - DNA, 587 bp, Homo sapiens
tctgttagttcaacacacgactttttagggttgtggggtacccctttaccttaagtcttgaaaagtttcgagaagcaaatggatagagaccattgtttccctctacttaaacttcagagataatagaacatastagttaaaagcatgaatcctagggtcacactgtgtgggttcaaatcccaactttgccacttgccagctatgtgaccttggaaaaattacttactatctttatgcctcaatttcctcacctatagaaagagccaacaataggctgtgtcttatagggttgttgtaaatgaaggaaagacttagaattgtgcctggcacattaaaaaaatattgtatatttaagagtttattgaataaaaatagaacaagtgcagttatgagcacctttcgggttgctgtccagcccataactcttcatttctgagaaagtgactctcatacaccagaatgatccttagcagccatgctagtatcatgtgatcctccctggttgcagctcatgggatcaggcatcagctttagaacaaagttgggccaatcaggttctttctcacaggacaaagagacattagcta

SEQ ID NO: 112504 - DNA, 569 bp, Homo sapiens
ataggataggtgtgagtgctgaggaaaattaaacccattgtcaatgagatataaatgtaaaaaaaaaattgtttttgttatttcaattactttagtctctgaggaaatcccagaagccactcarcagtgcagcacggtggtttctatattaaaatggaagctggaagccagttgtccttcctgggatcagagctactccacattttccagcaccttctgcaggtaaaatggagccatgtgaccgagtctggccaattatccattaaacctcacatgaagttctcctggcttgtctctctctttttcatttcctaggaggatgccgagtatgtggtagagtactccaagtctttgcagattacaaagtcaccagttgtaccaacactgggtatttgaatcaccatgtagaaatgcaccttctgaacatccagtaggtctatgatataagaaacagatagacccttactgtgttaagccactgaaatttggggctgtttgttacatcagctagtataatttattcttgctaattcaccagagtagacctatgagaaacttgagtgcaaatc

SEQ ID NO: 112505 - DNA, 659 bp, Homo sapiens
ataatctagtttatatctacacaaagtattattgacattttgataaaaattaggttaaacctgttcatccatttggggagtattgacatttttatgttgagtctttcaacccatatacatgatatgtcttgccatttgtttagawcttcttttacttttttcatctgtgttttacagttttcagcattaaagtcctgtacatattttgtcagatttataattaatcatttaaattattctcaagtaattgtaaatggtattgtatgtttagttttggtgactatctttttattattagcatacagaaatataattgagttttgtaagtggatcttgtatcctgcaactttgccaaatttacttattacctcttttcctgccttattgtatgggctagaactaccagcactatgttaaataagacaggggagagtgaaaatctttgactttttcccaatcagagaggaaagtatttagtcattcacagttaagtataatattaagtatagattttttgcacattatcaattgatgtaatttcctctatttctaattttataaaagtgatttttaaaatcagaaatgagtgttgaatttagtcaaatactttttacacattgactgatataatcatataaatttacttctttcacttctta

SEQ ID NO: 112506 - DNA, 592 bp, Homo sapiens
gtttatatctacacaaagtattattgacattttgataaaaattaggttaaacctgttcatccatttggggagtattgacatttttatgttgagtctttcaacccatatacatgatatgtcttgccatttgtttagaacttcttttacttttttcatctgtgttttacagttttcagcattaaaktcctgtacatattttgtcagatttataattaatcatttaaattattctcaagtaattgtaaatggtattgtatgtttagttttggtgactatctttttattattagcatacagaaatataattgagttttgtaagtggatcttgtatcctgcaactttgccaaatttacttattacctcttttcctgccttattgtatgggctagaactaccagcactatgttaaataagacaggggagagtgaaaatctttgactttttcccaatcagagaggaaagtatttagtcattcacagttaagtataatattaagtatagattttttgcacattatcaattgatgtaatttcctctatttctaattttataaaagtgatttttaaaatcagaaatgagtgttgaatttagt

SEQ ID NO: 112507 - DNA, 571 bp, Homo sapiens
tctttttcagcaattaattcacaaaataaaaacacattaactttttatttaaaaactcattgaattattaggattgaaaacatcttatctggtacaaatttccatccaagtttgaattcttactaacctttcttaagaagttattgaaagaagactttttaggacgttaggtatagtcatcacaaacatttcaaataaatcaaaaaaaaaaggaggaaaaagaaaacagaaataaactactcttcataagcaactgtagtatatgttacacrtatgtatttaaaacacacacgtgggctcagtaggaacctcattttctgtcacttgctccaagttatattccaggtaattggtcagagggattaaaagtgctgggagacagtgagtgtttaatcgcctcacacctgcctttctgtaaaactgcaacctattcctgttctgtaacctctaaaactctccaccagcaatttactgatgcagccaattagacaaaggaggcaagatttcggaagccctttcagagggatcagtcattcttgggcctacaacacaatgagcccgactgctgagc

SEQ ID NO: 112508 - DNA, 528 bp, Homo sapiens
gttacttctaaaggacaggtttcatcccattgggatttccactggcaaaactcccattgttaaaacggatcctttgacaatgtctagagttcaaaagtagcatagtagttagtgtgatggatgaaaattgcacctatttaaattgagatatatttagagagaatcgcaaatgatcattagtaaacatgcaggattaacaactactcaataatgatgtttctttacttacattttcatttttaataatatcttgatcctcctggtcttcttgctatgttttggcctgtttattaaaaygttacctataaaatgcttaagtcccaaagaatttcagcaggtattatatcaagacccttaattaattttttttttttccagatctgaacactgaggttcctaggtgacagataatgctcctggccaacataggatctcatttgaagatgacagaggaactattcgtggataggccattcctttctgctgtaagaatcagtgagcaaaggaaagagattcatgtgccatttc

SEQ ID NO: 112509 - DNA, 404 bp, Homo sapiens
aatatgtgctatggggaacaccttgaaggggtaaccaatgtgcctggggaccagtaagtatgaagcaagaaggtttaatacattgcagaaaattcctagagctctagggtctttagcatggatgcatcatggggcagggggtttgtgtggtgtgggaggtggacagatgggagctggtgctgccttgcatggygggaaggaattttaaatttttgtcctgtcagtgatggacagtcactgaggaggtctagggagagggcaacttggtaaatttttgctttttacttccacaggaagttggaagatgacttgcagagggaaatactagaagtcaagaggacatttatgacactcttacaatgatccatgtgagacaggatgtcagagcagtggctggagaagaa

SEQ ID NO: 112510 - DNA, 579 bp, Homo sapiens
agtaagtatgaagcaagaaggtttaatacattgcagaaaattcctagagctctagggtctttagcatggatgcatcatggggcagggggtttgtgtggtgtgggaggtggacagatgggagctggtgctgccttgcatggtgggaaggaattttaaatttttgtcctgtcagtgatggacagtcactgaggaggtctagggagagggcaacttggtaaatttttgctttttacttccacaggaagttggaagatgacttgcagagggaaatactagaagtcaagaggacatttatgacacycttacaatgatccatgtgagacaggatgtcagagcagtggctggagaagaaagatgagggaatagatggggacctgtttaaggaatagaactggcaggatttgaggagcaactgtgcgtggccagtgattaacaaaaactagggtagttaaaatatctgtgtcctaaaaagtcacttagttggtaattatcattcaaattatactagcttgagtaccattttaatatttagactccaaattcaagtaatagttccatgctttctgcttcaaatgctac

SEQ ID NO: 112511 - DNA, 579 bp, Homo sapiens
agtaagtatgaagcaagaaggtttaatacattgcagaaaattcctagagctctagggtctttagcatggatgcatcatggggcagggggtttgtgtggtgtgggaggtggacagatgggagctggtgctgccttgcatggtgggaaggaattttaaatttttgtcctgtcagtgatggacagtcactgaggaggtctagggagagggcaacttggtaaatttttgctttttacttccacaggaagttggaagatgacttgcagagggaaatactagaagtcaagaggacatttatgacactcttacaatgatccatgtgagacaggatgtcagagcagtggctggagaagaaagatgagggaatagatggggacctgtttarggaatagaactggcaggatttgaggagcaactgtgcgtggccagtgattaacaaaaactagggtagttaaaatatctgtgtcctaaaaagtcacttagttggtaattatcattcaaattatactagcttgagtaccattttaatatttagactccaaattcaagtaatagttccatgctttctgcttcaaatgctac

SEQ ID NO: 112512 - DNA, 641 bp, Homo sapiens
aaacttttttccctctatatgcttcagtttggataatttctaatgttatgccttcaagtttattgatcttttcttctatagtatctaaactactcttaaacccattcaattaattttttcatttcagataatgcatttttcagtgtagaagttccamttgtattatttttatatgtgtcatctctgtcctcattatattcatattttcctttaaatttttttttatttttttgagatggagtcttgctctgtcacccaggctggagtgcagtggtgcaatcttggttcactacaacctccgcctcctgggttcaagcgattctcctgtctcggcctcccaagtagctgggattacaggtgtgcaccaccatgcccagataatttttgtatttttagtagagactgggtttcgtcatattgaccaggctggtcttgcactcctgacttcaggtgatccgcctgcctcagcctcccaaagtgctgggattacaggtgtgagccactgtgcctggcctcctttgaatttttgagtatattttaaataggtgtttgaaagtccttatctgtgaatttcattattgctgtcatttcttggtctttttctattgattcatttgccctgtactttttcctgcttcttc

SEQ ID NO: 112513 - DNA, 566 bp, Homo sapiens
cattcactgaatgggaataaagagcagaggtctgataaaaaggaaaaggcattatacatacagacacatatagaggtggaagaatgaccagaacaaacatataaactgaatttaaagaagttcccrtcattgactttatgagaaatgtgcttaaaactgatatatatgtttggttttacctctggaagaaaacagacacagatgaaaagtcattcaggaaacagagacacttaagtatgtcatcaagtcaaaaacaaaactacttggtaaaataacaatttaagtagttacattatgtggtaaagtaggctaaagacatttttattatattataatatatggaaccttgagagtaaaaaccatgcttccccatgaacacaatggacagaatgttcagcatatactgtagtcatatcagattctcacttaacatctactctaacttctacaacttctacttgtagtggagtgagagaatatacacgaatatgtgtgagtgaatgctaaaacaatgatacctacaatttcccacaaccattctacttgtttattacagacaataaaca

SEQ ID NO: 112514 - DNA, 613 bp, Homo sapiens
gctttattatgtgagtggagtaatgttctctctttagctatcctctagaagacattgtgtagatttgaacttctttctcttaaatatttgacagaattctcttgaaatctacctatggcttaacttctctgtggaaatatttttgactaattcaatttctttcatggttataggtgcatgaatttttctttttcttgaatttgmatgtgatgtaaatttttctaaaaatgtagtcataacatttgtttgaaatttattgttatgacatttttcattacatgttcttattacttcttattatgtgcaacacctgttacgtctaactagtaaatactgatatttggtcatccctctcttctctgtcttatataatccattttaccagagggatgtcaatagtattagcaatttataagaaacaacttttgactttgttgatcttccctattatttttagttattttctattcaatacatattttttattttcattatttcatcctttttctgtattcattttggaatgctttatacctgaccaataacttagaaaaaacaaatatctctattctttaatgtcccttattaatagcatttacaaatttgaataata

SEQ ID NO: 112515 - DNA, 546 bp, Homo sapiens
aaaatagtataaacagatttttttttagcctctgaaaaccactatatattagtttgcattaaccactatacgtagaaatatcttcctgttcaaatgtagttatgtgatactttgtgaaaatagggccttaatatttaggggttaaaattaattcaaaatattttcagtaagaatgggccaacttggcccacatactgtagtacaagctgataagtagtcattagaagatgatgatctaagactactaaataagctctcacagacargtcatatgaaaccacgtttatatctaatgatttaagtgtaaagcatgtaggcaaacgctactagtcatcacactgtaatgtacagctttcagtacagaaaatttggataaatgttctgcagctatatccagaaatcagtttttcattaatttctctttctatgttttgtcagatacagtaattatatcacaagcagtcaaattctaaaatggtatgtgtagagaaaagaagcaacagagttcttgccattcctaattctgattaccctaatttgggataa

SEQ ID NO: 112516 - DNA, 238 bp, Homo sapiens
tttaaaatcaatttatttattttaattgacaaataaaaattgtatatatttgtcatgtacaacrtgatgtttcaaaatatgtatacatggtagaatgcctaaatcaagctatttatcatatcatattcattggcttacatacttaccattttttgtggtaagaatacttaaaatccactctcttagcaattctcactaatacatgttgttaactatagtcacatgtacaatagatctc

SEQ ID NO: 112517 - DNA, 557 bp, Homo sapiens
gaattccattccattccattccaatccattccattacattccataccacccagattgattccattccattccattataatccattccattccattccattccagttgattctaatgcctttcaccccattccattccactgcattccattccattccattccactcagtttgtttccattccattccattccactcgggttgattcctttccattccattccattccattycattccattccattccgtgcctttccattccattccattccattccattccactcgggttcattccattccattcgttttcattccattccattctattccattcatttccattcaattccattccactccactcgggttgattccattccattccattcctttccattaaattccattccattccattacattccagttcattccattactttcccttccattctgttcccttccattccattccattccattccatgccgttgcattggaatcgggttgattccaatacattccattacattccattcctttccattccattac

SEQ ID NO: 112518 - DNA, 734 bp, Homo sapiens
gttaatgtaaactcattcactcaggaaaagcggaagccactgagggaattgtgcactgccatcgaagactcacaccaggctctgaggactttgccatgatcgtgaatataaaatctgaggccacagtagtaatgaagcatttaagaaagatttataaacagctgagcctttaaaggttaattttaaagccaggaggacccagaaagctttgtatcatattgttgtagttatagtccctttgcctaacatggattcttgtcaaaattgtttctgatttaatactcagccaattccaatccactaaaactgatcatgttgataaaacaaatagacactatttacatatttctttcttttacttaattccacagcctatctgcaactacaaaatactcctacttcttcaaaacaccctccaccttagcttctgagattctaggctccttagccagatctttaaattttgaactcctcatgactcaccctaggccctctcctttatttctgtgttaattactccaatgacttctggcaccatctgtattaaaaacaacactcagatctgctctcctgactctagactaccatattctactgcctttcacatcttcatttggatggtttgcaggcacctmataatcattctgtctctcaacttcctcaatgttttccaagtgacattgccattcactgaaaccccaaagctagaaacacaagaattatccccaacatgc

SEQ ID NO: 112519 - DNA, 628 bp, Homo sapiens
gcaaatatcaaatgcactaagaagtatacagtgaaatagatcattcaagtaatatttagcttaaaaaattcaaaatatcccagtcttaaacttatttctattccaaaagttaaatataaaattttaggaaaagatgttacatgtcatgaatgtgcactcatacacatctacaaatacaaaattatttattcatttttactaaaatatttgctcaaaatagagactaactgatgtctgtctagcaacttacaacaccacttccccacttaacttgcactacatgctggagtcctaatggtactattaccgggccagttgcaattttttacacagaacactgatgaagatagtaaccsaaacttgacacttgaacgcattaaaaaatcatgcatgaatcatgcatgtaaatatttttaggttgctttctgaagccactcagttacctatttccccagaaagacatacaaaaggggaaaagagtagaaaccaagatttaaaatatgacaaaattatcctctataaatcgtacagtttctagactcaaaagcaaaatcctaccaaaattaacacaggaagatagagataaaagagtcccaaataaacctttcttccagccagaaaccatgtg

SEQ ID NO: 112520 - DNA, 628 bp, Homo sapiens
gcaaatatcaaatgcactaagaagtatacagtgaaatagatcattcaagtaatatttagcttaaaaaattcaaaatatcccagtcttaaacttatttctattccaaaagttaaatataaaattttaggaaaagatgttacatgtcatgaatgtgcactcatacacatctacaaatacaaaattatttattcatttttactaaaatatttgctcaaaatagagactaactgatgtctgtctagcaacttacaacaccacttccccacttaacttgcactacatgctggagtcctaatggtactattaccgggccagttgcaattttttacacagaacactgatgaagatagtaaccgaaacttgacacttgaacgcattaaaaaatcatgcatgaatcatgcatgtaaatatttttaggttgctttctgaagccactcagttacctatttccccagaaagacatacaaaaggggaaaagagkagaaaccaagatttaaaatatgacaaaattatcctctataaatcgtacagtttctagactcaaaagcaaaatcctaccaaaattaacacaggaagatagagataaaagagtcccaaataaacctttcttccagccagaaaccatgtg

SEQ ID NO: 112521 - DNA, 604 bp, Homo sapiens
agttttgtgttctaagaatttattcattaatctgtaagaccacaagagtaaattataacatatagtgttcagaaatgaaaatgtagcaatgttacaactgttcattttgtgctaatgtgaatgttcaaatagatcctgatgcaaaaaaaaaatgttcaaaagaaagaagtcatgtaaataccaagatgggttgaaaatcaggaatctttaacagaaggcacgagtagtgaatcatttcagttttrtgtgaaattgttttagttacagatgccaagagaaaagcaaatgactgcaaaacagagagggaagggttcctactgttgtttaacagacatgtgctagttcttcctctgttagacaaaaacagtcacagaaactatggagctgggatggcagccatatttttttcaaaaagtctgtggttgtagtttgcagtaagtgagaagctgaatgaaaaaatagatctggctgaagatttttactcagaggtgacagtcgatatctgaagaagtaaagagaagtaaactagtttatctaattaaagcttttgataacgtatatggctcacttactaataactaacctgggatttactgtttgtgaa

SEQ ID NO: 112522 - DNA, 604 bp, Homo sapiens
agttttgtgttctaagaatttattcattaatctgtaagaccacaagagtaaattataacatatagtgttcagaaatgaaaatgtagcaatgttacaactgttcattttgtgctaatgtgaatgttcaaatagatcctgatgcaaaaaaaaaatgttcaaaagaaagaagtcatgtaaataccaagatgggttgaaaatcaggaatctttaacagaaggcacgagtagtgaatcatttcagttttgtgtgaaattgttttagttacagatgccaagagaaaagcaaatgactgcaaaacagagagggaagggttcctactgttgtttaacagacatgtgcyagttcttcctctgttagacaaaaacagtcacagaaactatggagctgggatggcagccatatttttttcaaaaagtctgtggttgtagtttgcagtaagtgagaagctgaatgaaaaaatagatctggctgaagatttttactcagaggtgacagtcgatatctgaagaagtaaagagaagtaaactagtttatctaattaaagcttttgataacgtatatggctcacttactaataactaacctgggatttactgtttgtgaa

SEQ ID NO: 112523 - DNA, 570 bp, Homo sapiens
tcaactcctacaactcaacaatgaaaccccccccaatgcatttattttaaaaattggcaagggacattgaattcctccagaggacaaacaaatggccaataagcacgtgaaatgatgctcaacatcaccaatcattagagaaatacaaatcaaaccattataagatataacctagcactcattaagatggctgtatttgaaaaccaaaacaaaatggaacataamaagtgttgagaatgtagagaaataggaatttttgtgcactctgggtggcaatgtaaaatgatgcagccactatggaaaacagtatgatcgttttaatttaaaataaaactactatatgatccaaaaaattcacttctgagtatgtatccaaaaataattgaaagcagaatctcaataaatttgcacacccgtgttcatagcagcactattcacaatagacaataggtaaaaacaacccaagtgtcatcaactgatgaatgaataaacaaaatgttttatatgcatacactagattataatttagccttataaagggagaaaattatgccagcagacagccttcaa

SEQ ID NO: 112524 - DNA, 561 bp, Homo sapiens
taggcaaagaatttggggtacattttaaaatttttaaatagccagaatgtgttarggggcagaaggcttgatgacctgaataagttaaaaaatactttaatcccagaggcatactcagcctgtagtttctttcagcacaagaaagacacgtaacaagaaaaccaaccaggcctattcaggctaagcttgaggacacagggccttttcaatgaaatgagcatttagcatttgtgacttcctattctgtgttcctgtcctccaaatctacaaaaaaagatttggcctcttcatttgtatttatctttttaggtattttatcatcaaatagaagaacctataacaatgctaatttgtgtggcacccaaaactttttgaaggaatgtgttggtcttcattgtgtttactgatcagatgatacaatagagactccagaggtttagtggcttggctaagaccacagaactagaacgttgcagtatcagtattaagatagaacctaagttattcgtgtccaaatcccatgtcctttttactagaatctgtggccttatttaaagccac

SEQ ID NO: 112525 - DNA, 561 bp, Homo sapiens
taggcaaagaatttggggtacattttaaaatttttaaatagccagaatgtgttaaggggcagaaggcttgatgacctgaataagttaaaaaatactttaatcccagaggcatactcagcctgtagtttctttcagcacaagaaagacacgtaacaagaaaaccaaccaggcctattcaggctaagcttgaggacacagggccttttcaatgaaatgagcatttagcatttgtgacttcctattctgtgttcctgtcctccaaatctacaaaaaaagatttggcctcttcatttgtatttatctttttaggtattttatcatcaaatagaagaacctataacaatgctaatttgtgtggcacccaaaactttttgaaggaatgtgttggtcttcwttgtgtttactgatcagatgatacaatagagactccagaggtttagtggcttggctaagaccacagaactagaacgttgcagtatcagtattaagatagaacctaagttattcgtgtccaaatcccatgtcctttttactagaatctgtggccttatttaaagccac

SEQ ID NO: 112526 - DNA, 578 bp, Homo sapiens
  misc_feature (1)...(578): n = A,T,C or G
cacaagctaagactttgatactcttgttgcataagggttagaaaaggggatcagtttctcttgaccctacgttttctttctttctttctttctttctttctttctttctttctttctttctttctttctttctttcttttctttctttctctttctttctttctttctatctttctttttttttttgacagagttttgctcttgttgcccaggctggagtgcaatggcatgatctcagctcactgcaatctctgtctcctggcttcaagcgattctcctgcctcagcctctggagtagcttggattacagatgcccgccaccatgcccagctaatttttgtatttttaatagagatggggttttgtcacattggtcagtctggtctcgaactcctgacctcaggtgatccacccgccttggcctcccaaagtgctgggattacaggcatgagccaccgcaccgggcctcttgccactatcttaagtatttgctcattgcatcataakagacttatcagttaacacttgtgnnnnnnnnnnnnnnnnnnnnnnnnnnnnnnnnnnnnnnnnnnnnnnnn

SEQ ID NO: 112527 - DNA, 573 bp, Homo sapiens
ttgatactcttgttgcataagggttagaaaaggggatcagtttctcttgaccctacgttttctttctttctttctttctttctttctttctttytttctttctttctttctttctttctttctttctttctttcttttctttctttctctttctttctttctttctatctttctttttttttttgacagagttttgctcttgttgcccaggctggagtgcaatggcatgatctcagctcactgcaatctctgtctcctggcttcaagcgattctcctgcctcagcctctggagtagcttggattacagatgcccgccaccatgcccagctaatttttgtatttttaatagagatggggttttgtcacattggtcagtctggtctcgaactcctgacctcaggtgatccacccgccttggcctcccaaagtgctgggattacaggcatgagccaccgcaccgggcctcttgccactatcttaagtatttgctcattgcagcagaagagacttatcagttaacacttgtgcatttcctgtgtgacaaacactattctaaaatgtttgatatgaat

SEQ ID NO: 112528 - DNA, 576 bp, Homo sapiens
aaccttgtgaaattatttgactctttatgtatatgtgtactttatttttaaaaaatacttctaaattatgttttaaaagtttttaaaaatcctgttggctgttttgtggaaaagaatcactaggaggataagattgggaaggggaaaatgagcaggggctctcacttggttcaggagactggtgatggtttagtgataacaatggaggtggtggtaattggtyggattcttgatatgtatttaaagtaaagctgcccaagtttaccaatgtattgaatgtggaatatgagagaaagaagagaatcaaacatgactacaaggtttctggcctgagaagctggaaggatgaagtttcaatatcctgagatgtggaagactatatgaaaagcaggtattagtcaaggttccccagggaaatagaagcaacaggagatatagatacagatgatcgagatagagacagatagatagataaggggggatttattatgagaattggctcatgcaattatggaggttgagatgattcaccacatgctgtttgcaagctgaagaaccaggaaagtttgtaatgtt

SEQ ID NO: 112529 - DNA, 576 bp, Homo sapiens
aaccttgtgaaattatttgactctttatgtatatgtgtactttatttttaaaaaatacttctaaattatgttttaaaagtttttaaaaatcctgttggctgttttgtggaaaagaatcactaggaggataagattgggaaggggaaaatgagcaggggctctcacttggttcaggagactggtgatggtttagtgataacaatggaggtggtggtaattggttggattcttgatatgtatttaaagtaaagctgcccaagtttrccaatgtattgaatgtggaatatgagagaaagaagagaatcaaacatgactacaaggtttctggcctgagaagctggaaggatgaagtttcaatatcctgagatgtggaagactatatgaaaagcaggtattagtcaaggttccccagggaaatagaagcaacaggagatatagatacagatgatcgagatagagacagatagatagataaggggggatttattatgagaattggctcatgcaattatggaggttgagatgattcaccacatgctgtttgcaagctgaagaaccaggaaagtttgtaatgtt

SEQ ID NO: 112530 - DNA, 573 bp, Homo sapiens
ttgatactcttgttgcataagggttagaaaaggggatcagtttctcttgaccctacgttttctttctttctttctttctttctttctttctttctttctttctttctttctttctttctttctttctttctttcttttctttctttctctttctttctttctttctatctttctttttttttttgacagagttttgctcttgttgcccaggctggagtgcaatggcatgatctcagctcactgcaatctctgtctcctggcttcaagcgattctcctgcctcagcctctggagtagcttggattacagatgcccgccaccatgcccagctaatttttgtatttttaatagagatggggttttgtcacattggtcagtctggtctcgaactcctgacctcaggtgatccacccgccttggcctcccaaagtgctgggattacaggcatgagccaccgcaccgggcctcttgccactatcttaagtatttgctcattgcagcasaagagacttatcagttaacacttgtgcatttcctgtgtgacaaacactattctaaaatgtttgatatgaat

SEQ ID NO: 112531 - DNA, 562 bp, Homo sapiens
aaataagatcacacgtgtgaacgaatttttaaaatacttgaatgctgcacacatgctaagtattgttttaacagtggttgtcaatagataggggttagtgaagtcaggcaaagaagttctggagaaaaagatgagctggaccagaacaaggggagcttagcagagtttgacaatcatgggcatatcagcaaggcaagagatatattttatcagtgcaacactgttatcctttaattgatcatttaatgcaggctggaactttttatactcagatttagcctcccaggtcagcaagccagaggctaacctaaatagaggataacatttgcaaattttaaaaatgtagtggccagaaacttaaacatttgttaaattaaagaaaggatatgcatgccatgccaagtctytttttgttgtctggagagttataacaatcctctcctggcagttagttttaagatcattaaatgatcctcatttgcaatatatttgcagaagattacagccatctaaattgaccctgaaggaagacttatttcattaatgggctgtcctgcgctaa

SEQ ID NO: 112532 - DNA, 585 bp, Homo sapiens
agcagagctacaaacatatttaaaaagtcgttctctaatgatcctttaagacccaatttggaagccctcatccataaagctttcccttccaatatcacttaaaactttccttcccatagccacttactctgttccatgacatcacgcagccttgttgctgctatctcagactcattcactaattgacactacacatcttatctcaagtgttcctcaggactcttaacttgcattatttttaagttctggagtgcctcatgtagttctggacacacaacaaataattagctaagagggctgaatgattggacaaaygaatgaatggacaagatttgcatgaggacgatctttgaatgtttgctgtgatgttatgttttatcatgttggattccattcatttcatcccatgaagacactaataacaaacacttctgttttaacttataaaagtttaaacatcagtccttaacatatcataatatcatcccctagtcattataatttttgccttatacaaggtgtattgaaagccttgtggcctggtttataaacaacagcatattcagtgttgtaaaagtgcaaggt

SEQ ID NO: 112533 - DNA, 346 bp, Homo sapiens
tactgtgtaactcttgataggatgtactgaagacacatccctgctgtaatattcttgccaaaaatgaaaaatctgactttaatcaatagaaaataccaaacaatagaacttaagggacattctgaaaaataaccagccagcatamatcaaaagtttcaaggtatttcaaaacaaagactaaaaaactgtcagagattgaaggaaattaagaaagcatgaaaactgaatgcaatatgggatccagaaattttatcctaaaacattaaaagtaaaaatggtaaatacatgtatcagtggaaagctcagtgaaattcaaatgtagattgtaacttcattaataatagtg

SEQ ID NO: 112534 - DNA, 553 bp, Homo sapiens
agattcttttaaagaaaattggaggcaagaaaaaagaatcagccaatatttatggaaactcaactttattaaagacaagtgcaaaatgtgcctggaaaagtgctaaagaactgttgaaaaacaggtggaaagaaaaggaaatattataatatgtctcttctccaactgaagcaacacagattttatcttggttagttttccttgaaacacgcaggatattttatgtccccttgcccacaagagaagccctcatcctcctgttgttgcgcttagcatcactgcacccaccgggggatttgcatattgtcctctagggaggaccttcccttgtgggtctgagataaaagctcagctctaacccttaccttgactgatcaggactcctcagttcaccttctcactatgaggctccctgctcagctcttggggctgctaatgctctgggtccctggtaaggacagaaggagatgagggaggagaatggggtgggaaggtaagcctgggggycccactgccttccatgtgtgttctgccctgcccatgtgttagatgt

SEQ ID NO: 112535 - DNA, 583 bp, Homo sapiens
ccctgggctattctagctgagaggggagggagctggggtatgtatacatrtccttctgtcatcaccaattgagggctgtctgtctaagtctgttttgtgctgctataacagaatacctgagactgggtaatcagtaaagaacattctgtcacatttctggaggatgggaagtcaaagattgagtaactagcagcttgggatccaatttctgtgctttcaagatggaatttgaatgctgagtccttcagagagaaggaaggccatgccctggcctgacaatagcagaagtgagagactgggagctcgctctcataattgagatagttcagggatctgaccccttcttaggggtctttgaagcttccccagacatggaaataaaggaaaatcttgggtcttttcaagggaaatgttaggtgtccagctaagccttgagaagtaaacaagcaacatgagaagcaaggagacgataatagactaaaacaatagtcaaagaagctaaaaatcacagtatgttttattcctctacagaaactaaagagaacatctcagcatatgtctctgagttgtttttcagaaaccc

SEQ ID NO: 112536 - DNA, 583 bp, Homo sapiens
ccctgggctattctagctgagaggggagggagctggggtatgtatacatgtccttctgtcatcaccaattgagggctgtctgtctaagtctgttttgtgctgctataacagaatacctgagactgggtaatcagtaaagaacattctgtcacatttctggaggatgggaagtcaaagattgagtaactagcagcttgggatccaatttctgtgctttcaagatggaatttgaatgctgagtccttcagagagaaggaaggccatgccctggcctgacaatagcagaagtgagagactgggagctcgctctcataattgagatagttcagggatctgaccccttcttaggggtctttgaagcttccccagacatggaaataaaggaaaatcttgggtcttttcaagggaaatgttaggtgtccagctaagccttgagaagtaaacaagcaacatgagaagcaaggagacgataatagactaaaacaatagtcaaagaagctaaaaatcacaktatgttttattcctctacagaaactaaagagaacatctcagcatatgtctctgagttgtttttcagaaaccc

SEQ ID NO: 112537 - DNA, 527 bp, Homo sapiens
ttctcaatgttaaggcttatagctgaagtaatcataagagtgcggcattggaggatgtgtagacaaatagatcagtraaacaaaaatagtgaacacagaaatagacccacaggaatatgcctgcctaattttttcaaaggaataaaagtcattcaatggtcctgtagcaatttgatagtcatcagcaaaaaaaaaaatgaatcttcacctagacctcagctcttatgcttacatcaaaattaactcaaaatgaatcatggacttcagtgtgaaacttaagttcactaagaacataggaaaaacgtctgggggcctaggactagataaagagttttcagatttgaaactaataacatgacccagaagagaaaaaaaaatgctaaattggaactcaccaaaattttttaaatttgtgctgtgaaagaccttactaaaattactaaaaatataactatagactgagagataatattttcaaatcacatatctgacaaaggtcttgtacttagagtatgtaagaactctca

SEQ ID NO: 112538 - DNA, 679 bp, Homo sapiens
ttctatgtgaaatgttgctaataggtcaagtaagatgagcactgagcattgaatgttagaagccattagtgacctttacaacagtttcggtacagtgatggggatgaaattctgattggtgtagatttaggagagaatggaaggaaattggaaagaatgattataaaataatattttcatggattttagctgcaaaggagcataggaaggatagactagtacctgcctgagattggggtcagaaaagattttgaagttattttatttattttaatgtgagataaataatagcaagttttatatgtggtgagaatcactcagaagattgctgctctgcagcaggggtccccagacccctggctgtggaccaatactgatctgtggcctgttaggaaccagattgcacagcaggaggtgagcagcgggcaagtgagcattaccacctgagctccacgtcctgtcaggtcaatggtggcactagattctcataggaatgcaaaccctctgtgaacattgcatgtgagggatctatgttgtgtgcttcttacgagaatstaactaatgcctgatgatctgaggtgaaagagttccacctgaaaccatccccctccacctgctggtctgtggaaaaattttttcttccatgaaactggtccctggtgtcacaaagttgaggacc

SEQ ID NO: 112539 - DNA, 444 bp, Homo sapiens
tttttgctcttaagcacatgatagaaacgtgtacatgctaacaatacaccataaagtatgtgtcttatctaattaatgtgtcctaagtgttcatatggtttggatctgtcccagcccaaatctcatcttgaattgtaatcctcaatgttggaggtggagcctggtgggaggtwattggctcacgggggcggattctatggtttaacaagatcctttgccttccaccatgagtgtaggttgtctgaatcctccccagaagcagatgccagcatcatgcttcctgtacagcctgtggaaccacaagccaattaaacctctctacagcagcacgagaattgactaatacaggtgtatatattttatactttgtgtttacttatgaagcatacatttgaaggctgtttaaacattattttatcatctggatatctattaattggcatt

SEQ ID NO: 112540 - DNA, 605 bp, Homo sapiens
cttaagacatcacttaaaaatgtccctgttccttgtgtctttggaaataatttatggtttgcaaatcaacatttaaatgcccaaaggaagatcctggcaaggaactttagagtgaatatctttattaagagagaaagccttcggtaacttgtacgattgccgcctccacacgtggagccagagaaatcaacctttaggaaaaagcattcttgccccaatttggggtcttttataaactgagaagactcagcccttctgagtggctgtaataaaagtcacacagctctcccagyctgctacttaagaagctgttaatggccatcttattagcccattagcaactgctttagcccattagtcgacagttaagtggtacaaactgctggagttccagcaggattagggttggtggacttcagtgctgtgattccatgctttggcaaattatctaagtgggaaagggcagactttcttatacagcatttccttgttatgaggcacacttgtgcttcattttctatctggggtgaaatttttatggcaatcatttgagaagaagtagtgttgtccttgtaaactacagagactcaactgccaaagacctg

SEQ ID NO: 112541 - DNA, 605 bp, Homo sapiens
cttaagacatcacttaaaaatgtccctgttccttgtgtctttggaaataatttatggtttgcaaatcaacatttaaatgcccaaaggaagatcctggcaaggaactttagagtgaatatctttattaagagagaaagccttcggtaacttgtacgattgccgcctccacacgtggagccagagaaatcaacctttaggaaaaagcattcttgccccaatttggggtcttttataaactgagaagactcagcccttctgagtggctgtaataaaagtcacacagctctcccagcctgctacttaagaagctgttaatggccatcttattagcccattagcaactgctttagcccattagtcgacagttaagtggtacaaactgctggagttccagcaggattagggttggtggacttcagtgctgygattccatgctttggcaaattatctaagtgggaaagggcagactttcttatacagcatttccttgttatgaggcacacttgtgcttcattttctatctggggtgaaatttttatggcaatcatttgagaagaagtagtgttgtccttgtaaactacagagactcaactgccaaagacctg

SEQ ID NO: 112542 - DNA, 591 bp, Homo sapiens
tggaataaaatttgtaattataattttctataaaatgtaatgaatcccattctttcatttcctctattctatgggagataattgctattgctccttggtagagctttcctgaaaagttataaaagtccgataggatgaatagttctcttgaaaacttcaagatatcttttaaattaagaggacattacaaatcaaactctattataattacaaattataaggttaaattcaattatatttataaattacaaggttataatattgctgattttttatgtttgtytataaatgtttataattcctacatctttattcctgggctaagagcttaatgatgacttttaacataaagaacaaatatatttttatttctaaacaattaaaaatgtttaaaaatggaatggaggtcactgcaaaacatggtaataaatctattaaaagtcagagtccaaaacaaatgtataccttaacgtatacagaaacatagggcttaacttgggccacaaaagcatgctggagttagacacactcagtgggtctatagaaatgaatttaacatttatgattacagactgataatttttcatgccc

SEQ ID NO: 112543 - DNA, 573 bp, Homo sapiens
tgtttccaaatttgctccaggaaggctgactcctgtctatggggaagatgctgcyaacttcagggcaggaagctctatcctttcccagaagggcaaaagcagacagcagacacagaggagaagatttaaaacttgacaactctaactgcaaccccaaggcagaatttttcacaggttatgtaacagattctggcacttcccactcataccatccagaatgctgttggttccagttcctgatgttatttgggagggtgagttgggatagagttagttctctgtctcctggttcctctctaaacaatgaatgatgagctcttacacaggcacaaaattcagagcaatatatctgaagtaatttccagcacttgatttagagaacagatttaaataagataggatatttcttctaaggattgtacattggtaaggtacaattagggactaaatctgtctatctcaacattgaatcccaagtacctaagaaagttgtcactcaaaacgtaaatgctgaatgattcagtagagatcactggaagaaagtgccttgttgttttctctaagaataacaac

SEQ ID NO: 112544 - DNA, 645 bp, Homo sapiens
gacatttcaatacacaattgagatcttcatttttagctatacagagtattttaaaaaatgttttttaacttatgttcatcactttcagcataaaacttcaacggtttgtccttctctttcttcaggtcatgtacaatagccactccaacaccatactctactgtaaggcatttcagattgatactgctgtccagttgttctccaacagcttgactttctgtcctatagatagacataaatgtttcccctttttaaaatccctgttactaattaataggggtatctgcaggtctgttgaccttttcaacaatatcttttatcacagagaacamgcaaaacaaaatgagtaatgcacacagatcttgtccccatgtagggcattgtggggaacctaccactagtgtgtctggcctgcacacatgccattttaatatcctttgtggatgtatttccatggggaaatctgggctgatgtggcatagatatatcacagatgaaggtgttttttttcccttggggaaactgaacaagctgcgccattgcctgcattttgactgcgaggtcaggggtagaattttccatttgtggcatcatgccaggattcaaaaagtttcagattttggagcatttcaggtttcagatttt

SEQ ID NO: 112545 - DNA, 569 bp, Homo sapiens
tgtgactaggaaagtgcttttgtctagacagaggttttataacttttattaatttcctaaaggatgaacaattcaaaaatcagggatcataacactgacaaaagctctaaagtaatagatttctctttgtatgcaagtgaactctttaaatatataatcacattttgcctgagaatgctttcatgtttatatcttggcactacttccattcaattgtgctaaccaaaaacccagagagtcatactggacatcttcttgctcatatgtaatccagtatcaagtgctgtcaactttactgactaaattctgttcaaatccayctgcttttctccagctctgctagcacagttaatccatgctatcatcatctttcatcaggaaaacagcaatagactcaaaattctttactgtcattcggactcgtcctctgccaatccattctccacagggtagctagggaaacttttaaaaatgcagatctgattattaactcccctgaataaaaagtggtttcccatttctctcagggtaaagacaaaagtcctgaacataaccctatatggtcgggc

SEQ ID NO: 112546 - DNA, 569 bp, Homo sapiens
tgtgactaggaaagtgcttttgtctagacagaggttttataacttttattaatttcctaaaggatgaacaattcaaaaatcagggatcataacactgacaaaagctctaaagtaatagatttctctttgtatgcaagtgaactctttaaatatataatcacattttgcctgagaatgctttcatgtttatatcttggcactacttccattcaattgtgctaaccaaaaacccagagagtcatactggacatcttcttgctcatatgtaatccagtatcaagtgctgtcaactttactgactaaattctgttcaaatccatctgcttttctccagctctgctagcacagttaatccatgctatcatcatctttcatcaggaaaacagcaatagactcaaaattctttactgtcattcrgactcgtcctctgccaatccattctccacagggtagctagggaaacttttaaaaatgcagatctgattattaactcccctgaataaaaagtggtttcccatttctctcagggtaaagacaaaagtcctgaacataaccctatatggtcgggc

SEQ ID NO: 112547 - DNA, 608 bp, Homo sapiens
ataacattaatgctggccagttgttgtgtctaaagtccaaaaaggaagggataaaatgagtcatatttgacctcccttcctattatggtagggaattcagttttaaggttgtctrctgtcccgttagccaagggggcattaattcagtctgttggttgggggttaggatttcatttttagtttacacactatctagttactatgaagtaactatatctaccatatagcctgtggtagatagatacaaggaatctgccttatctgaggtattccccatccatggcagcaatcttccaatacagaggtacaaaaaggaataaatacctcaaactgggcctaccctgaaaggttatccagctcaagagtttcaaatggtcagtgaaagatctctgttgcaactgcctcacagtgcagcttctctttctgtccagtcctgcttctctcagctctcacaggtgtcaccaaaattactatccaataaaacccctatatttgttgtgatcccaaaaagaaattcagctactcctaaatgtttggtgtttacttggctttctgggaaggtaacatgtagttgacagtaatatgaaagatattttaggaccatttca

SEQ ID NO: 112548 - DNA, 608 bp, Homo sapiens
ataacattaatgctggccagttgttgtgtctaaagtccaaaaaggaagggataaaatgagtcatatttgacctcccttcctattatggtagggaattcagttttaaggttgtctactgtcccgttagccaagggggcattaattcagtctgttggttgggggttaggatttcatttttagtttacacactatctagttactatgaagtaactatatctaccatatagcctgtggtagatagatacaaggaatctgccttatctgaggtattccccatccatggcagcaatcttccaatacagaggtacaaaaaggaataaatacctcaaactgggcctaccctgaaaggttatccagctcaagagtttcaaatggtcagtgaaagatctctgttgcaactgcctcacagtgcagcttctctttctgtccagtcctgcttckctcagctctcacaggtgtcaccaaaattactatccaataaaacccctatatttgttgtgatcccaaaaagaaattcagctactcctaaatgtttggtgtttacttggctttctgggaaggtaacatgtagttgacagtaatatgaaagatattttaggaccatttca

SEQ ID NO: 112549 - DNA, 563 bp, Homo sapiens
agtgtgtggaagatggaatakagatgagattagcagaaagcagagagaaaagatgttgcagtcgatgatgaatggcagcaaggtaggagaaaaaaaaaacaaacaaaaaaccctgctctactcaggaaacattttatgcagcaccacctaactccatgtcaaaaccttcaccttcaccatgctatagtgcatcctcaccacaaaagctaattaaccaaaataaggtgtggggatgaaatgtgggccttcaaaacagtgatacttctagcatctgtttttaaaagatacatttagaggtgactgaatcctaaagccagaaaatacctaaaggaatggtccagtccagtggttctccagcctggctgccattaaaatctcttggggagatttttcaaaataccaatcctgagtactcacactttgtcaattaagtaagggtccctgggagtgcagctcaagcactgctgagtcttcaagctcgtcaggtgattctaatgtgcttccaggctgaagaacccccattgatctcatccaaccccacactggacagagtagaaagtgag

SEQ ID NO: 112550 - DNA, 563 bp, Homo sapiens
agtgtgtggaagatggaatagagatgagattagcagaaagcagagagaaaagatgttgcagtcgatgatgaatggcagcaaggtaggagaaaaaaaaaacaaacaaaaaaccctgctctactcaggaaacattttatgcagcaccacctaactccatgtcaaaaccttcaccttcaccatgctatagtgcatcctcaccacaaaagctaattaaccaaaataaggtgtggggatgaaatgtgggccttcaaaacagtgatacttctagcatctgtttttaaaagatacatttagaggtgactgaatcctaaagccagaaaatacctaaaggaatggtccagtccagtggttctscagcctggctgccattaaaatctcttggggagatttttcaaaataccaatcctgagtactcacactttgtcaattaagtaagggtccctgggagtgcagctcaagcactgctgagtcttcaagctcgtcaggtgattctaatgtgcttccaggctgaagaacccccattgatctcatccaaccccacactggacagagtagaaagtgag

SEQ ID NO: 112551 - DNA, 560 bp, Homo sapiens
tagcagcctcaggttcagagaggttgactagtttgtccaaatcttcaaccgaaaagttgctgagttaaagctggaactcatatttttctggaactaaaatccattctcagtacattatctacagcactgtctgtcctctgcctgakaggtggactaattttttacctccccagcacagatggattccacatctatctcaagaaaaatgaaagcattctaataaagttcccaatcaaatggatccttctagtcttactttctggtttagtttacttctcaactctgatcaggcatttgttgctcagagaagccttctctgaccaccacaggtcaaatcaccatattctggcgcttattagagcagcaattttacatttgtttgcattataacttgaataacatatctgcctttataagattataagcttcatgaggataagaactgtgtctctctttgcgactgtatcttcaacgctgtggctcttaacagccacacaaaaacaatcgttgaataaatgcctttgaaaatgcttaattcctacaaactaatagggcaccct

SEQ ID NO: 112552 - DNA, 560 bp, Homo sapiens
tagcagcctcaggttcagagaggttgactagtttgtccaaatcttcaaccgaaaagttgctgagttaaagctggaactcatatttttctggaactaaaatccattctcagtacattatctacagcactgtctgtcctctgcctgagaggtggactaattttttacctccccagcacagatggattccacatctatctcaagaaaaatgaaagcattctaataaagttcccaatcaaatggatccttctagtcttactttctggtttagtttacttctcaactctgatcaggcatttgttgctcagagaagcyttctctgaccaccacaggtcaaatcaccatattctggcgcttattagagcagcaattttacatttgtttgcattataacttgaataacatatctgcctttataagattataagcttcatgaggataagaactgtgtctctctttgcgactgtatcttcaacgctgtggctcttaacagccacacaaaaacaatcgttgaataaatgcctttgaaaatgcttaattcctacaaactaatagggcaccct

SEQ ID NO: 112553 - DNA, 560 bp, Homo sapiens
tagcagcctcaggttcagagaggttgactagtttgtccaaatcttcaaccgaaaagttgctgagttaaagctggaactcatatttttctggaactaaaatccattctcagtacattatctacagcactgtctgtcctctgcctgagaggtggactaattttttacctccccagcacagatggattccacatctatctcaagaaaaatgaaagcattctaataaagttcccaatcaaatggatccttctagtcttactttctggtttagtttacttctcaactctgatcaggcatttgttgctcagagaagccttctctgaccaccacaggtcaaatcaccatattctggcgcttattagagcagcaattttacatttgtttgcattataacttgaataacatatctgcctttataagattataagcttcatgaggataagaactgtgtctctctttgcgactgtatcttcaacsctgtggctcttaacagccacacaaaaacaatcgttgaataaatgcctttgaaaatgcttaattcctacaaactaatagggcaccct

SEQ ID NO: 112554 - DNA, 475 bp, Homo sapiens
atgcatagctcaagtctcctaactgctggcttttcactccatctgtcaaaatgacaatttgccaagttataggctgctctggaactcacttcccctaaaacaggattttttcaagagtccatcctttattagagcaagtaactcactttcagcaagatctcccggactccctagtctttgggtctttgaaaactagtctaattttctaataccatttacttgaaagaataaagtaaaataatgatctamagtattatgtgaaaatgagatataatttaatctcaggataggtctataccatggcaaaaattttcagctctattcttgccaatttttttatacctcctgcctttttttaaatttaaataacatttactaacagcatttaagcaatgtgttttgagggaaaatatattgcttaatgcctttttgcacacaaaatacactacctcataatctcaatttttttcaggtc

SEQ ID NO: 112555 - DNA, 604 bp, Homo sapiens
ttccaaatccaagctcccccaatatttatcaactgactcaagaagttctgagcattcactaggcttcctcactatactttaccttaacccttctttataagctttctttataattgcttgaaaatttactttaatgcttttcatccatttctcctatagaagtaagctggtcctgaatcatgtaatattgrgagggacttgagtcaagcttgtgctgctcagaaacagctgcttcttgagccttaaaaccaaaaattctgaggaaaaataccatcctcatagaaacccattcttttatctattatcctaagacatatggtaacagatgaaaattgcttatgttgaaactttatgcattttctcataattgtaaatacaaaaataagatgataaatatttctcatgttgctggaaacagatgcaaatgtctgaacattgggactatatattaagcaagctaaatagagatgtttatcactaggaaaaaaacaaaataaaacaaacttggtacctatagaacatacaacactggttatttttagtaaaactgtttcttcacaggttcttattaaaatctatattttaataaatcaaaacttgttag

SEQ ID NO: 112556 - DNA, 604 bp, Homo sapiens
ttccaaatccaagctcccccaatatttatcaactgactcaagaagttctgagcattcactaggcttcctcactatactttaccttaacccttctttataagctttctttataattgcttgaaaatttactttaatgcttttcatccatttctcctatagaagtaagctggtcctgaatcatgtaatattgggagggacttgagtcaagcttgtgctgctcagaaacagctgcttcttgagccttaaaaccaaaaattctgaggaaaaawaccatcctcatagaaacccattcttttatctattatcctaagacatatggtaacagatgaaaattgcttatgttgaaactttatgcattttctcataattgtaaatacaaaaataagatgataaatatttctcatgttgctggaaacagatgcaaatgtctgaacattgggactatatattaagcaagctaaatagagatgtttatcactaggaaaaaaacaaaataaaacaaacttggtacctatagaacatacaacactggttatttttagtaaaactgtttcttcacaggttcttattaaaatctatattttaataaatcaaaacttgttag

SEQ ID NO: 112557 - DNA, 631 bp, Homo sapiens
tcagaattgtgcagaatttgaaatctaacaccaaagtttaatatttttatggaagtattgatatttataaggatattcaaaatgtattcttcctgagcattacattgatatctttcaacttttggtgggggaatttgcattatagaattacacagtctcttgtggaggagaaggatcttaggaaggcagttataacagtcccaacttgatggaattcattagaaggtatttatttgtatgtttcattcttaaattatgattcacaaccgattttcattgttcttggaaatataaaggtttactcatttactgtaaaatttcttcttgagaagctttgtgcacttcctatatatttgtcctatagcccctcaacccccatccatgcctttagaggttgagggaatttgctgacatttctcttatcgatgcaccagctggttacagtgaattgctttttgtctaaattcaaggaccttycaaggcttaacattgcagggggcggtgtggctattacactgcctttgcaatttcggaaggcagactttggttctctttatacattcagccatgtgacagtcctttagtgggtttcctcttgctcaactcgttctataagattccttttagaaag

SEQ ID NO: 112558 - DNA, 672 bp, Homo sapiens
agtacttctttaaagaccctatatccaaatgtagtcacattctgaggtactgaaggttagagcttcaatgtattaatttgttggggggtgggggagacacacttcagcccatagcactcatctttcctaaaggggtgctctgaaatactgcagataaagtgcctggtacataataaagatgttaaaatattagctctccttccttttctcaattttcattccttgtccctggcatagaagggaatgtatttcctttaccttcaatgtaattgttcctcctttcctttgtgagaaatcatggaaaggcaatctgtytttatatttcccctttgcaaagatcctacatcattagtttcaaatggaattccaacaatttttctcctctcttccggaatgtggacattttggttggaactccaatagtccccctgagaccaggaggtgaccttgaggttggaaaccccatataaggtggaggagtgaaaatatagaacaaactcaggacatagttgacagtgaataggtgcctgtcagccttggatggcctacctcagaactttatgttccaagaaagaagaaaaaccctcgatataatttgtgccattgcagttttagccaaaagcaactcataattaatgtggaatttgagttcagttgccagttcagttgcca

SEQ ID NO: 112559 - DNA, 591 bp, Homo sapiens
tatttctggccgtgtctttggtcaggatcagtggttctgagaactgcttcttctgtgacagactacaatcactgcaattgcccttcaaagaaacgatggagttttgctttgacctcactgaaagcaaaatttgatggccmaaatttgactttcgttagtcttgagatgtatggcacctacacccaggggagtagaagactcagcaccgttttcagatcactcattcatgaggtcacagcaattttcagatcactcattcatgaggtcacagcagacaggggcacagcagacagctccttaaacatagagatgtgttgttcataggaaatcttggcctttgctttcctgtcggagtttgagctggtggagtgggggtctcagagtcccgtgacacatcctagaatctgttaggacttaaggaaaatgggttgaggtagggtatcagggtggcctatggcaatatgggctggaaggaaggccaccccagagaaactcctgtgcctttttcttttgacttgatattcatgggctgatgtgtgaggtgacttggtacctttgtcctgggcacctggaatcaaaaactgaagtcac

SEQ ID NO: 112560 - DNA, 539 bp, Homo sapiens
taaatctctagtgtaccctaatatgacagtgtggttaaataaatgtggccatgaaattcagagaaagaaaagcttattcttttcagtaatcgtcagttaaaatttcacaatgatacatgctttatacttttcagacacaggttaggaaacatctatctccaaaaggtacaggcaatatgggagcctcagtgggcagagcaaacacatgctaaggtcattttgttgggtcaggggttgaggggggcattgtcatgggctttttaactaaacaaatcgccaatcaaatatcttccagattctgatacccatgctgaattgaagggcctttttgacmggtgtaatgtttggccaaatattaaaccaaaagcaattattaaaacaatactttaaaaatgtttattttaagaaaatttgtacaagtatacaaaagaagttcaactacaattagtttctgagttatgttgagtcattaatcaaaagcttcagtcctgaggaattctgcgaagttcaccactgcactttgcctgcatcgcttttgt

SEQ ID NO: 112561 - DNA, 606 bp, Homo sapiens
ttttgatttaattccaagaggaytagatttgaatttttaaaagtttattgagacttttaaaatatagcttagaatataatttattttggtaaagtgttccttaaacacttgaaaataatgtgtttgctgttgttagggttttttataaaggtcaaacgataaactggtggatagtgctgttcaagtctttgatatcactgctgatttctatctctttgtttaattaaatattaaaagaggggtgttgagttctccaaatgtgatgataaatttgcctttttttggcaattctatcagtttttgtttcatgcatttttgacgttctgttattaagtacatgaatatttaggttcgttatgtcttataaataaattggcccttttatcaatatgaaatgagcttctataaccctagtaatattatttgctttgaagtaggctttttctaatattattatagctaatctggctttctttagattagtattatgatagtaaatatttttcaatccttttagttttgatctatttgtgtctttatagctaaagtagctctcttgtaggtgggagattgagtcttggttttttatccaatttgacaatctcc

SEQ ID NO: 112562 - DNA, 541 bp, Homo sapiens
tttctaatattattatagctaatctggctttctttagattagtattatgatagtaaatatttttcaatccttttagttttgatctatttgtgtctttatagctaaagtagctctcttgtaggtgggagattgagtcttggttttttatccaatttgacaatctccatactttctaattgggtttaattaaatgtaaattaattacatttcattgtttttaatgtaattwttgatatggttggatttaaatctaccattcttgtatttgttttctacttgtcttatctattctgtgttcccttttacctctttttctgtcttctttatggattaattatattttaatgattttttccttttttagtttattagttataactctattttgttattttagtcattgctttagggtgtttaatatatagatggttcttaacttatgaagatttgacttatgattttttgatgacacaaaaacaatacaaattcagtagaaaccatactttgagtacccaccatacaaccattctgtttttcactt

SEQ ID NO: 112563 - DNA, 563 bp, Homo sapiens
agggtgccctattagtttgtaggaattaagcattttcaaaggcatttattcaacgattgtttttgtgtggctgttaagagccacagggttgaagatacagtcgcaaagagagacacagttcttatcctcatgaagcttataatcttataaaggcagatatgttattcaagttataatgcaaacaaatgtaaaattgctgctctaataagcgccagaatatggtgatttgacctgtggtggtcagagaaagcttctctgagcaacaaatgcctgatcagagttgagaagtaaactaaaccagaaagtaagactagaaggatccatttgattgggaactttattagaatgctttcatttttcttgagatagatgtggaatccatctgtgctggggaggtaaaaaattagtccacctctcaggcagaggacagacagtgctgtagataatgyactgagaatggattttagttccagaaaaatatgagttccagctttaactcagcaacttttcggttgaagatttggacaaactagtcaacctctctgaacctgaggctgctaatc

SEQ ID NO: 112564 - DNA, 384 bp, Homo sapiens
tcacagctccactaggctgtgccccagtagggactctgtatagtggttctgaccccacatttcccttccggacttccctagcagaggttttccataagagcccttcccctgcatcaaacttctgcctggacatccaggtgtttccatacatcttctgaaatctaggaggaggttcgsaaacctcaattcttgacttctgtgtaccctcaggctcagtactatatggaagctgtaagaggttggggcttccaccctctgaagcaacagcccaagctgtaccttggccccttttagtcacagctggagtggctggtacacagggcatcaagtccctagattgcacacagcccagggaccctgggcctggcccacaaaaccattttc

SEQ ID NO: 112565 - DNA, 639 bp, Homo sapiens
gggcaatcaatagtgagatccgcttcagagggatggtacagagaacaaacatgtagagagagaggcaagattyaagggcagctgttggatccccctgtgatctcattaaggagacaactccagggctttcccagggataaaaataattttttcttctttactcccaaattcttacatgctgcccaccagtactgaggtaatttaggaattggatattctagaaatccttttcaaaaaccattgcttctgctcacaataattcacagataattgctccatggttgtaatatttataaactgtggtaatgaggcttattagagaaacaaatagaaatatttgcttttggatttactgcatacattaggtgtttttctagcctcaaataaaatttccataaaatctgacaataaatgactattttctacttagttgctgagaatcattttgtcactttgtagaacacctaaatgtttgaccatgcatctgaatttctcttaaaaatcaatgtgacacttcagataagagatactcttgtaaaatagacacaactccacttaaaatgccaaagtccattcctgttccataatgattggtgtaatgattctaatttaccatttaactcaagattttcaggcaaa

SEQ ID NO: 112566 - DNA, 639 bp, Homo sapiens
gggcaatcaatagtgagatccgcttcagagggatggtacagagaacaaacatgtagagagagaggcaagattcaagggcagctgttggatccccctgtgatctcattaaggagacaactccagggctttcccagggataaaaataattttttcttctttactcccaaattcttacatgctgcccaccagtactgaggtawtttaggaattggatattctagaaatccttttcaaaaaccattgcttctgctcacaataattcacagataattgctccatggttgtaatatttataaactgtggtaatgaggcttattagagaaacaaatagaaatatttgcttttggatttactgcatacattaggtgtttttctagcctcaaataaaatttccataaaatctgacaataaatgactattttctacttagttgctgagaatcattttgtcactttgtagaacacctaaatgtttgaccatgcatctgaatttctcttaaaaatcaatgtgacacttcagataagagatactcttgtaaaatagacacaactccacttaaaatgccaaagtccattcctgttccataatgattggtgtaatgattctaatttaccatttaactcaagattttcaggcaaa

SEQ ID NO: 112567 - DNA, 568 bp, Homo sapiens
tgttcccctctgagatagcaagaatcttgcttagttttctagatgttcatgtaattgttgcagtgacgctcatgaaacttgttttatccgtgtacaaattaatcagagactaaataatctctgcaaagtacaacatttcctcaggaatgtaaacccttcctgtgggactattaaaatatttccacctttttttttctttaatgcaacattactttagattacaataaaaaataaatgagagatgagattttcttaacacaataagctctgaaagaaagaaagataaaagaaagaaagagaatgaatgaaacaaagaaagagagagagaaaagcaacttgaacccaaactctccccacactctgagctttcttcacctccagagtggtgacaaactttccaagaattttacatccccaaggagggaatacaattcacacctcctstcagccagaaggaagcagcacaaacagttggggattcctcttgttatggtttctaccaaccctgggattcattatctcacagaaaggatgcttcaggctctaatagtgtgtgtcagaaaggtcg

SEQ ID NO: 112568 - DNA, 633 bp, Homo sapiens
tggtcaatggcttgatatctgcagtatttgccaagttcaccatatataacaggagccatcaatcttttttttttaaccaaataatgaaatatcaaggatttgctctttggaaggacactgctgggaatgactagatggaatggaggtgacagagattagaaayagaaaagactggatgatacagcacttcagtttgagaaatacaaaggtcaaaaaacaggtcagtgatgggggaaatgaaatttataaattaaatacattataatagatctcctttcaaggaatatttgacaaggtcacattgtattaatctaataattttcctggagaaaaggttgaatgttttcccaaaatccattgattcccttacacctctagaatagcggttcttaatttttcccaacgtccatgttttcaggaagaatagtaatcctaaacaaacataggtgagacaatggactacatggaccacctgtcccccaagtttccactttctagtgggaattaaaagtgagttataacaaagaatagagagggttgaaatcacaattcaggtaatcacagcccatcaattaaaagcaaatgacacacaaagattgatccatgaataatgatggttgaaaattaagacca

SEQ ID NO: 112569 - DNA, 633 bp, Homo sapiens
tggtcaatggcttgatatctgcagtatttgccaagttcaccatatataacaggagccatcaatcttttttttttaaccaaataatgaaatatcaaggatttgctctttggaaggacactgctgggaatgactagatggaatggaggtgacagagattagaaatagaaaagactggatgatacagcacttcagtttgagaaatacaaaggtcaaaaaasaggtcagtgatgggggaaatgaaatttataaattaaatacattataatagatctcctttcaaggaatatttgacaaggtcacattgtattaatctaataattttcctggagaaaaggttgaatgttttcccaaaatccattgattcccttacacctctagaatagcggttcttaatttttcccaacgtccatgttttcaggaagaatagtaatcctaaacaaacataggtgagacaatggactacatggaccacctgtcccccaagtttccactttctagtgggaattaaaagtgagttataacaaagaatagagagggttgaaatcacaattcaggtaatcacagcccatcaattaaaagcaaatgacacacaaagattgatccatgaataatgatggttgaaaattaagacca

SEQ ID NO: 112570 - DNA, 532 bp, Homo sapiens
cagctcttgctgttcttataaacagatctaacatgttcatgatcatttgaaatggcaaacaatttgccmcactttcttttcttaatttctattcaccaaaattattcctttatactagtgtgaagatgatgaatagaaacatttcctaaagatgattttcatcctaaggaacttaactgaagatttacatttggcttacaataaaatgaatagaggagatttattgcaaaactatttcttctgtattacgttaagctggttatgatggctctgaggtcttcgagcaatttactcaaagtagctctcattttcctatgtctcatttatttctactatatcttgcttatgttaggaataatttggttttcttccttggcacctgctgatcctttcacaattaaagtacctgtagtttcttttctttgtcatatcctgccctaggcccctcttcttcaggagttatgctgacattcttccaaaatgcccataacaaaattatgatgctaatacacccagtgggtcaattcatgtc

SEQ ID NO: 112571 - DNA, 557 bp, Homo sapiens
gtcatgtaatctgtatatctgtttcacctccaaaaggaggtcacactttcctagttcacaaggatattgtgaggtttaaataggataaatgatgtaaaagtacatcgtaaattgcaaagaccacacagatgttggctattgatatggcagtatagcctggatgtcacaatattctgtttgccatcrcattactgtgaataaaagggttttggctcaacataaatttggatggcaacatagtttaagtcaaccagtacagtggcagaaaatcaacagctggttgtctatattagtctctttcactgttttcttcagtactgggtttctatcacagatactatagcccctaattatcaaacagcatgtggctcggaagggctcagtggtttgtgaaataaaaccctttctgaagactcaccatggtcataagctcaaatggatccagaggggcttgtcaagtggcgatacatgctttaataactttttaatttgcttttttcttgaaggaactggattcttatgtcttcttgagcaaataagactctgaaagtaactgt

SEQ ID NO: 112572 - DNA, 571 bp, Homo sapiens
tcagcaatcaaaccctgaatcctgatcaccacccttcaatgcccattgtgaggagctctagttaagctgatgaggatgtgtcagcaaaccagagctcatcaccagggtgcctatcggctgcaccccagcgtgactatgaaacacccagaagaagcaaagaaaagtctatgtgtcttgttactttatctaattcccccaatattctgctaccactatcgtccatttgcaacttgttccaaggaaagcacattccatccaaaattagggtcttatagaagaacttatacctctggcttattttaaaacatatayttgaaagcctacaaaatatgtaatgccttattagacactgtacaaagatatatgtgacatcatgcctatcctcagagaatttatattctgtgggagagataaaacataaatattaatcagatacaaatacaaatacaaatatgacatcatcgttggcacacaggcatgtcaaaaaaaaaaaaaaagagcttagaaatggactttgtaggattaaggtgttcaccaaatgttatcgtgtttctctgagtggtcggtttgg

SEQ ID NO: 112573 - DNA, 502 bp, Homo sapiens
aacatgtgtttcccagtacttcaagtagggataaaatatatgtggctgggaacaattacttaataaactgctttgggtgctctgtgagtccccagaaaggcaagtccaagatgacgccttctaagaagggtggatgtgaagagcctagagttttggttttgctgaggggagaatataaatttggggrccagagcttagacaatagaggtgaggttgagagcttccaccagtgatgatctttcttcatctttaccccatagagtgctcaaattcacctctaaatgaactatcaagtacatctcttcaaagagccatcaaattactagcctgcaagagatacccacatgtcttgttaaattgtgaatagtcccttttgtcactcatagtcagtcttgaagtattgagaaacataattaaaacaaaagttcattctcccagtcattcaataatttccatatcccttctccttcacctagaccaccctggccagaactgatgtcat

SEQ ID NO: 112574 - DNA, 502 bp, Homo sapiens
aacatgtgtttcccagtacttcaagtagggataaaatatatgtggctgggaacaattacttaataaactgctttgggtgctctgtgagtccccagaaaggcaagtccaagatgacgccttctaagaagggtggatgtgaagagcctagagttttggttttgctgaggggagaatataaatttgggggccagagcttagacaatagaggtgaggttgagagcttccaccagtgatgatctttcttcatctttaccccatagagtgctcaaattcacctctaaatgaactatyaagtacatctcttcaaagagccatcaaattactagcctgcaagagatacccacatgtcttgttaaattgtgaatagtcccttttgtcactcatagtcagtcttgaagtattgagaaacataattaaaacaaaagttcattctcccagtcattcaataatttccatatcccttctccttcacctagaccaccctggccagaactgatgtcat

SEQ ID NO: 112575 - DNA, 502 bp, Homo sapiens
aacatgtgtttcccagtacttcaagtagggataaaatatatgtggctgggaacaattacttaataaactgctttgggtgctctgtgagtccccagaaaggcaagtccaagatgacgccttctaagaagggtggatgtgaagagcctagagttttggttttgctgaggggagaatataaatttgggggccagagcttagacaatagaggtgaggttgagagcttccaccagtgatgatctttcttcatctttaccccatagagtgctcaaattcacctctaaatgaactatcaagtacatctcttcaaagagccatcaaattaytagcctgcaagagatacccacatgtcttgttaaattgtgaatagtcccttttgtcactcatagtcagtcttgaagtattgagaaacataattaaaacaaaagttcattctcccagtcattcaataatttccatatcccttctccttcacctagaccaccctggccagaactgatgtcat

SEQ ID NO: 112576 - DNA, 502 bp, Homo sapiens
aacatgtgtttcccagtacttcaagtagggataaaatatatgtggctgggaacaattacttaataaactgctttgggtgctctgtgagtccccagaaaggcaagtccaagatgacgccttctaagaagggtggatgtgaagagcctagagttttggttttgctgaggggagaatataaatttgggggccagagcttagacaatagaggtgaggttgagagcttccaccagtgatgatctttcttcatctttaccccatagagtgctcaaattcacctctaaatgaactatcaagtacatctcttcaaagagccatcaaattactagcctgcaagagatacccacatgtcttgttaaattgtgaatagtcccttttgtcactcatagtcagtcttraagtattgagaaacataattaaaacaaaagttcattctcccagtcattcaataatttccatatcccttctccttcacctagaccaccctggccagaactgatgtcat

SEQ ID NO: 112577 - DNA, 572 bp, Homo sapiens
tttctgtcttgtctgctgccacataagacatgcctcttgccttccaccatgattatgaggcctcctcagccatgtggaactgtgaatccattaaacctctttttctctataaattacccagtcttgggtatgtctttatcagtagcgtgaaaacagactaatacaaagtactatcatcattttaacttcccaaaaaacatctaatagaaaagatcttttccccactttagtttccaaagagcgatcactaaataatgattctatggcgctgagcaactttggagcgaatggctgataaaggtactggaaagccaacgtggggtagtgagaatcagaagacaagtcctgacayagactctgtgtgtgacctcagccaaggtatttaatctgattgcctcagctttctgatctcgcagacatggagctgggcaagttataataccagacatctactgaatagttaccatgcagcatgccttctttcaattacacctcaaaatagccatatgacataggtaagatgaccattcccatcttgcaggtggagtgtctggcactgcacaggtatgtaa

SEQ ID NO: 112578 - DNA, 574 bp, Homo sapiens
agataatttgtaggacactgaaaatactctgtatgatagaataatggtggatacatgccatcagatatttatccaaacttttagaacgtacaacactaaaagtgaaccctaatgtatactataacctttgggtgataatatgtcaatgtaggttcatcaactgcaacaaatgtaccactctggtacaggatattgataatggggaaggcyatgtatgtgggagtagaggcagagtagatgggaaatctataaccttcctttcaatttggtggtgaaattagaattgagctaaaaactaaagcttacttttaaaaaatcactgagacatattaaagacaaagtaactaaatggaaggctatacaatgtttgagaactattaacagaaaactcaatattgtaaaaatgacaattatccctattgcattagcatcatgcaatatgctgattgcaatgatgatcagcatcatcacaatcaaaattctagctagtattttaaaaatataaattgataggctacttgtaaaatgtatatacaaatgcaaaaggccatgaatatccaagaacaacctgaaa

SEQ ID NO: 112579 - DNA, 522 bp, Homo sapiens
ggacctgttgtagaaactgttcaggttccattatcaaaatgagaaaaatttgttggaccaggtggatataacttaaaaaacttcaggctgaaacagttgtaactattagtcaggtggatgaagaaacgttttctrtatttgcaccaacacccggtgctatgcatgaggcaagagacttcattgctgaaatccgcaaggatgatcaggagcagcaattagaatttggagcagtgtgtactgccacaataactgaaagcagagatactggtgtaatggtaaaattatatccaaatatgattttggtactgctttataacacacaacttgatcaatgaaatattaaacatcctactgccctaggattagaagttggccaagaaattcaggtgaaatactttggatgtgacccagctgatggaagaatgaggctttctcataaagtgcttcagtcttcagctacaactgttgtcagaactttgaatgacagaagtagtattgtactgggagaacctatttcacagt

SEQ ID NO: 112580 - DNA, 456 bp, Homo sapiens
aagctttgaaaagcagaacgattaagaaaaaaaagcacagtttctgaacaaaatgaagagatgttctgtgatgagtgtatgaggataggggtttggcagtgacgttgtcagagcgatgataggcagaggaggtattttatgatggagtgtatggaaagaaacaatgtgtggcatagatacacattgaatattctattcagtagtttttggtaaatgttatcactgttttgattccttataaagaatcagcctgactgagcagaataaaatgctctcaaatatcaattttccacacccatgaataacctagctgtttaarccatgaatccttaacacacaaaccagtcacaagggataaaccctatgtgcagggcacatactccgtagaaagaggtcacctttccaactgaaaactgcataaatgtaatacctggagacacacatacacacaagtac

SEQ ID NO: 112581 - DNA, 477 bp, Homo sapiens
tagtttttaatattaaaattactaaatttcctataaacccatcaccagacactttattgagtatgaagcatttattttgtttttgctgtcattgtttttggaaggaatatctttcgagggcctatgataagtcaggtcttggtccragagctttgcattataatgtcagttaaccctcatcataacacttcattcattcaacaacaaatatttattgtcttccctctgccagtcacttttagagaccaagcatacagcaggagatgaaacaaaaacaaaaacaaaaacaaaaaaatctcttcttcttatggatctgaaaagaaggaagtgttatcattatcatccactttttatcagagcagttaagccatttgctgaggtcagaagtatcttggctccagagaaaatgcaggccccaactgaagagccttactcaaagcacactgcctctatcccagccactatgctgaaggtttt

SEQ ID NO: 112582 - DNA, 594 bp, Homo sapiens
gtttagacaggatctttcgaattccagagacaagatcttggccaagctatgttatagttagttgagtttagttaactatagttgttagctaacactaacaattttaacacaatactcaatttgtaaaattgagatatcttcccggaaaatgttaaatgcgttgaagtattgcaaatgctaagttkagtgcctagtacatagtaagtattcattatcttatccaattatgtagtattaaatattacttatataaggtgagttccaaatttagctcttcaaaccagagcttttgccctaaacatataatccagctgcctgctagaaactttcacccttgtatctaactggcatctgaacattaacatctcctaaaacaaattcctgatttactccatccttaaacctgctatcccttcatcaactccaccccaataaatgatactccattttccagttgctcggtcccaaatccttggagttatcttttacttttctccttctcttataacccacattcaatctttcaggaaattattttacttataccttataaatacatactgaagactggtaattatctatctgtctacagca

SEQ ID NO: 112583 - DNA, 380 bp, Homo sapiens
gaattcatatgccaattttgtcaattaaagcaatatctgttatggtatttttcccccttcaagaacaggatcaagtctaacctaaagtattgtacttagttgtcatgtccatttactattttaatgtagaacagtcctgaagcctgtctgtgacttttatgatgttgacatttttwaaataacatagtcccccttttaaaaaaaaaaaaaatagaacaattcttcagaaaggccctggggaagaggaaaagcttttctagcaattgatgtcagcaacccaccaaggaaccagtggaagaaatctaagatggctgactaaatgcggctaatacacagctcttctgtggagaggaaaaaaaatggcaagtagatattcacac

SEQ ID NO: 112584 - DNA, 589 bp, Homo sapiens
atccccactgacctccactgatctggggcactcacctttcacacagtgcctgcagaaccacccagatgccatggtctgaaaaagctccggttcattaaagttataaagcctgcctttaaatccagcctgcctaactcaatgtacgctgttttaccctgctgccttgtgttggcctattactgctgtagtccctctcccatgttttcgtgacaggtaaagccacccttggtggctttcaaccaagggtaaataggagaaaacaaagaagtttcacaaaatacctagcatcttataaattattaaactgtgtcttacaacagaaatggggtaggcttccttgtagagtggctgagagttcatggactgcgatatcagtcagtttcaatttgatcatgcaccataagaatcttgtgaaaaatgcagatcccagagccatgcccatgattttgatttagtaggtgtggaataggttaaggaacctgaatttgtgtaagttcamtccctctgccttcaagagaggctgaagttgttgaataccacctagaggagcactggtttggtgcacacatatctacttagatagaaatgt

SEQ ID NO: 112585 - DNA, 335 bp, Homo sapiens
ctgtcatacatcaaggctcagtgcctggtaacatgtgttattatactcctcctttagaggcaatttactttctttgcattttttaaagtaagaaaccacagctactttctttcactttataagtttgttgcagaattttcttttctttaagggtcgtagaaggacatccaaagcatgcatgaaaaacagctttactgaaacattgatgataaccatgattccaggtgctattcctgtatgtaactttgactctccatgtccttgagatgacatcaagattacctctsaatagtggtgactgaaaaaattctgcattcagcactgtcactgtctag

SEQ ID NO: 112586 - DNA, 725 bp, Homo sapiens
ggtagaatctccaagtatattgttggctcatgaattcttctggtcataaatagtagtattcattgaaggagataaattggacttaggaataagtctaatggttgctgaaatcttagtgaagaccttgcaaatacatttgggtggttagtgattataaaagctctattataagaactccttctatgggacttgttccacaattctgttatgcttcattagcattatattcttgcttttcttcaactcttcagaggggagaaaaactccaygaggtattgcatttcaagtcctgaatacaatcataaaatgcaccaacaaattttctacctgtatgaatcccactgtgaacatttaattaaaaaaacaactagagaatttctccacttcaatgacttccttaaactttctggctctctaaatcttgtaccagccatgacttgactaagctacaaagctcgtcagagactagtgtgaattatgttccttggaggaatataattagtataaatcttgtgtttcattcttctctggaatgctcataattaatgttggtttgctttgctttccttggatatgaacttttccctccattttgccagccacgtaaataaagggtgaacaacaaaaaaagggcaaatatggaaaaaaggggccattaaaaagtagctgcaacatatgttcattaaaaatatattgattcagttatatgtttggcagcacccaca

SEQ ID NO: 112587 - DNA, 580 bp, Homo sapiens
  misc_feature (1)...(580): n = A,T,C or G
gatgtgcttggtagttttgcacctgagacaacactccttcaggttacrtctacaacgcacagtgctgaactggccaccgtagcagtggctgaagtaagaagcagggccgagaggatcgaaattgtgcacaatataaaacgcaagtctgtctgacttctagagtttttctactgcacaacctgccttcaccaagacagaagacccttcaatgagaanccttaanccaaacgagtaaaagaaatcatgatgtctctgggtggtgggaactaagcctaggataacctcttgcaggaatcaggacaacttccagttacagaatgtgcttcctgcagccttgagggacaaatcaaggcaaaacttagaagaactagatctattggtgaaatggaatcatgtttctgggtataataaacacaattatatgattcataagtatttgttaaaaaattgtcctaatatatgtctgacctgggaaaataaatgcatgctcatatgtaatttcacataacttacaaaggtttcagatatatctgattttatgcttaatgcaataatggcggctacagaacacatttattta

SEQ ID NO: 112588 - DNA, 580 bp, Homo sapiens
  misc_feature (1)...(580): n = A,T,C or G
gatgtgcttggtagttttgcacctgagacaacactccttcaggttacatctacaamgcacagtgctgaactggccaccgtagcagtggctgaagtaagaagcagggccgagaggatcgaaattgtgcacaatataaaacgcaagtctgtctgacttctagagtttttctactgcacaacctgccttcaccaagacagaagacccttcaatgagaanccttaanccaaacgagtaaaagaaatcatgatgtctctgggtggtgggaactaagcctaggataacctcttgcaggaatcaggacaacttccagttacagaatgtgcttcctgcagccttgagggacaaatcaaggcaaaacttagaagaactagatctattggtgaaatggaatcatgtttctgggtataataaacacaattatatgattcataagtatttgttaaaaaattgtcctaatatatgtctgacctgggaaaataaatgcatgctcatatgtaatttcacataacttacaaaggtttcagatatatctgattttatgcttaatgcaataatggcggctacagaacacatttattta

SEQ ID NO: 112589 - DNA, 580 bp, Homo sapiens
  misc_feature (1)...(580): n = A,T,C or G
gatgtgcttggtagttttgcacctgagacaacactccttcaggttacatctacaacgcacagtgctgaactggccaccgtagcagtggctgaagtaagaagcagggccgagaggatcgaaattgtgcacaatataaaacgcaagtctgtctgacttctagagttttyctactgcacaacctgccttcaccaagacagaagacccttcaatgagaanccttaanccaaacgagtaaaagaaatcatgatgtctctgggtggtgggaactaagcctaggataacctcttgcaggaatcaggacaacttccagttacagaatgtgcttcctgcagccttgagggacaaatcaaggcaaaacttagaagaactagatctattggtgaaatggaatcatgtttctgggtataataaacacaattatatgattcataagtatttgttaaaaaattgtcctaatatatgtctgacctgggaaaataaatgcatgctcatatgtaatttcacataacttacaaaggtttcagatatatctgattttatgcttaatgcaataatggcggctacagaacacatttattta

SEQ ID NO: 112590 - DNA, 611 bp, Homo sapiens
aactctagccttgactgtaggtgttaataacactaaattgagatgcccttcagaaatcagccttttcatcctaagtagcaacagcatgtgactgaatgtaatacagaaaggggaacatgtcttattaagtgagatgaggaaatgccatagcagagaacatcagaaggaggtgaaaaattaggacagtgggaaaggagaagagaaaactacaactaacatgtgaggaaactkcacttcacatgaacctgtctatgaacaattagatcaggaaagctgttgccacaattcttggtatgtgctctgttcttttatgggtgaatgagttattggtgttccttaagtggaattgctattctgaagattcctgcttttaaaattagcagaatttgcagtggaataaaataagtttgtagtggctttgtaatgacatgtaaatcaggttttgacactactggaacccatttcaggcaattctttgtctcatctcaatttgaacacactgtcccaggatagagctgtgaggcagaaacttctagaatgagctatgagttgcttacaaaggcacccatgctagccaatgagcaccattaactctggatattatttgtacc

SEQ ID NO: 112591 - DNA, 611 bp, Homo sapiens
ggcactgtccaccatttgttcctcctcatactaccacagctaatgctctcttgaaaccaccacttcctgctaggaggccaaccagtgcaaaaacagtgcattaatcaacctaagctaaggaccctcacagagtctatttcaccccctgccacctccaccggagcaattgctggtatccacggctgagagacacatagatggttcccatcacagaactctgtgaagacaacccccagtaccagcccagagcctggtagacttgctgggtggctagatccaaaagagagataacaattactatagctcagctctcaggaagccatatccataggaaaacrgagagaatactacatcaagtgaacacctcatgggacaaaagaatctgaacaacagccttcagccctagaccttctgtctgacagaatctacacaaatgagaaggaagcagaaaatcaactctggtaatatgacaaaacaaggttctttaacaccaccccaaaatcacactagctcaccagcaatggacccacaccaagaagaaaccccgatttacctgaaaaagaattcgggaggttagtaattaagctaatcaaggaggcaccacaaaaagc

SEQ ID NO: 112592 - DNA, 611 bp, Homo sapiens
ggcactgtccaccatttgttcctcctcatactaccacagctaatgctctcttgaaaccaccacttcctgctaggaggccaaccagtgcaaaaacagtgcattaatcaacctaagctaaggaccctcacagagtctatttcaccccctgccacctccaccggagcaattgctggtatccacggctgagagacacatagatggttcccatcacagaactctgtgaagacaacccccagtaccagcccagagcctggtagacttgctgggtggctagatccaaaagagagataacaattactatagctcagctctcaggaagccatatccataggaaaacggagagaatactacatcaagtgaacacctcatgggacaaaagaatctgaacaacagccttcagccctagaccttctgtctgacagaatctacacaaatgagaaggaagcagaaaatcawctctggtaatatgacaaaacaaggttctttaacaccaccccaaaatcacactagctcaccagcaatggacccacaccaagaagaaaccccgatttacctgaaaaagaattcgggaggttagtaattaagctaatcaaggaggcaccacaaaaagc

SEQ ID NO: 112593 - DNA, 596 bp, Homo sapiens
gcacttatttctggccgtgtctttggtcaggatcagtggttctgagaactgcttcttctgtgacagactacaatcactgcaattgcccttcaaagaaacgatggagttttgctttgacctcactgaaagcaaaatttgatggcccaaatttgactttcgttagtcttgagatgtatggcacctacacccaggggagtagaagactcagcaccgttttcagatcactcattcatgaggtcacagcaattttcagatcactcattcatgaggtcacagcagacaggggcacagcagacagctccttaaacatagagatgtgttgttcataggaaatcttggcctttgctttcctgtcrgagtttgagctggtggagtgggggtctcagagtcccgtgacacatcctagaatctgttaggacttaaggaaaatgggttgaggtagggtatcagggtggcctatggcaatatgggctggaaggaaggccaccccagagaaactcctgtgcctttttcttttgacttgatattcatgggctgatgtgtgaggtgacttggtacctttgtcctgggcacctggaatcaaaaactgaagtcac

SEQ ID NO: 112594 - DNA, 576 bp, Homo sapiens
gaacacactgtgtcccaggcactgttctaaggactggcagcgaagtccaagacaaacaatacctacctttagcaagtttgcaatcaaacaggatacggatgctsagcattacaagggaaatgattattctgaaagaggaagtatggggtgctatgggaacatataaccagggacctaattaaatgggaaagggaccatcccagatccagtacttgctctcccagtttacctccaataggttctttttaacttgaactaatcttgtttggtggggtacacagtgaggaaaaagaagagctagtgacaaaatctaactcctttctcagtcttaagcaaggtgaaggcaagggagtagaagatatcaagggagtcagtggtggtagccaccaaaggaaatagcaaactgaggcccttaaaaaagaaaggaaacctaaatctatccagcaggaccagagagagagcactgagggtgatcagatggaatccctgcatgcactctcctggcattctgaaaaggagccaaaacaaggacgaaactggggtatctagttaagacctcacaaatcactcatccat

SEQ ID NO: 112595 - DNA, 618 bp, Homo sapiens
gagttaataattcagcatccacttttctgtttagcaatatctgctaaattcaaagcagctgctttctactccctgttagtattctttagcaaagcttctagttaggataatccttaggatatataaacattttggttttattttttctcttaatactaactgggaaggtgcattttaaaagttatacataacatatataatatttttgtagttagtaatgtgtggagtataattgtaaattttatgtatatgctacacacccataaatgagacatgtacaaatgcattggtttcaaatctaaaagaaactggtttgggatmttttgcctttttttgtttgttttacttccaatactgttagcctaaccccaatgatcgattttcaaatttggaaaattttaagagacttatctgtgagatgtgaagtcaaagctttttaatatgcttaatgacttgcttttggtaatagattaagatcagaatgaaaagtagaccttttctgtggcataatagtgccagcctggggaaatagaattatttcgagtaggaaacacacactataattttagagagataaaggtaaaagatggccagtaaaagactagaagagttcaaaat

SEQ ID NO: 112596 - DNA, 618 bp, Homo sapiens
gagttaataattcagcatccacttttctgtttagcaatatctgctaaattcaaagcagctgctttctactccctgttagtattctttagcaaagcttctagttaggataatccttaggatatataaacattttggttttattttttctcttaatactaactgggaaggtgcattttaaaagttatacataacatatataatatttttgtagttagtaatgtgtggagtataattgtaaattttatgtatatgctacacacccataaatgagacatgtacaaatgcattggtttcaaatctaaaagaaactggtttgggatattttgcctttttttgtttgttttacttccaatactgttagcctaaccccaatgatcgattttcaaatttggaaaattttaagagacttatctgtgagatgtgaagtcaaagctttttaatatgcttaatgacttgcttttggtaatagattaagatcmgaatgaaaagtagaccttttctgtggcataatagtgccagcctggggaaatagaattatttcgagtaggaaacacacactataattttagagagataaaggtaaaagatggccagtaaaagactagaagagttcaaaat

SEQ ID NO: 112597 - DNA, 519 bp, Homo sapiens
agaggatccccttactagcagaaataatcctaatatactatctcagtttaacaaacaagccaaaaaattacatttccagtggaaatcaaccacagtaacaatgttgtacacagcatgctcaagatagagtttaaaatcaaaaccggttcttatagaagatcatgaaatacatgggtattgcagacagtagaaaaacagtttgttgaaatcagctgtgtagygtactttgtgcgtaactattacttgatggtgcaggcctttattgacctgagcaaaacagtgtttaaatcgatgtgattcccacattatgctgacatcattaccctatttataaataacatgtgagttaattcacatcatagaagtatgcattgtactaaaacagactgtagtcctatatagctatcatttttcctttgctcagttgttccactggtgatttagaaaggtgtacatgttacatttattctatcagtaatcacttctaagtattttaaaacacatctaagtctatttttc

SEQ ID NO: 112598 - DNA, 452 bp, Homo sapiens
aatctacaaccaactcaaacaaatcagtaagaaaaaaacaaacaatcccatcaaaaagtgggctaaggacatgaacagacagttttcaaaagaagatatacaaatggccaatgaacatatgaaaaaatgtccaacatcactaatgatcaaagaaatgtaaatcaaaaccacaatgcaataccactttactcctgcaaaaatggccataatcaaaaaacagtagatgttggcatggatgcagtgaacacagaacacttctgcactgctggtgggaatgtaaactagtacagccactatggaaaacagtgtggagattccttaaagaactacaagtataattaccatttgatccagcaatcccactactgggtatctaccyagaggaaaagaagacactattcgaaaaagatacttgcacacacatgtttatagcagcacaattcacaattgca

SEQ ID NO: 112599 - DNA, 502 bp, Homo sapiens
tgttcatttctatctggaactgtgttcagtttctcagacttcaagagaaaaagtaaactggcaggtgaggaagtttaagtagtatgataggttaaaagcatgggctatgtgatctgaggatgtcgcttagcttctgcttcagttgcacatctataaaaaaaggaatcaagcatgtcagaaagaggcgtgctcggaacatgcttagtcrtcaaatgtttgcgagggaattgaaaacctaaccccacggccctccaacctgttcctggaagaagaattgtgatctttattgaccaacaaccatgacgtctattgagcagtgagaggagttactgtattagaaagtggcaagtgtgctacacagtcagtcccagcatctcggtctgtgattctgagtaaatcatattagcttaggcttgtcctgtgttctagtcatctgtgatttggggggagaggagagagagagaagccattctgaattccaaaatgagataacagggccaag

SEQ ID NO: 112600 - DNA, 499 bp, Homo sapiens
caactctgcaacttactagcaaaaataatcctaatatactatctcagtttaacaaacaagccaaaaaattacatttccagtggaaatcaaccacagtaaacaatgttgtacacagcatgctcaagatagagtttaaaatcaaaacckgttcttatagaagatcatgaaatacatgggtattgcagacagtagaaaaacagtttgttgaaatcagctgtgtagcgtactttgtgcgtaactattacttgatggtgcaggcctttattgacctgagcaaaacagtgtttaaatcgatgtgattcccacattatgctgacatcattaccctatttataaataacatgtgagttaattcacatcatagaagtatgcattgtactaaaacagactgtagtcctatatagctatcatttttcctttgctcagttgttccactggtgatttagaaaggtgtacatgttacatttattctatcagtaatcacttctaagtattttaa

SEQ ID NO: 112601 - DNA, 605 bp, Homo sapiens
acacaagcttgttgctcccacccctcctccaattcaattcctatgcttttacctgtgtttctgattgactggctataaaccagagctcccacaacctccccctacaactccttggattggattaattttctggagcagctcacagaagtcagggaaacrggttcatttgctagtttattataaaagatattacaaaggatacagatcaagagatgcatagggcgaggtatgggaggtagggaagcttccatgttctttccaggcataccacccttcaggagactccatgtgctcagctatctgatagctctctgaatgcagtcctttcgtgtttttcatggaagcttcattatgtaagcaagattggttaagtcattggccattgataatgaactaacacttctgcccccttgcccctccttagaggcgagcagaaggggcttaaaattccacctgtcttgtttttttccatggtgatcagcccccacctcaatctacctaggggctgccacccatcagtcaacacattagcattccaaaaaatcactctggagattctgaggattttaggtgttaaattccaggaaacagggaggaagaccaaa

SEQ ID NO: 112602 - DNA, 520 bp, Homo sapiens
ctaatgtcaaagtgcacgtcatccatttgcttcacttgaacgcagcaattgcatttggtgtggttggtttgactgggtttggtctgatttcctttccttcattgcatagcaggatggcatatattacccctccctcttgcagaaggtttagacattaagccttccctgacctagatagaggaaacgagtttttctgttactaaagatgctggctttgagttaaataggtctgttgtaaataagatgaaaggaggatttgaagagaaaccactgctgcctgaaagaaacaaggggggaggtaagatttccccaaaactgaggagactggaagaaaaagagaagttaccggagccacttgaaccgagttgtcctgtaagggagtgggcctgctgccctggtttgcgcctcttccataagatttcagagcctgcctggagagaacaggcctggtctccatcacccacytaggaagactttcattagcatcacgcattctctgccctgaagagcgatagaatcc

SEQ ID NO: 112603 - DNA, 544 bp, Homo sapiens
gttctttccataataccacctgctttaatttgctaaccaagggagagctgatacttagcaactgggagtctcatatcctctcttggtgactctccaggtatttattgttcctttctrtgaagagcctatgaggagagggagaaatcatgttacacagagaaagtccttcaaagtacgacctctctggaacacctatcttagtttctctttggcagtttgtagaaaaggaatgtttctgtccttacctcaggctttctatttgagaatctgtgggtgtgaggaatgcatttttaacaagcccatttgggaatattgatgccatctgggaagtgtaaaagtaattacagaactgcttctacagagtgttggtaggctctaccatctaagaccccctaccccagtcagaatagatgaagcagaaacaagacgaggaggaagctccagtcagctcctcttcatgcagaaatggcatcaaggactagtattagagaggatatagcccccgacaaattctatcaaacttctgaaaaggtgcatttaagaa

SEQ ID NO: 112604 - DNA, 544 bp, Homo sapiens
gttctttccataataccacctgctttaatttgctaaccaagggagagctgatacttagcaactgggagtctcatatcctctcttggtgactctccaggtatttattgttcctttctatgaagagcctatgaggagagggagaaatcatgttacacagagaaagtccttcaaagtacgacctctctggaacacctatcttagtttctctttggcagtttgtagaaaaggaatgtttytgtccttacctcaggctttctatttgagaatctgtgggtgtgaggaatgcatttttaacaagcccatttgggaatattgatgccatctgggaagtgtaaaagtaattacagaactgcttctacagagtgttggtaggctctaccatctaagaccccctaccccagtcagaatagatgaagcagaaacaagacgaggaggaagctccagtcagctcctcttcatgcagaaatggcatcaaggactagtattagagaggatatagcccccgacaaattctatcaaacttctgaaaaggtgcatttaagaa

SEQ ID NO: 112605 - DNA, 589 bp, Homo sapiens
gactccctaggacaccctccccatgagtttatgacaggtctatttcatagcttttcttactgaatggtgaatttctggcctttgcaaatcacgtctraagaaatgagcactttctatgaggcttaaacatgcattcaactaatcaatcacttggattaggaaaagtcaaattattagtaaagtggtgagacaaggaagaccagatacattcttggacacatgtgctgttttaaaggaagccttcgtaggttttatttcctttcaaaggcagggaaaatagatgtagtttcttcagtactctgacttcatattattagacttgccaggtgataaagtgaatattgattagatatcattcagtcattagttcagaatattttaaagctttattgttttctaatagcttagcaagtcatgaatacaagtctttatgcttcaagatgatttatagagattctctcaatttacctttttgtacatgccaaaatctgttttcttacttaattttactttaaaaaaatatttggcaatttttttacaaaaagtaattttttaaattgcttttgtcatggatacatatttgtacata

SEQ ID NO: 112606 - DNA, 595 bp, Homo sapiens
aaccctgtctctactagcaatacaaaaaattagctgggtgtggtggtgagcgcctgtaatcccagctactcaagaggctgaggcaggagaatggcgtgaaccgaggaggcagagcttgcagtgagccaagatcacgccactgcactccagcctgtgcgacagagcgagactctgtcttaaaaaaaaaaaaaaaaaaaaaaaaaaaaatccatatagaaataagattccacaaataagtgcttttttatcaatatgtctaaaatactcctttaaataaatataaattatattaagagaaataagtcacattctatattgtcaaatataatgayttaatctcccggaaatgcattttcccttattttgatgagaaaggcttatcaagttattgttcgcacattttaaaaggaggctttaatttctttctttagccctaagggaaaatgtgaacactggatattatttggagtttttcacatgaaatatgtttcatttaaaggcagtttacaaaggaaagtaaaattgttatcttttttccagtattacatctattgtttaaaatgtatttgtaagatatttgatctccatagcacat

SEQ ID NO: 112607 - DNA, 540 bp, Homo sapiens
cctgaaagtataattttttgcaagtgatttattagatgagtttttagaaagaacccaaaggaaaagagggaagtggggcagggaagagatagtagccaagctyggtatactgtcaagcaaagttccacagaaggtaaatttgattcaatcctatagctctggagagaatacaggtcatacctagagttgtctcacaactaggagcacgggagctggagaagttataccctagaagccagtcatttattggttaatggctgctcctgggggtatgtaaattcctaggtactttcagttctctctttgtgaagataaattagctataacagcttgaggacagtgtccaaaaagagataacatgtactggctcttaagggtacaaagtacataggaatctggggcggaagagggattagaagggacgtgagtccagcactgacattttctgctacattactcgtctaagaaaggtgtatctaaataggagactccatttcttgtatcaaagggaaaaaatgcttgtccagtaagactttaatg

SEQ ID NO: 112608 - DNA, 671 bp, Homo sapiens
tttggaatattttctttgttgttttttttttcttactttcataactaatttcccttgaaagggtatgacttggatctgacttgttctgaattttacgctacaataaaacatgttagggagaaacttctgtgtctctgacagcctgtcctctaaaasacatctcaacatgtgaactgatgaaccaaaatgccacaaccttgagaagaaattaactcagagttattcatcttcgaaatccatgttttaggtggtttccatggtgactccctggctagcagcatctttgtctaccagatgtcttattgttcaacagctcatctgtcttcagagtttaaggtttgaaaactgaagtccaagcagaacactttctctaaatatcacagagaagggggaaaaagacaataaaatcattagaatgtttaacggacataagatgggaatggcgagcagagacattgttctgccatggtccaaatcagtgcatgacaaatgatttaggttttcattgggttctgagggcataaatatgttataataatgaaagaaggcttaattatacttaaaacagaactcctactcacttggcaaattttatctccctattggctccacgatatattagttcacatggtaagccacttacttctatcaagtcctgattgttgcaagac

SEQ ID NO: 112609 - DNA, 519 bp, Homo sapiens
agtagagacatcaagtaggtagcacaagacacaagccttgcgtttaagagagacaccaaggccacggacaatttgggtgtctttagggtagaaacagtatttaatgccatgtgattacagtagatcactgatggagggagcacagaagggacaaggtccaaagactgggtcccaggcacaccaacatcaagacatcatggatacaggaacaaatcagcaacagagagttggaaggagcagctaaggtcagaagagggggtggtatcatcaaagccaagtgaagacagtggtccaagaatggatcagctctatcaaaggctgctcaagcagagtaagacaaaggccaagtactcaccactagatatagcaacastcatcagtgacttgctaagagcagttttggtaaagtagcaaggctgaaagtcctaactggagaatacttgagaggatgaaaagaaaaatgaagacatggagtttatacatcatttttctagaagttttgatgcaaaagggagcaca

SEQ ID NO: 112610 - DNA, 483 bp, Homo sapiens
agatctcttaatgggcctttgcttttctctgtgmatgtatggtagctttctaaatcaccttatatgtatatagttggtttgagtgtcccagtctttaatatctggttccccccccaaaaaaaagaaaaagaaaaaagaaaaaaatgaaggggtgaggaatggcctcagccctttaaatgctaagtatatttatttagcctgagagggagacgctgcaacaatgagggaggggtacaacaacagctaaccacctagatgtctgcaccttcctgattagtaacagcaatcagtgatcagaacatagaacacggatctccaacatttggagtagagttctgcttgctcaccctggccctctcaagctgcatgtaagctgctttaggaacatgtgcatggctgctttccacagggctagaggtggaggatgggtagctgctgctgagctaaacactaagagcaatccaaattaactacaatttgcca

SEQ ID NO: 112611 - DNA, 554 bp, Homo sapiens
taatcacattagccgctcccccttaaagctctccaggacttttctgctagctaactcagttgcctaaaaaccttcccaccttttaaaaaatgtaatttacaaataataatgtacatatttgtaccaggatagttgagttcaatttctttttcttcttgcaaaggtcttcaataaagtttttcttgcccatttagctggctaggtacttccccttgctcccaatactacttcatgacttcatggctagaggagtcaacagcgattttatagttagaagacttggatcttctaacgcttaaatcttggatcttctaacttagactcttccttaaacacagcagttaacttcagagtaccctcattttcttattcataaaattggaacctcaaagattcctatgaagatgayacaagatgagggatgtagaaagcattgtaattattttttttaactgaatagttaatttcatttaattttttaaaaatgtattatactttaagttctgggatacatgtgcagaatgtgcaggtttgttacataggtgtacacgtgc

SEQ ID NO: 112612 - DNA, 554 bp, Homo sapiens
taatcacattagccgctcccccttaaagctctccaggacttttctgctagctaactcagttgcctaaaaaccttcccaccttttaaaaaatgtaatttacaaataataatgtacatatttgtaccaggatagttgagttcaatttctttttcttcttgcaaaggtcttcaataaagtttttcttgcccatttagctggctaggtacttccccttgctcccaatactacttcatgacttcatggctagaggagtcaacagcgattttatagttagaagacttggatcttctaacgcttaaatcttggatcttctaacttagactcttccttaaacacagcagttaacttcagagtaccctcattttcttattcataaaattggaacctcaaagattcctatgaagatgacacaagatgagggatgtagaaagcattgtaattattttttttaactgaatakttaatttcatttaattttttaaaaatgtattatactttaagttctgggatacatgtgcagaatgtgcaggtttgttacataggtgtacacgtgc

SEQ ID NO: 112613 - DNA, 666 bp, Homo sapiens
gtcttgcaacaatcaggacttgatagaagtaagtggcttaccatgtgaactaatatatcgtggagccaatagggagataaaatttgccaagtgagtaggagttctgttttaagtataattaagccttctttcattattataacatatttatgccctcagaacccaatgaaaacctaaatcatttgtcatgcactgatttggaccatggcagaacaatgtctctgctcgccattcccatcttatgtccgttaaacattctaatgattttattgtctttttcccccttctctgtgatatttagagaaagtgttctgcttggacgggagttttcaaaccttaaactctgaagacagatgagctgttgaacaataagacatctggtagacaaagatgctgctagccagggagtcaccatggaaaccacctaaaacatggatttcgaagatgaataactctgagttaatttcttctcaaggttgtggccttttggttcrtcagttcacatgttgagatgtgttttagaggacaggctgtcagagacacagaagtttctccctaacatgttttattgtagcgtaaaattcagaacaagtcagatccaagtcataccctttcaagggaaattagttatgacagtaagaaaaaaaaaacaacaaagaaaatatt

SEQ ID NO: 112614 - DNA, 575 bp, Homo sapiens
caaaccctagttctatgaaagtaagccagcagcacttgatgaagaggtcacaagaagtataaagtggttttgatcaaaaggccttaatattcccctaagcttggctaaatttgagacaagcttcttcctgacttgaagctcctgacctctcttttcttagagcatttagtttagataattttacattgtaaattatttatctggtcgtttgagatgtaaatcttctcccagccacctgccaggtttataacccaggaatgcttttcccaaggacctgggccctttctttgtgtgtgtgtgtgtgtgtktgtgtgtgtgtgtgtgtgtgtgtgtgtttccgtaggctttagattttttttattttcataggttttttgaggaacaggtggtatttggttacatgagcaagttctttactggtgatttgtgagattttagtgcacctatcacccgagcagtatacaccgaacccgatttatagtcttttttccctcatcctcttcacatcccttccccctgagtccccagagtccactgtgtaatcttatgcctttgcgttctcatagcttagctcc

SEQ ID NO: 112615 - DNA, 486 bp, Homo sapiens
tcttttgacctcctcccataaaccaaaaaaaaaaaaaaaaaaaagttcttaatggcatctataatggtaaatcctttccaggaggttttcaatttacttttcctagatccatcagaggaatcactatctatgacagctatagtcttatgaaatgtatttcttaaataatgagacgtgaaagtcaaattactttttgatagatgggtacasaatgaatcttgtatcagaagtcattgaaacaacatttatctctgtacatctccactggagctcttgggtgactgggtatatcaccaatgagcagtaatattttgaaaggaatctctttttctcagcagtaaatctcaacaatgggcttaaaatatgcagttaactatgctgtaaacagatatgctgtcattcaggttttgttgttccatttatagagtgtaggtagatttagcatagtgcttaagggccctaggatttttggaataagctttggct

SEQ ID NO: 112616 - DNA, 486 bp, Homo sapiens
tcttttgacctcctcccataaaccaaaaaaaaaaaaaaaaaaaagttcttaatggcatctataatggtaaatcctttccaggaggttttcaatttacttttcctagatccatcagaggaatcactatctatgacagctatagtcttatgaaatgtatttcttaaataatgagacgtgaaagtcaaattactttttgatagatgggtacagaatgaatcttgtatcasaagtcattgaaacaacatttatctctgtacatctccactggagctcttgggtgactgggtatatcaccaatgagcagtaatattttgaaaggaatctctttttctcagcagtaaatctcaacaatgggcttaaaatatgcagttaactatgctgtaaacagatatgctgtcattcaggttttgttgttccatttatagagtgtaggtagatttagcatagtgcttaagggccctaggatttttggaataagctttggct

SEQ ID NO: 112617 - DNA, 362 bp, Homo sapiens
agggacaaggtagaatggtggtggccaggggcttggggaggagagaatggggagctactgtttaatgggcacagagtttctgtttgggaaggggaaaaagttctggagatggatggtggtgatggttataaaacaatgtgaatgcacttmgtgccattaagctgtacacttaaaaacggtttaaaaaaagtaaatgtcatatacgtattttacaacaaatttttttaagttaagggagccagactgagccccaagtagaaactgcagggtagggtgagatcccttttgctctcaggtagccggcgaatacagagacagttgagcgaagcgtagaagcaggatagaactagagaaaatgaata

SEQ ID NO: 112618 - DNA, 573 bp, Homo sapiens
gaaattctcttagtaaaatgtaaatctgcttcttaggccagttaccaaagggcaaagatgatttgcactgtgattgcttctccttatgggaagctcatttagataacctgaaagccaaacctgatgggaaaagagtacttgaattaatcagatacaggaagagtgtgtccagggtcatgagtgaaccttataaaggaaagaagaaaccgggaaacgagtactttgagcaggggaacagcatgagaagtttgccagttacatggaacaatttagacataatcaagaaaagccaagagtacggaatcaagttatactggaagaaaacatcgcttttctagaccttacagataaacatttcagcatcaggccactgcagtagttagaactggaggaaaaaaagttaaaagagctagcaaaaaggttgaaggagagagttagcatctcaggccttttcatggggagaaaaaagctgaaagcagcaagacacattctgagacatgaatatgagaagttttcaaaaagaaacagtatagtatcaaaatcaaaacctsttgtgattttattaagagcaaa

SEQ ID NO: 112619 - DNA, 613 bp, Homo sapiens
aagaaaggggaggaaaaaagacacatcttttccctttatactttcttaagttgtacccaccattttcacttgtatcccattgaccagaaggtaatcactttgtctttatttcagatggttgtgtgcctagctagaattaggggttctgtcactaaggaagaagaaaacaatggggggaatctctcacgggctctaccacactatcagaaatgtttactgtttttttttttcttttgactcagaaggctcaattatatgacctctggaggtttctttaaatagatatgtatttttttacattaaatattccttcaggaaaaattccctcaatatttactgaaccctcccatgtgctaagtggtatagtaggtattttgaggactatgaagattgacaaaacatattatctgatctcaaggtgtttacaattcatttattcaataaatatttgatagaaaaaagtttctgtgtactaagtatatgctaagctctggagatagaaagtcaaaacagaagtatgggattaaaccaaagaaacaagaatacatgaaataataaatataagggcagaaatcaatacaactaacaacaaaaraaaaataatagtaaagat

SEQ ID NO: 112620 - DNA, 588 bp, Homo sapiens
tattgcctcccaagccttcgttttccctttccaactcagctgtattatctcagtgggattgtcttactccaaatataaaggtgaaacttgattggctttaaaaaactgaagtgggagttcttagctgcagtgagtggtgatcgaacccctgcactccagcctaagtgacacagcaagatcctgtcattacaaaaacccctcaatcccatgaccccagcattttgtcattgtgtcagtttttttctttttttggtccagttgaggtcaatgagatgtaatatgtgattcttagtggcttcagagaatgatgcttaccacctctctgtgtctctagctagatgtaaactaaaaagcctacggaacaatttgtgaacagcagctttctgggaacactaaaggataatgatacccttactatacatgtcaggagagagagatrgaaagtaaaaccttcatttgttaatattggtaagatacattaatcttttcagtgacatgaataaaaatatatttttcaagacaatggtaatgattttctgttaattgcaaataaagaattgaaacttgtatacattgtgagccaaagca

SEQ ID NO: 112621 - DNA, 604 bp, Homo sapiens
ttttcatttcagaagacaaataagtacatataaaattgcttaacaacatgctggaatatagttaaaaaaaacaggagcaagagatttagtctaaataataagtagacagatccagtttacaaaggagttgatccctttcagtgggtgtgtggaaaatataatagagaggaaaggaaatctggaagttccaccaggtgttttctaagtcattgggaaaaatatcattagattttaccttatgactgagtatattaagggttatgtaatatacattttatttatcatttctattaaaatgtatattatcttaatataaattttatttgtattaatayaagttgtatttgtattataattattataattacatgtttgatataacacttctctatttaaaaacacatttgaataaacaatgcacttcatctcctgacctgactatgtaacagaatttgctttgcttgatacaacaaaccaggcttttttctcttttcttctttttttgttcctggcaaatcaaagtattgaactgcagcagttggcttatagaagctcaggtcagaggaaagtggattgctctggattgctgatgtttcaaaagttt

SEQ ID NO: 112622 - DNA, 590 bp, Homo sapiens
  misc_feature (1)...(590): n = A,T,C or G
agaagtaataaaataaggatattgttattgttctttgttttgttttgtgttatcatttagacatagctcttaggtctgtgtcacccagacaagtgactaatgtctatacatcttctttgatgccctgagcatcctttacttctggatgctgagcatttttggcacgagcatttttattactttcatactttctgaaatttatacaattaacatcttcagagttaagtgagagctgatataagaagatacctctagataagttatttttcaaatccttccctgccttcaatgcacttattgaaaytgatacctaagttatgcttagcagcaataactgaaattaaaaactctcacactatgtcttcctagttcacatggaacttaattcaatttgaaatataaaatcaatcttggcctacagaacatactgaaaataaagtaaaatgtcagatattgttctatcaattctcatttagaactaattcttactgtggactttcttgaaatactaggccaaaatgcacatcatcagcttactattgagatgtagtggattttttcactattatctcttgctctttggagnnnnn

SEQ ID NO: 112623 - DNA, 587 bp, Homo sapiens
gaagtacaaatatgtatacatggaatgcaaaaacaagtaatctaacagacattttattagtccatttgtgttgctataacaaaataactgagtggataatctattaaaaaaaaagaaattcatttttcagtctggaggttggaagtccaaggcaccgggaggttcgttgtctggtgagggtactgtctctgcttccaaaatgacaccttgttgctctactctggggagcggacaaatacagtgtccccataggtgaaatgcatagaaggacacaaggactaaattcacttgctcaagcccttttaacccattcgtgatggcagagcccttatgaactaatcacttcccatgggccttatgtcttactgccattacctcggggattaagttccracatacaaaatttggagggacacatacattcaaaccataacatcctcttagctatgtgatcaagttagcaccactattaaaattaatgacatcatgctccttcttatatcatttaatgagaaagatatttcttctgtgtgaatttcaaaaaaaacaaaatcaaaaactccagtctaatgagaaaaatatagcac

SEQ ID NO: 112624 - DNA, 647 bp, Homo sapiens
ggggcctggctcgcccagtccccactctagggcaccactgggctcagctttatataatgtttcctttaggggcaaaacataaatgtttgaaaacagctgcattgaagaaaactgacagcaacgtaaaccatccccaggggctcgagcctaacagactgagtctccaggccacacagcagagaggcaggggagggccgtggtatgggaggctagctccagcctcccagcagctctctgcctcagtttyctcgtctgtaaaatagggataagggcagcctctcctcttaggatgtgagcataaaatggcttagtgcccacaaggctctgggaaggcctggccccaggcttgtgtttaccatcgtgtttctcattcgtctgccttctcttggcttggaagagagcaccttcccagttttattttgttttgttttgttttttgtcttctgccaggcaaggctttttctctcgctgcttttcttcccctttgattacagcagaagtgaagactttgtttctctgtgtcacgtaaaataatgatgtaggcccggacatagcctgctaacttagagacccttggactctttcatctttggatcagacggagcagggcttgtgttctgtgctttgtgaggccagtggggggagcg

SEQ ID NO: 112625 - DNA, 571 bp, Homo sapiens
catctagagtgctatgatcagcttgggctacacctccttgcattccagtatacgaagtaccccaaggaagaaaaccaggggattagtaggagtctgtctgtgtgtttcccttctgtcagtgatcactttccagaactacctgttattcaaagtcagaaaaaaattgtgtcatatattttattcatttttatattgtggattgtgaaaataagaaccaagactgtgactgttggtacatagcaaaaggtctaatatccaaaggtcctcatgatacagtattaatgcactgagtctgtcagtcggtgatcagtckttggtccagaaaagcaattgacgacatgattggtgaaaatatcccaatgtggtgatttgaaaatatcatgaaagaagagtttgagcatttccatttctctacaaagatcctaaatttatcaaaggagattggtcaaaagtgcacagtctcttttgcagttctactatactttacagatctgctataaagtcctcaaactgaccttcaatgcagtctttcctactgctgcaggagcaggatgtgggtaatggagggctc

SEQ ID NO: 112626 - DNA, 476 bp, Homo sapiens
tctgataaaaatggaaaagaaccaatttgccagayaaatggctgcataccatgtaccagagaccatggtaattttctctagcaaatatattacatctggcagagcagctgcagttgaggctattacctggttgagtttgcagttatccactgacatcattcaagttccatctgtttgtttgtttgtttgtttgttttttgagccagatggataaattaaatggagatatgatggaaccatagatcctttaggtctttaagagttgtactaatttttgccatttcccctgagactcaatgggcttttatttactttgtaggctaaggactggtacatttttaacatctacatgtatttattttgttctaaaagcatgaggttttgaattagaggtcaggcttattattacagaaacaacagcactgattccctgtgccctaatcttcctggggtgatacaatgaggatggatataac

SEQ ID NO: 112627 - DNA, 591 bp, Homo sapiens
gtggttagaagcatggctctggaattagatttgttattaattaattaatctatttatttattatgtccaacatttattttaggttcaggggtaaatgtatagatttgtcacgtgggtaaattgtgtaccatgtgggtttggtgtacagattattttgttaccaggtaaatgagcatagtaccctacaggttgtttttcctcattctcctctaccctccaccctcaagtaggccctggtgtctattgtcatcttctttgtgtccatgtgtactcaatatttatctttcaattgtaagtgcttataagtgcttaggataatggcctccagctgcatgcatgctgctggaaagggcagggcttcattcttttggatgkctgcatcgtattccatggtttatatgtatcacattttctttatccagccaccattgatgagcttctagatttagtccccatttttgttgttgtgaatagtaatgccacggacatacacgtacatgtgtccttatggtagaacaatttatatacctctgagtatatatccagtaatgggattgctgggtctaatggtagttctttctgtttgaagtt

SEQ ID NO: 112628 - DNA, 400 bp, Homo sapiens
gttgttgtgaatagtaatgccayggacatacacgtacatgtgtccttatggtagaacaatttatatacctctgagtatatatccagtaatgggattgctgggtctaatggtagttctttctgtttgaagtttgttgagaaatctccaaatggcttttcacagtggctgaaataatttacagtgtaaagcattgcattttctccatatcctcataggaatgttatttttttactttataataatagccattctgactgctatcttattgtggttttgatttgcatttctctaatgattagtgatggtgagaattgttttatatgtttgttggctgcatctatgtcttcttttgagaagtgtctgttcatgctttttgcacagtttttaacagggttgtttg

SEQ ID NO: 112629 - DNA, 562 bp, Homo sapiens
tgtcattattgcagtactttgcaaaatgtttatacaagccaatttatactaccaaaattttgtctggaaataccacaagtttattgtgtgaattctgttttctgggctatcgtaagctatagttgtatcaaatgttttaccagaacgtaatatgggttacattttccaactccaaatgttttccttctgcctgatacccagcccggaagccaacatcacatattttagttttagttaaggcaggacctgtttctgcattagttagataatattgagacaatgaattcttctaacatttcaatggtttataaaacaaatatatatttcctcctccaagttctgaaaattgactgtgagttacctaggttcaattggttttggcatatggctaactgcaagttggtttcagttaygttcctatgtccactcattctggaactcagaggcaacagagcatgctatttgcatgtaagaggagagaattgcaaacaatgaaactaaaaaataaagcaaaattataaaaacacatttaaacattttgtttacatcacatatatttaat

SEQ ID NO: 112630 - DNA, 598 bp, Homo sapiens
tattatctacctatagactgcactagatcttgaattcttccccattcctccaatacaactttattttgtatttttttggaattattaaaagtgggaactgttctgtttctgaagccctataagctgaaactaaataaattttaaggaacaagttttgtgtctgatgtatgggccacacagaaagtttacaaaaccacccaatgccataaccagagacactcaaactgcaaaccaggacaagaagttgatgtttttgtgctgtaaacagcttctcccgagatgtcagaacaagtctcaatatcataatgaaatttttacctgtctttatgtctacctttctcacttggcaggataatggtgtaattgaactttcacagtcagtagctcatgctggtgacttggcagaacttaacctaagagatagtttagcatctattggttaaataaggaaatgtctgtactattgctaatactacatgatgtacttggaaaaattgctgtgggatagatgagacccatatattcaaaataaggaaacaagtcccatggttacarcagttctcatctacttccctatggtcatatgatttattcaatt

SEQ ID NO: 112631 - DNA, 575 bp, Homo sapiens
tgctctactctccagcattgtgcaacaatttgcctgtaagattaaataattttgaaaataatatcctgtattctaagacttaggagagaaaaatgtattaattcgtagataagaataatttaaagtaaggtcttagaatacacgaaaacattaatctgtaaatcaagatttgctctttggagaacacagaaccctatacaactggtgtggataaagsctgggtagaatgacgagaagagttagcaagatgaaagttataccagaaaagcgtagccacattaaaaaatagtgccaaccgaaaaatgaatataatagtcacatgtaaccatgaacatactgatagaaccaaaggaggccgtgtaagcagtgagaaaatgtagtttatggattcagattgtaaagggaactgcaaacaaggtagtttgagataaagaagtaaagaggttagtcctgtaaatctcactatattttacttatacttttaacccaataaaataaaatataaacaaaatcacattattttcagtagcagtactttgtcaaaaattcaaaatatggaatataagcattgaatt

SEQ ID NO: 112632 - DNA, 519 bp, Homo sapiens
tggtggatgaggcattccatgagtccacrgatggtagtcatggcagaagcattttgtgcagtataggcaaacccatatctggagtaagtgtctattacagtgaagaccaactactgccctttccatgatgaaagaagtccaatataatcaacctgccaccaagtagctggatgatcaccccaaagaacagtgctgtattgaggtctcagtgttggtctctgctgctggcaaatcggggacttggcagtggccgtagccaggtcagccttggtgaataaaagtccatgttgatgagcccatgcataatctccatctctgctgccatggccactttgttcatgaacccattgggcgatgacagggatggccagggaaggaggctgagtggtgtccacagaatgagtcaacctatccttgtgattattaaaatcctcctctacttaggtcaccctttggtgagcactcacatgagatagaaatatctttacagtttttgaccactcagagaggtccttccac

SEQ ID NO: 112633 - DNA, 583 bp, Homo sapiens
acagttaggcaagaagaataagatctggtgttcagcaaggtgactatagctaataacatagtagtgtatatttcaagacagaaataataaaagattttgaatgttattaccacaaagaaatgataaatgtttaaggtgatgaatgtggyaattagtctgatttggtcattatacaatgtatacatacaatgaaacatcacattgtatccccaaaatatgtacaattattgtgtggcagttataaattttaaaatattaattaataaaatacagaaaattgatgtaaaactaataaatattaattttacatttaaaagttattgaatcattcctccattttaaaaaacaaattactattacaagatttgaaattattgagggctcttttggttatgttcagtagtgatattgttattattatgaaacctaatgcctagatcattgtatgtgatgcctgattaaaagataattcatgctattatgtcattaaatttataatagggagagatatgtttgaatttcctagaaaacttacaggataggaatacctaaatcaagcctcatttttcaaaacaatggtatt

SEQ ID NO: 112634 - DNA, 572 bp, Homo sapiens
catgactatgaaatcaccaaaagcagaaaatgactatcaaattaaattcagatctaagattacttaattccacagaaagcaaggttacagaagtataaakaaaatgtctatctctaacaaataaaaaaagtttagagctttaaaaattataccaatttacattcctttgtaattttattcatattccttctaattttattagaattttgaaaacttatgtgaaatagtgagtctagaagcccaaagtaataatgttctaaaacaatttataaaagaaaaatgaccacaagcaaggcaagcattcttataaaatatatattcctcacttattaaaattaatgcagatgtggtcaaaattagaaataagatctttaccaaaatgccagaacaaaaattattttaccaaaaagaagatgaaataattaaagcacttaacactgacagctagaacgtcaaataaaatgagttgctagtttaggtagagtagcctttgttatacaatagtttgacgatttgaagttggaaaagaaggtgtcaaaaaaatagtacttgaaaatattccctgtgctcac

SEQ ID NO: 112635 - DNA, 506 bp, Homo sapiens
ccacagaggcagctgtaggtcatagctctcccaggggagcccagtccctgtccctccatctaatgttattagaattggtttcccatcagccttcagtgtggacttccagcctcttttctagtcactgcttcctgatggacaggaggtgctggaggtgcacacacctgtttctccttgcacaggcccagcttttgagcacgtctttgtttgcttagtggtaagatgctcctgtcaccctgcactgctcagaagctatctgcttacccggccagggcagggcagcagagggtctgccaatggtacctttggggtgtaatgattgcctttgggggagggttttctcgatggggttggtctcctgagaaagggctgcaaaccacaccacgtgtgcactctctgctgtcatggagagacctgcatgtggagcccacagacctcayagtctatttgctgtggggacagaaacctgaatgtactggatcctgaagttcttaaacaaggggctt

SEQ ID NO: 112636 - DNA, 615 bp, Homo sapiens
actggactagctgcctcaaacaaggatggagcctgcctcctcagtttagtwccaaggcaggagcattaacaagaggaatgcaaattctcccacatatttctactttgatttttaggtttccattctttcttgatcagtgtcctctattttacatacaagacttggtaaacctgtaaattcaactgatagtgtaattcagcattggaaagataaaacttagagggttctgtgactactgtattttttgtttgtttgtttgtttgtttgttttgctatttctgccagctgaacggtaagagattgttcagcatggtcatagagcaatgtccttgagctttatactatgcctcaagctgagtatttggagttttgaagttggcattctcttgcctgtagttatttcatatagcagaaatggccgattcaccactagagtctaaattgttcataggtgctatggtttaaatgcatccttcaaagttcatgtgttggaaacttaatccccagtgcaacagtgttgagaatggggtctttgggatctttaggaggtgattaggtcatgaaggatctgccctcgtgaatggattaacagagttatcttgggagtgggcttcg

SEQ ID NO: 112637 - DNA, 615 bp, Homo sapiens
actggactagctgcctcaaacaaggatggagcctgcctcctcagtttagttccaaggcaggagcattaacaagaggaatgcaaattctcccacatatttctactttgatttttaggtttccattctttcttgatcagtgtcctctattttacatacaagacttggtaaacctgtaaattcaactgatagtgtaattcagcattggaaagataaaacttagagggttctgtgactactgtattttttgtttgtttgtttgtttgtttgttttgctatttctgccagctgaacggtaagagattrttcagcatggtcatagagcaatgtccttgagctttatactatgcctcaagctgagtatttggagttttgaagttggcattctcttgcctgtagttatttcatatagcagaaatggccgattcaccactagagtctaaattgttcataggtgctatggtttaaatgcatccttcaaagttcatgtgttggaaacttaatccccagtgcaacagtgttgagaatggggtctttgggatctttaggaggtgattaggtcatgaaggatctgccctcgtgaatggattaacagagttatcttgggagtgggcttcg

SEQ ID NO: 112638 - DNA, 537 bp, Homo sapiens
taaccagagtctgtggtgagagtgtggggagcccattgtttccagagttgatgtcctaggaggatttgtgatttctgagcctcaaatgaaatttggtatatattcccagatgagaagcagcagtgatgggtcagcctaaggaccagccccagaccaaagaacagattggatggaatttagacctctaggttctgggatcctaaagaactgaagtaattagccagacatggtggtgtkcacctgtagtcccagctacaggttgaggtgggaggatcacttgaacccaggagttttagaggctgcagtgagctatgatcacaccactgcactccagccccagggccacagtgagaccctgtctcaaaaaaaaaaaaaaaaaaaggaactgaagtgaagtcagaatatcttcttttcaggccttagagaaagatcgttatgagcatagtcccaaatctggatttctctgaagccaggtcctcccttggcttaccattctgtcttccactgataacttgaggcacgtagccattaactgga

SEQ ID NO: 112639 - DNA, 537 bp, Homo sapiens
taaccagagtctgtggtgagagtgtggggagcccattgtttccagagttgatgtcctaggaggatttgtgatttctgagcctcaaatgaaatttggtatatattcccagatgagaagcagcagtgatgggtcagcctaaggaccagccccagaccaaagaacagattggatggaatttagacctctaggttctgggatcctaaagaactgaagtaattagccagacatggtggtgttcacctgtagtcccagctacaggttraggtgggaggatcacttgaacccaggagttttagaggctgcagtgagctatgatcacaccactgcactccagccccagggccacagtgagaccctgtctcaaaaaaaaaaaaaaaaaaaggaactgaagtgaagtcagaatatcttcttttcaggccttagagaaagatcgttatgagcatagtcccaaatctggatttctctgaagccaggtcctcccttggcttaccattctgtcttccactgataacttgaggcacgtagccattaactgga

SEQ ID NO: 112640 - DNA, 537 bp, Homo sapiens
taaccagagtctgtggtgagagtgtggggagcccattgtttccagagttgatgtcctaggaggatttgtgatttctgagcctcaaatgaaatttggtatatattcccagatgagaagcagcagtgatgggtcagcctaaggaccagccccagaccaaagaacagattggatggaatttagacctctaggttctgggatcctaaagaactgaagtaattagccagacatggtggtgttcacctgtagtcccagctacaggttgaggtggraggatcacttgaacccaggagttttagaggctgcagtgagctatgatcacaccactgcactccagccccagggccacagtgagaccctgtctcaaaaaaaaaaaaaaaaaaaggaactgaagtgaagtcagaatatcttcttttcaggccttagagaaagatcgttatgagcatagtcccaaatctggatttctctgaagccaggtcctcccttggcttaccattctgtcttccactgataacttgaggcacgtagccattaactgga

SEQ ID NO: 112641 - DNA, 521 bp, Homo sapiens
acattcatctatcatactacactcagaagtggataaaaaacttgtaaaatgtgtacagttactaaattctcatcaaagagagtacagattttcttctctctgcagctctccctgtagcttttctgcttggtcaactgtagaaacccacctctcttcttccactattaatgtattaatactaaactgcttctgttatctgtcactacatctcctttccctcattcaccaagtatataatgaatgccttacaaatccaggtagatatccattctcaaagaatttgagtggaaaatgttaacatgtaaacaaataacaaaacctaagtgtgactttattgaaaacatgatgcttttctacataaakaacacagggtagaatatgttaactctcagaggtaaaatataacaaaggattgctacaacagtcctttcttgaagctgtgtctcctaggtttactctttcctttccattcctaaaggagtcatcatctgatgaccagatgattataagtgcctcctact

SEQ ID NO: 112642 - DNA, 679 bp, Homo sapiens
tggtaatatgttgtcagtttaagtaacattacactatatcagatgacaagtagggacataaaatagaagacttgacatcaacagccttaaagatactggagtattcctgacagggaattttttactatacatctgtcctacagagaggccyaagtgtgagccatcctttgggattcattcattctccttttcttatcccttttcctatttccattctttatccaattgcataaaccgcaatccctctttcttaagctatcaaccccaacttaagaattcttggcagggcgcagtggctcatgcctgtaatcccagcactttgggaggctgaggtgggcagatcacctgaggtcaggagttcaagaccagtctggccaacatggcgaaaccccatctctactaaaaatacaaaaattagccaggcatggtggtgggtgcctataatcccagctactcaggaggctgaggcaggagaatcacttgaacctgggaggcagaggttgcagtgagccaagatcacaccactgcactccagcctggatgacagagtgagatgccatctcaaaaaaaaaaaaaaaaaagaatttttataacttgattaagcagatcaacttagatttttctcctcaatcttatccttctagaatggtggttttaaaattctcgctgctcattagaa

SEQ ID NO: 112643 - DNA, 589 bp, Homo sapiens
gttaggtctatatttctaggaagtcatttaaccgccatgtgcctcagtttgttcatttgtaaaatggaataacatcatttcaacaaaaattgttgtcccaccacatccccttagcatttacctgtatgtcctgaaggctgctaacgataaaactcttacgaatctctgctgaagagcttttattttctttcttttttttcctcttgtcatagaagtacagtcagcccatccagaggactcaggaggagcactcaaccaataataggcacagagatagtagacaaatatctcatcttcctcacccctagtttgatataacgctaaggtttattctgcctatattttattgtttctcaatgagattaagctccagttacatattatgataactcacttgacaacctgtattttattatctttttttctcccctatcgcacccactgcctatcrtgtttcctgggatagctactcaaataaactattggcacataaattcttatgtcaggactgcttctggagaatctaaactaaaacaatagttgtatctatgttgtatggttgttgtgaagattaaacatattaacatat

SEQ ID NO: 112644 - DNA, 575 bp, Homo sapiens
ttagcacctttttattataagaaggaaacagacaaattcctggatccagattccagacaaatattgatcacctttctggttcctaacacaacttcagtccagtctgaccttagaggaacctcagatattttaaattccttgtggaaatcatcacagaagacaaatgacattcgcagtttggctaagttatagagaatacctttgctttaactacagacggtaggaatttgaaccaataaartatctctactacaaggatatagcaatgcctgagaaacaagggcagcaggagtaaaatttaatggcgacttttcccctggattccttaaagagcagatgtttattttgttaaaattggcttgagtgtgctataattttgacttgaaaacaaatctttaatcacggtcgagtgtttgtttcttcattttccaaactaccacttttcctatcctcagctctacttcaatatattcccagaaactttttaagaagttaaaccccagatgagcatgcatgttggagacatgcttacaagcaacctataagctgctccaataatcttagcagcagccgag

SEQ ID NO: 112645 - DNA, 557 bp, Homo sapiens
tagtccttaaaattgtttataaatgacagtttaaacaaaaatattaactatgtaatatggggcttataacacatgttacaaataaattgtggccaggcggggtggctcacgcctgtaatcccagcactttgggaggccaagatgggtggatcgcaaggtcaggagatcgagaccatcctggctaacacggtgaaaccccgtctttactaaaaatacaaaaaaattagctgggcktggtggtgggtgcctgtagtcccagctactctggaggctgaggcacgagaatggcgtgaacccgggaggcgaaacttgcagtgagcggagatcgcgccactgcactccagcctgggcgacaaagcaagactctgtctcaaaaataaaatataataaaataaaataaaataaaataaaataaaataaattgcgtggcaattagagtgcactcatctggaggggagaaatggatgtataccatgatatcattcttatactgcaatgtgaagttgtatcatatcacctgaagatagactgtgatgagttaaaatgtgtactataaa

SEQ ID NO: 112646 - DNA, 557 bp, Homo sapiens
tagtccttaaaattgtttataaatgacagtttaaacaaaaatattaactatgtaatatggggcttataacacatgttacaaataaattgtggccaggcggggtggctcacgcctgtaatcccagcactttgggaggccaagatgggtggatcgcaaggtcaggagatcgagaccatcctggctaacacggtgaaaccccgtctttactaaaaatacaaaaaaattagctgggcttggtggtgggtgcctgtagtcccagctactckggaggctgaggcacgagaatggcgtgaacccgggaggcgaaacttgcagtgagcggagatcgcgccactgcactccagcctgggcgacaaagcaagactctgtctcaaaaataaaatataataaaataaaataaaataaaataaaataaaataaattgcgtggcaattagagtgcactcatctggaggggagaaatggatgtataccatgatatcattcttatactgcaatgtgaagttgtatcatatcacctgaagatagactgtgatgagttaaaatgtgtactataaa

SEQ ID NO: 112647 - DNA, 557 bp, Homo sapiens
tagtccttaaaattgtttataaatgacagtttaaacaaaaatattaactatgtaatatggggcttataacacatgttacaaataaattgtggccaggcggggtggctcacgcctgtaatcccagcactttgggaggccaagatgggtggatcgcaaggtcaggagatcgagaccatcctggctaacacggtgaaaccccgtctttactaaaaatacaaaaaaattagctgggcttggtggtgggtgcctgtagtcccagctactctggaggctgaggcacgagaatggcgtgaacccgggaggcgaaacttgcagtgagcggagatcgcgccactgcactccagcctgggcgacaaagcaagactctgtctcaaaaataaaatawaataaaataaaataaaataaaataaaataaaataaattgcgtggcaattagagtgcactcatctggaggggagaaatggatgtataccatgatatcattcttatactgcaatgtgaagttgtatcatatcacctgaagatagactgtgatgagttaaaatgtgtactataaa

SEQ ID NO: 112648 - DNA, 557 bp, Homo sapiens
tagtccttaaaattgtttataaatgacagtttaaacaaaaatattaactatgtaatatggggcttataacacatgttacaaataaattgtggccaggcggggtggctcacgcctgtaatcccagcactttgggaggccaagatgggtggatcgcaaggtcaggagatcgagaccatcctggctaacacggtgaaaccccgtctttactaaaaatacaaaaaaattagctgggcttggtggtgggtgcctgtagtcccagctactctggaggctgaggcacgagaatggcgtgaacccgggaggcgaaacttgcagtgagcggagatcgcgccactgcactccagcctgggcgacaaagcaagactctgtctcaaaaataaaatataataaaataaaataaaataaaataaaataaaataaattgcgtggcaattagagtgcastcatctggaggggagaaatggatgtataccatgatatcattcttatactgcaatgtgaagttgtatcatatcacctgaagatagactgtgatgagttaaaatgtgtactataaa

SEQ ID NO: 112649 - DNA, 556 bp, Homo sapiens
tcacaaactctgctggttatggtactccctgtgttgtaaatgttactggagacagaccctgtgactgaggctttcccctctgtgaacaacatatcactgagcaacaactatcttctcacaggtctgacagagacagaaaaacatgccaaggtgaagacactaagaaagagggtcattaaacactgccaaattgctttyttctcaaaatggaacacttagcacaagcaataaaaaaattagcaaacatgcatgtcaccagtttgctcttattattgaaaatgaggaaatgtataagaaggctgtccacaaaaatcaaatgtctatttcattgcttgcctagatattagcagaggtgaaaatggatacacaggttccagatagaggtcaggtcagtcctgaacaacattgaaagatgaactaaggtggtttgatttccctgtaagtgacctcattgataattagggatgcctatgccatgctcactcagaggctacacctttccagtaatattgtatatgtacctatcatcagtcattcacttattatccaagaattc

SEQ ID NO: 112650 - DNA, 570 bp, Homo sapiens
cactatgatccaatcacctcctaccagtccctgccccaacactggggattacaattcaacgtgagatttgggtggggaaacagagccaaaaaccatatcattaggatagtgaagtttttgcacaggtagaaataaacaaagtaattgaaggtaaaggagatgctagaaacagattcaatttatgcatgtatgtgcacccctcatgtattacagaagtgtcatcatagagcatcaggggaaagaatggtctttacaataaatggagctggaacaacaaattatcccataccccaagttatgtttgtgtggcaaaactatcagagaaacaactatgtgaggtgatggatatgttaattagcttgattgggtgatcatttcccaatgtatacatgcattaaaacatcagttggtacatcttaaacatatacaattcctatctatcaggcataccttaataaagctgaaaaaagagaaaatctactgggttatatacygcatatatttgtaatggcaaaggactggtttcataattatatacattattttattaatcaatacaaagaaaggcag

SEQ ID NO: 112651 - DNA, 479 bp, Homo sapiens
aaagcacaaggaataatacatatttgatcaaaattcacttgtagactaagagttgattggcagagaacaagcaatattaagcactcagctctgctcagagaaaccacagtgaatacatagccaagaataccatctgttgaatatgaaattcttggatcaagacattatagatacatttccccaaacagcagggacasaagcctttctggaaacaaaatcacaatagagttgcagaaaggtgaagtgagagagaggcaaataactgttctctgcattgtggggagcaagttctcttactgctagtgtggagtgtgattaattacatggcatggttcacgatggtggtagtaaataaacatacagcaggtagtcaccctgttcgaataatttctacatcagtacgtcaactgctagctatgggtagatcaaaatctttttactcattgtggtgtctgcacctttttttcacacttggaatt

SEQ ID NO: 112652 - DNA, 425 bp, Homo sapiens
tttgtattactataacagaataccacagactggataatttagaaagaaaagaaatttatttctcatggttccagagtataggaaatccaatatcaagatgccagcatctggcaagggccttcttgttgcctcatccatcccctggtagaagcataagagagcaagagatcaaattcacagcttcaagtactttcatagctgacattaatccattcaaaagggtgaagccctcatgacctgaacacctcccattaggccccatctcccaaaacgggtgcattggggattaagtttccaacatatgytttttttggagacaacttcaaaccgtagcagtcctctaatctcacactaactgtcacttcctcaaggagctctttctccttggaccagactagatgtttttatttttgctgttgttgttt

SEQ ID NO: 112653 - DNA, 542 bp, Homo sapiens
tcattctgctgtgaggaggagtggaatatgaggcaggaaactaagagtgttttataaaactctgtctcatataggaaaggataaatgaaaaaatgatattcctctcctcaatcagagtttcgaggaatagagagatgatttttgagttgaaacaatcaaagttggtactagggaatctaagattgatgtaagccttgtaccatgggcaggrtttgagtaggttttcaggaagcacatgttttgtgatgagggaataacgtgtaaaaatggcttagtgatttaaatataaaaggcaagttcagaaacaataaacatgagtaactagagcagagtagccatgggaaacattggggcagatacaactggagaggtcagatgatacaacaatatgaaaagaatgctgggaatatgcatttgttttctgcattttcatgcttttgatcctatagtcaataccattaagcaggtattccaggtttaggattaaaatgctcactaaaaggcagatgctaggtaaactctttcagggccccttggaaaca

SEQ ID NO: 112654 - DNA, 544 bp, Homo sapiens
tttgaaatgcagaaacttttttaaatgartattatatctaatttgtacactaatatattaaatagatataattcagatatctttcacataccaattatacttcacaattatagatcaaatcaaagttgtctatttataatatttggagtaagtgaatagtttaacatatatttaaagagttctgcttcttcctccatagtcaaacaattatttctagctataacaataaataaattgaggcactaatcatgttttatgatgattatgatataatttgctgttataaatacatgcagttatgattttttttccaggccatagaagcactcgaaaatttacacagacatataaatattagcacatttattttaaattactcaaatttataacttaccagatttttattaaattgatgcaaaagtaattgcggtttctgccaataaaagtaacgccaaaaacaacaattgcttttgcagcaacctaatatcatacaggaagaaagcagtgatacgttggattccacaaggcctggtgttcaatacca

SEQ ID NO: 112655 - DNA, 367 bp, Homo sapiens
ttttctgtacatattgttataaatatggatgaattattttttagatatttgtcaagaacagtgaagagtctgagactgcaccattcttacaggctgacaagttatcctgcctcagttacttgaatgctggcagacaacaaagagatgcttgggagaggaacaaaggatagcttcatactcactgcaatagcagtgaccggagtcagaaatcccaactttaagaaagccaaatatttgtgtggaaagaaacatgtctgccctttatttawaaaggaaaaactctcattttcaagaatatttgctctactaacatccttggaaagacagttcagaacaaagactgttcacaagacaagcagaacagaga

SEQ ID NO: 112656 - DNA, 544 bp, Homo sapiens
tgctggcactctggttcattatgtttctttattctgctggcatttcctatgtcagtcttgcttcgtgtggagccattattcctctcttcacatccaggtcatgtggagagctgccaccttccatataggtagataacctggcctcattgttcataggacaccagagcttccaggaatggggtggccaagggcctgggtcccagcacttcagtggccgttgataacagaggcaagctttcgactgaacccctttaggctccttcattcctgccagctcacccttacctctccagtagtaaagggcttgtgcctttgcctgctctgggtgagagtcccagagcacagtagcccatcamactgtgttgcagctgtcactattccctggatacagaaagaaacaaaggccaaagttagggtgctaatggtttgggattcaccatggggagaaggtgaatcaacctctctgtggatggaggactggaggcgtgactgagaggcggtctgccacccagtgcagagcagaaacagagggctgactcagaga

SEQ ID NO: 112657 - DNA, 595 bp, Homo sapiens
gaattcaatggcacaacagtacagagtagtctgactgatacagggaaacagatgctgaattagaggtgtcctgatactgtgcatagaatatggtggcagtgcgagtgatctccttattgcctctgttctggtggcatgtggaccggtattgctacaccttgatggcaaatgctccaaggaagggagtggaatgaatacatcgacttcctctgccaagcatgggggtaccctgggcttaaggtaaaaccccttggccccatgtcacactgaccctgccaacctcaggcacctcaccaaggttcttctctccacctagatgagcgggaagttgttcagaaaaagaccttcacgaaatgggtgaactcgcacctggctcgagtgtcctgccgcatcaccgatctctacaaggacctgcgggatgggcgcatgctcatcaagctgctggaggtgctctctggagagatgctggtaaagccccttctgtgggcccyggggctgctgccatcggcccctcttcagcaaaggcatggtttgggggcatctcaagttctcctggccttcccagttttctctctgctcctttgggaggctctaa

SEQ ID NO: 112658 - DNA, 603 bp, Homo sapiens
agaagaaaaggaaacctggacagaccagtaacggtaatgtaattgaatcagtaataaagtttaccaacaaagaaaggtctaaaactgggtaagttactctgaattctactaaacttttaaggaaaaactaacaccaatttttyataaattattccaaaatcttcctagtttattctaaagttcagtattactctaaggccaaacccagacaaagacacaacaacaaaagaaaactacatgccaatatccctgaaggatgcagatacaaaaattgtcagagaaataaaggggatccagattggaaaacagaaagtcaaactgtttccctgtgcccatgccctgatttcatatacagaaacccataaccccccccccaaaagagcctgttagaattaaagaattcagcaaaggtccaggccccaaaatcagcaaacaaaaataatgccaatagcatgtgtaacatttttatcccctaataatcaactagcataaaaagacatcaagaaggccgtcccactattctagctacaaaataataaaatggctcagaataaagttaaccagagagattttgtaaagagctttacaaaaaaaaaaaaaaaa

SEQ ID NO: 112659 - DNA, 603 bp, Homo sapiens
agaagaaaaggaaacctggacagaccagtaacggtaatgtaattgaatcagtaataaagtttaccaacaaagaaaggtctaaaactgggtaagttactctgaattctactaaacttttaaggaaaaactaacaccaatttttcataaattattccaaaatcttcctagtttattctaaagktcagtattactctaaggccaaacccagacaaagacacaacaacaaaagaaaactacatgccaatatccctgaaggatgcagatacaaaaattgtcagagaaataaaggggatccagattggaaaacagaaagtcaaactgtttccctgtgcccatgccctgatttcatatacagaaacccataaccccccccccaaaagagcctgttagaattaaagaattcagcaaaggtccaggccccaaaatcagcaaacaaaaataatgccaatagcatgtgtaacatttttatcccctaataatcaactagcataaaaagacatcaagaaggccgtcccactattctagctacaaaataataaaatggctcagaataaagttaaccagagagattttgtaaagagctttacaaaaaaaaaaaaaaaa

SEQ ID NO: 112660 - DNA, 603 bp, Homo sapiens
agaagaaaaggaaacctggacagaccagtaacggtaatgtaattgaatcagtaataaagtttaccaacaaagaaaggtctaaaactgggtaagttactctgaattctactaaacttttaaggaaaaactaacaccaatttttcataaattattccaaaatcttcctagtttattctaaagttcagtattactctaaggccaaacccagacaaagacacaacaacaaaagaaaactacatgccaatatccctgaaggatgcagatacaaaaattgtcagagaaataaaggggatccagattggaaaacagaaagtcaaactgtttccctgtgcccatgccctgatttcatatacagaaacccataaccccccccccaaaaragcctgttagaattaaagaattcagcaaaggtccaggccccaaaatcagcaaacaaaaataatgccaatagcatgtgtaacatttttatcccctaataatcaactagcataaaaagacatcaagaaggccgtcccactattctagctacaaaataataaaatggctcagaataaagttaaccagagagattttgtaaagagctttacaaaaaaaaaaaaaaaa

SEQ ID NO: 112661 - DNA, 603 bp, Homo sapiens
agaagaaaaggaaacctggacagaccagtaacggtaatgtaattgaatcagtaataaagtttaccaacaaagaaaggtctaaaactgggtaagttactctgaattctactaaacttttaaggaaaaactaacaccaatttttcataaattattccaaaatcttcctagtttattctaaagttcagtattactctaaggccaaacccagacaaagacacaacaacaaaagaaaactacatgccaatatccctgaaggatgcagatacaaaaattgtcagagaaataaaggggatccagattggaaaacagaaagtcaaactgtttccctgtgcccatgccctgatttcatatacagaaacccataaccccccccccaaaagagcctgttagaattaaagaattcagcaaaggtccaggccmcaaaatcagcaaacaaaaataatgccaatagcatgtgtaacatttttatcccctaataatcaactagcataaaaagacatcaagaaggccgtcccactattctagctacaaaataataaaatggctcagaataaagttaaccagagagattttgtaaagagctttacaaaaaaaaaaaaaaaa

SEQ ID NO: 112662 - DNA, 548 bp, Homo sapiens
caaaaaaaatggagaaataccacttctgtacctttagtatatgctataaatctttgaaggacattttgaaacagtattatttatcttataggtcaaaaaccaaatatatcctgaggctgactttgctgactcaatggagccatctgaaatagcctcagaggattgtgaattgtctcactctgtttatgagaattttatgttgctgatgaacaacttagaatggagtataaaggtaggaccactgcataaatgcaaggccttttgatgtatcctgcagtaatgtgtgtatacattgctgagaactgacgygtgatagtgaagctcatctcagaaatacgctcagtgttaaaatagagaactagcttatactctacgccaaagagctatgataactccactgtacttctctcagtgtgagtggcattcccagtctttttgttgactctttctctcctattccttcccccaatgtcaggttaccatttttttctccacctggaatgctgcgagaatcttaggaatcttagaactgttttcccaaatacccc

SEQ ID NO: 112663 - DNA, 552 bp, Homo sapiens
cttggctcccatgagctaattacctccacaaagccccaccttctgataacatcacctctgtgattaagtttcagcatatgagttctgggaggatgcaaatgtcagacaataccagatgcttattgtatcatttcctctgcttgctttgagtttaatttgttcttctttttcagtttcttctctttttttagtttcttaagataaaagtcaagaccattgacttgagagtcttctaatatagacattaagtgctaaaaaattttaagtactgttgtagctgtgttccacaaatcctgatatgtagtattttcattttcattcagttcaaaatactctctaatttctctttgcatcgtgtctttgacctagggttatttagatgtgtattactttgttttaaaatatttgaatattttgatgagatattttgttactaatttgtgacttgattgccatgtggtcagggaacatacttygtatgacttaaatctttctgacttaattctttcattaagattgattgcaggccgggtgcagtggctcacgcctgta

SEQ ID NO: 112664 - DNA, 569 bp, Homo sapiens
aattgtttcactccacaaaaaccaagttgcagagaaaaacacatagacattcaactgcaaagcagagaaacttgactattttctgcaattttaaagtgtatattgaataaaaccatctttttattttcttttttgctcactggcaaatattaacaacatcaagtgcgttattataatgttatstagttaaaaatctcaaaaagttttcataattaccatttaaaaatatataaataagtgacctaatgttaatttttattgtctgagaccatgtctgttatttcactctttaaaatcagttagtaatgcagaacctagcacttagtagatactcaaaaattatttgctgaataaaaaagggttaaacatgtaatatacacaaaatgtactggaaaaaatgcaccaaataattttgttataccagtttaatgtaaatattgcctttaaaagataatatagttttcaggtgtctacagtgattttgtaatatttgtgcacatataaaataatatttccaaaaatgtaatccagtggggaaatatactttctaaattctagatttataattt

SEQ ID NO: 112665 - DNA, 423 bp, Homo sapiens
gaatgcattcctgttttcatttcattcctgggggcaatattcaatctggtgtggccctctgtattataaaatgtttcccagattgtgtttatctgaaatacaaatccaagaagaagcatggtgttaattgccgtgtaaaaaagattccagagtcaagagcttgagaagttctgttccttccttcataggttcagttgtttaacccagcatttttcaaacatattttactcctagaacctgtttttcctcaracatatttaagaaaaaagcattttgtagaacacatttggacaaatgatactttatatcattgctttgttttttaaattttagtttgactcaattttacagtttcaggattttgtttctgtttcaggttttaagcttttcttttataaatagttactttcctagtctgaaatc

SEQ ID NO: 112666 - DNA, 423 bp, Homo sapiens
gaatgcattcctgttttcatttcattcctgggggcaatattcaatctggtgtggccctctgtattataaaatgtttcccagattgtgtttatctgaaatacaaatccaagaagaagcatggtgttaattgccgtgtaaaaaagattccagagtcaagagcttgagaagttctgttccttccttcataggttcagttgtttaacccagcatttttcaaacatattttactcctagaacctgtttttcctcagacatatttaagaaaaaagcattttgtagaacacatttggacaaatgatactttatatcattgctttgttttttaaattttagtttgactcaattttacagtttcaggattttgtttctgtttcaggttttaagcttttctttkataaatagttactttcctagtctgaaatc

SEQ ID NO: 112667 - DNA, 621 bp, Homo sapiens
ctccgtctcaatgataataataataatatgtgcataatgtattgctgagtttttgacatgtagaaatgtaatacgtctataacatattttccagtaacatcaaaaaggaggtagttggaagaaaaatgtattgtgataaggtaatcactctagatggtaaagtaataattactaaaatgtattgttggctttgtaactttaatagatgtaatgtgtaaagtgataatactttaaaatggaggaaataaaagagatttatataagaatgatgtttctatgtattactaaaagtttactagtataaattggaagatgatttgaataattaattttccatatacctatatggtaaacttacaacaacaacaaacattcycaaaaatatataataaaataattcattagtaatctaaagttccctattttagaaaatattctttcattgcaaaataaagcaataaagaaaaatatttgagaaatatataaaacaaacggtaaaatggcagacataaatagaattataccaattataatcttaaatgtgagcagattaaaatccattccagaggcagagattgtcagactggattaaaacaagtgatcccaatatacgctgagatg

SEQ ID NO: 112668 - DNA, 621 bp, Homo sapiens
ctccgtctcaatgataataataataatatgtgcataatgtattgctgagtttttgacatgtagaaatgtaatacgtctataacatattttccagtaacatcaaaaaggaggtagttggaagaaaaatgtattgtgataaggtaatcactctagatggtaaagtaataattactaaaatgtattgttggctttgtaactttaatagatgtaatgtgtaaagtgataatactttaaaatggaggaaataaaagagatttatataagaatgatgtttctatgtattactaaaagtttactagtataaattggaagatgatttgaataattaattttccatatacctatatggtaaacttacaacaacaacaaacattcccaaaaatatataataaaataattcattagtaatctaaagttccctattttagaaaatattctttcattgcaaaataaagcaataaagaaaaatatttgagaaatatataaaacaaacggtaaaatggcagacataaatagaattataccmattataatcttaaatgtgagcagattaaaatccattccagaggcagagattgtcagactggattaaaacaagtgatcccaatatacgctgagatg

SEQ ID NO: 112669 - DNA, 618 bp, Homo sapiens
tgatgataaacccacattttttgtttgttttaatctgaaaatgtatttgtatggttcttggaaattttttttgcatataaaattatagtttatcatcttatttcaagttttatttaccatttgatagttactcctaaaatgtcattgattaaagaatcatctattgctccaactgctctttactaaaggtaatttgtctttttaacctcatcaggctccttttaagctctcaaactgaccttatttttttttttacagattgaatgcattaagtcmatttattatttatgatgaatttatttatgtatttattttcgctatcacaagtagaaaaagcctataagttgctatgccaaaaacctgcctctagatggcaaacaaaccccacaatacacaaaagagagccaaattcttagaaaccctgggaaaggaagagggctactgtcccattaacaacttggagcccttaaggcaagaatgaggtggaacatctggaacatctgggaggagacaccagggtgcggagtagtggggaacctgctctgtgctctgagactgaaagcccagccttgcctctcaccgctgccttgactgtgtccccatctgctgtgaagtgaa

SEQ ID NO: 112670 - DNA, 618 bp, Homo sapiens
tgatgataaacccacattttttgtttgttttaatctgaaaatgtatttgtatggttcttggaaattttttttgcatataaaattatagtttatcatcttatttcaagttttatttaccatttgatagttactcctaaaatgtcattgattaaagaatcatctattgctccaactgctctttactaaaggtaatttgtctttttaacctcatcaggctccttttaagctctcaaactgaccttatttttttttttacagattgaatgcattaagtcaatttattatttatgatgaatttatttatgtatttattttcgctatcacaagtagaaaaagcctataagttgctatgccaaaaacctgcctctagatggcaaacaaaccccacaatacacaaaagagagccaaattcttagaaaccctgggaaaggaagagggctactgtcccattaacaacttggagcccttaaggcaagaatgaggtggamcatctggaacatctgggaggagacaccagggtgcggagtagtggggaacctgctctgtgctctgagactgaaagcccagccttgcctctcaccgctgccttgactgtgtccccatctgctgtgaagtgaa

SEQ ID NO: 112671 - DNA, 618 bp, Homo sapiens
tgatgataaacccacattttttgtttgttttaatctgaaaatgtatttgtatggttcttggaaattttttttgcatataaaattatagtttatcatcttatttcaagttttatttaccatttgatagttactcctaaaatgtcattgattaaagaatcatctattgctccaactgctctttactaaaggtaatttgtctttttaacctcatcaggctccttttaagctctcaaactgaccttatttttttttttacagattgaatgcattaagtcaatttattatttatgatgaatttatttatgtatttattttcgctatcacaagtagaaaaagcctataagttgctatgccaaaaacctgcctctagatggcaaacaaaccccacaatacacaaaagagagccaaattcttagaaaccctgggaaaggaagagggctactgtcccattaacaacttggagcccttaaggcaagaatgaggtggaacatctggaacatctgggaggagacaccagggtgcggagtagtggggaacctgctctgtgctctgagactgaaagcccagccttgcctctcaccrctgccttgactgtgtccccatctgctgtgaagtgaa

SEQ ID NO: 112672 - DNA, 498 bp, Homo sapiens
caaacaaaccccacaatacacaaaagagagccaaattcttagaaaccctgggaaaggaagagggctactgtcccattaacaacttggagcccttaaggcaagaatgaggtggaacatctggaacatctgggaggagacaccagggtgcggagtagtggggaacctgctctgtgctctgagactgaaagcccagccttgcctctcaccgctgccttgactgtgtccccatctgctgtgaagtgaatggtgtcttctaaattcrtgctgagccctaattgctgaaaagtgtaagacatgcaatggggggattatgtgcatcttcccgacaccaacatgatgctcaggaaggagacttcttgttttctcttaggattcttttactaaccaagattttgcctctactacatatttccctttgctgattgtccctcccttttgacagaagatggcccagggcattcactactaagtctcaacctcttacccaaagccctcagt

SEQ ID NO: 112673 - DNA, 574 bp, Homo sapiens
cttttgcaggtgtaaattaaggagcytgaaacagggagatggtcttagattaatcaactgggacttaaatgcaaactcaagtgtcctaaaaaaaaacaagaggtagagagacatttagcatagactgaagtggagaaggtagtgtgaacacagagacagagattgcagtgatgtgtccacatcccgggagagagaagccaccagaagctggaagagctaaatcagactgctccctagagcttcagaaggagccagaactgatgactccaagatcttagcccagtgaaactgatctggacttctgaactatgagagattccattcctgttgtttgaagctaccacatttttgagaacttgtcacagtagcccgaggacactaacacaaacggggctccgggaaaatccagactaaaggtgttgtgttggtttgcaatctccttgcttaactttctgatactagacgtaaatagattggtgaaaaattttgtgattgaagaaatgtacatgaaacctacagtgtacagagaagcatctgttagttataagataaatattgataattttagttgaaa

SEQ ID NO: 112674 - DNA, 574 bp, Homo sapiens
cttttgcaggtgtaaattaaggagcctgaaacagggagatggtcttagattaatcaactgggacttaaatgcaaactcaagtgtcctaaaaaaaaacaagaggtagagagacatttagcatagactgaagtggagaaggtagtgtgaacacagagacagagattgcagtgatgtgtccacatcccgggagagagaagccaccagaagctggaagagctaaatcagactgctccctagagcttcagaaggagccagaactgatgactccaagatcttagcccagtgaaactgatctggacttctgaactatgagagattccattcctgttgtttgaagctaccacatttttgagaacttgtcacagtagcccgaggacactaacacaaayggggctccgggaaaatccagactaaaggtgttgtgttggtttgcaatctccttgcttaactttctgatactagacgtaaatagattggtgaaaaattttgtgattgaagaaatgtacatgaaacctacagtgtacagagaagcatctgttagttataagataaatattgataattttagttgaaa

SEQ ID NO: 112675 - DNA, 591 bp, Homo sapiens
gacactaacacaaacggggctccgggaaaatccagactaaaggtgttgtgttggtttgcaatctccttgcttaactttctgatactagacgtaaatagattggtgaaaaattttgtgawtgaagaaatgtacatgaaacctacagtgtacagagaagcatctgttagttataagataaatattgataattttagttgaaaatgacatatgactgttagtatctcacataacattctgagttactcaagaatgcataaaaggggcactagatactcttctcatgtatgtgtgtgtgtctgtctatacatgtatgtacacttcatggtgcatcagctggcggaaccctcaggacagcccttcacatcctcagtgccccatttcacacatgaggaaactgttcatgacagcacatggctgatttgcataaaagtcacgtggtcagcagttgttgaagctgaacttggaatctaggtctgtctgaccttaactatgttccttccacagagccacgttcattccatagaggaacccaccacctataaaaccaggaaagagacaaagccagaagtgcagggtggatttcttaacaca

SEQ ID NO: 112676 - DNA, 591 bp, Homo sapiens
gacactaacacaaacggggctccgggaaaatccagactaaaggtgttgtgttggtttgcaatctccttgcttaactttctgatactagacgtaaatagattggtgaaaaattttgtgattgaagaaatgtacatgaaacctacagtgtacagagaagcatctgttagttataagataaatattgataattttagttgaaaatgacatatgactgttartatctcacataacattctgagttactcaagaatgcataaaaggggcactagatactcttctcatgtatgtgtgtgtgtctgtctatacatgtatgtacacttcatggtgcatcagctggcggaaccctcaggacagcccttcacatcctcagtgccccatttcacacatgaggaaactgttcatgacagcacatggctgatttgcataaaagtcacgtggtcagcagttgttgaagctgaacttggaatctaggtctgtctgaccttaactatgttccttccacagagccacgttcattccatagaggaacccaccacctataaaaccaggaaagagacaaagccagaagtgcagggtggatttcttaacaca

SEQ ID NO: 112677 - DNA, 591 bp, Homo sapiens
gacactaacacaaacggggctccgggaaaatccagactaaaggtgttgtgttggtttgcaatctccttgcttaactttctgatactagacgtaaatagattggtgaaaaattttgtgattgaagaaatgtacatgaaacctacagtgtacagagaagcatctgttagttataagataaatattgataattttagttgaaaatgacatatgactgttagtatctcacataacattctgagttactcaagaatgcataaaaggggcactagatactcttctcatgtatgtgtgtgtgtctgtctatacatgtatgtacacttcatggtgcatcagctggcggaaccctcaggacagcccttcacatcctcagtgccccatttcacacatgaggaaactgttcatgacagcacatggctgatttgcataaaagtcacktggtcagcagttgttgaagctgaacttggaatctaggtctgtctgaccttaactatgttccttccacagagccacgttcattccatagaggaacccaccacctataaaaccaggaaagagacaaagccagaagtgcagggtggatttcttaacaca

SEQ ID NO: 112678 - DNA, 578 bp, Homo sapiens
agtaaaacacaccccttccccttgcattggtttcctgttgctgctgtaacaaattaccacaaccttactgctccacataacacaagtgtattatcttacatttctggaggtcagaagtctcaatgaagtaaaatcaaggagtaatagggctctattcattctaggcttcgagagagaatccaatatcgagcattccatctttctgatgttcccacattcctagcagcatggccccttcctccatcactccagtttccctgtccrttgtcccaggtcccctctggctgttaccttcctccttccctattataaggacccttgtgattatgatggtctcacccagataattcaggatactctcctgaccccaaaattctcaaccatgtctgccaagttatttttgacatattcataagtaatgatcatagattccaaatattacgacaatgatgtctttagtgggtgtattattcattccacaaacaaccctcgtcatccacacaatggtcttcccctaagatagaataaaaatatcacaaggcagatttacgaggcgatcgacctagaaaaaacctgag

SEQ ID NO: 112679 - DNA, 263 bp, Homo sapiens
agaactgcagtcactcagttacaaaagttaaatacaatttggaataattggatcctgaagtggcaggggccaagtggtagcactcaaccctcaaaggcacggtgggtgtagctaccgtaatgggcagaaaagacaaagcagcaatctgaacagtctgactcaygtagagctctggcattggctaactaatcacagtgttcctagaagtgaaactgacaggaagactaatgcattcctacttaatttatgtaaggaggaaactt

SEQ ID NO: 112680 - DNA, 263 bp, Homo sapiens
agaactgcagtcactcagttacaaaagttaaatacaatttggaataattggatcctgaagtggcaggggccaagtggtagcactcaaccctcaaaggcacggtgggtgtagctaccgtaatgggcagaaaagacaaagcagcaatctgaacagtctgactcatgtagagctctggcattggctaactaatcacagtgttcctrgaagtgaaactgacaggaagactaatgcattcctacttaatttatgtaaggaggaaactt

SEQ ID NO: 112681 - DNA, 479 bp, Homo sapiens
atatatacatatatatatacatacacacacacatatatatatgcacacacacacacacacatatatatatttatttacaaaggggagtttattaacttacaggatcataagttacacaatgggctgtctgcaaactgatgagaaaggagagccatggagtccaatgtttgagggcaggaagaaaccagcatgggagaaaaaagatgtaggctgggargctaggccagtctctccttttcaaatttttctgcctgctttatatttgctggcagcagattagattgtgcccaccagattaagggtgggtctgccttccccagcccactgactcaaatgttaatctctttcggcaacactctcacagacacaccctggatcaatacttcatatccctcaatcctatcaagttgacagtcattattaaccatctcactccccttcatatatatatgtatatagtcctttaattctgtcactct

SEQ ID NO: 112682 - DNA, 459 bp, Homo sapiens
gacagaactaacaggatatatacatatatatatacatacacacacacatatatatatgcacacacacacacacacatatatatatttatttacaaaggggagtttattaacttacaggatcataagttacacaatgggctgtctgcaaactgatgagaaaggagagccatggagtccaatgtttgagggcaggaagaaaccagcatgggagaaaaaagatgtaggctgggaggctaggccagtctctccttttcaaatttttctgcctgctttatatttgctggcagcakattagattgtgcccaccagattaagggtgggtctgccttccccagcccactgactcaaatgttaatctctttcggcaacactctcacagacacaccctggatcaatacttcatatccctcaatcctatcaagttgacagtcattattaaccatctcactccccttcata

SEQ ID NO: 112683 - DNA, 248 bp, Homo sapiens
tgtcctagtctcattctggcctcaggacttcagcctgggcgacagtgggagactgtgtgtcaaaaaaaaaaaaattgccaatgattgaagcctaatactgaagattctggtttattaataattagtctgttgctgggtgttaattgagctccccaagtgattactcatgtaggacttcaaaacrataatttagaaccttgtgactcaaaatctgggcaaaaataagcggcatcagtatcacctgggag

SEQ ID NO: 112684 - DNA, 248 bp, Homo sapiens
tgtcctagtctcattctggcctcaggacttcagcctgggcgacagtgggagactgtgtgtcaaaaaaaaaaaaattgccaatgattgaagcctaatactgaagattctggtttattaataattagtctgttgctgggtgttaattgagctccccaagtgattactcatgtaggacttcaaaacaataatttagaaccttgtgactmaaaatctgggcaaaaataagcggcatcagtatcacctgggag

SEQ ID NO: 112685 - DNA, 248 bp, Homo sapiens
tgtcctagtctcattctggcctcaggacttcagcctgggcgacagtgggagactgtgtgtcaaaaaaaaaaaaattgccaatgattgaagcctaatactgaagattctggtttattaataattagtctgttgctgggtgttaattgagctccccaagtgattactcatgtaggacttcaaaacaataatttagaaccttgtgactcaaaatctgggcaaaaataagcrgcatcagtatcacctgggag

SEQ ID NO: 112686 - DNA, 445 bp, Homo sapiens
ctcctaggtattttaaactacataatatagtattgttaactatagtcatctacrgtactatagaacactagaacttattactcctacctagctgtaattttgtatccattaacaaatctcttactattcctcctttctccctacccttttcagcctgcagtatcctctgttctactttttacttctataagatcaacttttttttttagcttctgcgtgagtgagaacatgtggtgttgaaatttctattcctggcttattttgcttaacataatatcctccagttccatccatgttgctgagaatgacaggattttatttattcttttttatcgctaaatagcattccttggtgtatatataccatattttaaaagtccattcatctgttgttggaaactaggttgattccatatcttggctattgtgaacactgttgcaataa

SEQ ID NO: 112687 - DNA, 445 bp, Homo sapiens
ctcctaggtattttaaactacataatatagtattgttaactatagtcatctacggtactatagaacactagaacttattactcctacctagctgtaattttgtatccattaacaaatctcttacyattcctcctttctccctacccttttcagcctgcagtatcctctgttctactttttacttctataagatcaacttttttttttagcttctgcgtgagtgagaacatgtggtgttgaaatttctattcctggcttattttgcttaacataatatcctccagttccatccatgttgctgagaatgacaggattttatttattcttttttatcgctaaatagcattccttggtgtatatataccatattttaaaagtccattcatctgttgttggaaactaggttgattccatatcttggctattgtgaacactgttgcaataa

SEQ ID NO: 112688 - DNA, 445 bp, Homo sapiens
ctcctaggtattttaaactacataatatagtattgttaactatagtcatctacggtactatagaacactagaacttattactcctacctagctgtaattttgtatccattaacaaatctcttactattcctcctttctccctacccttttcagcctgcagtatcctctgttctactttttacttctataagatcaacttttttttttagcttctgcgtgagtgagaacatgtggtgttgaaatttctattcctggcttattttgcttaacataatatcctccagttccatccatgttgctgagaatgacaggattttatttattcttttttatcgctaaatagcattccttggtgtatatataccrtattttaaaagtccattcatctgttgttggaaactaggttgattccatatcttggctattgtgaacactgttgcaataa

SEQ ID NO: 112689 - DNA, 615 bp, Homo sapiens
aaaggagaaatataaaggaaaatggtatttaaactgagtaaaaatgaaaatacaacatatcaaaatttgtgggatgcagttaaaaccatactttggggagtcatttatatcactaaacacctatattattaataagaaatctcaaaccaatgacctcagtttccaacttgggaaactagaagtggagcattaaattcaaccaaaataagtagcaaaagggaaataattaaaaactgaagagaaagtaatgaaacaacccaagaaaataattaaaaataaaatgtagccaaaaattgattctttgaaaagatcaataaaactgatctctacactaatcaagaaatgtaaggaataaaacacgtgaaagaactacagattatatagaaaataaaagagaaatattatagacaagtttatgctattaaattcaataacttagataaaacaaaccaattcattaaaaaagcacagttgcctaagaagaaatacataacctgaagccctttatccaataaattgacatagcttaaaacattctgagaaagaaaactcargaatcagatgtctgcactagtgaattttaccagatgtttaagggagaaatagtatcaatta

SEQ ID NO: 112690 - DNA, 575 bp, Homo sapiens
aagttttccagcaagattatcctgaggaaaaacaaggtgagttggtctttgatttactctttgctcaaggaatggttgttctggaaagaaactctgaaacaagccaccgtgtccataggcgggcaggaatagttgtttaaaagaaacactttaagttttggggaactgctcagcaatatggacattaatgagagtgtgagagaccccatcgycttcactttggaggaatttactgttgttccctcaggtgataggatgagataatgaaaaaatgaagcatgggtggtaacaaatgagcaattcaccctaggagtagagttatttactcggaagttgatttgactttcactgtgtgagtagaacttcaagcaggcattgagcgaaaagcttcgtaagaggtgctgtgtttgagtctgctctgtactctttccagacaggatctcactctgttgcccaggctggagtgcagtggcgccattacagctcactgcagcctcaacctccccaggctcaggtgatcctccctgctctggactgttttcagctgtaaaaccagagctgattttgcgtgggaa

SEQ ID NO: 112691 - DNA, 554 bp, Homo sapiens
tttctcttattaatcatagatgaaaatgctctgcattgagcctccctaacatgaatactttaaaatgctatggattatcaatgcaaatatgactaatctacaagcagaaatggaaatatggacatcttaagagagttttagagctacaagaakaacatggataaggtaatatgatacaatccatgaaaaagaaaaattacctgaagcaaatataatggaatgttaccatttttacagtaaacaaaataaaagaaacaaaagacagaaaaagattgaaagggattttataaaattatctttaatttcagatgaaataattgtaataaagtaaatcctaagaaatctacaaagctactactgaaactactaagtgaatttagcagtatcataaaatacaaggtcaatatgaaaaattcagttgtatttctgtacattggcaccaaacaattagatgtaaaatttaaacaataattccatttattatagcatcaaaaacataacatctacactgattttaaaaattgagaaaatatttcaaagatctaaataaagag

SEQ ID NO: 112692 - DNA, 640 bp, Homo sapiens
ttcttgttattgtgtaaaactttcaggtggtatgtttataagctcctctgtaatagattttacatacagttaattttggtttagtttgtatcctggattataatagtctacaaaatagcaactcaatacattttagctgagaaagacaattgaccagttgtgtttcaaagggatacagtgatttataatgcctgaatgtgtgaatttcaagtctttattatgctaaaccagagggaagtggtttattctgaggggaaaatggcagatttctacaagctatataatgtaccttaaaataatttaagtaataagtttcatctcaggattttcattaactcaagcagcatgtattataaaacacatcaggttgatgtattataaaaattctgaatttttttaagaaagaagggcttatgtaaaatatttagatgaaaaagtttctaaagcgagaataaagtgtcttgggaattattcataaaaattacaataaaattatcctttgtagcatcaatatttggcctgaaatttaatacatartcatattgtgaaggtcattttatttttcaaggctggacttctgaactgatctatcttcccttatgtattctttatcctgctgtgatgctcctgtggacctggg

SEQ ID NO: 112693 - DNA, 677 bp, Homo sapiens
tggttctcaattttgatccccagggcgcattgggaaatgcctggggaaataccattggttgtcacaactggggaggggttctatggcatcagggaataaaggccagagatgcttctgtgcatcctacaaggcacaggacagccgccacaacaattatccagcctaaaacgtcagtaatgccagcgttgagaaattcaccctcaaggaatagacattccacacttgccctattttcagcatggagacacccttggcattacccttttttatgggtctataaatatgactattggattatggagttcttaagagaaaaagaaggacttcaagaattaaatctgattccagaatcaaataatggctcagctcaatatttgttccctctttaaaaaattgaccatactctcctgtgtggagaataaggaagtgccaaaataagtgccaaatgatgctttacagggctgtgttcccaagtgttggcaaagttaggtctgaaacaytgataactaatctatacagatcttgagactagggttctctgttgagagttcagcaggaaaggactgattgggaaaaaaaaaattgtgaaaggacgagaagtccatggaatgtcagagctggaagaagacttagagattatgtaatactgtccttttacacgtgttaaactgaggcct

SEQ ID NO: 112694 - DNA, 634 bp, Homo sapiens
tgggtaatttccgccatcccattggtgagatgaagctcctgcagccacgctcsttgtttgcagaggccgagcggaccaggcaggaagacatctcctaaagtggagcctgttctatgtctctagcttgtcaaactcgattatttggttcctttggcaacgtattctacagaagctgtgatgtgcaaataggagaatggtctctttctctctcacatataaaatgggtctaagggacaacatggcacagtggttgagagtacagtttttcgaggcatattgctaaggtttgaaatttaatcctgtcgccataacatctgctatcttaggcaagttacctaagctctctgcatcttaagtttcctaacctacaaaatagggatataaacagttcccacttcacagggtttttgtgataattaaatgaggtcatacatgtaaagtgcttaaaaccatggatgtcacatagtgggtgctatctgtgtaagtattagtcattctgttgttaatattactgctgagatctcaaggaatgtaagaggatactggtgtgtgtttttttggttttttggttttttggtttttatggctctgattttaccactagcttgccatatcaccttaaaatcatcactta

SEQ ID NO: 112695 - DNA, 509 bp, Homo sapiens
gtcttaaggaaagtgattaagtcatgaggactctgccctcatgaatgggattagtgtccttataagagaggctgaaggcagtcccctagtccctcccacgcctttcgccattggaggacacagagtttttcccttctaccatgtgaggacacagcaacaagagtgttcatcccttcctccatgatgaggacacagcaacaaggcaccatttamgaagcagagagcaaaccctcaccagacgccatatctgttggtgcctggatcttggatttctcagcatccagaattgtgagcaatacatttctattgtttataaatgacccagttaaaggtattttattatggcagcccaaacagacgaagacagatgggttccttaaagtagaatgtaagggtcaaaggatgtgttcgtcttaaattttgatgaatattgcaaaattgtcctgcattaagtcctatcagtttttacacccactaacagtgtatagcagcgctgtttccccctacac

SEQ ID NO: 112696 - DNA, 473 bp, Homo sapiens
acaacataccagaatctctgggacacagctaaggcagtgtttggagggaagtttacagcactaaattcccacatcaaaaagttataaagatcccaaattaacaactaaacatcaaaactagaacaactagagaagcaagagcaaaccaaacccaaagctagcataagacaagaaataaccaaaagcaaagctgaactgaaggaaattaagacaaaaaaaaaattatacaaaagataaatccaggagttgcttttttgaaaaaattaaaaagatagacaattagctagactaataaagaaaaaaagagaagactcaaataaacataattagaaatgacaaagaaaacattactaccaactccacagaaatacaaataactgtcagagaccactatgaaaacctctatgcacacaaactagaaaatctggaagaaaytggtaaattcctggacacataaaacctcccaagactga

SEQ ID NO: 112697 - DNA, 667 bp, Homo sapiens
attctgcttacacatcaagttttgttacagtttattatgtatgcagaaacctgtaggccaaacttaaaatacataaggaggcagccttagsgcaaacttaatttaatagtggatacagaatataaaataatgctttaaatttgtaaggaaataagagttagaattggaacatgagaaaggaacaggataaaagattttaaaaagccagatagatgtaaacaacaactaaatgaaaattcatcaatgaaaagaagaatagctaatattaaaaactcaatgagtgggttaaagagcaggttcagcacaagtgaaacaataattcgttaattagaattagagaaacagggagtggtggcttgtgcctatagtcttagctactcaggaggctaaagtgagaagattgcttaagcccaggaatttgagaccaatctgagcaacatagtgagacatcatctctgaaaaaaaaaaaataaaagaatttgaattaatcaagaattagaaaaaaattcatatacaaggaaatccagaatgaagcacagaaagagcaagaaatgtaagattttaaatcaggtaaagagacatagaagacagaattagaagatctataatacagatcttctaaaaggagataatggagagaataggaaagaagagcaagaattttgtt

SEQ ID NO: 112698 - DNA, 667 bp, Homo sapiens
attctgcttacacatcaagttttgttacagtttattatgtatgcagaaacctgtaggccaaacttaaaatacataaggaggcagccttagcscaaacttaatttaatagtggatacagaatataaaataatgctttaaatttgtaaggaaataagagttagaattggaacatgagaaaggaacaggataaaagattttaaaaagccagatagatgtaaacaacaactaaatgaaaattcatcaatgaaaagaagaatagctaatattaaaaactcaatgagtgggttaaagagcaggttcagcacaagtgaaacaataattcgttaattagaattagagaaacagggagtggtggcttgtgcctatagtcttagctactcaggaggctaaagtgagaagattgcttaagcccaggaatttgagaccaatctgagcaacatagtgagacatcatctctgaaaaaaaaaaaataaaagaatttgaattaatcaagaattagaaaaaaattcatatacaaggaaatccagaatgaagcacagaaagagcaagaaatgtaagattttaaatcaggtaaagagacatagaagacagaattagaagatctataatacagatcttctaaaaggagataatggagagaataggaaagaagagcaagaattttgtt

SEQ ID NO: 112699 - DNA, 583 bp, Homo sapiens
gcatgtcagaggtcttcacggcagcccttcccatcacaggcctggagacctaggagtaaaaagtggtttcatgggctagacccagagtccccaacctgtgtgtagcctaggaacttggtgccctgtgtcctagccactccagccatggctaaaaggggtcaatgtagagcttgggccatggcttcagagggtggaagcccaaagtggcagctttgacatggtgttgagctgcgggtaccagaagtgaagagttgaggtttggggaccccacctagatttcagaagatgtatggaaacgcctggatgccccaggcagaattttgctgcaggggtgaggctctcatggaaaacctccactagggcagtgtggaaggcaaatgtggggttggagcccccacacagagtccctactgggacactgcctagtggagctgtgagaagagggtcaccgtcctccagaccccagaatggtagatccactgacagcttgcactgtgcgcctggaaaagccacagacactcaacaccagcctgtgaaagcagccaagagggaggytgtaccctgaaaaaccacagaggtggag

SEQ ID NO: 112700 - DNA, 629 bp, Homo sapiens
tgcttgatggtattccacaattcttgtaggtcttctttacccttttttattcttgctcctctgaatgggtaatttcatatgttctgtcctgaagctcaccaattcttttatttgattaagtctgctgctaaagctttccaatgagttattccagttcagttactgtattgtttatagataggatttctatttgttttcttgtttctatttctttgtcaaatttctcactacatacatggattgctttctaaatttcatttaattttctatctctattttcttgtgattccctgaacattttttttttttttgaggcggagtcttgctctgtctcccaggctggagtgcagtggcacaatctcagctcactgcaagctccgcctcctgggttcacaccattctcctgcctcagcctcccgagtagctgggactacaggtgcccaccaccaggccctgcttattttttgtatttttagtagaaatggggtttcaccrtgttagccaggatggtctcgatcccctgacctcgtgatctgcccacctcggcctcccaaagtgctgggattacaggcgtaagccaccatgcctggcagattcactgaactttttaaagaggcttattctgaatt

SEQ ID NO: 112701 - DNA, 591 bp, Homo sapiens
tttgtatttttagtagggatggggtttcaccatgttggccaggctggtctcaaactcctgacctcaagtgatttgcccaccacagcctaacagcttgtggtttggtatcatatttaagaaatccatccctgttccagtamatagatattcattctttctttttggtttgttcattctactactgttatggctgggattgcaacacaaggttgaataaaggagtgatagcaggcatttacatgttgttccatttaaaaagacttaaatttccaccactaagtataaagtttgctgtagatctttgataagtattctttatcaggtttaaaagttgtcgtttattcatattatgccagatgttttgacattgtcgaacctttctattgcatcctttttcttacgtttaactcctttctgctcttatatttattatttcttttatgtcctgttttggaaacttataacagattgcttaattttcttcactgaattctagggtcaataattttcaacatcttcccttgtttttagtaaagactataaatttctctccaagaatgatttttgttgtgccctaaaaattttgaaaaa

SEQ ID NO: 112702 - DNA, 675 bp, Homo sapiens
atattatcaggcccaccttacagatgataaagctggagcttccagaggttccaaagttgcccaagatcacacactgagcatagggaccagaattgaaaatcaggcagctggatgccaaagtacaaaggcttaccactcaaaactatccttgtgacagtctagggtcatggttataaaaatcgacgggaaacatgccataggaatgccagtaaacactctctatctagaaaagtatactaaatgctgaagagttcccaaactaacagagtgacttttaggcatcttaacatacagattgcaagtattagatgcttcttcttctttttttttctttttttttgagatggagtcttgctctgtctacccaggctggagtgcaatggcactatcttggctcactgcaaactccgcctcctgggttcaagcaattctcctgcctcagcctcccgagtagctaggattacaggcacgcgccaccacacccagctaattttgtatttttagtagagatgaggtttctccaagttggtcaagctggtcttgaactcctgacctcaggtgatcygcccaacacaccctcccaaagtgttgggattataggcatgagccactgcacctagccttagatgcttctttagttggtggttgtgttacaaaatgcctctttttaaaagg

SEQ ID NO: 112703 - DNA, 675 bp, Homo sapiens
atattatcaggcccaccttacagatgataaagctggagcttccagaggttccaaagttgcccaagatcacacactgagcatagggaccagaattgaaaatcaggcagctggatgccaaagtacaaaggcttaccactcaaaactatccttgtgacagtctagggtcatggttataaaaatcgacgggaaacatgccataggaatgccagtaaacactctctatctagaaaagtatactaaatgctgaagagttcccaaactaacagagtgacttttaggcatcttaacatacagattgcaagtattagatgcttcttcttctttttttttctttttttttgagatggagtcttgctctgtctacccaggctggagtgcaatggcactatcttggctcactgcaaactccgcctcctgggttcaagcaattctcctgcctcagcctcccgagtagctaggattacaggcacgcgccaccacacccagctaattttgtatttttagtagagatgaggtttctccaagttggtcaagctggtcttgaactcctgacctcaggtgatccgcccaacacrccctcccaaagtgttgggattataggcatgagccactgcacctagccttagatgcttctttagttggtggttgtgttacaaaatgcctctttttaaaagg

SEQ ID NO: 112704 - DNA, 734 bp, Homo sapiens
tattccctcttgctgcagggcgagggtggagaagactgaggcataacttggttattactttgctacttaggaagataaacaacagggtacccaaggagggcagcacattttggaaagcagaccaacgctggatgatctgagcttcagctggctctgagttctgtgaggtcttccatgggggcacttgtttcataggcagcagggagcttgggagattaaagagaytctcaactctcagcccaactttcatactcttaaccctggggaaacagattatgtcattcttgtgcatttatctcactggtgacctcttccaacttacacagagaatatgacctttcttatatgagtaagtataagttggggattttacccaaaacaagccctcagaataaaaggtacagatgtatactcaagttctctattattattattattattattattattattattattattattattattattttatttgagagaggtgggttctcaccaggttgctcaggctggagggcagtggcttttcacaggcatgatcccactgctgatcagcacatgagttttgacaggctctgtttctgacctgggacagttcaaccctccttaggcaacctggcagtcctctgctcctgagaggtcaccatactgataccaaacttagtgtagacaccagatcagcaaagtgcactacagcccagggctcctgggctcaagcgatcctcctgtct

SEQ ID NO: 112705 - DNA, 734 bp, Homo sapiens
tattccctcttgctgcagggcgagggtggagaagactgaggcataacttggttattactttgctacttaggaagataaacaacagggtacccaaggagggcagcacattttggaaagcagaccaacgctggatgatctgagcttcagctggctctgagttctgtgaggtcttccatgggggcacttgtttcataggcagcagggagcttgggagattaaagagactctcaactctcagcccaactttcatactcttaaccctggggaaacagattatgtcattcttgtgcatttatctcactggtgacctcttccaacttacacagagaatatgacctttcttatatgagtaagtataagttggggattttacccaaaacaagccctcagaataaaaggtacagatgtatactcaagttctytattattattattattattattattattattattattattattattattattttatttgagagaggtgggttctcaccaggttgctcaggctggagggcagtggcttttcacaggcatgatcccactgctgatcagcacatgagttttgacaggctctgtttctgacctgggacagttcaaccctccttaggcaacctggcagtcctctgctcctgagaggtcaccatactgataccaaacttagtgtagacaccagatcagcaaagtgcactacagcccagggctcctgggctcaagcgatcctcctgtct

SEQ ID NO: 112706 - DNA, 611 bp, Homo sapiens
cacataaacagtagtctgtagacaaggcagaccagaggaggaatgtggttcaaataaaatcatcaaagaccccagaccctccaatattttcctaccttcattaatgtgttggctttttgcctcacaattacagatgtattcaatgtaggaagaagagggagacaatatgaaagggtatgaatcagttttaccaggaaaaccaagctttattgaagrgatggtgcaggtttcagcttaagtctcattggctagaaccatgtcacatgtccagccctctttgcaatggaaactgcaacagtgagtagcttttctagcttcttcagtagaaggtaatatgggaggatgcctaggtattccttacaccagcttatagttactatcacttacaaacaaatgtcaggtcttatataatttatgtttatcctccgtattcaagaaatggaaaatcttcctgatcctagaccatcaacctgattagaagagtaaccacttttctttcattcaaaactggaattcttattttgaaaatgagatataacacttcaacacaacccaggaaaatctatgtcatatagttatatgctttctagattaggacaatattcaaaatc

SEQ ID NO: 112707 - DNA, 554 bp, Homo sapiens
gaataacttcatgaaacaatgcatcactaattatgtgacaatggttgaaatggccatagaaaatcacaataaaagaaccagcacaaagctgaatataacatatgccacataccttcaattaataatacacgttagaagcagtgtgctaactgggagggaagatgatttaataggtgtagtaggactggatttcaacaccaaaggatggggggagagtttggggatgaagagggaaggccttagaagaaccatccttggcttagaagttgagttcaggaaacatagcgttggggaaggtggtgtccatagcagatcattcactagggaagtagaggaatacatatttggcaagttgggccaagattgttaatggtatcaacaaccgcacagatttgttgggagcccagaatggcccatgatttgagtgcacctaaattgttcaaaaagaaaaaaatattaagcaaggagtagcagcagacagattttcaaactgtttgtgtaatcactgaggtactcaaacactgctttgasatgaaagtacactaatctcaggc

SEQ ID NO: 112708 - DNA, 598 bp, Homo sapiens
cggagatcatttagctaggagacttaaattgcaatatatattatagagctgtcagttttcttttggaccatctcttgtgaaggggcatggcatttcagaaatgattttaaatcagttttgctaggctgctagtaagagagaaatttcaaggaacaacaacaaataaggctacaggtggtaacagtgttcctagtggttaaaccagacatggacttaataccaacagtggtcaagatggcagagaacttaagaatagctgctggtaattaatttttgaaattaaatattattttgactctcaaatatgattgaagcacttcctaaaattatgccactgaattttcttctaaaagctttatataaatatatctcttaataaatgaaatcaaaatagtattaggattgattacttgcatctgaaaaaacaagatggatttgatatggattcttgacttccttgctgtcatagcygtacaagtatttaagtggtaagaaaataatcctgccaagccttagaaagactcaagaggctggaaagagagccaagatgttagaaatatctccctattcccactgttcttctttccgtcaaactcat

SEQ ID NO: 112709 - DNA, 598 bp, Homo sapiens
cggagatcatttagctaggagacttaaattgcaatatatattatagagctgtcagttttcttttggaccatctcttgtgaaggggcatggcatttcagaaatgattttaaatcagttttgctaggctgctagtaagagagaaatttcaaggaacaacaacaaataaggctacaggtggtaacagtgttcctagtggttaaaccagacatggacttaataccaacagtggtcaagatggcagagaacttaagaatagctgctggtaattaatttttgaaattaaatattattttgactctcaaatatgattgaagcacttcctaaaattatgccactgaattttcttctaaaagctttatataaatatatctcttaataaatgaaatcaaaatagtattaggattgattacttgcatctgaaaaaacaagatggatttgatatggattcttgacttccttgctgtcatagccgtacaagtatttaagtggtaagaaaataatcctgccaagccttagaaagactcaagaggctggaaagagagccaagatgttagaaatatctcccyattcccactgttcttctttccgtcaaactcat

SEQ ID NO: 112710 - DNA, 638 bp, Homo sapiens
tatctttctcccctgccctttttacagtaggtctcagagaagcctgaatgcacatcctaaagctcattaggtaggggaggaaaaaagtccagtggtgtgtagatgctctgtggggattcaggatatttgtatgtggtataaactgaggggagcaaaagtaaaaactgtctgacactaaaaataatgtaattatgaaaatattttacctttagcgtaamaatgtttgaattagtgatttttctaaatcaagaatttttaaaatattttatgctttttattaaactattaattcttatagaaaagtacacaaactgtacgtgtacagctcaatgaattttcacaagcactcgtgaccctcattcagatttagaaatagaacatgacgaagaaacaggagctccccttgcaggcattacctccactcccccaacttctagcactggagattagttttgcatatgtgtgtatctacactggtatcaaacagtatgtactattaaacatgtgggattcattcatattgtggcatgtagttacacattgttcattctcactgatgtttgatgttctactgttgtgggtatatcctaatttatcatgtctaacattgatgggcctttggatattttccagtttgg

SEQ ID NO: 112711 - DNA, 538 bp, Homo sapiens
tgccagcctcttgatgttacctatctggttcctgtggtaatttgggtttgcaaccctgatatagtattaagaattcctgggagattgagaccacaagtccttcactttccttgcacccatgcacactttattcctgtcctgcacactcaggatctcaggattaggcataccaattcctgtgatggatgattttaaaactgcatgccttggagctggggggcactcyaaactctccttgtgctctatatccatcaaaccatcacttctcctttcatccagcccttgttctacttcctgattgtccacagtctcacatgttatctcacttatctactaatcagattttttaaaagtgcaaatgcccattcatttttcggtgataaaatacagaccaccagctctaggcatcttatagtctattagaaagtccatctgaatgtttattgtagccatttgctatacctgaacaaatgagtaggttttcaaatataaagttaatttccttagtattgacacaagagcagtgttttttttgttg

SEQ ID NO: 112712 - DNA, 538 bp, Homo sapiens
tgccagcctcttgatgttacctatctggttcctgtggtaatttgggtttgcaaccctgatatagtattaagaattcctgggagattgagaccacaagtccttcactttccttgcacccatgcacactttattcctgtcctgcacactcaggatctcaggattaggcataccaattcctgtgatggatgattttaaaactgcatgccttggagctggggggcactctaaactctccttgtgctctatatccatcaaaccatcacttctcctttcatccagcccttgttctacttcctgattgtccacagtctcacatgttatctcacttatctactaatcagattttttaaaagtgcaaatgcccattcatttttcggtgataaaatacagaccaccagctctaggcatcttatagtctattagaaagtccatctgaatgtttattgtagccatttgctatacctgaacaaaygagtaggttttcaaatataaagttaatttccttagtattgacacaagagcagtgttttttttgttg

SEQ ID NO: 112713 - DNA, 591 bp, Homo sapiens
gttggtgatttcttatccattttgcaattctgtgtattataattgtagcatttaggccatttacattcaatgttagaattgacatttgaggtgccattcaattcatcctactatttgttgcctgtataccttggttttttgtttttgttttttaaattgtatttttgttttatacatcctgtgacatttatgcttcaaagaggttctgttttgatgtatttccaggatttgtttcaagatctggagctccttttagcggttcttgtagtggtggcttcgtagtggcagtttctctcagcatttgcttgtctgaaaaagactatcttttctttatatatgaagcttagtttcactggatacaaaattcttgattgataattgttttgtttgaggaggctgaagataggaccccagtcccytctagcttgtagggtttctgctgagaaatctgctgttaatctaataggttttcttttacaggttacctggtgcttttgtcccacagttcttaagattctttcctttgtcttaactttagataacctggtgacagtgtgctaaggcgatgatctttttgcgatgaatttccaa

SEQ ID NO: 112714 - DNA, 591 bp, Homo sapiens
gttggtgatttcttatccattttgcaattctgtgtattataattgtagcatttaggccatttacattcaatgttagaattgacatttgaggtgccattcaattcatcctactatttgttgcctgtataccttggttttttgtttttgttttttaaattgtatttttgttttatacatcctgtgacatttatgcttcaaagaggttctgttttgatgtatttccaggatttgtttcaagatctggagctccttttagcggttcttgtagtggtggcttcgtagtggcagtttctctcagcatttgcttgtctgaaaaagactatcttttctttatatatgaagcttagtttcactggatacaaaattcttgattgataattgttttgtttgaggaggctgaagataggaccccagtcccttctagcttgtagggtttctgctgagaaatctgctgttaatctaataggttttcttttacaggttasctggtgcttttgtcccacagttcttaagattctttcctttgtcttaactttagataacctggtgacagtgtgctaaggcgatgatctttttgcgatgaatttccaa

SEQ ID NO: 112715 - DNA, 478 bp, Homo sapiens
tttgagtttgccacgtgggtctttccagtccccagacaatgttcaaaagtgattagtgatgtaaagagatcaagtagaattagggcttggtatcagcctttgaatttaattattattgatgtcaactaattgatattttaatgcactggttcgacacaccgtggccagccagacccattacaaaaagtaagttagatcaagccatcccctttctcaaaaccttatgatggcttcattttggtcttagagtaaaaccagtggtactttcaatggcttagaagactccacatagcctggtttcttgctgcatctctgaattcaccacatttcaggatcartcatttatttttctccctttgttccaataacactggccttcttgtggtctttgaacatgccaggtgggcttctgcctcaggtcctttgcgttgggtcttcctcttatctggaacatactctccaatatatttacatggtt

SEQ ID NO: 112716 - DNA, 359 bp, Homo sapiens
tggggagtgataaaagatgaaccttgaaaggtaggtagagcccagatcacaaaacagtctgaggagcttagcacttctgctggaagcaatgaggtaggaaggatgtaagctgaggaataacatgatcatggttgtggtttggaaaaaaaatctccttagcagccatctggagaatgaaatgcagttcatcaaaagtagacacagggatgagaggtgaagtaaggcaagggaaagaggaaaaggtaagaaactctttaraagatggaatcaacagggcagccttggtgagtaacggaatctggaaagaaaggcagaggaaggaggtagaaaagacacctctaaagattccagtttgggtg

SEQ ID NO: 112717 - DNA, 445 bp, Homo sapiens
actaatattccacactacggagaattacccacaaataggaaaaggagttgaatattgagcagaagaaaaacaaaaccaaaaataggaccgctatgatatttttcattcattcagcagtcatttattgagtactcactatgttatattctaggctgtagttttcaacmacaggtatcctagtattgcttacaggtacattaaagcattctgtaaataatggaatgtttcctgccaaaccatgaaatttaaatagtctgagtcgtgtcccattacttttatcatgccaagtgcaatcccacctgatatggtttggctgtgtccccacccaaatctcatcttgaattgtagttcccataatccccacatgtcgtgggagggacctactaggagataattgaatcatggggatggttacctccatgctgttcttatgatagtgagtgag

SEQ ID NO: 112718 - DNA, 570 bp, Homo sapiens
ccatgtgttctcattgttcaattcccacctatgagtgagaacatgcggtgtttggttttttgtccttgcgatagtttactgagaatgatgattcccaatttcatccatgtccctacaaaggacatgaactcatcattttttatggctgcaatatcacctttcttatagatttgcatatatgtggccaaaggagcaactccatkttttctaaaaggcctagagaacatatatcgggtgcctctcctctttcgctttgtgttcgtcattttggcgaattactggaagatggcggttccggccgaaaggcgaagcaggaacatttctgttagaaaaataaagtgaggtccaagagtggtggctcacgcctgtaatcccaacactttgggaagctgaggtgggcagatcacttgagcccaggagttcaagaccagcctgggcaacatggcaaaaccctgtctccacaaaaaatacaaaaaaaaatagcctgtttggtggtgtgcacctgtagtttcagctacccaggaggttgaggtgggaagatcccctagcccgggaggtcaaggttgcagt

SEQ ID NO: 112719 - DNA, 575 bp, Homo sapiens
ccagcctctggggactgacacagcattatggccgtggatttagggtgaagaccacatccagaggacagcagcacatccttcccagcatactctccaagctggctcctcagccatgccttcagaagcgcattccctcattctatccagcaaaagccttctggacttgcagtctgtggcaggaatgccaggtctcggggtcagtagcccttgcatcttcttctttattctaaattaaggcctttgtttgagcacttccctgagaggtgtgcagctatgagccctctctagcagcctcagtyccgcagagcgatgagggccgcatctgatggtgggacctgagtctgcggtgaggcccatgcaagggaaagagtcgtgtcacatgaactcatgtgctgtaaattcaaatatcctctcaacgggctttcctgaggactgccattccatttaatatgctaaagaacaaacttattgttactgccctccacatcccttgaaacaaaactagcccttctattcttgggaccacaagtggtcatgtctgccttcctggtgcttagctctttgcttctagaaca

SEQ ID NO: 112720 - DNA, 545 bp, Homo sapiens
  misc_feature (1)...(545): n = A,T,C or G
ttatcaggtatatactagttaaacatttttctccccctttttttattttctaagatgactaaaatagatgaagtcacttcccaattatcagatcatgcaagttgtctcccaggagagcagtatacctgggcagaaaggtaagcaacatttctaagagagaaaggacagagatcaccaaacatttcccttttgaggtanacatggaccaggtgggtgattattttgttaacctaaataacaaaaggggctctctaatattttttaaaagctacttatttggaaataggatactgcaatggggataatcctgccataacaaactatacgcatattcagagaataaagaagacaaaggtttttttaaataaaaaatgaggaggattacataattgttttaaaattgttatctttggatacaargatgaataataagggtgactagagtctgtggttggacagacagttgctcaatagatgtccttgcagaagtatttttttagtaaggttgcaatgtcctttgtacaagattgtgttttttgcagagt

SEQ ID NO: 112721 - DNA, 628 bp, Homo sapiens
tttgctgctctgacatatgaacagtagctgtagaaagacaaatgtctcaaaaataactgtgagtacagctttgcaaatatttcatctagaaatacctcaaagtattcttgagggaggcttgcagcaaaagcagaaccattctagggtaaaggagattaaatggttcaaattccataaatgtctytgggtccccaactttttacaggtaaataagctggctgagaaagctatccaatggactgggtagcttcttttatagagcaatatataagaaatgcccaaggctccaattgcatagcataacaaggccatgattaaggattatttactacttatgaagtaaattggtctattgcagtcatctttttgtatcctttgggggattgcttccagaacccaactccttcccctaggtactgaaatccatgaaatctctagtaccttatttaaaatagcatagaatgtgcatatgatctacatccccccacatacttcaaatcatctccagattacttataatacctaatacaacacacacatattaattcattgaatggattcaatgtagtacttggcaaacggcaaatttaagttttgtttttttttaattttgtgtatttttttctaa

SEQ ID NO: 112722 - DNA, 628 bp, Homo sapiens
tttgctgctctgacatatgaacagtagctgtagaaagacaaatgtctcaaaaataactgtgagtacagctttgcaaatatttcatctagaaatacctcaaagtattcttgagggaggcttgcagcaaaagcagaaccattctagggtaaaggagattaaatggttcaaattccataaatgtctttgggtccccaactttttacaggtaaawaagctggctgagaaagctatccaatggactgggtagcttcttttatagagcaatatataagaaatgcccaaggctccaattgcatagcataacaaggccatgattaaggattatttactacttatgaagtaaattggtctattgcagtcatctttttgtatcctttgggggattgcttccagaacccaactccttcccctaggtactgaaatccatgaaatctctagtaccttatttaaaatagcatagaatgtgcatatgatctacatccccccacatacttcaaatcatctccagattacttataatacctaatacaacacacacatattaattcattgaatggattcaatgtagtacttggcaaacggcaaatttaagttttgtttttttttaattttgtgtatttttttctaa

SEQ ID NO: 112723 - DNA, 628 bp, Homo sapiens
tttgctgctctgacatatgaacagtagctgtagaaagacaaatgtctcaaaaataactgtgagtacagctttgcaaatatttcatctagaaatacctcaaagtattcttgagggaggcttgcagcaaaagcagaaccattctagggtaaaggagattaaatggttcaaattccataaatgtctttgggtccccaactttttacaggtaaataagctggctgagaaagctatccaatggactgggtagcttcttttatagagcartatataagaaatgcccaaggctccaattgcatagcataacaaggccatgattaaggattatttactacttatgaagtaaattggtctattgcagtcatctttttgtatcctttgggggattgcttccagaacccaactccttcccctaggtactgaaatccatgaaatctctagtaccttatttaaaatagcatagaatgtgcatatgatctacatccccccacatacttcaaatcatctccagattacttataatacctaatacaacacacacatattaattcattgaatggattcaatgtagtacttggcaaacggcaaatttaagttttgtttttttttaattttgtgtatttttttctaa

SEQ ID NO: 112724 - DNA, 628 bp, Homo sapiens
tttgctgctctgacatatgaacagtagctgtagaaagacaaatgtctcaaaaataactgtgagtacagctttgcaaatatttcatctagaaatacctcaaagtattcttgagggaggcttgcagcaaaagcagaaccattctagggtaaaggagattaaatggttcaaattccataaatgtctttgggtccccaactttttacaggtaaataagctggctgagaaagctatccaatggactgggtagcttcttttatagagcaatatataagaaatgcccaaggctccaattgcatagcataacaaggccatgattaaggattatttactacttatgaagtaaattggtctattgcagtcatctttttgtatcctttgggggattgcttccagaacccaactccttcccctaggtactgaaatccatgaaatctctagtaccttatttaaaatagcatagaatgtgcatatgatctacatccccccacatacttcaaatcatctccagrttacttataatacctaatacaacacacacatattaattcattgaatggattcaatgtagtacttggcaaacggcaaatttaagttttgtttttttttaattttgtgtatttttttctaa

SEQ ID NO: 112725 - DNA, 613 bp, Homo sapiens
ttttatcagtaagtaaaagttgctgaaactcaacctggatcttttacctgtcttattaaacaaattagaggagaaagaggatagagctattggttaatgaaatgaggttaatcaattgaaatgaatgggtttactgttttgattgaattttaatttaagacataataccttctaatttcaagcaatgtgttcacaatgacatgaagagaaaatctatataaagatttttttaatttccaaattttaatagaatacttcattttaaaattagtattaaaattacagttggtactaaacaaaattatctgaaaaaaattttctatatagctatcactagttccatttattactaaaacaagaaaatatagatttccatctggtcatgattacaaaatgtcatgtaatgtaagatttacyacacatttaattatagctcttcaagaaaagaaaggctaaattaaatatatacatctattttaatgcatattataattttagttatgtacaaatgtgaacaagtataaatctgataattgaaaaaataaaataattttctgtaataattataagatcattaaaacaattaaaattacagtcaagtcatggttatttt

SEQ ID NO: 112726 - DNA, 613 bp, Homo sapiens
ttttatcagtaagtaaaagttgctgaaactcaacctggatcttttacctgtcttattaaacaaattagaggagaaagaggatagagctattggttaatgaaatgaggttaatcaattgaaatgaatgggtttactgttttgattgaattttaatttaagacataataccttctaatttcaagcaatgtgttcacaatgacatgaagagaaaatctatataaagatttttttaatttccaaattttaatagaatacttcattttaaaattagtattaaaattacagttggtactaaacaaaattatctgaaaaaaattttctatatagctatcactagttccatttattactaaaacaagaaaatatagatttccatctggtcatgattacaaaatgtcatgtaatgtaagatttactacacatttaattatagctcttcaagaaaagaaaggctaaattaaatayatacatctattttaatgcatattataattttagttatgtacaaatgtgaacaagtataaatctgataattgaaaaaataaaataattttctgtaataattataagatcattaaaacaattaaaattacagtcaagtcatggttatttt

SEQ ID NO: 112727 - DNA, 613 bp, Homo sapiens
ttttatcagtaagtaaaagttgctgaaactcaacctggatcttttacctgtcttattaaacaaattagaggagaaagaggatagagctattggttaatgaaatgaggttaatcaattgaaatgaatgggtttactgttttgattgaattttaatttaagacataataccttctaatttcaagcaatgtgttcacaatgacatgaagagaaaatctatataaagatttttttaatttccaaattttaatagaatacttcattttaaaattagtattaaaattacagttggtactaaacaaaattatctgaaaaaaattttctatatagctatcactagttccatttattactaaaacaagaaaatatagatttccatctggtcatgattacaaaatgtcatgtaatgtaagatttactacacatttaattatagctcttcaagaaaagaaaggctaaattaaatatatacatctattttaatgcatattataattttagttaygtacaaatgtgaacaagtataaatctgataattgaaaaaataaaataattttctgtaataattataagatcattaaaacaattaaaattacagtcaagtcatggttatttt

SEQ ID NO: 112728 - DNA, 476 bp, Homo sapiens
  misc_feature (1)...(476): n = A,T,C or G
ccaccctgggcttctgcggcccaggcgcgacccagccgcnnccggcctgtccgccccttagagtgctgaaactctcttcattatgggtctcccgatcgagtcccgaacctggccccgccatggggagagagggggagctgcatgaaaactttctttctttatctttttctttctttcttcttcttctttccttcttttttttttttttaacgagttctcttcttttccttccccttctcgagataatcaagattttgggggtgggggaatggcagcgggcttttttccaaatcttaaaagatttgggggaattccgggggttccaggtgcccacctgtccgaggtyacaacagacggggtgtgcacaacagcccctctgtcctggagcgacccctcttcccaaacactggagcatctcctgagattgctccagcgacaaggtgagccgcgaggaggaaaagcccgctctcgcctct

SEQ ID NO: 112729 - DNA, 402 bp, Homo sapiens
ttttgctttgagtatgcacttttctgtctcttgggttaaagtggtgtgccaggcaatagtccatgtctatggtctagcacagctggtcactaaaaccatactccagctatttgtggagtgccatgtatgagactgactggggtctgttttattctcaagacatttccttcaatttactgtgatagaagaaaatacagggagtgggtatagcaactgcttargctcacagatttagcagtaaaatactatgattgtaccaaggaacttaaaaagtcatgaattcagagatgacaggcccttaagagttcacaactttggactactctttccatagataataaaatcaagattagagacagaatgagaaagacctgagaaaacttaatgaggtcatgttgtgga

SEQ ID NO: 112730 - DNA, 558 bp, Homo sapiens
tggaaaactacaatgaaaaaaaaaaaaatctatcctgaggccccggtggggctggctcagaggcaacaccctttccccttcccatgtcctgtgaatgaatgtcttgctctgtgtatgtgtccaggaccctgaggtgaagagctggggtagataatctgatgagcayttggtccaatggggaagtggtccataggctttccatgggtcattatcctttggagctgtgtaagccttgtgctgggagacctaggtgacatattaggagcagtggttcttcctccccaggcagaggttgcatgcacaaatgcacaattctctttccacactctaggcagtgcaagtcccagcagagcattgttctcattagttgctctcctacaactggttttcagaacaaatgcaaagcacaaactttatcccaaggggctgatcctaagaaaataacaatacagaaacaggcacaacactgaagatacatgaagaagaaatacaaatgtttgtgccataattttttctaatactatctgatttttatgctaaggcatgagcagagaaaag

SEQ ID NO: 112731 - DNA, 599 bp, Homo sapiens
tggggtagataatctgatgagcacttggtccaatggggaagtggtccataggctttccatgggtcattatcctttggagctgtgtaagccttgtgctgggagacctaggtgacatattaggagcagtggttcttcctccccaggcagaggttgcatgcacaaatgcacaattctctttccacactctaggcagtgcargtcccagcagagcattgttctcattagttgctctcctacaactggttttcagaacaaatgcaaagcacaaactttatcccaaggggctgatcctaagaaaataacaatacagaaacaggcacaacactgaagatacatgaagaagaaatacaaatgtttgtgccataattttttctaatactatctgatttttatgctaaggcatgagcagagaaaagacagaaaagtcaacaatggaccagaatggaggattccacagggagaccagacctagaccattgccctctacctggaagagcaatggatgtatctgggataggcaggattggaatctaggtgggttgggtatgcagggagagctgagctctgtcccaggaggtgggttcctttgagatttttat

SEQ ID NO: 112732 - DNA, 597 bp, Homo sapiens
acggcaataagcatttttatcacaaaaaggacaaaccttctctaaataatcaaagctcttattaggggaaaacctttcgtaaataattatttattcctaaatggaagtcaaatgcaccactaaatatcttccagggaaatgtgaagctttcaatagtgcatttaacatgagacagtcccttggaaaacactctgaggatgccrtatctccatcttccaataacttccaaggtccacataacagaatctgctaaagccatcaacctgaactgaccccagttggttactgatttgtttgcataagatcctgttactcaggctgggcatagtgtctcacacctgtaaatctcaccactttgggaggccaaggtgggaggattgcttgagtccacgagtttgagaccagcctgggcaacatggaagaccttgtctctgcaaaaaataataaaaaaataaaaaactaaatagccagacagacatagttgtatgagcttgtggtcccagctactaaggaggcagaggtgggtggattgcttgaacctgagaggtcaatgctgcagtgagtgttgcagttgcaccaaccagcaccctccagctt

SEQ ID NO: 112733 - DNA, 597 bp, Homo sapiens
acggcaataagcatttttatcacaaaaaggacaaaccttctctaaataatcaaagctcttattaggggaaaacctttcgtaaataattatttattcctaaatggaagtcaaatgcaccactaaatatcttccagggaaatgtgaagctttcaatagtgcatttaacatgagacagtcccttggaaaacactctgaggatgccgtatytccatcttccaataacttccaaggtccacataacagaatctgctaaagccatcaacctgaactgaccccagttggttactgatttgtttgcataagatcctgttactcaggctgggcatagtgtctcacacctgtaaatctcaccactttgggaggccaaggtgggaggattgcttgagtccacgagtttgagaccagcctgggcaacatggaagaccttgtctctgcaaaaaataataaaaaaataaaaaactaaatagccagacagacatagttgtatgagcttgtggtcccagctactaaggaggcagaggtgggtggattgcttgaacctgagaggtcaatgctgcagtgagtgttgcagttgcaccaaccagcaccctccagctt

SEQ ID NO: 112734 - DNA, 548 bp, Homo sapiens
ttgtgataggcactggtttgatcatttgtgacaagcagctcttctttaatatctactggttgcacccaagctgttatcagctcctcttctccttgggggcttcttagtgtctatgtgtccatacagaacattactttttatgagggaattttgcctgaaacaccaactctttgcagaggtgcctgttaactcataattcacagggatttggtcttcgtccatgctcaccctacctttgcctgactttgaaatactgagamctaccctcaggcttgagtgctgaatttgctgtggttgtgggcacacaacttgggttgtcttgctcctcttgtgaggtgtaaggctttttcccacttcctgtttcctgtagctttccactgcctctgatttccagatgacagagtctctgcaacttctaataatcccttcactaggacaaagcttgaaaacaaacagccctttgcacatattaagtgctcaaatagtttgtgaaatagagttgagttgaaaaccatgttatcagtgctgaaagaatttagtgtttggtt

SEQ ID NO: 112735 - DNA, 548 bp, Homo sapiens
ttgtgataggcactggtttgatcatttgtgacaagcagctcttctttaatatctactggttgcacccaagctgttatcagctcctcttctccttgggggcttcttagtgtctatgtgtccatacagaacattactttttatgagggaattttgcctgaaacaccaactctttgcagaggtgcctgttaactcataattcacagggatttggtcttcgtccatgctcaccctacctttgcctgactttgaaatactgagaactaccctcaggcttgagtgctgaatttgctgtggttgtgggcacacaacttgggttgtcttgctcctcttgtgaggtgtaaggctttttcccacttccygtttcctgtagctttccactgcctctgatttccagatgacagagtctctgcaacttctaataatcccttcactaggacaaagcttgaaaacaaacagccctttgcacatattaagtgctcaaatagtttgtgaaatagagttgagttgaaaaccatgttatcagtgctgaaagaatttagtgtttggtt

SEQ ID NO: 112736 - DNA, 548 bp, Homo sapiens
ttgtgataggcactggtttgatcatttgtgacaagcagctcttctttaatatctactggttgcacccaagctgttatcagctcctcttctccttgggggcttcttagtgtctatgtgtccatacagaacattactttttatgagggaattttgcctgaaacaccaactctttgcagaggtgcctgttaactcataattcacagggatttggtcttcgtccatgctcaccctacctttgcctgactttgaaatactgagaactaccctcaggcttgagtgctgaatttgctgtggttgtgggcacacaacttgggttgtcttgctcctcttgtgaggtgtaaggctttttcccacttcctgtttcctgtagctttccactgcctctgatttccagatgacagagtctctgcaacttctaataatcccttcactaggacmaagcttgaaaacaaacagccctttgcacatattaagtgctcaaatagtttgtgaaatagagttgagttgaaaaccatgttatcagtgctgaaagaatttagtgtttggtt

SEQ ID NO: 112737 - DNA, 557 bp, Homo sapiens
tcatatagcacgttctatcctttgtaaacactgggccttgatagagacttaatgagattcatgtttgattttttttctcaaaaatacttgcctacacttcattgctttaatagtcacgtattatcttgttgcctctcttttatgatgttaatatttatcaataggttcaggagttgtcaattcaattcgtccatttttaaattctccattagtgtttcatctagtagttttagtagccaccaaggattattgtctagatttataattatattaacggatggcaaaatgatgatatccttccattatttctgctcttgtcagctgtggaatttttctataaagaaaagcttgtatttctctactattaaattactctgaaacctaattggcatgggaaaggcaggataaatgcatgtgttcccctgcccccatttttttgctaccagttttttaaatactgaatttgtgccttaaaaatttcctcaagtgatcagtgagatgtatttttgtgtcacyatgaattcagaaatgatgatcttgaatcttttataaccaaa

SEQ ID NO: 112738 - DNA, 483 bp, Homo sapiens
gagagggagctgagcagtaggtctgatagtcctgccaagactgrggattgaaattctttggcaatagactgcatttttaataaaagtgaaagatctccacaaatgatggtaacacagaaagtcagtgtcctccataaacctcagttccctgccatcaacttcaagattctttcatagacatgggctgggagcacacaaaatgtgcccacagggcacagcacttggaaagttaccctcagagcagaatgccaaggagaaaagggcaggcttagagaggaggggatgggggaccatttcaacccacattgcccctagctctacagttgggccagcacctcttactctatcagaagtcccttgcctccttctattccaaaaatgaccaccttgtgcacattttacagtcatgccatgaatgggcccatttttctacctggaaaaactcctagcagatgaaactattaatagaacttgtcaggtagc

SEQ ID NO: 112739 - DNA, 454 bp, Homo sapiens
agtctctgccctcatggagcttacattctaatggaaattatgaaaaaatatggtggttgttttgcgtgtgtrcttgcacatgtgtttagtttattgcttctgtctgctacctactactctatttcctgcacctacagtctttgactggctcattctcttagtgatagacatccaggctgcctctcacttgttgttaccacaaaggaggctgcaaagaacatccctatacccccttacaatcctattcaagcattcttgtgttttagactcaggaaggaatacccatggctaggttcagtgaacacagcagactaatccccagaagacccaccctagtctacactctctcaggagatttgatgtgccacgtgctgctgtctaatgtttgccagtatgagaaatgtaaagtcattttaatttgtgtttctctaattgctagtgaggctgaccactt

SEQ ID NO: 112740 - DNA, 579 bp, Homo sapiens
tgatacttgtgtatgcttcacgaagttcttgtgctgtgtttttcagctccatcaggtcatttatgttcttctctaagctggttattcttgttagcagctcctctcaccttttatcaaggttcttttttttttttttttttttttttgagacggagtctggctctgttgcccaggctggagtgcagtggcatgatcttggctcactgcaagctccgcctcccaggttcacaccattctcctgccttggcctcccgagtagctgggattacaggcacccgccaccatgcccagctaattttttttgtatttttagtagagacggggtttcaccgtgttagccaagatggtctcaatatcctgacctttatcaaggttcttagcttccttgtattgggttagaacatgatcctttagctcagaggagtgtgttattacccaccttgtgaagcctacttctgtccattygtcaaactcattcttcattcagttttgtgcccttgctggagagttgttgtgatcatttggaggagaagaggcattctggtttttgaaattttcagcatttgggggctggttttt

SEQ ID NO: 112741 - DNA, 616 bp, Homo sapiens
cactggcagaaattaaataccttctataataaattagatttctggcacttttgccttaaatttgctataacaaatatcttttaaaaagtttataagtgttaagaaaatatgagtaataaacttaggagagttgactgaaataagtaactgaaaaaagcatacaagataaagagaaaaatgtgtccaaaacacttctgttcacagaaagaaagtgtcttcagcggaattcagacatttagcagcaaagttggctgtaaacattttcccaaacagtcaacaggacaaagaaaatgctcctgtgagaacagtaaccagatcttaaggctctggtctttgatgtttgaagtatttycccagaactgccacaatcttctttctctcctaccccactggaagatcacaaaagtacattcttgttcattccctctttctgttatcctgccaaaaatacacagtcactgataaagctcaccaatgattcattacataccatcctcctaaggtttccagtataaatgccatttttaatgagcctcttttgtttcattaatgctaacagacatttaatagcaatgatgggtgccaaatgattcttacggtaccatttcattgaaac

SEQ ID NO: 112742 - DNA, 582 bp, Homo sapiens
accaggcactgtaccaggtgctggggatagaatggtagcgcaaccaggacaggtccctgccctcatggaacttataaactagcgggatgaggttagtgctgcacaaaaattgtgactgactcatttgatttcctttggaatgacaaaatagagcacaattggttatctccaaatctgattatctgtacatctgaacaaatagagtcttttatcataaaaaaactaacggtatattcagtaattgctaaygctacacaaaggaaattccttttccagcccaattctacatccactcccctctactactatacagggcacacgttctccaagcagaaagagaaggagcatttcctctctggggctgaggtcagccttgggctgaggccagcatgagtcagcttgcccagcacggatgcttgcctctgcctcaaggcaggccttgctataaccttgacgcacacagatagtgtgtgtattcagggtccagggcagaggcccatgcatatctgatgaatctctctggaacagggagtataagacctactctggctttgagttgatagtgcagtaaggagaaacatc

SEQ ID NO: 112743 - DNA, 555 bp, Homo sapiens
ttgcctctgcctcaaggcaggccttgctataaccttgacgcacacagatagtgtgtgtattcagggtccagggcagaggcccatgcatatctgatgaatctctctggaacagggagtataagacctactctggctttgagttgatagtgcagtaaggagaaacatctgtcttttttttttttccaaaaaggaatttgttaattataacaggagccaccaaactgtccatatatttgatttcataattctatttgggagaatttatgtcaaggraacaacctgaaagaaaaaaaaatccaaagatattttcataataatgtaattggtcatcatgataaattcttagtatcccaaatacttccaatggagaactataatgtgatctgtattaaacatcctaaaggtattaaaaatgtaaaggatgtatacaatggtatttcatggaaatatctatatttaaaacagaacataagatggaattcacacatggattacaattacatgaaacatctgtaggtatgttaagaataattggaagagaatttagaatattgt

SEQ ID NO: 112744 - DNA, 375 bp, Homo sapiens
cctgtggtttagtgtgctgataatgggacatgctgctccactgacttttaatgagcttattccactggctagcagaaaagcaacaaaaataattttacaaacatatacatgtttagaggactaagggagttttaaaatctccttatgctctcagtatattccaccaaggtgtacgtaaacataacttctttttccttttctcacaggcttttttcgatagatcttttttaaatttaaaataaaaatctgaggaatagttgctatggactgaatgatgtccccacaaaattcctrtgatgaagctctaatccccatgtggctgtatttgaaaatagagcttgagaggaagtgataaaggttaaatgaggtcatatg

SEQ ID NO: 112745 - DNA, 595 bp, Homo sapiens
gttcctcacaatcactgtcatgtaagcaaatctggcctttcatgcctgtctgcttattggtaaatactgaatggcagctggtcaatgagaccaatggtgctttaataatagccacaaaagcctatttaggataaacaatagaaaaagcatgttttaaaatgcttataactggttaagaaatacagcagaagtataaaaatttaataatttcacttgatattgagaaatataagcactatttcttaaaatttcaattgcattaattcaaaaccttatgcagaataagaaaagagcaatatgccagattctttggytaaatccttcattgtcacagtcttaaattattgcaaagacctgaagatttcagaataatgatgatacagagcggtaactttctatcactgcacaaaatgtacagagctataaatcttattataatataacatagagttttagagatgcttaaaatccttttaaataccaagtcagctagttggtaaaatgtagcatccgcaatttgctgatagacaaactaaggtgaatgacctcactataatcatggcagaggaaagggtggatttgcttagctaattac

SEQ ID NO: 112746 - DNA, 595 bp, Homo sapiens
gttcctcacaatcactgtcatgtaagcaaatctggcctttcatgcctgtctgcttattggtaaatactgaatggcagctggtcaatgagaccaatggtgctttaataatagccacaaaagcctatttaggataaacaatagaaaaagcatgttttaaaatgcttataactggttaagaaatacagcagaagtataaaaatttaataatttcacttgatattgagaaatataagcactatttcttaaaatttcaattgcattaattcaaaaccttatgcagaataagaaaagagcaatatgccagattctttggttaaatccttcattgtcacagtcttaaattattgcaaagacctgaagatttcagaataatgatgatacagagcrgtaactttctatcactgcacaaaatgtacagagctataaatcttattataatataacatagagttttagagatgcttaaaatccttttaaataccaagtcagctagttggtaaaatgtagcatccgcaatttgctgatagacaaactaaggtgaatgacctcactataatcatggcagaggaaagggtggatttgcttagctaattac

SEQ ID NO: 112747 - DNA, 543 bp, Homo sapiens
ctagccatgagctgtcaggcatcggttgacattttgggcctcagttttcttatctactttcttatgtaactgtatgaagtcatgaggattacataaattatcataatctgaagtgcattgagcttaataggcactcagtaagtgtataataacgttgatgmcccgccctttgatggaaaatgctgatgacaataacgatatcctgcacttgaactgtcagcttgggtgctttatgtgagagagcaaaccaaaacaacacacaaagtaactaacaactaactgcctaaaacctggcttttccttttcttggaaaagggagaaagtccctgtcctttccccttctcccagagcctggatttgtgcccatgcacccagcattctcatcactggtggcttcttcttttgcatgactctacatcccaatctccttcatgtgggtgggatatttatttcattatgtccttttctcaaaaattcagcaacaatctgaatacctatccatgacctcttctgatttattaataaataaatgcattttaaggg

SEQ ID NO: 112748 - DNA, 611 bp, Homo sapiens
aagaaagtattattttatgcatatttttgttttttcaacatccactccagttgcttaagatgagttgacaaaagaattttggctaaaacagaaggctttttccacatacctaggattctctgagtggtctgtctaaaataatgcacagtgcggttcaggttcctaaaaagttacctcccattatcccataaattcgytttgagcactttcaaagtatatgtattggttaaaacaaaattctatattttttctttaatattgattcctttttgacaccaacaaaatttttttaaaccctttgttctatataagtttttaaatgacagaatttttgggttttagtgttaaaagaatcttagaaccatctaattcaggagtcccaaccaccagtttccatcccctaattttaaagccagtcatgggatctataagctacttttagtgtttttaaataagcttaacaacaatcaacatttatccctaataaaacacaggagctaacacaccagttttccttgctttaggcttaaactttgtttgttcaatgataacactggcagttttacattaatcagagaatctgatgggcagggattatcagaggaatccat

SEQ ID NO: 112749 - DNA, 611 bp, Homo sapiens
aagaaagtattattttatgcatatttttgttttttcaacatccactccagttgcttaagatgagttgacaaaagaattttggctaaaacagaaggctttttccacatacctaggattctctgagtggtctgtctaaaataatgcacagtgcggttcaggttcctaaaaagttacctcccattatcccataaattcgttttgagcactttcaaagtatatgtattggttaaaacaaaattctatattttttctttaatattgattcctttttgacaccaacaaaatttttttaaaccctttgttctatataagtttttaaatgacagaatttttgggttttagtgttaaaagaaycttagaaccatctaattcaggagtcccaaccaccagtttccatcccctaattttaaagccagtcatgggatctataagctacttttagtgtttttaaataagcttaacaacaatcaacatttatccctaataaaacacaggagctaacacaccagttttccttgctttaggcttaaactttgtttgttcaatgataacactggcagttttacattaatcagagaatctgatgggcagggattatcagaggaatccat

SEQ ID NO: 112750 - DNA, 543 bp, Homo sapiens
gttctgcactgagataaaacaatgaattaatttctgtaatgtcacataccttgaactctgagggacagaaatatttaatttcctaatgtgaagacatagtttaaggaaattaaaccagcgattttctcactcaagtaatatgttttattttaacccaatgaatatatttatacaatactataatgtctataaatttttcttctataaaaattaatggatctggtaaagtttagtcactaattaatgaaaaggcagagcatcttgatttttgagtgatatttttaatttctgtagcttaaaaaattatgaaacaactcatatttccaacttcatcctcttgctgataccctactgtcttcctattattattggyagtaaacttgtcttgcctgccaagtgagtcacttgagatgggaacatttcttgattagaacctacttgggtcaaagtaatataaagaatatataagaatgaaagaaaaaaaataccatgctttatgaacacacagaaaaacatatgtatataagtgaattgtttaggaaa

SEQ ID NO: 112751 - DNA, 549 bp, Homo sapiens
aagcttctgaggaagaaaagattgaactcactcaatatcatgtggctactgaagaatgaaaagaactagaaaaacaacatggtagaatattagtaatgagaataccaattagaattggaagcactgtttccattctaaatactctgccttgaccactcagcaaaggtgctaacagtatgtgtcattgatccctggggtgcctggtaaagtcaccattcttgagacattgtaattttgtaggggaacayggcctaagaactacaatgcaaaaatttggacactggtattaaggaaagagttaaaacttagtcaaaagaaaagggtaatttaaaacgagcaaaagagtaaacaacaacaaaacaactacaacagagtgcttgggattactgagatgtgggtgtcaaaaacttaaagagagggattattgtgttctaataagcagactatggacattttcaggtggggataaatctgtgtatatttatgtattagaaagtaaactcaataaagtgagctaactataaaaggttatcacagattcgttcagtg

SEQ ID NO: 112752 - DNA, 398 bp, Homo sapiens
aaatgtttggtccggaaggagcactggtatgttctttcccactggacaatgtagggagttccatgttgtggaaagaatgacagaatcattgagcaggaaggggcatcgacactgagaagttatctagtctatccccttatctgggcagaactatctttcaactgtccccagcaaggtttttgaaayctttacagaaagacgttacacattctcctagataattttgccagctctctctcaaccttaaagtctggtgacaagataagcaagtcgccttgcccagcttttatctgtggtatgattttagatagaaggaaaggaaagaataaagaacaataaaaagaaagcagcctccactacaagtagctgcagcaggaaccccaggtaaggtgggaatt

SEQ ID NO: 112753 - DNA, 547 bp, Homo sapiens
tttcaaatataaattaattaagcaaaaggcatagaaaacaagtcttcagttgccactcaacaaacagctaaatctgaatctatatattccagaaaaatctgaggagttctggagaaaaaaaaaatccactttactttttcactcaaatttatcaagaaaagccatgtcttgccctgacacgggaagacattattcaatgtcttcttgagagacagtgctcacacatattttagtcatctttgcatccycagcacctagtaatgtggctgagaaaaaggaaggactaaacgggtatatgttgtatttaaatacttactcaattctccactttaattattgctatttaaatcttctttctaaaagatgttttctaaataatgatcttggctatgtttcttagaaattagtttaaaaacagcaacaataacatttgcttaataaatcagtgaaattttaaacataaataatgatagagtaaaaacattaattcagtaattcagattgctactctgaatcctatgttacctctctagggtttcacattcaa

SEQ ID NO: 112754 - DNA, 524 bp, Homo sapiens
aaatttcatctcaaaaaaaaaaaaaaaaacagaatttaaaagttcaagaaatgctgctggtctgaaatatgcattaaaagccacaccttagatatcgaactcagaatcttgttaaaaatcaacaagagattgacaaacactcaaggtacaaattacaacactataataattattgaatattgccaagttggagaaggagagagaagcagagagaataaggaaatgtacacaatttacatgaartgttgaaaatctttgaagtccaggtaataccagttgatcttattaaagccacaccctttgaaatcacaacagaagcagatgaattttccagagcataatttttaaggagaaaaccctctctacattttttttattatactttaagttttagggtacatgtgcacaatttttaatgtttctgagaactaccacacacacatactaagctatatacatgctgtgactatttttatttttaagagggggtggcagtcaagacaatgtggtttcttttacaggta

SEQ ID NO: 112755 - DNA, 481 bp, Homo sapiens
aattcattagggatgaggaaatttccttagtgaatgttggaaacaggatgcaatgtggcacagctgtccgcagaggtttggaggatttccctgggaagatcagtactgagtcatcagttgatcgaaggtaggggacggcacaacacataccatgcacaaatcgaatgtagggtgtattaagccctcagcagtatgaagattttaaattattgggtgggtacaaaagtaattatgatttttgccattaatataatttcagtcatagcactatcttaatatctctgacagaagactcttggaacattaaaaaaatcaagattctaataaggctgtcttgtgaagatcaaggcatggargtttgaaaatctcagtgtcgattcattatctaaaaatctcttgaatagctcaattacaaagtcagccataagtggaaaactatgtatctagggtctgcaccgtgccggctgcataagataccgag

SEQ ID NO: 112756 - DNA, 566 bp, Homo sapiens
actccttatcacaaaaccttgagggctagaacccctcaggatgggagagatcatgatataaaggcactgataatctgtatatactatagaaggctgagaccatcagcccaggcttattatgggtaaaagggttataaagcaagggctaaaaatgaaaacctaaaacattataagaactgaaagaaaatatagaaaacaaccttagtatcttgatggaaaaagagggcaggttttgcttatcaattcacaaaaatccagaagccctacaggagaagactaacagatttgactactccaagcttttttaaaacattgttttctatttttcatgtataaggctttcttcagatatctgtggatctttgtctatttgctcatgattataaatggagaaaagagctgattagaaactgtgtatctgcatagagcttatttattccgaacatcactgttggataaactgggtaggccatttattaagcaattcccactgtcagtatcttaggccagaagtcctaagtaagtctcactargctaaaattaaaatgctggcatggttttattgc

SEQ ID NO: 112757 - DNA, 600 bp, Homo sapiens
tctgtcacccaggctggagtgcaatggtgcattctcggctcactgcaacctcttccttctgggctcaagtggttctcctgcctcagcctcctgagtagctggaattacaggcacgcgccactgtgcccagctaatttttgtatttttagtagacatggggtttcaccatgttgcccaggctggtcttgaacttctgacctcaggtgatccacccgcctcagcctccmaaagtgctgggattaaaattccatgagccatggcatgagccaccatgcccagcctaatttattattgaagaaggaaaattttggtgtaaattaagtgtagcctaagtgcgcagtgtttataaaatctatagtaatggatagcaatgtcctaggccttcacattcactcaccactcactcactgactcacccagaacaacttctagtcctgcaagctccattcatggtgcgtgccctagacaggtgtatcattttttatttttataccatatttttattacatcttttatatgtttagacatacaaatacttgccattgtgttacaattttctacagtattcagtacagtaacgtgctgtacaggtttgtagcc

SEQ ID NO: 112758 - DNA, 600 bp, Homo sapiens
tctgtcacccaggctggagtgcaatggtgcattctcggctcactgcaacctcttccttctgggctcaagtggttctcctgcctcagcctcctgagtagctggaattacaggcacgcgccactgtgcccagctaatttttgtatttttagtagacatggggtttcaccatgttgcccaggctggtcttgaacttctgacctcaggtgatccacccgcctcagcctcccaaagtgctgggattaaaattccatgagccatggcatgagccaccatgcccagcctaatttattattgaagaaggaaaattttggtgtaaattaagtgtagcctaagtgcgcagtgtttataaaatctatagtaatggatagyaatgtcctaggccttcacattcactcaccactcactcactgactcacccagaacaacttctagtcctgcaagctccattcatggtgcgtgccctagacaggtgtatcattttttatttttataccatatttttattacatcttttatatgtttagacatacaaatacttgccattgtgttacaattttctacagtattcagtacagtaacgtgctgtacaggtttgtagcc

SEQ ID NO: 112759 - DNA, 507 bp, Homo sapiens
agtatggttactactcttcaaacaatttcccttaactgaattctctttgatatctggggtctcagaaagagtttgactcattcagctttctcacaattaatgtaatgcacaaaaaccaaacagatataagtgtcctaatcacaatgttttgctctccttcccttctatattgtgtattacgctgtaagctctttggccaaaacctaagaggagcagagaccctgactcatggtgaagctgctggttcacaggtaaacagcatgtttgctaggatgagctcatgtgatttgcagaccctccayacactcaatggagagcttggtattattacgatgttggaggatgagttgacatctttgatttgtgttcaaatctgttctctcaggaatttaaaatagtctaattttatttttttatgaaactgcccaagctaaagaaaggtacacaagaggaagaagtggaaatgcttctgggcgaggtttggaagaattttagtgagacttaact

SEQ ID NO: 112760 - DNA, 568 bp, Homo sapiens
aaatgcacctgtttgcagaaagacacgaataatctggtttccaagtattcttggctctcaaacttgcctttattgactccgtgggtgtgtgtgtgtgtgtgtgttttcctttcataatcaaattattctgactctagattttccaaattcatcttttcaactttcctatgaaaggtgtttagggragaaaaactaaaataattaatgaatcacatgggaagagaaggagattttggaggagaggaatggtgtagaaaatcaggttgcccattctcctatgttctgtaaccataatttagaatcttatcttgcatggtttgttggtgagaaatgttaacatttgcatttcaaggtaaagaaaggcttttactgatggccagtcaccagggaaacttaatgagaagttacagtggttggatttgtagcaacttgttttctgtagtatccaggcagcagacggctttgtgcacacaaatacagaaagtggactgcttgttaggtatcatatctaattagctagaacccaaaaaacttctgctaatgatatttttatgccaggagagtttga

SEQ ID NO: 112761 - DNA, 552 bp, Homo sapiens
aacatggtctctgttcccatgaagcctgtcttctacctggaaagcactgagatagatttgaattttaattgktttttttttttttttttttttttttttagtggtcacaaaacttcatcaggcagtcacataaaccataaggaggttaaaggcaaacatatgcagaaacattttaaacagattcacatgtaggtcaacattcatagagattttccagcaataatgcttttctagaaaaggtttattaaagatatcagtcaattgtaagaattatgatctataaatgctattcatcaccacctagaatatatatcagacatcaaagtattaacttctttgagtaattttttttctagttaaatcttcattgtcagacctcacttagatgcaaattctttaagagaaatcttccagagaagcttaaattataaaagccatataagtagaaacactgtatgtaagtggaagtggggtctaggaagctttccccaccttcttccccttctgtgcaatccatggagcaactctgtagaacacagtttgaaatcctgg

SEQ ID NO: 112762 - DNA, 661 bp, Homo sapiens
ccaaaatctatacctacaataatggctgatttaataatttttgctgcataaaaatgttaatgtaaatattcaataattcttatatgaatatatttatatagaatataaatatatattattataatatataatttaatagaaataaataattctaatataaatataagttgccacatattgatctggtaggcataagctaaatccatcgtacactttattttatttgttcttcatatacattctatgacccttgctttccacatttaatgcatagggaaactgaagcttagagacatgaattcatccttgttcatgcagctgcgagatggtagagactagattcaaaatcagacagtgtaactgaagcatcaatgcttttaccaatgggatgcacatcttacgaggttggaaggtttataagtgctatataagtttaaagagaagagggaagcagaaaaaaaatatatgtatatatataatttatataatttacataggtatatataatttatataatttayataggtatatataatttatatagatatataatttaatatatgtgtatataatttatatatgtgtatatataatttatatgtgtgtgtatgtatatatattctttttaactgagcacctactatgttcccagcattgtaca

SEQ ID NO: 112763 - DNA, 532 bp, Homo sapiens
gtacactaaggaactggtagccaacaaaagtgtgaaagctggtgtaggggcaataccacccaaacagctactgccaccttaagagctgggaaccgcattcaccatctccacttcacactcaatttattcatgctagcattcactgtcattcacaaccaccagcacagcacatcacaacagagcagagctggactagactctccccaagaaactcaggagctctctgagtgtataacagggaaggagttgcagaaggccaattggacttctagactttgtactcctactgacaaatagaggagctgatcttttacgctctcaatcactctggcagttaatttgcacctcagactatgaagytggactctgaatgtcacatattgaatccccaggcaatatgatattgtggagggaatgaaggtagcaaaataataataataacagttatttattcagcacctactatgttccaggtcctgtacttagcattactaaatgttttttattttatcccaaaatagcacttggatat

SEQ ID NO: 112764 - DNA, 583 bp, Homo sapiens
gacaatgagagagagaatgtttgagactggacttgttagaaaatacaggaactagtcagcttgaaatataacagtataaattataccttgcccactttagtgattcaaatggcatgtatttttattgtgaagactgcgtaactttggttccctcttcctcccgaaccctgctcaaagattttagggaattaactaaggtttcagtagtgaagctttggatcagcacaggggcagttgtcaccattactctactttataatcttgtggggagggagcttaaccaggactatcatctcagcctgggatgacatgctttgaaagtgctccagtgtcactttgaggagggtggccacctgcaacccagactaagcagtgtagttgcattactaagaggtgtgtttggaagtcagacaaacttgccttcaaatacagacacttgcttgttacttaacttttctgagtctcctcatttgtaaaaaaaaaaaaamaaaaaaacaaaaaaacacaaacaaacaccaccaaaaaaccaaagaaaaaaaagtaggagagtgagaataatagttcttgccttaaagagttattg

SEQ ID NO: 112765 - DNA, 586 bp, Homo sapiens
ttttgtattctgtgggaatcttccaagttccttagtatctactgaacatctgctgctctttgattccagggtgtgcagactgcagtgatgtttttgtcatggtatgctcaatgagggcctcctggggttgggtatagtaacttggccatgcccaaaatgcgcctgaggtgtcttgacacttcaacatgacaaagctacggagattctagtggcatgctcagagattattctcagggttgttccaaaataacatgatggcatctggaaccatctggagggagggtggtgcttctgaggagtgttagtgtaggaagaaagtcccagcttgagtttgtttctttctatgaagttgagaagaaaacagcattttcagttctctgccttttcttctcatgtgacatgatgcatagatgkttgttcaaatggatatttacaaatgatgacaatgaatgataataattgaaagatttttttttaattttagagcaaaaagcttaaatggtccttagaggctagaactgttacataaagtggtttgaggaaggtaatttccagaggagaaatactctgaacttaaaatagagtt

SEQ ID NO: 112766 - DNA, 593 bp, Homo sapiens
taattccctatgaatggattacttggtatttttcagtctcttgcaatttttcacaatgtttgaataaaaactaatatggctaaatctctaaacatttccaaattcttgtcttagggcaaattgccagaaacagaattgctgggttacaaggtatgcgtgcttcttaaagatttaatgtctattgctaaattcacataaaatttaaattatgtgttacgcttttttgtctctggagataattaatcacattcagagtcaggaatcctgagtgtgatactcccttataataagatatggctgggtgcmtttatacacatacacttttatccgtgaactgttttgatattgtgctgttttgtgataactcagaagaattgcagtacacatttatgtggctatctttctgctttcctcccagggaatgttgttagagaaagaaaacaaaatcgctacatgtttctgagtttgcagagaattttaaaccgattctctaagactctttctagcttttataatttaagttggtgtttgttttatctcaacacacttattgagtttctactacatgattagtaatgaggcctgtggcatga

SEQ ID NO: 112767 - DNA, 529 bp, Homo sapiens
atgacaaaatatgctataaaataaagagatttccatacaaacatgcatgtaccgtgtgctcacacagaataaacttttctgttgtagaaggtcaaaggagaatatgcctattttcaatgatacaaaaatatgttgtggagaaagacactagcaaatgtaggtagagatgaagatgtaataagatgtaaaataattgtgaaatcgtgtgtgcccacaagttgggcagtgtagactgaagttactgagcaataggkagataagatagtgatgcatttcaatcaataatatgtaagattaatccaaaaatccatcaatgtttgaaatacacataggagagaaaataaagtcagagattaaattctgctcagaaaggttcatgtaatatgtaagtaaactaaggtgcttataataagaataaatataaaataaatataagagatattacagaagttcatcctgtcatgttagaaactatctggatttggaaagaaaaccaatgatttggtgatttacaaagcacttgtgtcat

SEQ ID NO: 112768 - DNA, 529 bp, Homo sapiens
atgacaaaatatgctataaaataaagagatttccatacaaacatgcatgtaccgtgtgctcacacagaataaacttttctgttgtagaaggtcaaaggagaatatgcctattttcaatgatacaaaaatatgttgtggagaaagacactagcaaatgtaggtagagatgaagatgtaataagatgtaaaataattgtgaaatcgtgtgtgcccacaagttgggcagtgtagactgaagttactgagcaataggtagataagatagtgatgcatttcaatcaataatatgtaagattaatccaaaaatccatcaatgtttgaaatacacataggagagaaaataaagtcagagattaaattctgctcagaaaggttcatgtaatatgtaagtaaactaaggtgcttataataagaataaatataaaataaatataagagatattacagaagttcatcctgtcatgttagaaactatcwggatttggaaagaaaaccaatgatttggtgatttacaaagcacttgtgtcat

SEQ ID NO: 112769 - DNA, 558 bp, Homo sapiens
caaaaccccattatagtagcccccctgaataaagtctgccttattgtttttaataartgtcaggaatgatttatttataatatcatatcatatataatatcttcagaaatatttctgaacacaaaaatacatctgtccctaagggttttggataaggggttgtagacctttccactccaacctgccccactttctttcaaaacaccctgaggtcatctatgaactacagatcaccaatttacaatttataaatacaactaaacattatatgcaaaacaaacataagaagactctgaaaaaatggagagaagaaagtagagcaactatgcaccttagaacctgaggaacaacactgtggcgagttccttggatattcttttagcctcatctacctcagacttggagaagaataagttggcagcctagaaacaccaacagatctatagacacagaaagcctcaacaaaagcttgctctctctagccaaaggaccagggaaggggcagcctagcaggagagaaaacttttagacagtaactcttctattccaaccaaacac

SEQ ID NO: 112770 - DNA, 552 bp, Homo sapiens
actgagcaagactctaccaaaaaaaaaaagtttgcatcctggccatgcagtagaaatgaaaaacccattttctggggagacattcaggctggctgcaaaaatttgcataagtaatgaggagccaaatgttattagmcaagacaatgggaaaaatgtctctagggcatgtcagaggtcttcatggcagcccctcccgtcacaggcttggaggcctaagagggcaacatgctttcattcgctgagcccagggccctgctgctccgtgcagcctcaggacatggtgccctgtgtcccaaccactccagttccagccatggctaaaaggggccaaggtacagctctagtggtgtcttcatagaatgcaagcccccagctttggtggcttccacatggtattgggcctgtaggtgcacaaaagacaagagttgaggcttgggagccaccgcctagatttcagagtatgtatgaaaatgcctggatgtccaggcagaattctgctgcaggggcagagccctcatagagaacctcttactagggcagtgcagagaggaa

SEQ ID NO: 112771 - DNA, 552 bp, Homo sapiens
actgagcaagactctaccaaaaaaaaaaagtttgcatcctggccatgcagtagaaatgaaaaacccattttctggggagacattcaggctggctgcaaaaatttgcataagtaatgaggagccaaatgttattagacaagacaatgggaaaaatgtctctagggcatgtcagaggtcttcatggcagcccctcccgtcacaggcttggaggcctaagagggcaacatgctttcattcgctgagcccagggccctgctgctccgtgcagcctcaggacatggtgccctgtgtcccaaccactccagttccagccatggctaaaaggggccaaggtacagctctagtggtgtcttcatagaatgcaagcccccagctttggtggcttccacatggtattgggcctgtaggtgcacaaaagacaagagttgaggcttgggagccacygcctagatttcagagtatgtatgaaaatgcctggatgtccaggcagaattctgctgcaggggcagagccctcatagagaacctcttactagggcagtgcagagaggaa

SEQ ID NO: 112772 - DNA, 559 bp, Homo sapiens
ttttaacaacatggatggaactggagattattacaagtgaaacaaggcaggaacagaaagacaaacataaaatgtcttacttatttgtggggtgtaaaaatcaaaacaattgaacctatggacatagagagtagagggatggttatcagaggctgggaagggtagtggtggactgggggccaggtggggatggttaataggcacaaaaaattagttaaaaagcgtamgacctattatttgacagcacaatagagtgattacagtcaatgacaattgtaaatttaaaaataagagtgtaattggattgttggtaacacaaaggataaatacttgaggggatggctacatcattctccatgatgtgattatttcacattgcatgcctgtatcaaaacatcttatgtaccccataaatatatacaccttctgtattagtctgttttcacactgctgatgaagacatacccaggactgggaagaaaaaaaaggtttaattggactaacagttccacatggctgggaaggcctcagaatcatggtgggagacaaaaggcacttc

SEQ ID NO: 112773 - DNA, 514 bp, Homo sapiens
aggcaaaaaacaaaagagctctttctgtggagagctgcatgaaaaactatttctccatttctctaaagccctttcatactgaacatttctaatctttcagtrcaagtgcattctttctgagagatggctcatctcttggactatttgtctgggagatttgtgagagatttctgctgctgactgaggcaaaaatttgcttttgagctttttcccactccccatgtaaataccaattttctgtcactttgtgaattatgtttcctctctctctctctctctctctctctctctctaccatagtgatatacatgccacatagataagttcttcaaacctttacattccaggtcaaaaattatccttggcccatatgggtgtttcccttctttcctgtgtttgaaaataaagcataatgtaaaggggatcatttgggaagtagacccagtgtctggtgtcattatagacaaaatatcaacctaggtcttcatctatttcattagggagtgtgacatta

SEQ ID NO: 112774 - DNA, 573 bp, Homo sapiens
tgctttcaaatatattataatcacagaatggcataagcttagaaggatgagcattactcaacattctttagaccttggcaagatacaaaatgatctttcttttcttggttaaacagaagtaaatgacgaagtcaaaaggatacaaatctaaaccagttaagactatgttcrttttgttattgttgttattaatagtaataacttatgcagtcctttatagcagggatccccaaatcctgggccacgaactggtaccagtctgtggcctgttagaaaccaggctgcacagcaggaggtgagtggctggcaagtgagcattactgcctgagctccgcctcctgtcagattggcagcagcattagattctcataggagtataaaccctattgtgaactgtgcatgcaagggatctaggttacgtgctgcttatgagaatctaactaatgcctgatgatctgaggtggaacagtttcattggaaaccatcttccccaacccccatggctgtggaaaaactgtcttccatgaaatcagtccctggtgctttatatgttactaacaatttcccacagtt

SEQ ID NO: 112775 - DNA, 452 bp, Homo sapiens
tagtaattattaatttcccagcatcttctcaagggtgaaaacatattagctttgtgtgtgcgtgtgtgtgtgtgtgtgtgtgtgcgtgttcccactgaactgaatttctgtcttgagtctcccaaactctctgaagcagaacatttaatcttgtcacttccaagtaaactcaattgctttagtgatttttattcttctcattgacttcaggttaaaccaagtcagattttagatttttctcactcctttactctccacagggaagataccaaggagtgttcagatcttgctatgccattagtggggagggatggccaggtctgtgttttggtccattgayatggtatggctgtgtccccacccaaatctcatcttgaattgtagttcccataatccccatgtgttgtgagacggacccagtggagataattgaatcatggcggttgtgtccc

SEQ ID NO: 112776 - DNA, 596 bp, Homo sapiens
ctacaagctacataaagcccagatgtatatagtaggctatactgtctgtgtttgtgtaagcaaactctgttgttcacacaatgatgacatcacctaaagaggcatttctcagaggcattaagcgacacattgctgtatttcaataacagacaacaacaaaaaaagagttagcatttctagtaatattgatggcagtgttgttattctaagagtgctgtatttataycatgggataaagcaaataaaaaaattatgttgagcatcagcagtttgggcatgggaaaaagaagatacagacagatataagaatgatattaagtaaaaaccttgtagtcctgaacttgaattgccaagtatcagtatgaattactatgtaatttatgttttaaaaaaagaaaaaaaaaaagacatgcgtctaagtctgttcactgaaaaggcctaaaaggtatgagtaagttagtagcaataggaatcctcagtgctcagattgtggtctctaaatactatgccccaactaaaggaactataattccttagcaaaatgggctaattccaaatctggagcataaaatgttcaagataagaagggaacatgt

SEQ ID NO: 112777 - DNA, 553 bp, Homo sapiens
ttttttccaattgtcacaggtggtacacaaatctaattctgcacatggatactggaaaggctattccagttcttctcttcaccattgtttcctccatatcttggtgattttcacatccccaggttcccagtaatggccacgtttgaggcaacctctcaggtactgatgtatgtgacctacagcagactgaaggttgtgttaggtcctgagggcttgtgggaatgccaaagatgtaagcgtctctggcctstaaatgatttgttaaatccctggaaagaacctaagaaaacagaggactaataatgcattgtatgcttctgttaatgctaaaattcagttttcattatagagtggttctgaaggtgtctgctgtgagaggcagaaatgtaggtgacaagaacagtgtcctggaggttaaggagactcaggtctagtctgagatttgcttcaaattacctcagctcactgacttcagtttcctcttctataaaatgaggataattagagggtccacaccacagagttgatgtggaggttagatgctttgaaccat

SEQ ID NO: 112778 - DNA, 636 bp, Homo sapiens
ctcttttggcaagtgggggcttggcattgcagagagaggtggaagagagaggagggaaacggtgccccggacgattttcttttccctcctgtaagctgagcttccggagtcacccccactcacctgtcatgggcascacccggaagctgccactatcgggctggtcaaagctactggggacatgcaggattcattctgctttcattaaggacccctaagcatcctggcccagccagacaggaagatgcaaaagaaaaaaaatccgaggacaatgaagcagtgagtgaatcggttgtgttaatctagggaagaagccggtccactaccctccccaccttggccagaactgggtaacgcagagacctgagtcacgggaagagggtgcaagatgccccttggagggcacggccctgggtcctcattggcagccggttgcacggagtctctactcgtctctcccaggcgtggaaaaggcctcccggaatatctgcagctccaaagatcatgacttcaacctctgatgaaaagacaactccaacttcattttggggcttactgttgtctccttgtcgtggaagtattttttacccttaggaaagtttagaattatatgtggaacagaggcaactattgaaa

SEQ ID NO: 112779 - DNA, 636 bp, Homo sapiens
ctcttttggcaagtgggggcttggcattgcagagagaggtggaagagagaggagggaaacggtgccccggacgattttcttttccctcctgtaagctgagcttccggagtcacccccactcacctgtcatgggcaccacccggaagctgccrctatcgggctggtcaaagctactggggacatgcaggattcattctgctttcattaaggacccctaagcatcctggcccagccagacaggaagatgcaaaagaaaaaaaatccgaggacaatgaagcagtgagtgaatcggttgtgttaatctagggaagaagccggtccactaccctccccaccttggccagaactgggtaacgcagagacctgagtcacgggaagagggtgcaagatgccccttggagggcacggccctgggtcctcattggcagccggttgcacggagtctctactcgtctctcccaggcgtggaaaaggcctcccggaatatctgcagctccaaagatcatgacttcaacctctgatgaaaagacaactccaacttcattttggggcttactgttgtctccttgtcgtggaagtattttttacccttaggaaagtttagaattatatgtggaacagaggcaactattgaaa

SEQ ID NO: 112780 - DNA, 606 bp, Homo sapiens
acaacaggtactcaaaaaaatattggtggaatcagcaaataatcacagagtgctttatcatggaaacgtgggccgagctttaaggcgagcctgaatttaggagccgagaacagcatgaaagaatctgaggcaggagaaggtcaggggtgctggaagggagcaggacactcacttgtttggggaaacagcagcctggcgtgaaggactgggtgggtgctggaagccaggagggcaccaaggttgtccaggcttgaggggtgggggccgtggggagccgtgtccaggggagttctgggggtagggtctggggtgggttctgagcaagttctccaactgttgcaggctgtattgggtcccccagatccttctgtggaagcccaaactttcagcccctcaggctggggctgcatttggagatgtgagctttaaagtggtgcttaagttgaaatgaggtcattaggtgggctcgattccagtctgaccaatgtccttatgggaagtggacattagggcacagacgtgcacagagaaatgataccctggaaggacacagggagacrgtgcaagcctaggagagaggcctcaggaggaaccagccctgccagc

SEQ ID NO: 112781 - DNA, 609 bp, Homo sapiens
gatgcttaaaatatatattattcaataagggtgttgtctccatatggcaaataaatgaaactgcctgaaagggttattctatgctctcaaggtagaaatggcctttctaggttagacaaatgaatttgatgatataagccatatcaaaaggcaaatgaaaaaattggagaaattttacagttcaaaaatacagaaacaaggctaartattccatatataaagatctcctacaaatcaataagaaaaaaatgtaaaaaacccaatgacactgtttcacagggatgattcaagtggagaatatgtatgctcttcagaactgcatgtgtgcaattcagggcaggtgcttgcatcacacacacactgttgacacttctcactgccttcctttggttttacaggtctttgagcttgtcgatgtgtgctggagaaagtcaagttattcttcctgtgaggatgtttgtgcatttgaattctagctgccccatgtgaccactgatctcccagatggaaacatctcatcctgggaccattgagaaatccagatgccagagctggagtctggaattaaaagcttcagccaaactgttggttatctgtaatgcaccccag

SEQ ID NO: 112782 - DNA, 609 bp, Homo sapiens
gatgcttaaaatatatattattcaataagggtgttgtctccatatggcaaataaatgaaactgcctgaaagggttattctatgctctcaaggtagaaatggcctttctaggttagacaaatgaatttgatgatataagccatatcaaaaggcaaatgaaaaaattggagaaattttacagttcaaaaatacagaaacaaggctaaatattccatatataaagatctcctacaaatcaataagaaaaaaatgtaaaaaacccaatgacactgtttcacagggatgattcaagtggagaayatgtatgctcttcagaactgcatgtgtgcaattcagggcaggtgcttgcatcacacacacactgttgacacttctcactgccttcctttggttttacaggtctttgagcttgtcgatgtgtgctggagaaagtcaagttattcttcctgtgaggatgtttgtgcatttgaattctagctgccccatgtgaccactgatctcccagatggaaacatctcatcctgggaccattgagaaatccagatgccagagctggagtctggaattaaaagcttcagccaaactgttggttatctgtaatgcaccccag

SEQ ID NO: 112783 - DNA, 612 bp, Homo sapiens
agtactatattattagcaagtttctaacattctggtttttcattcatactgtgtgaaggttttttaaaaacccacatgatacagcattgcaagagaaaattagacatttattccttcacacaatcttaaaaacagaaaaaaatacaaatctcaagttctccttagaaatgatgttttctataatgttagccaagatatgcacaaacaagagagatagaaataattagctaaagtgtttgtaacaagtacacatgtccggaaaattcactgaaagctaaccgtcccatagaagcagagcacaccacagtgarccctcaagattacaattaaatagttaagtgaaatttagtttgtcttttctcacttggtagtgctcatatatgtatgttccataacacttttctctgggagcattttttcgttattcatcatttcttactaaaaaatgatgactctcataaactttaaaggtatgagtactcatcttacttctcttggattaccttttgcttggaccaactctgcaccaggattcctgccccagtcttcctgcctagcccagtctcccatgactcccctgcctctcacctcctacctgaggctatattcagc

SEQ ID NO: 112784 - DNA, 542 bp, Homo sapiens
taaaataggtttaaaaatagtctttctgtccccacgtataacttttaagagaataaatatagggatattcttgtgtgagataaaattgatgcttatcccctgccccaagcttccccctcatttttaattacttccttcctcccactgttttccagactatctgaattgtatcagtctcaggcatatgggaaagtgggtaccaccggatggctattgtcagtcaggaaatagctaccattcaaacactgttygctaatgatgatatttgatgtgataaagtggatgtgaatattaaatttgaaccatctaggcaccatctcagattttaaaagcaggcatgagaactgacagctttgaataaacctctttctttctattttctgtgattctgacatattcacattccactaaataagagtgaacaccactacccacccactcaccaggcgttcactttatatatagctatagatactcaatgcaaaacaaagaataaatggattcacgtaacatagcgtttgtggtggggttttgaggaaagc

SEQ ID NO: 112785 - DNA, 668 bp, Homo sapiens
ctactggtgtactgctactcaagaggctgagatgggaggatctcttgagcctgggaagcagaggttgcagtgagctgagatcatgacactgcactccaacctgggcaacagagcgagaccctatatcacaaacaaaaacagaaaatagcctggcacctcttcctctctctcttcctccctctctcaccctgtgacatggcctgctacccctttgccttctgccatgagcaaaagcttcctgaggcctttcagaagccaagaaagatgctggtgccatacttgtacagcctgcagaacagagagccaaattaatctcctttctttatagtttctccagtgtcaggtatttccttacagcaaagcaaaacggatacacacacacacacacacacacacacacacaatgagacaaacatggaaataaattttctatcttctcagtggttcttcacgctagctatgcatacagaaattgaaygtaaggagctcaggcgtgtgtctcagtcatatggttaactcctttgtgctgtactaacacagccagatccccctgtacccattgcatgtcaacattaggcatacttcacttgttttctggggtgaactcacaaattagtctgcagaggtacacttgcctgtaatttaattcctatctccagaatagaaca

SEQ ID NO: 112786 - DNA, 553 bp, Homo sapiens
aaaaaatatagaactcagcctttctgattcctaacatagtgccgtaacttagtatacaactaaaggcaacatttcccaccaactctgttccrtacaataacactttctctcccttagatgttataattttttaactatttacctaaacctaaagaaaaattttaggatttaaaacgcgtaaggattggttaattttaatatagcctggggtcatctgagtcacattaaaccgtggccaaagaaggacttctactgaggtggaatgtttacaggtgtcagaaatcaggagctataatattccctgttgaagcaaaacaaatttttagccttaaaatattcccatttgcaactgaaaagaaaataaactattctgtctaaagaaattgcttttgccatcaggatgcaaagggccaagtaaatttgttacccaataaatcttttggggcattatatagacatagtcttatattttgtaaagcctaagctataaaagcaaataacaaaaaagaagaagctataaattccaaatctagatgacacctttgtatgtaag

SEQ ID NO: 112787 - DNA, 541 bp, Homo sapiens
ggaaaataacatcttgattttggcctatgaaatgtggagcagggagccagctatgrcacattgtgcctgaactcctgacttatagaaaattgtgaaataataaattcatgctgttttaattatgtttgtggtaatttgttatgacaaagatagaatgggataagttaggcatgcagaacattttaactgaacattcattatatccaagtatctgtgctagctactgtaaggatagggcaacaaaagacaaagataatatttgcccttcctgtgcctttattctagtgggaaggactgtatatatatgtatgtacatacacatacacatatacatttatattacctagggaggatgtgtttggtgagcattaagaagagaaaagggtatcaaacagaataacttcagttactgtgcttcatgaatggctagtccgggttcttggagactgccttttatactttgtacttttgtccaaaattgtgatacttgtaatgaagtgattgttatttccaaggcattttaattaattttttaaagcta

SEQ ID NO: 112788 - DNA, 541 bp, Homo sapiens
ggaaaataacatcttgattttggcctatgaaatgtggagcagggagccagctatggcacattgtgcctgaactcctgacttatagaaaattgtgaaataataaattcatgctgttttaattatgtttgtggtaatttgttatgacaaagatagaatgggataagttaggcatgcagaacattttaactgaacattcattatatccaagtatctgtgctagctactgtaaggatagggcaacaaaagacaaagataatatttgcccttcctgtgcctttattctagtgggaaggactgtatatatatgtatgtacatacacatacacayatacatttatattacctagggaggatgtgtttggtgagcattaagaagagaaaagggtatcaaacagaataacttcagttactgtgcttcatgaatggctagtccgggttcttggagactgccttttatactttgtacttttgtccaaaattgtgatacttgtaatgaagtgattgttatttccaaggcattttaattaattttttaaagcta

SEQ ID NO: 112789 - DNA, 562 bp, Homo sapiens
tccactagaatattttgcaaagtatatttcaaaactttgagtgttattttagtcagaagaagaaataattgtatacttcatttggtaagtttatcaaaatattacttatgatttgagatttttaaccaraaagcagtatagacttttaatctgaagatccagttgttatttgatttcaggatatttcatttcttatttacctccatgtttgcttcagtctcttaatctctttctctctggtcttccttgcaaatatatatccaatttttatgccaagaatttcagccttttcttcatttatgcacactctgcttctagacaatgcaataagcattctcttcattctcaaagcttcatcaaagtgcttggttaaataaaaaagggtgactgctttagatattaccataataaggctgtgtaaaaaacaatctcaaaacttagttgcaaaaaatagacaaataaattagcattttatactcctgcatctgaagttcagttgatcctggttgtgcttggctgggcttgattggatttcacaacaaactacaagttgggtttatat

SEQ ID NO: 112790 - DNA, 562 bp, Homo sapiens
tccactagaatattttgcaaagtatatttcaaaactttgagtgttattttagtcagaagaagaaataattgtatacttcatttggtaagtttatcaaaatattacttatgatttgagatttttaaccagaaagcagtatagacttttaatctgaagatccagttgttatttgatttcaggatatttcatttcttatttacctccatgtttgcttcagtcwcttaatctctttctctctggtcttccttgcaaatatatatccaatttttatgccaagaatttcagccttttcttcatttatgcacactctgcttctagacaatgcaataagcattctcttcattctcaaagcttcatcaaagtgcttggttaaataaaaaagggtgactgctttagatattaccataataaggctgtgtaaaaaacaatctcaaaacttagttgcaaaaaatagacaaataaattagcattttatactcctgcatctgaagttcagttgatcctggttgtgcttggctgggcttgattggatttcacaacaaactacaagttgggtttatat

SEQ ID NO: 112791 - DNA, 562 bp, Homo sapiens
tccactagaatattttgcaaagtatatttcaaaactttgagtgttattttagtcagaagaagaaataattgtatacttcatttggtaagtttatcaaaatattacttatgatttgagatttttaaccagaaagcagtatagacttttaatctgaagatccagttgttatttgatttcaggatatttcatttcttatttacctccatgtttgcttcagtctcttaatctctttctctctggtcttccttgcaaatatatatccaatttttatgccaagaatttcagccttttcttcatttatgcacactctgcttctagacaatgcaataagcattctcttcattctcaaagcttcatcaaagtgcttggttaaataaaaaagggtgactrctttagatattaccataataaggctgtgtaaaaaacaatctcaaaacttagttgcaaaaaatagacaaataaattagcattttatactcctgcatctgaagttcagttgatcctggttgtgcttggctgggcttgattggatttcacaacaaactacaagttgggtttatat

SEQ ID NO: 112792 - DNA, 562 bp, Homo sapiens
tccactagaatattttgcaaagtatatttcaaaactttgagtgttattttagtcagaagaagaaataattgtatacttcatttggtaagtttatcaaaatattacttatgatttgagatttttaaccagaaagcagtatagacttttaatctgaagatccagttgttatttgatttcaggatatttcatttcttatttacctccatgtttgcttcagtctcttaatctctttctctctggtcttccttgcaaatatatatccaatttttatgccaagaatttcagccttttcttcatttatgcacactctgcttctagacaatgcaataagcattctcttcattctcaaagcttcatcaaagtgcttggttaaataaaaaagggtgactgctttagatattaccataataakgctgtgtaaaaaacaatctcaaaacttagttgcaaaaaatagacaaataaattagcattttatactcctgcatctgaagttcagttgatcctggttgtgcttggctgggcttgattggatttcacaacaaactacaagttgggtttatat

SEQ ID NO: 112793 - DNA, 616 bp, Homo sapiens
aaatgtacagtttacaagaaaaaactaaggaaggatttttttaaaaaatgaaaataaatcagcccccaaaattwaaaactaaatttaaatataaatactagttatataaaaacattaaccaaaaaacaaagacatggaaagcaagaaagcaaaaatatacaaaataattaacaaaaacatataaataaaatcatgaaataacaaaaatcatgacagaatactttctatatctgtacgcaaatatgttgtatacttaggtaaggaggaaattttcctagtaacctacagtaagtaaaaacaatcctgagacacagagttgaaatagatgggtttcactggagaatagtgaaaggtaaagaagaaaaaaacaaaacaaacaaacaaaaaaacatcctaccaaaattagaaccagagttaggtggttccacaggggcggtctataaaatggttaatatttatttgtgcaattgctacataagttgttcatataacttatgtagttatatccttcacttcataaaagtgaaggaagacttccaaattacttcttatgagacagatatatcattaaatggtgaatggtggtagcagaaaacaaaacaaacaaaaaacaaat

SEQ ID NO: 112794 - DNA, 614 bp, Homo sapiens
tattttatcattctcaagattgtcttggctattcaaggactttttaacccatttatgcctagtattccactattagaatgctaagtatgtgggagttatttatatcctattgctgaatgtcattgccaaggtctgattgcaaaaattcaaaaaattgcaacctcaggcataaatgggttaatttcatacaaattgtaggattgttttttctatttgtgtgaaaaatgccacgagaattttgatagagatcgcactgaacctgtagctcactttgggtaaggtggacattttgacartattaattgttctaatccataaatatggtatatcacttcatttgtttgtttcttgttcaatttatttcatcaatgtcttatacttttcggtgtacaaatctttccactccttggctacatttatttttaaatgttttattatttttgaagatattataaatgcaattattatcttagcctttttttaaaaaatatttgttgttagtgtatagaaatgcaactaattttcatatcctgcattgattttgtatcctgagactttactgaatctgtttattagttctaacagttttctggtagagtctttagggttttcta

SEQ ID NO: 112795 - DNA, 614 bp, Homo sapiens
tattttatcattctcaagattgtcttggctattcaaggactttttaacccatttatgcctagtattccactattagaatgctaagtatgtgggagttatttatatcctattgctgaatgtcattgccaaggtctgattgcaaaaattcaaaaaattgcaacctcaggcataaatgggttaatttcatacaaattgtaggattgttttttctatttgtgtgaaaaatgccacgagaattttgatagagatcgcactgaacctgtagctcactttgggtaaggtggacattttgacagtattaattgttctaatccataaatatggtatatcacttcatttgtttgtttcttgttcaatttatttcatcaatgtcttatacttttcggtgtacaaatctttccactccttggctacatttatttttaaatgttttattatttttgaagatattataaatgcaattattatcttagcctttttttaaaaaatatttgttgttagtgtatagaaatgcaactrattttcatatcctgcattgattttgtatcctgagactttactgaatctgtttattagttctaacagttttctggtagagtctttagggttttcta

SEQ ID NO: 112796 - DNA, 604 bp, Homo sapiens
  misc_feature (1)...(604): n = A,T,C or G
tgtaaatacatatgcacacaatattgtacttaggaacaaatctaatcaaggaggtgaatgatctaaatgcagcactccacccccccaaaaaaattaacacagattaaaataagccaagagaagtrgcacatagggtagatatattagtccgtttcacactgctataaggaactacctgaaactgggtaatttacaaagaaaaaaggtttaattgactcagttatgccagcttaacagcaaggatgactgggagccctcagaaaatttacaatcattacagaaggtgaagtggaagcaagcatgtctttaccatggtagagcaggggagatagagtgaagggagaaatgccacatgcttttaaaccatcagttcacttgagaactcattatcatgagaacagcaaaggggaaacctgcccccatgatccaatcacctaacaccaggcttttcctccaattagacatgagatttgggcagggacaatatcattttgcccctggggcaaaatggatttcctccaattagacatgagatttgggcagggacaataccatttgccctcccaaccttaggtcattctcttatttcanaatgcanttatgc

SEQ ID NO: 112797 - DNA, 586 bp, Homo sapiens
gaatgaaatatggtacacaaatacataggcattgttttagtccattctcatgctgctaataaagacattcccgaggctgggtaacttgtaaaggaaagaggtttaattgattcagttcagcatagctggggaagcctcaggaaacttacaatcatggtggaaggggaagcaacatgaccttcttcacatggctgcagcaaggaaaagtgtcaagcaaaagagggaaaagcccccccaaaaaatcatcagatttaatgagaattcactcaccatcacgagaacagcatgagtgagggtaacctccgcaatgactaaattacctcccaccaggtccctccagcgacacatggggattatgggaacaacaatccaagatgagatttgggtgggaacacagccaagccatatcagacatactcatatcactgaagtaaaagactcacaaatgttaccaytattatatgcaatgtattctagtattcttttatccactgtattttatttttttaagaacgataagtcaaaattcatgaaattgattttatagtccacgattggggttaacacacagtttgaaaaacactat

SEQ ID NO: 112798 - DNA, 585 bp, Homo sapiens
aacagtactgtcactaaatattccttaccaaatggtctagacaaaaaccaactgttctttagaagcaaagtttatcttttctcagaacgatataatggaagttttattaataaatacaactaaatacttcaagctaatccatgctgacaaaatgccctgaatcttaaatataaatattkccctataaatgctaatatcattgtgctacatttgattagatttatgctcccccaaatcccccctcaaaaaatatgagaaattcagaacatctttgagtatttagattagaaataaagtctggcaaaaatcgcccaaagggattctgaagtgatggcatgaagagtgccaagaactcttttcccaacaatacaattatttgactggaggaaattatttaaaaaatacaattatttaaagtttcttgtaattgtcctaagggagtgcagcaagtgaaatatttattcaagaaaatttactaaatcttgttaagaagtgtaagagactgtggctcttgagccatagtctgctcttttatccccctcccagctctgatttatggaactttaagtaggatgctttactctg

SEQ ID NO: 112799 - DNA, 651 bp, Homo sapiens
ttgtattgtttttcataatgtgtcaggtgttgtgggttcttctattcttcctttacggccttcctttgcattaagtaaatatcttctggggtgcttcctacacatccttaccaacacttgatctggtcagactttgttcattttagccattctgacaggtgtggagtggtttctcattgtagtataattttgcatttccctaatgaagaattacattacacatattttcatatgcctcttkgtatttatctgtcttccttagtgaggtatcggctgaaatcttttttctgtttttgtggtatgctgtctggttttaattattgagttttgaaagttctttatgtatttctggatacaagtcatttatcaaatatacaatttgcaaatatctcccaggatgaaatttgtctttgtgttctcctaataagtgttttatcattattattattattattattattattattattaatagaggcggagttttgttcttgtcacccaggctggagtgcaatgacaggatcttggctcactgcaacctctgcctactgggatcaagagattctcctgcctcagcctcccgagtagctgggattacaggtgcccaccaccacccccagctaatttgttgtatttttagtagggacaggg

SEQ ID NO: 112800 - DNA, 588 bp, Homo sapiens
acaaataagtcaatgccctttgaaaagcaaaaaagaaacaatccagcctggcttgccctaatgaaggcagcaagacaaggtccaaaccatctgtaccaaaaacgtcacgaattcagatgtaacttaggtggtcattgcacctttaagtctcttcttttgggtaggtattgtgttttacatgaatttgcagaaagagatcacaatctaataaaagtctcaagtttaatcctgaaaaggaagcagatttatktgtgaagctttctctgggctctaatttcctaatcacatatatattaatgctgatagaacttgtctttgagaggtacagctcttaccaatcttaggaagtggtaaaagattctgctacttcactctctttttacatttttggttcatatcagtatcctatcagagtttacattgccaatatgaatactggcatttgcaggaattatgacaaattgttagtggtttgggcagcaatgtgctaagaaatgtttaacaaatgactctccagaaaaaaagtatgcacatatatggatacataagtttagcataaatgttataatacataggacacaagttaca

SEQ ID NO: 112801 - DNA, 591 bp, Homo sapiens
caaccactacctgctgcctcttytgtaaataaagttttattggagcacagccacatccattcgtttccatcttgtctatggctaccttcatgctacaactgtggagttaagttgttgctacctggcccttgacagaaaaagtttggcaacctctgcttgacagaattcaggggactattgagcatgaaactgtaccagaattcaagaacaaggtatcagataaagtagcaaatgctaaaaaccaagtgcacataagcaacaataagatgttgaaattgatttttaagcagagggtctcaaaacctctactggcacatgactgaccctcttgcaagtctggctcaggatatacagatgaataaggggttgtaagcagctgaagagaagggaggctcagaaataaggaagaactttgtggactagaggttgtctgtcagccacaaacacccaagaggcctctctaaaaatgagttcaaaactcactgtgtgactgtctgacaatagattcgtaagttataaactaaagctgtttacccaagaactaaaggaaatttgatcatggttaattacacctcaccctttagacacact

SEQ ID NO: 112802 - DNA, 422 bp, Homo sapiens
gataaaattgtaaaaaataggagggagaaaaaaggacaagagtaaaaatagtgcttattttggcagagaaaaaggattttaataagtatggggcatgtggagggtttctggagtggctggccaagttctatttcttgttctgggtggtggttacragggtatttgccttagaatatcattaagctatgtaatcattttgtctgattttccgtatctatgctttattttacaataagaaagggctgagcactgtggctcatgcccgcaatccgagcactttgggagggcaaggcaagagaatctcttgaggccaggagttcaagaccagtctgagcaacatagtaagaccccatctctacaaaaaatagttttttaaaaatactaatgtttaaacgaaaaacctcaccaggaccactcatacc

SEQ ID NO: 112803 - DNA, 562 bp, Homo sapiens
tttgggtgctgtgtagtattccacacaaagatatgctacaatttatttatctattataatatcaatggatagcatatccatatgtgaaatactatatagcacccaaaatgattgagccatagctccccacaataacagctgaatctcacaagcataatgtaagttaaagaatccaggcacaataaaatccaagtaatgcgtttctgtttgtatgaaattaaaacaagaggtaaaactaagcagtgattagacagtaamaccaaggaagtgattacaatacttgtcaggacaatggttaggatgtaagaaagaagtagtgatgggaagaggctagaaaggagatttcaggttataggtcatgatctatttattgctatgagtagtagacacataaatgttgattttatgataatttagtcttgatttttgttttatgcctgttctctgtattatatttgatacacacaaatatttttaaaaagtatattggtgacagggtagtttagaggctgggagacccgtcaggtgcgttaaaaaaaaaaaaaaaaaaaaaatctcggct

SEQ ID NO: 112804 - DNA, 628 bp, Homo sapiens
tacccaagactaggttaggccttcctttatagtacttaacagaattgaagttgtacttttttcttttaactgtcatctataaaaaagcaaactctggccgggcatggtggctcacgcctgtaatcccagctctttgggaggccgaggcgggcggatcacaaggtctaggagttcgataccagcctggccaatatggtgacaccccctctctactaaaaatacaaaaattagccaggcttggtggcttgcaaycaactactcaggaggctgaggcagaagaattgcttgaacccaggaggcggaggttgcagtgaactgagatggtgccactgcactctagcctgggtgacagagcaagactccatctcaaaaaaaagccaactccataaggtcaggttatttatctttcttgctcatgtatctcaacacctagaaaactgcctggctaaataagtagatatggttttattcattaaaaaaagaatgaatgaataaatgaatatacaccgaggtctcattttaaaattgattgtgaatgtcacacatttgctcctgccctacaaatattactctattagcacatcatgtttgaagcatgaaagtgttttttatacttttctactatttt

SEQ ID NO: 112805 - DNA, 628 bp, Homo sapiens
tacccaagactaggttaggccttcctttatagtacttaacagaattgaagttgtacttttttcttttaactgtcatctataaaaaagcaaactctggccgggcatggtggctcacgcctgtaatcccagctctttgggaggccgaggcgggcggatcacaaggtctaggagttcgataccagcctggccaatatggtgacaccccctctctactaaaaatacaaaaattagccaggcttggtggcttgcaatcaactactcaggaggctgaggcagaagaattgcttgaacccaggaggcggaggttgcagtgaactgagatggtgccactgcactctagcctgggtgacagagcaagactccatctcaaaaaaaagccaactccataaggtcaggttatttatctttcttgctcatgtatctcaacacctagaaaactgcctggctaaataagtagatatggttttattcattaaaaaaagaatgaatgaataaatgaatatacacygaggtctcattttaaaattgattgtgaatgtcacacatttgctcctgccctacaaatattactctattagcacatcatgtttgaagcatgaaagtgttttttatacttttctactatttt

SEQ ID NO: 112806 - DNA, 607 bp, Homo sapiens
aacgaataaaatgaatgtagaaggaagacctctacactcatctcttttaaatgctgcatgaacaagaggctcactgttcaagacattaagtattgcttcatggcaaggggagatattctgtaaagttgtatcatttttaagattattaccagggacttaccytctcggaaaactcaccctatttgcagaaaaagatgacagaactaaaataatggattagcagaactttactctctaagcaaatgacttttataaaatctgaagttccctgaagaaggccagtaagtctcaatgagtaacatatcacaatgctcaagtggtgattgtagcatttgttaccagctacataattactctattctaactcttaatgagcctgaagtactaaatttttaactcccctgatgatcctcttcaaagtggataaatgtaggtttctcctcaatcaaatatttaattgtcagtactactggcaccaacacacaatctggaacatttttttactctctagaacttttcagttcttctaaaaatagcttatatcatacagatcttaaaataattgttggagagaaaaaataaggagcaagttaataagtggcagagt

SEQ ID NO: 112807 - DNA, 588 bp, Homo sapiens
acaagggatattagaaatactttggactaagtgataataaatgtctaccatatgaaaatgtgtaatgcagctaactcaatgcttaggaggaaatttatagtttaaatgtttatattacaaaagaagaagggcatagaatcaaagcttatacacaagtttacacattaagaagcaagaaactaaaagctaattaaacytaagttaactagaagggaagaaattataaaaataatagtaaatcaatgacagagaaagcagaccaaacaatattttaaaatctatgaccaaaagctagttctttgaaaagatctataacatgggtaaatcactagctggaatgatcaagaaaaagagagaatatgaaaattaacaatataaataaaacagagggcatcaaaacagatactacagaaattaaaataaatataagggagtaatataaactaccttatgccaataaaattgacaacttagatgaaatgcacaaatttcttcaaagacacaaattataaaaactaactcaagaagaaatagaacatctggatagcactataacaacaaaaattttaaatttgtatttaaaactat

SEQ ID NO: 112808 - DNA, 450 bp, Homo sapiens
tctaagagagactttttcttcccacccaacccccgatcccagccttgcaattccttttccatggtttctttttcccccatagtatctgtcaccttctaacttaacatttaaattctctttatcatgcttattgtctccctcctctagaatataagttccatgagaacagagatttttgtccattcagtccactgctgaagcccaggcatctaagccaggagtcagcaaatggccatatytgacctgctgctgttttttttaaataaagttatgttgaaacacagccatgtccattcacctatgtattgtctatggctgcttttgcaccataatgacagacttaagcagttgcaactgagaccatatgagccacaaagtttaaaatatttacttctggctctttacatataaattttgtcaacccctgatccagaataatacctggagtgc

SEQ ID NO: 112809 - DNA, 528 bp, Homo sapiens
aattgttttcaaatgcaatgatactttatgaatactgaatttaaccaatgatgaagtagctagttttatgtcttatagatttttgtggtctacactttgtggattaggttttgtagttttattttcatattttggagccaatagctttgtttttcagttctcatacttttttttgcaggtccttagaaagrtcataagtcctgaatactgtgtctgttgttcttaatcaataaaatgatcctgctggtgacctgtttgagaatacaatagtaggcttatgcctatgcaagaaaaattggagttgaagattaagcagtttgaatgatgataaaaagaaatctaacatttggttatattttatatattagggactttgttttaatgcaaaccatattctcattgaccagatatgctttaaaattcagaagtttttggattcttagaaatttaaaatagcatatatttcatatattattctgtaatactcctaaaggggtcttggacagtatccttaaccatatacattaa

SEQ ID NO: 112810 - DNA, 523 bp, Homo sapiens
tctagcccttaactctgaaaattctgataaagaacagacacctaaagaaaaaatgaaatttgtaaaagggaccaaatggaaaattgccatccttgacttttcttgggcgttctgagataaaaatctgtccaagatccatgcatagaagttcaaggctatggcttgtggtcactgaaatctatatcttaggctagaactaaagtaaggtcttttctcattcattttcctatctgtatatctattactctaacatgaaatggaaaacattgtctcttactactagttgaaattcccaaatttacatcttctctgagctagatctagatccaactgcttactcagggtctacacttagatgcctataggcatctgcaagtgatatgcctaagataaaactcttgaccacyatgatctttgttctacctagaacgtattccagggcagtctccaatatgtcagtttatcatccaactcttaatcatgtcacaatactgggtaccatctttgattctattttcttcct

SEQ ID NO: 112811 - DNA, 580 bp, Homo sapiens
ttatctaatggagtggaagatgtgaactcttcctttgtcgcaactacaaaatctttagtactttgatcactaatgcatttgtgcaggaagattcattaagaaggtgctacatctacatttggatccagattagcatggattgaaccaggtagtgctcgtataacataaggcaatccataaagtgctcacacaaaggaatcagaggatgagggagagggtgacatcctcatgaccatgtaaaatgaaagcatttttagaataagacacaaaatgcacaaaacataaagaaattgtttatatctttaaataaaattaaaattactttaacaacaactgtggacaaaagaaaaagacatgcatgcaagagacyagaaaatatatttgctgttcatatagctgacaatattgtactacccagaatgtataaagaactccaacattttcctttggagagcaatttggcaatatctagttaagttgaagatacaatatcaaaaaatttagcaattcctttctaagccaaccccctagacaatccttacacatggaaacatggataagagtgggttttgcagctttg

SEQ ID NO: 112812 - DNA, 580 bp, Homo sapiens
ttatctaatggagtggaagatgtgaactcttcctttgtcgcaactacaaaatctttagtactttgatcactaatgcatttgtgcaggaagattcattaagaaggtgctacatctacatttggatccagattagcatggattgaaccaggtagtgctcgtataacataaggcaatccataaagtgctcacacaaaggaatcagaggatgagggagagggtgacatcctcatgaccatgtaaaatgaaagcatttttagaataagacacaaaatgcacaaaacataaagaaattgtttatatctttaaataaaattaaaattactttaacaacaactgtggacaaaagaaaaagacatgcatgcaagagaccrgaaaatatatttgctgttcatatagctgacaatattgtactacccagaatgtataaagaactccaacattttcctttggagagcaatttggcaatatctagttaagttgaagatacaatatcaaaaaatttagcaattcctttctaagccaaccccctagacaatccttacacatggaaacatggataagagtgggttttgcagctttg

SEQ ID NO: 112813 - DNA, 589 bp, Homo sapiens
aatatcaataagaaaattaattggtcttagatctgaaagagcatcgagttgctgagtgcaatattagagataagttcatgtttgcaggagtaggaaggcttgtgaggtgctcttgtgagaagaacagataacaatggcatcatcttttatgaaaggggttatattctagtgtcctaatggaaggtagaaattgcatacaattaagataacctttagaaatctctgaaatattacatggggttttgtatgtacacatatgcrgcaatataatatgtagtataaataatatgtaacattagataacattcacattataataattatgtactatgcatatataatgtgtaatatatattatattttatatgtaatatgttctataacatatatgtagtgcattataaatatagtagtcccccttatccacaggggatacattccaaaagccctagtggatacctgaaaccataaataataccaaaccatatatatatatatactgttttctcctatacatacatacctatgatgaagtttaatttgtaaatttggcacagtaagagattaacaataattagtaatagaaaag

SEQ ID NO: 112814 - DNA, 555 bp, Homo sapiens
acctagaaaatccactcataggcatatacccaacagaaatacatgcatgtattcacagaaggcatgctttggaatgttyattctttggaataactttggaaagtcctacacatagtaactccaaactggaaactgtccttccagtgtaggactttggaaagtcctacacatagtaactccaaactggaaactgtccaaattcccatacattcaaatgttatatgaccacataaatcagtgatttacaactctaggcagaaacatgaataaatgtcataagtaaagtgttgagtaaaagaggctagtccccaaaagactacatattcaattcttctagttattcaaagcgcagaaacagaaaactaacgtataatattagaagtaatatttttgagggagtaataattacaagagggcaagaaggaagctctgccttgtttctttattaagatactggttatatattacgttcagttggtgaaaacttatcaagctacatttatcatatgtgcacttttctatatatcattctcccttttccccctgaaaagatgt

SEQ ID NO: 112815 - DNA, 555 bp, Homo sapiens
acctagaaaatccactcataggcatatacccaacagaaatacatgcatgtattcacagaaggcatgctttggaatgtttattctttggaataactttggaaagtcctacacatagtractccaaactggaaactgtccttccagtgtaggactttggaaagtcctacacatagtaactccaaactggaaactgtccaaattcccatacattcaaatgttatatgaccacataaatcagtgatttacaactctaggcagaaacatgaataaatgtcataagtaaagtgttgagtaaaagaggctagtccccaaaagactacatattcaattcttctagttattcaaagcgcagaaacagaaaactaacgtataatattagaagtaatatttttgagggagtaataattacaagagggcaagaaggaagctctgccttgtttctttattaagatactggttatatattacgttcagttggtgaaaacttatcaagctacatttatcatatgtgcacttttctatatatcattctcccttttccccctgaaaagatgt

SEQ ID NO: 112816 - DNA, 555 bp, Homo sapiens
acctagaaaatccactcataggcatatacccaacagaaatacatgcatgtattcacagaaggcatgctttggaatgtttattctttggaataactttggaaagtcctacacatagtaactccaaactggaaactgtccttccagtgtaggactttggaaagtcctacacatagtaactccaaactggaaactgtccaaattcccatacattcaaatgttatatgaccacataaatcagtgatttacaactctaggcagaaacatgaataaatgtcataagtaaagtgttgagtaaaagaggctagtccccaaaagactacatattcaattcttctagttattcaaagcgcagaaacagaaaactaacgtataatattagaagtaatatttttgagggagtaataattasaagagggcaagaaggaagctctgccttgtttctttattaagatactggttatatattacgttcagttggtgaaaacttatcaagctacatttatcatatgtgcacttttctatatatcattctcccttttccccctgaaaagatgt

SEQ ID NO: 112817 - DNA, 625 bp, Homo sapiens
ataaggaataagttctagcatttgatagtatagcagggaaattataacattgtgtatttcaaaatagctagaagaaagaattgtaatgctctcaacacaaagaaaaactaaatatttgaggtgatggatatcctaattatcctgatttgattattatatattgtatacatgtatcaaaatatcacatgtacacctaatatatgtacaactatgatatattaataagagaaaaaaacaaaaaaacaagaacagcaatatattaatgtttgctcaaaatggatgatggatacacgagagctcattactcaattttactttattgtacacctaaaatttctgtaataaaatcttgtaaatgttttttaaaaaatccatgactcaattaaaaaaaaaatgttctgcagatgccaaaagtcaaaggagaacatagcagctggaatctgggattgagctggcagttatgctttcaaccttaggctgagaatttgtgtaggtaattttcaaagactgaagccaataagcttatttatcgcaaacacaaaagacaaaggttcttctaataaacacaaatttaaaaggggcggattagagtatgagtaacaaaraagaataattattctgcatg

SEQ ID NO: 112818 - DNA, 519 bp, Homo sapiens
gctggggtgcagtgacgtgatcttggctcactgcaacctctgcctcccgggtcaagcgattctcctgcctcagcctcccaaatagctgaaactacatgcgtgcaccaccacgccctgctaatttttgtatttttagtagagatggggtttcatcatgttgctcaggatggtcttgatctcttgacctcatgatccacccaccccggcctcccaaagtgctgctgggattgcaggtgtkagccaccgcgcctggccaaaatgtgcacattttaaggtgttttctccccttagtgtctagaatatctcctaaatattgaatgccttttggatttctttggaagtttatagcacaaatgtttttggccacctctttctatgtccctcctgtagcctctccttggcctttaagatgcagaataatgtagttgttgagatcttcctgatataaatttatgccaagtatacacatcagcaacaattgtacatatcactgctttcctccttccaacaggtataagg

SEQ ID NO: 112819 - DNA, 562 bp, Homo sapiens
ttgcttttgattttacaagctcataggtggaaaggacttgtcttgtcacagatgagacttcggacttggacttttggattaaggytggaatgagttaagactttgggggacagttgggaaggcatgattgtattttgaactgtgaaaatgatagagtttggaggggccaggggtggaatgatatggtttggctctgtgtccatacccaaatcttatctcaaattgttatccccacatgttgggggaacaggctgatggggagtgattgaatcatggggacagatgtccccattgctgttctcataatagtgagtgagttctcatgacatctggttgtttgaaagtgtgtggcacttccccctctgcactctctccctctctccctcctactctgccatgataagatgtgttttcttccccttaaccttccaccatgattgtcattttccttatgcctccagtcatgctccctgttaaacctgcagaaatgtgagtcagttaaatctcttttcctcttaaattattcagtctcaagtagttctttatagcagtgtgagaacat

SEQ ID NO: 112820 - DNA, 617 bp, Homo sapiens
ttcttacccaaattatttatagtgaatgggaggacttaagtaaagacacttgttttaaaagcaatttagttattcttacccaaattatttatagtgaatgagagggcttaagaaaggttgtggtactttggtataagcagtttattggcatattcaccagtgcctaggcasaatctctgatttacacacagtccaggagactcaaagaagacaatctgaatctagtgtgtatggagtgacaagaaacaatagactagcgagagtcccagtgggtaccctgagagaacaatccacatacttgagaaaaaaagcctggtacaatagatcaggttcagcaatatagtctgaatataaaacttcagtaggtggaagtgggggtaaaaccgctggtgtgtgaggggcatgtctggacagctggagaggattgtgtagtaagtctgtgaaaacttgctcaggagagacctaaactcctccagtaggagactctgtccctctttcctgaaagaagaatgtatatagtattttctaaccagctggcgagaagaaagtaaattagacccagagacaggtcagggagacgggaagagagcagattcctcaggcggatcagggccatg

SEQ ID NO: 112821 - DNA, 573 bp, Homo sapiens
gaattccaggtaggggaaaacagtatctgcaaaggactggggttgggggaggatgaatcttttaacaaacagaaagatagaaaggaaggtgactctgagagtgctgtgaagaatgggagggtggtgacagaaaggctggtgacagattacactaaggaatttggatgcatagtcaagtacagtgtgatgcaaaccacagtaatatggtctaatttcttctttttaatcacatkggctgctgtgaagagaatggattgaaggaaagcaagtggaagtagactaaataagagattttcataatagagaagagaatgctgttagtggagatgcagagatgttgaagcaatcaagaaacaagctggtaatcaactgaatgtagggatgataaggaaagacgtgtcaagatcaatttccaggtttctgttgaacatataggtgaatagagatgcaatctcctggttggaaaaactagaggatggagggtggagggtggaaggcaagggaaaagataagatcaagagttcagttatgggtgtgttcaattggaaatacccatgaaatatccaagtgggg

SEQ ID NO: 112822 - DNA, 574 bp, Homo sapiens
tgcagtatacttctctgaaaatgagattcttaaaggagtgagatgctggcagactgcactgagggtggtgatgagctctgggagataaagacctgaccctccccatactgctcagactgggaaacttttatagttgtctctacaactgttccaatatatgaaggcacacttcacctaacatgtgcagacttagagcatgtatgttcaatatatgaatgcacatttcacctagcatgtgcagacttactaccagcaagagtaaccactaagggggctttgaagcatcaatcttaatatagttcaagttctgccaagggaaaaatctaaacatttgaaggaccacagcagatgctggtgccacactccctcccgtatcccctcagcctcaactctgagttcctgtagctgtcatggacaatgagcacgttgataacttcccacctcaatactcttccctatctctccacctgcgggctctgtctcccctakgagagattgcttaggctacttgcgtgcacagttggcagtgtaaaattcttaactttattccactttggatgtgctttgcagttcc

SEQ ID NO: 112823 - DNA, 575 bp, Homo sapiens
ctgaccgtgctttcttacttatatttctctagaaggtaaaattacaacttgccctttccttgctaagaagaatataatcaaagttaaaaacctaatactgaagtttcatctaaaatgctactgtttatactctgcacaaaaaatgataggaaatggtctgtcaggccagccgcggtggctcatgcctataatcccaacacttgaaaaggctgaggcagatggatcacttaaggccaggaattggagaccagcctgygcaacatgacaaaaccccatctctactaaaaatagaaaaattagctgggcgtggtggcataggcctataatcccagctattcaggaggctgaagcacgagaattgtttgaacccgggaggcagaggttgcagtgagccaagaatgcaccactgtactccagcctgggcaacagagcaagactctgtctcagggaaaaaaaagaaaagaaacggtctgtcaaatgctcatttatgcaaagtcatttgcacctatgcaattagattatcatggagacaatctgctcagactaatagctttcattgcaaatgaaattattct

SEQ ID NO: 112824 - DNA, 575 bp, Homo sapiens
ctgaccgtgctttcttacttatatttctctagaaggtaaaattacaacttgccctttccttgctaagaagaatataatcaaagttaaaaacctaatactgaagtttcatctaaaatgctactgtttatactctgcacaaaaaatgataggaaatggtctgtcaggccagccgcggtggctcatgcctataatcccaacacttgaaaaggctgaggcagatggatcacttaaggccaggaattggagaccagcctgcgcaacatgacaaaaccccatctctactaaaaatagaaaaattagctgggcgtggtggcataggcctataatcccagctattcaggaggctgaagcaygagaattgtttgaacccgggaggcagaggttgcagtgagccaagaatgcaccactgtactccagcctgggcaacagagcaagactctgtctcagggaaaaaaaagaaaagaaacggtctgtcaaatgctcatttatgcaaagtcatttgcacctatgcaattagattatcatggagacaatctgctcagactaatagctttcattgcaaatgaaattattct

SEQ ID NO: 112825 - DNA, 555 bp, Homo sapiens
taaaataccatcaaaatatcaactctctaagaataaatctaacaaatacaagaagagtgctatactaaatagtataaaattttatggagagaaattaaagatgaccagaaaatgtaggagaaaaaatcttgttcatagattgaaatagttcatattgtaaagataccartctgtctagattgatttatagtttccatgcattaccaaccaaaaccacaacaaatttttgggagaatataacaagttgattctaaaatgtacggggaatgcaaagaatcaagaatagcacatgcactattaaaggaaaaaaaggagaggtagtaattgcggtggtgttagtaagaggccataaactttcatatatcaagttttacaagaaacatacaaagacaagtgaaccaatggaataataataatataatatagacagcccaaaaaaagaccatgtacatatatatgtatactctacctaataaaaagtaaataagttgtgcagaaacaattggataattatttgaaacaaatgaaacttgaattcaacctcaggccacgcac

SEQ ID NO: 112826 - DNA, 555 bp, Homo sapiens
taaaataccatcaaaatatcaactctctaagaataaatctaacaaatacaagaagagtgctatactaaatagtataaaattttatggagagaaattaaagatgaccagaaaatgtaggagaaaaaatcttgttcatagattgaaatagttcatattgtaaagataccaatctgtctagattgatttatagtttccatgcattaccaaccaaaaccacaacaaatttttgggagaatataacaagttgattctaaaatgtayggggaatgcaaagaatcaagaatagcacatgcactattaaaggaaaaaaaggagaggtagtaattgcggtggtgttagtaagaggccataaactttcatatatcaagttttacaagaaacatacaaagacaagtgaaccaatggaataataataatataatatagacagcccaaaaaaagaccatgtacatatatatgtatactctacctaataaaaagtaaataagttgtgcagaaacaattggataattatttgaaacaaatgaaacttgaattcaacctcaggccacgcac

SEQ ID NO: 112827 - DNA, 626 bp, Homo sapiens
caaaatattaatatcattgaatttggatggtatggttggttgtctgttgtagtcttaacttttagtttgtttaaaaatatttcatgttttcaaataaactataaaacaatgcaaaatttggaaactagtttaaaagtgtaataaataaatgaattattacataaaggataatattgtcaacattgttttattttgatccagatttttttatattttgttttgaaataactatcgtcttatataaaacctgcaaaaatagtaggaagtgtttatgtatacccttcacccagttttccctaatgtcaaaaatttacataaccttagtgcaattatcaaaatcaggaagttaacattggtacaatatcatcaatacaactatakaccttatttgaatttctccagttttttctctactgcccttatactattccaggatgctacacttcatttagttattgtatctccttagtctcatccaatctgtgacagttcttcaatctttatttatctttcttggccttatacttttcatcagaaggcttctcaatttggattctctagccttttctaatgattagattgaaattatgccttttttgatgatagtaccacagaaatgatgctgg

SEQ ID NO: 112828 - DNA, 645 bp, Homo sapiens
ctcctggccatgtgaagtgccagctctcccttygccttctgccatgagtgtgagtttcctgagacttccctagaagcccaagagatgctccatgcttcctctacagcccacagaactgcgagctaattaaacctcttttctttataaattacccatctcacgtatttcttcatagcagtacaagaacagactaatacatcattcagattattttacttgcctagatagccaattgggctacaaaagccatggcataatctttgtatattccttaagattggatatggctgtgacaatacaattcaacaaataggggctttaaaaagatagaagtttacttctcctctatataaagcagggctgtacagagtcctgaggtagtatagtggctttgttccaccgtgtctcagggacctgggctccttcaggctccatactctgtcaatccaagttgtggctctctctctcttttctaatccaagatgacatcttctacattgcagtaggtggggaaaagaagggaacaaaagaagaggggcaacatttgtacaatggctgtttcttaaagagttagaaaaactgccacatgacaattgcgtataaatcttattggccagactttagagtgagtggtcatgtgcctag

SEQ ID NO: 112829 - DNA, 645 bp, Homo sapiens
ctcctggccatgtgaagtgccagctctcccttcgccttctgccatgagtgtragtttcctgagacttccctagaagcccaagagatgctccatgcttcctctacagcccacagaactgcgagctaattaaacctcttttctttataaattacccatctcacgtatttcttcatagcagtacaagaacagactaatacatcattcagattattttacttgcctagatagccaattgggctacaaaagccatggcataatctttgtatattccttaagattggatatggctgtgacaatacaattcaacaaataggggctttaaaaagatagaagtttacttctcctctatataaagcagggctgtacagagtcctgaggtagtatagtggctttgttccaccgtgtctcagggacctgggctccttcaggctccatactctgtcaatccaagttgtggctctctctctcttttctaatccaagatgacatcttctacattgcagtaggtggggaaaagaagggaacaaaagaagaggggcaacatttgtacaatggctgtttcttaaagagttagaaaaactgccacatgacaattgcgtataaatcttattggccagactttagagtgagtggtcatgtgcctag

SEQ ID NO: 112830 - DNA, 527 bp, Homo sapiens
attcttgaagagattggcactggccatgcataggccagaatgtacgctttccaattatctgacatcctcttccaacacatccagggcactctctgcatctcatttgcatcaaattcattttagtacatttttgattactgctttattattcccttttcaatcccaaactttcaataacaaaggtttattatcttaggtaattcccacgcttataagcaacctttaaactccactatcccttcacccccactgtccacaaactaccctcctttccaccagccctgactgcacacacatgaatattcctcattacctctcctattactgrcatgaagcatttcatgtaaaatcctcaagacttggacagaagctatcagtcatagaaaggtgatccttcaaacttgcttagaaaatattcctttttctcatacccaccatttctgatgtcaagagaatcaactgtctgctataactctcagaaaaataggtcatggtttcttaatgacaattgctagtacgatagtaaa

SEQ ID NO: 112831 - DNA, 353 bp, Homo sapiens
ctatcattgagccaccgccaagcatgtgtgtatatgtgatgcttctggatgtggctagacataagtcacacagaggggacactcrgggggagaagggaatagggcccaaatggctgctgctgttccattgcctcttccccttctccctgtacttctcatatggcccatatgtgtcccaagcttgaagaaaaaataaaaaataggccaggcgtggtggctcacacctgtaatcctagcactttgggaggttgaggcggtggatcatctgaaatcaggaatttgagaccagcctggccatcatggttaaaccctgtctctgctaaaagtacaaaaactagccgggcatggtggcg

SEQ ID NO: 112832 - DNA, 532 bp, Homo sapiens
aactgtatttagtgtttgctttttttgttgtctagatgtccagtgcccagaaatcccttctgcctatgggcagcaaggttctgttaatgtttggccttctggtgtcactggaagaaaatagaggagggaaaggtgggacatgatgtcaggttgggaccaggatactgaagttaggctcagggagcaaaatcaggagattttggttggggatgttgaatgtgaggtgcctctaagtctaagtctattaagaggtgatgttaagtagacatttagatatctcgctgttcagagatgagttctagactggagatattagcctgggagccattcatgctgggtggtattagaaagcatgggtattagaaggcatggatttcacactgaaacgtgyatcagaagcttatggagggcttttgaaaatacagattgctgggtcctacccccagagtttctcattcagtaggtctgggaggggcctgggaatatgcactttaacaatgtttaacagtcatcccaggtgatacggatgctg

SEQ ID NO: 112833 - DNA, 606 bp, Homo sapiens
cacctgccacctgtgatgcctgcttgacttgatttcacaggggacaccagttgttgtccatcttcccacgtgggaaaattacacagaaaagtcaagctgaccttcctgatatcsctctgtggtggacctaggccaaatcacaaattggtttaggacttgcagttggtgaaggactgagagttcagggcacacacatttgtcctttggactctgccacatccctctccagaggtgggagaggcagaggctgggcttcaggtatcacccttcccccagctgcctccaggatatgaagaagaagggaccctcttccacagcatggccatgtccaactctgaaagtagctcttacatctttctttctggccacagttttcagaactacttttaagagattagtggggagggagggtggtcaggaagctacagctcaaacccacttacccagaaacctcttggaaacttcccagctcaccttctgtgccagaccatctgccaaggatggtctgcagccccctgcatcacaatcacccaaggacctggtgaaatgcagattccaaggccccacccagatcttctgaatcagaatcacgagcctgtgacctgt

SEQ ID NO: 112834 - DNA, 606 bp, Homo sapiens
gtcagctccttctaccttctgcatgctttctctagccacactggcagctgattggatggtgaccacccacattgagggtgggtctttctgagtccattgactctgactcaaatgttaatctcttctagcaacacccagaaacacccagatagatgcagagacaatccttcaatcaagttgacgcttaatattaatcatcacagctgggaagagacagggaggaaggagggcatccgagggacccggggtgtcaggggattcttttccctaaagctgagagaagcttgtgcatgtttaagttataaagtgatgctcagagtcccagtggtaatgtggggctgctttccaggggcttgaaaactctcctctgtgtaccttgtgggtttccaggacacaattatgcaaccaccttactttttaccacccacttaagagtaacagagaattttatttaaaagagaagtatgtaattgtgttcacagtagatctgctstgtgtaattagtttgtgtggagctagttcagtttgtctggttgacattttgtcgaccagtgacttgtgcagtaaataattatagggaaattcaaggggaattcaaagggacag

SEQ ID NO: 112835 - DNA, 623 bp, Homo sapiens
tttctctgcatataaacaggtgtgcacacggggaggaaaaggggatagagaagaaatacagaaataaatcgttgttgttatcaaaacgccttctctttgtcgtaaacgtgtttttccacttgrtgttctgtcctggccaattccaaccgcgcgcctgctcaggccgaggtgagatccctgcagccccaacctggggtgctgacacccttgcacaccacccttgtgcgcagcccccagtgctcgcatgctttttgcatagagttgctcaccggctcgctccgaccagggcttccccggaaaaggtggggaggggctcctaggcactcgcggtttcctggagatccaccgtctccctgggtagctcaggccggtgctccaaggccattgcctgctgacgcagccgactctgcggtctcctacagcatgcgcctcctgggagcgagctcgccgggccgcgccccctgctggccgtgtcccctgaagcctcggccgcaaatgcgcgccgcttgagcctcggaggttcggagtctcctctcccagcttcctcttctccgtccacgcccaccagacttttaggccgttctactctccaaactacccttcttgaaaggatgtgagtcatt

SEQ ID NO: 112836 - DNA, 623 bp, Homo sapiens
tttctctgcatataaacaggtgtgcacacggggaggaaaaggggatagagaagaaatacagaaataaatcgttgttgttatcaaaacgccttctctttgtcgtaaacgtgtttttccacttggtgttctgtcctggccaattccaaccgcgcgcctgctcaggccgaggtgagatccctgcagccccaacctggggtgctgacacccttgcacaccacccttgtgcgcagcccccagtgctcgcatgctttttgcatagagttgctcaccggctcgctccgaccagggcttccccggaaaaggtggggaggggctcctaggcactcgcggtttcctggagatccaccgtctccctgggtagctcaggccggtgctccaaggccattgcctgctgacgcagccgactctgcggtctcctacagcatgcgcctcctgggagcgagctcgccgggccgcgccccctgctggccgtgtcccctgaagcctcggccgcaaatgcgcgccgcttgagcctcggaggttcggagtctcctctcycagcttcctcttctccgtccacgcccaccagacttttaggccgttctactctccaaactacccttcttgaaaggatgtgagtcatt

SEQ ID NO: 112837 - DNA, 471 bp, Homo sapiens
tgaattcagaagttcaatatcagcctgggcaacatagtgagaccccatctctacaaaataaaaaaaaaaaattgaaaattagccaggctcagtggtgtgtgcctgtagtcccagcacctcaggaggctaaggcagggggatcacttaggcctaraagtttgaggctgcagtgacccatgattgtgccactgtactctagctggggtgacagagtgagtgagactctagctcaaaaaaaaaaaaagcacttgttaatgcattgatgaaaatggcagtgtgttaccacagattcttagttatagcctaagtgacaaaaactcaggcatataagcagaagaacatcctagaccacatttattgtacactgaatatttcagatttcctctgatctgtagtttactgagggtaatgacgtcctataactatcactcattaaagttggcttttagagataaagggactgttagggta

SEQ ID NO: 112838 - DNA, 553 bp, Homo sapiens
cctctctgaaacactcttccttttaattccaccacactacattcttctacctccccaatccttccttctcattcctttgccagttctttctcctctgcagtcatttcagtgatgagctctttaaagtcttcttctcttttcaatctaatctttctcagagttctcactcagcctctcagtaaatatgcagttgacagtttcttcatccaacccagacgtcttcccagaacaagtcacctrcatttgaaactgttcgctcagcattatccttcatcacccccaaagcacctcagtctctactcagaaaacaaattatctttccctcaaaacttggttctctttctgtgttttctatttcagtgaataacactaccaccatctatccagttgcttatagcccgccatgctcctctctctccttaaccacgtatctaatccatttccaagcctgcttaactcctgcatcatctcttaaatctcctctgctatccaagccatgattctttgtcaccaggactcttattgtagccttcaaacctattgccttacatct

SEQ ID NO: 112839 - DNA, 562 bp, Homo sapiens
gataagaatgggaaataaaacttgaattattacattgttaaattgcccaattcaagcccctaagtctggatgtttatataaaaatgcatgcagatgatttagtaayggtgataacagaaataaacaacaagatcaattttacttacttgaggatgttaatatatcaattaaaaaataaatattgttgctaaatattgataatttaaaatttaattcagtaatttaactgcagtaatttatttttaaaatcgtaacatttgaattgcagtaataagaaaaaggtaaaagagaattggcatacaatcaggtacctgagaaagaagaaagttgagtagagagttgctgcctcctgtttgcttttcagaagatttcccaatataattcaaaataataatccctaatattgctatagacctggacttcttaacctagtgtctatggaaacctcagctacttttgggagctccacaattgccctgaagttatatgcaaaattttgtagcttcttgtggtgctactgtgtgcatgtgggcattcttctgatatacatgattcatggctt

SEQ ID NO: 112840 - DNA, 472 bp, Homo sapiens
gtccaaatcctccacatcttagaagatttcgcactaatsccatctctttcttgcagttgttccaaagcaccctgccatctttggctgtggtctcataagcctgaattatttacatcactcatctctcattcagttggaatgttactttgctttctttcttttatttttttctttttttattttctgcctttttatttttggaagggtggtggtatgtgtgacaaaccttgactcccactcatctcgcacattcaatggcaattgtttatgtttttaattcattgacagtacaagtattctttttagcatgtctttcattttccaggcaacccacttgtccccaggaataaaacactttaaaagaaaggcgtggtccttctttcatgaagtttatgggtgcagagggagatagacggatgtcaatgaagtaatcattccatgtttacataagtataatttgcaaaaagaacat

SEQ ID NO: 112841 - DNA, 540 bp, Homo sapiens
tcttttctttctggccacttttgagatcctctcattcatcgtttttgaaataataattttacttttttgacttgagattgtatacatatcctgaatctagaaacctatattttttatcaattctaaaaaattctcatcattgtctcatcatacattcttattcatatttctatatctttgctcttttacagttctcatttttatctttgcagcattctgtgtaattatctgcctttcagttcactctcacttcacctgtgtctaacctgctttttaacttattcattgtttactttttacagctttgatgaggtattcttcacataaaataaactatgtatatttaaatgtacaatttgatcagttttgaccaatgtacaggtgtatatgtccataaagtcatctccatgatcaagataatgagcatatgtgtcacctgccaaagttttctcctattctttaacscttttctccttccgcttctggccctataccccaaattcccaggcaaccatggatatgcttttttgtttctataga

SEQ ID NO: 112842 - DNA, 530 bp, Homo sapiens
ccttcaatccattctccttgtggcacccaaagcaaggcttctaattcattctttagtgtaaaactctccagtggccctacttgccttcaggatcaagtatgtattccttagcctggcccatagggcactgcgtcatctcccgcacccacacccctccctccaccccactctccaaccttttctctggacacccctgactctctttcggcttcccagcctctcatatcagtgtgaccactttatgttgcctgtcctctgcacgcctgcctctcatcacatgttactatgmttacattattttgagggggatgaagtctcactctgtcaccaggctggagtgcagtggtgcgatctcagctcactgcaacctctgcctcctaggttcaagcgattctccggcctcagcctcccaagtggctgggactacaggtgcacaccaccacacccagctaatttttgtatttttagtagagacgggatttcaccatgttggccaagatggtcttgacctcttgacctcatgatccacc

SEQ ID NO: 112843 - DNA, 530 bp, Homo sapiens
ccttcaatccattctccttgtggcacccaaagcaaggcttctaattcattctttagtgtaaaactctccagtggccctacttgccttcaggatcaagtatgtattccttagcctggcccatagggcactgcgtcatctcccgcacccacacccctccctccaccccactctccaaccttttctctggacacccctgactctctttcggcttcccagcctctcatatcagtgtgaccactttatgttgcctgtcctctgcacgcctgcctctcatcacatgttactatgcttacattattttgagggggatgaagtctcactctgtcaccaggctggagtgcagtggtgygatctcagctcactgcaacctctgcctcctaggttcaagcgattctccggcctcagcctcccaagtggctgggactacaggtgcacaccaccacacccagctaatttttgtatttttagtagagacgggatttcaccatgttggccaagatggtcttgacctcttgacctcatgatccacc

SEQ ID NO: 112844 - DNA, 417 bp, Homo sapiens
ttgaattcaatgctgggtcacctccagattcattttcacagtctttcatgtttggtcatattacattgtattttgctgccatatgactgatctctttttgttaaatgtgagatacttgttaaaaaatatttagcaatgaattgaggcctagtggcatgttatcttgctgcagaagagatgggagtctacttctgggggatggtcasgggtcctccatacaggctgcaattgaggtcgtcggtgcaggctcagtccctacaaaggccagggtatttcctgtctacctctattctgatgcatgactcttctgggtctcaaccagagccagtggatttcagtacgggtcgctttcattggcagaccctcaatccacttgttttccatctaatcccacgcatgtgtgcaaaagctgctgtg

SEQ ID NO: 112845 - DNA, 583 bp, Homo sapiens
acgaagtaactatgtagagagttaatagctgagaattatctaaaatttataaaaaacatggatgcctagattcagaaacacaaattcaagcaagatacataaaaaggagtctgcacctaartgcaatatagtgaaatttaaggataaatagaagatctgaaaagtatctggagaaaagataaagaactcattaaagattgataatggattaacagaataaagtcatttggttaaagaaattaaagaactactgcaattagactgacagccgacttctccatcctcaatatggaaaccaggagccaatggaattacatctttgcagtgcggacactaagtaatgtcaacctttattcatatacccataaaaactatctttcaagaagttttcagtttcatattaaagaagaaaacaattcagacaaatgtaaacaatgagacgaaggccaaaattaccttctttgaagtggttttctcaccctctaaaaacatcaccattgctatactcttcaacttaccagtgctattcgaaatatgttttttcttcctagcacaatctatcccagagtctttatcatgttaa

SEQ ID NO: 112846 - DNA, 583 bp, Homo sapiens
acgaagtaactatgtagagagttaatagctgagaattatctaaaatttataaaaaacatggatgcctagattcagaaacacaaattcaagcaagatacataaaaaggagtctgcacctaagtgcaatatagtgaaatttaaggataaatagaagatctgaaaagtatctggagaaaagataaagaactcattaaagattgataatggattaacagaataaagtcatttggttaaagaaattaaagaactactgcaattagactgacagcygacttctccatcctcaatatggaaaccaggagccaatggaattacatctttgcagtgcggacactaagtaatgtcaacctttattcatatacccataaaaactatctttcaagaagttttcagtttcatattaaagaagaaaacaattcagacaaatgtaaacaatgagacgaaggccaaaattaccttctttgaagtggttttctcaccctctaaaaacatcaccattgctatactcttcaacttaccagtgctattcgaaatatgttttttcttcctagcacaatctatcccagagtctttatcatgttaa

SEQ ID NO: 112847 - DNA, 548 bp, Homo sapiens
agctggagcatctgtgcaggctcttggtaggaatcttgtgtggagcccttcgcttatctaatggtggaaaagattacctccaggtctctattgaacrtgagagtcaggatccgtgggagtgcctgggaggccactgtctctctctctccagttcatcctccttttgataaattaatcttcttaaatacttccagcattagtttactccattgctcacaaccctccaaacatgctgcattgccttttaaatcaaacccccattttataaaagccctccatgagagtcaaacttgttcctgtgattcccctggtccccatgtgccaaggccattctgagcatggccagtagcttccgtcagctcctgcctcctccacttgctgtgagccttctcttgggagtcaccagggatttccaagttaacatatccaaatcgaatacatgaccttcgggttgttgggttgggagaaggcttgaatttgcccccacgggcagtggatgtgtcacaaagtggcaaattttccacctctggaagcgtccaagtagagaa

SEQ ID NO: 112848 - DNA, 563 bp, Homo sapiens
gcctagtgggaggtatttgggttatgggagcagatccctcacaaatggcttggtgccatccccacaacaaagagcgggttattgctctattggttacagtgagattcaatatttgaaaagggcctggcaccttcctccccttctctttcttcctgcctctctcactatgtggctcgcctgtacccctttcaccttcttccatgattgaaaacttcctgaggtccttaccagatgaagatgctgacaccatgcttcttatacagcctgcagaaccatgcatcaaataaacctcttttttaaatataaattatccagcctcacatattcctttataacagtgtaaaatgaatggagacactactgtacctattttttttttttttttgagacgtagtctcactctgtcacccaggctggagtgcaatggcatggtctcagctcactgaaacctctgcctcctgggttcaagtgattctcccgcctcagtctcccaagtagctgggactacaggtgtrtgccaccacacctgatttttttatttttagtagagatggggtttcact

SEQ ID NO: 112849 - DNA, 296 bp, Homo sapiens
cagaattagttgtgattgtgaaatggtctactctcaactccaacttttggttatttaactatagtatactgagtatgaacaaaaaattatatatatatatataattggcagctcatttaaggtgtatgcyacatccagtaacatccagtaatatagaatttcacaattgcaagatattgatttccagctgatgctttaactgagccctcagcaaaggcaattcattattcttttaagccaccacagtaaattctgtgggtgtgagtgtattcttagtgtgtgtgtgtgtgtgtgct

SEQ ID NO: 112850 - DNA, 630 bp, Homo sapiens
gtttatgtactttataaactgagcaagataaatagtgtgttaaggctttatggacttgttatgacagctaattttgtattgcctgacatagtatctgagcaaatgtacagatgttcattcattttcactccactatagatactgtaaattgagtaactctggaagtccagtcataacagctgacaaatatccctgctacctagaagaatgaaagttgtaagtcactggacttcaaccaagaaagttagcagggaacatgggggcccatgcatctttttaatgattgcattgcagaaatctactgtgggtttcctatgacagtctacctggtggctcagaggacacctaatgaatcagccataactttaagtgacgtaaggcctgacaaatsaggggctgctggcgtgcctttgagtttatcagcctctccgtgaaaccacccattgtgatccaaaccttgcctttgttttctcctttactgtgatcccttcctaattttaaaagggtcaaatagcttttactgaacacaatggcaggcagtccttcctaaaagtgtcacatggcacatgaccctagcatattttcctgctcttgaagctgaccaatcattctaaagggattgtttcccaa

SEQ ID NO: 112851 - DNA, 429 bp, Homo sapiens
gagtttttttgtcatcatttctactcagttttttctacaaattcttactacctttttcacccattgttaggataataaagcacaaagccacttagacaaagcagctgtgttgcaggacatacaacttctcataaaaattataactgtacgtattgctgctggtttaagtagtgatgggtttattcttgataatgcaaatcactgattttcactaaccgagcactaattcagtagtrgtcaaagtgtggtccttggacctgcagcatctgcataacctgggtacttcttagaaatgcagacttttaaaatcagaaaccctgggagtggaactagcagtcgtttaataggcattccaggtgattctgatgcatgctaagtttgataaccacagccctaattaagctgatttaattccagttgatttgtcaa

SEQ ID NO: 112852 - DNA, 351 bp, Homo sapiens
catacatttttagaaaataagtaaatcacacgttaaatttttcagaattgaggaaattcatgtaaaccttagaaaaagtaattccttaagttaaacagtagcagccatgcaatgcggaccttgtggttctgttcacgtcgtctgacgtgtattgtgtttttcccttgtccagtgtgtctctaatacagtcttcaacatgtgggctattagcaaccaccaccataaaactgtttctcaatactgagatggtccctttactgaggaaagcccagcacattcccactgctgcmtggtgtgggcttcacgctcctctctattaggagaatgtggttctgagccgcatcaggtgtt

SEQ ID NO: 112853 - DNA, 616 bp, Homo sapiens
atatagcagttaagaagaaatcacgtaggcagttagcaagggtatgagagtccctggtaaagcttttctttttgatgaaaagcagccccagatcattttctaacaaagaccagcctgtaaagttgagctgcagacatagacaagcaagctggagcttgcgtgagtgaatgccagcaggaactaagaactagacattttcaagagggcagctccatcttcctgtctctgccagccacatgtactgtaaggagcagacaagatggcgcagatcaactagaaagtctatttgcatagtaagactaagttgggacaaccagctttcccagcacgctacataaatttcataccttacctgatgtgaccaatctatgagccctctgcaaatcagacactgcctcctcaaartggactataaaattcggtgcattcaccactagccggtcctttcccttggagacccctctctctacggagagagccgtctctttttcttctcttctgtttattaaacctctgatcctaaacttctcgcttgtgtctgtgtcctaaattttcttggcatgcaacaattacccagacacgtaccactccattactatattattatttaattaaa

SEQ ID NO: 112854 - DNA, 537 bp, Homo sapiens
gtctcttcaaactctgagattctatgagtctatacaaagagtgtttatccaaaccaagaacagaggagaagaaatggcaccaatattggaaccatgaagtcctgggtttaaattgtggctctattatctactacctgggtgcatctatcaggtaggattcacctggttgcaagtgacagaaaattcaaaccatcttaaacaatagagatacataagcttctgtgactggaatgaccagtggcaaagatggcttcaggagttttcaagtcagtagaccaatgatgtcatcaagattttgctccttccaactctctgccctacataccctctgctgaaactatcttatggctgrtgccccatcgtgaacacaacatgggaacctgccaacattccacaagtgcttccatgcatgctcttgtatctttagaaggttctcagaagccctccaataaaatctcccatctcatcgttcttaactatgattcatgctaatcaatgagccagtcaccatggccagtgaatcagaattgcatggat

SEQ ID NO: 112855 - DNA, 577 bp, Homo sapiens
agcacccttgaaacatgctaattaattatttttttttaatctaagttacccagtgttggtttcatctacctgctgccctactgcagaatcagaaagtgggaatctgctttgtggygggatgacgttcaccaagcatcgttcagggctggttcaccatgatgcctgtccaaacccctgagcacctagtgtctgtaccacacatgtaagtacttaatcacatgctacaccaagctgctcatagtttcaccctataactcttgtctctgcagacagacaaaagcttttctggaggctggagaccatagcatagataagaggtcctcaaaactaatggatcatgagcagctgtgaggtgtgatgcactaattagttaggatcccagtccaatcagtgatacttggaaatgattttggctttttttgtaagctacagcacattcaaggtcatttctataataacatcattcttactcatttacaatctgaaatgttttcttgagtgggagcgaaatggaaaaagtttttaatgtgttatgctttgtcttacatattctttaatcctgtacagaacagagcac

SEQ ID NO: 112856 - DNA, 643 bp, Homo sapiens
tggtgagttgtgagtgaatgtgtrggggagtctgacttgtcaatattctgctttattatcagaacaaatgaaaactccagtttttggtcattttcatatggctggataccttccccttctcaacctggcacttgtagaataaattttataacctaaatgcaagaccagtatgtatgtctcttaaaggataccttgacaactttaccctgcattctagtttagtaaaccatatttgaagcttgatttcattggccactatatgttcttttctcctggccttataaatgtacacatttcttagaaaactcgggtcttcattcattctacaaacatgtcttgagtggctactatgagccaggctcagagggtagctgaagataaataggtaaacaaagcatgagccccacccttagattactcagtctagcaggacagacagaggcataaatggaccactctgaaaccaagtgttgaatgccattataaagaaagttgggttctgtggtgtaagtaggagttaacgagatgaggatggcacaggagtcccagacaaagggaaactcattaccaagaaatgagggtgtctcaagaagtgacaaccgttttaagtcatttaaacataggtcagagtggagagagacaa

SEQ ID NO: 112857 - DNA, 573 bp, Homo sapiens
ctccctttctgtcaactgaagaacatggatctgctccattcactgcacagtcaagctggggggcactgcagagaacaaggaaagaagaccaccaccagcagacatgggccatggcagctcttaacaatggccccaggaaagcctagtagctccactcagtgagaaacacgccaaacaagaaccaggtctgcttttctctcacttcctcccaccccaaaacaatgcagaacttgaaatcaggtgctttcagattcaggtgaacgaacctcaggaasaactgcacttccagtcccctctctttctcaatcacagaaacgatcaagttctctcctattccacctgcctgttctcaagtggaccctcccgtgaagatggctctatttcaaatcaaaaccccatcgcaccaccacccaagggcttccttttgcctttccctaatccactttttgcctagtgcttattatcagctgacacattaaatatttgttatgtttctgttggcctctcctcacacaaagaagacaggtttgttgactgctgtatctccagcatgcacagcccattgaaggctca

SEQ ID NO: 112858 - DNA, 573 bp, Homo sapiens
ctccctttctgtcaactgaagaacatggatctgctccattcactgcacagtcaagctggggggcactgcagagaacaaggaaagaagaccaccaccagcagacatgggccatggcagctcttaacaatggccccaggaaagcctagtagctccactcagtgagaaacacgccaaacaagaaccaggtctgcttttctctcacttcctcccaccccaaaacaatgcagaacttgaaatcaggtgctttcagattcaggtgaacgaacctcaggaagaactgcacttccagtcccctctctttctcaatcacagaaacgatcaagttctctcctattccacctgcctgttctcaagtggaccctcccgtgragatggctctatttcaaatcaaaaccccatcgcaccaccacccaagggcttccttttgcctttccctaatccactttttgcctagtgcttattatcagctgacacattaaatatttgttatgtttctgttggcctctcctcacacaaagaagacaggtttgttgactgctgtatctccagcatgcacagcccattgaaggctca

SEQ ID NO: 112859 - DNA, 565 bp, Homo sapiens
ggacacaggaaggggaacatcacactctggggactgttgtggggtgaggagaggggggagggatggcattaggagatatacctaatgctaaatgatgagttgatgggtgcagcacaccagcatggcacatgtatagatatgtaactaacctgcacattgtgcacatgtaccctaaaacttaaagtataataataataaaaaaaaagaaagtcttcctttcagtatgtcgacagcttatctttcctctcaggtacttatgactttgtgtcttcgattttctagaaaagagagatgytctaattaaatattgagcatgtcaatgcaaggggatgagtgaataattctcacttatccccttgcactctatctatcatctatctatctatctgtctatctatctatctatctatctatctatctatctatctatctacatatatataaacacacagagagagagcgcatgattatgagaggagtcagttaaattaggcataggacagggtctcaaacacaagttgatagtcctgtcaagcatacattcaaagagaataatactagttgt

SEQ ID NO: 112860 - DNA, 565 bp, Homo sapiens
ggacacaggaaggggaacatcacactctggggactgttgtggggtgaggagaggggggagggatggcattaggagatatacctaatgctaaatgatgagttgatgggtgcagcacaccagcatggcacatgtatagatatgtaactaacctgcacattgtgcacatgtaccctaaaacttaaagtataataataataaaaaaaaagaaagtcttcctttcagtatgtcgacagcttatctttcctctcaggtacttatgactttgtgtcttcgattttctagaaaagagagatgctctaattaaatattgagcatgtcaatgcaaggggatgagtgaataattctcacttatccccttgcactctatctatcatctatctatctatctgtctatctatctatctatctatctatctatctatctatctatctacatatatataaacacacrgagagagagcgcatgattatgagaggagtcagttaaattaggcataggacagggtctcaaacacaagttgatagtcctgtcaagcatacattcaaagagaataatactagttgt

SEQ ID NO: 112861 - DNA, 563 bp, Homo sapiens
atcatcccttcctgatctgtataaaaattggttattttatattttttactgttttcagagaaacaaattaaatttatggttaatatgtttattgttttcataacctgatcatttatctattgatagtcataatgttaatatgttaaaattaagtacgaacttgatagtatctgtggcagctacttttatagtgacgtctgtaatcatacacagatgctaaatcatagttcacattttatygttttaaaaatgtgttttgtttttcttatgatgtgtttttacatttttatgatgttagaaagcgaaaatcctgctaccgtgtaagcatacctcagaaattaaaatgctggatatatttaatggtgacattggaataaaatgacattcttgaaagccatgtgtctaaatatgtgactttttcaagtatttgatattaagattttaaaaaacaactaaaatacaatagagatattaagttacctgattcaccacttagtagtagcagcccacttttctcctgcgcaacactgtcctaggagctctattgtaccttaagtacccac

SEQ ID NO: 112862 - DNA, 560 bp, Homo sapiens
ctactcagaggcactgaaataattagaacctaggtttattatcttaaagtataaaaccagtacctaagaaattgcctcttttctattagggagttggttttggaagaggtgagctgtaaccagtactgggcttaattatcagtctttcatatggacaattacatgagaatctatgttagcacattttcctcctaattatgcattttcttawtgaaaaatgcgcaataaaataaactcccaaatataaaattattttagactttttttcaaaccagacagaatagtgaatcaatttcttcttcctgcaaacaggaaaaaaaaaaatggttgggtacataattgatctgatcactggttaatagagtgaaaaatcacatgataaaaaaatgtttcacttactttaagagaagaaagtctaaagagattgcaatctcatgcatgttctaggggaactttgtaaaaggtgaggctctttatctttttaaaaacagtttgcttttgcattcaattttaaaatattacatgtaacacattatttattgtaagaattaccttgagct

SEQ ID NO: 112863 - DNA, 572 bp, Homo sapiens
cagcattttttttcctgcaaagcagcagatagcaaatactttcagctttgtgggccatatggtctctgttgctactactcaactctgtcatgcaaatatcactaaatataatctctctctctctctctctctctctctctctmtatatatatatatatatatatatatatatatatatatatatatatgtatagaaactagtgtgacttttctttcaataaaactttatttgcaaaacaggtgtaggactaggtttggcctgcaggctacagtttgctcactcctgtactagctcattcaagagtgtcttgcctctgagcctcaaatcaggaacttcaaagattacttcttttcagagccacaaacttcaatatgaaaattgcatgtttgattttctgcaacacaggtataggttgacaccttacactacgtaaccctcatactataaagtgttcctttcaaattttcttaatttctaaagtgtatgccttattttggagttaaccatgttaaaagtgttgcagcatcctggagtggctggaactgaagggacacattacaggagtaatttt

SEQ ID NO: 112864 - DNA, 633 bp, Homo sapiens
ctgttattctcttttaacaaaaacaacaattttgcaaaagctgcttatttggggctacatctaaagaagtattttctatgtgtgacacaacaggaattcaattatacctcccaaataatgaatgtctattttattcaaggttgtgttctatattacgagaaattagattatgatttttgattctcgttatcttctaaccaatggaagatagataatggcacaaatgagaacctgctttctccagaggagttcatgctgttaaaaaaataaagaaaaagaaagtcaaaatgtttttgataatattcaatgtaagtcctctttctttctctacctaatctctcattctctttctctctctctcacacacacacacacacacacacacatgcatttacatacwaaaccactatcaataaagcaatgcttactagctttattattatttattattagctttattatttaatatttagtggaagtaaaagccaatgcaaggtagcaaaaaaaatcagaagtacagtattagaaaaaataatccaacttattgactgcatctgcttttattttatacctgtaaactcctaaaaaaaatgtactgcagaggagaaggtgactgtggtagtcagggttctc

SEQ ID NO: 112865 - DNA, 503 bp, Homo sapiens
tctgaatctgtgacatattgcctgggccaaagaagagtttgaatgtgccccaaacaaaccttccttgggttaagccactgagatctggggaatattttctttttataacatgatgtagcctgtgctgactcatacaagrggctgaaaaattcaaatattaatgcttataaggctcatattttcttaacttttctttatccaatttgacactactttacatttagataaagtgagtctgttctcttctctccacccagactttagcacagaatatgatgtattagggtcttcctactcagtagccatgtgatttgctcattaatcacaagtgccagttgggaacatcagaaaataagggaaaatagacttcgaaagaaatcaaaagacatacacaaaagacctagatggtaagaatgaccatttttgaaaagaagctgaaatccaaagctacccctctttttccttaaattgctttccctgaggtcctggaggtgtttcccatg

SEQ ID NO: 112866 - DNA, 634 bp, Homo sapiens
aattatgctgttgtacacaaagtcttaatgcctgtaaaaataaattctgataaagattgataatatattcatattggttagtcatatcttcttcccttaccgtcttcctcttctgtacttcaacttgaaacctgtaaaatttcttattgggcaccggcacaggctattccctctgaatgaagcatatttcctctctttactgattaacttgtattcatcctgaaatctcccttaaggctttccttcctctgggaagatttctctgatgcataaagttaactcttttcccatatacttccatagggccttgtttttcctcaattacgtgttgcaagctgcttgtttacttgtcagttccaacctaaactctaagttctattaggtagaacctttcatctctgtatcctcagagccttccctattacacagtgggtacttaaaacttgttgaataattgaaagaatcaatttaattgtcataattcttatatttgctttcaacaaaaataaagttttaamttatttgaaagaagcaagtctacatcacatggtttttttcttaatcacaaaaagaaatactcctttcttttgaagttttccccttttttatattcaaaacagtctcttgtctaatt

SEQ ID NO: 112867 - DNA, 619 bp, Homo sapiens
tctgtcaatgttatcagctttctaaaattattaatttgaattgtatttttttatttttctcatactccttttagtatttcagactccacactcttgtgattaccatctttcaaatgttctttctggagaaaaaaatgagtcactgtttgatttttatgtgcactgatggtgaccaaaaatgttactttattatgcatagcgcatagtgccttagatttattgaattggaaaagtcaaattgtttgatttctaattctgctaatgtaatgctgttgggccaaagggaggtagagagaagtcttaaaattgcatgccatttgtattaattaataattggtttaagtctctagtaaagatgcaatatcccattaattatattgggatcccactattatggagtgaaaataaggtaaaagttatgtggcaggctattttcccaataaagccttgcacaacaggtttaaaaaattagtaaattgggttttatcartacatgtaataattcaagttttccttgatttgaaactaccaatatgagtgaacagagaagtaagtttatattacacagtattaaagacaatttatagttactttttcagaggtatattttattagtgaa

SEQ ID NO: 112868 - DNA, 558 bp, Homo sapiens
gaagttgtgatcctttggaggagaagtggcattccgatttttggaattttcagcctttttgcactggttttccctcatcttcatggatttatctaccttttgtctttgctgttggtagcctttggatgaagtttttccatgatcatcctttttgttgatgttgatgccattgctttctgtttgttggttttccttctaacagtcaggtccctcttctgcaggtttgctggagtttgctgggggtccaatccagaccttgtttccatggatatcaccagctgaggttgcagaacagcaaagattgctggctgttcccttctctggaagctttgtcccagaggggcactcgccagataccagccagagctctcctgtatgaggtgtctgtcgacccctgctgggaggtgcctccccatcaggagacaacgggkgtgtcagggacccacttgaggaggcagtctgtcccttagcagagcttgagcactgtgctgggagatctgctgctctcttcagacctggcaggaaggaatatttaagtctgctgaagctgcgccaaca

SEQ ID NO: 112869 - DNA, 656 bp, Homo sapiens
aataatctggaaaacatatttgaaggaataataatycaagaaaatttgtccaatcttgctggaggtagaaatccttgtttctggatttctacctctagcaagagtgagactctgtttcaaaaaaacaaaaatccatatacaaggaatccagagaacacctgtgagatactgtataaaacaaacatcactaagacatacagttactgggctatccaaggtcaatgctaaagaaaaaaattttaaaggcagctagggaaaaacatcagatcacataaaaaggaagcctcatcaggctaacagttgactttcaacagaaatcttacaagccaggaaagattgggggcttattttcagcaggcttaaagaaaataaatgccaaactagaatttcatattttgcccagctaagctttataagcaaaggagaaatacaatctttttctgacaaatgagctccaggaaaatgtgttaccactagaccaacctcacaagagatccttaagggagttctaaacatgaaaatgaaagaacaatacctgctaccataaaaacaaacaacaacaacaaataaccacacttaagtacatggaccacagatgctataaagaaaccacacaatggaaactacaaagcaaccagctatcaacttcatgatag

SEQ ID NO: 112870 - DNA, 656 bp, Homo sapiens
aataatctggaaaacatatttgaaggaataataattcaagaaaatttgtccaatcttgctggaggtagaaatccttgtttctggatttctacctctagcaagagtgagactctgtttcaaaaaaacaaaaatccatatacaaggaatcyagagaacacctgtgagatactgtataaaacaaacatcactaagacatacagttactgggctatccaaggtcaatgctaaagaaaaaaattttaaaggcagctagggaaaaacatcagatcacataaaaaggaagcctcatcaggctaacagttgactttcaacagaaatcttacaagccaggaaagattgggggcttattttcagcaggcttaaagaaaataaatgccaaactagaatttcatattttgcccagctaagctttataagcaaaggagaaatacaatctttttctgacaaatgagctccaggaaaatgtgttaccactagaccaacctcacaagagatccttaagggagttctaaacatgaaaatgaaagaacaatacctgctaccataaaaacaaacaacaacaacaaataaccacacttaagtacatggaccacagatgctataaagaaaccacacaatggaaactacaaagcaaccagctatcaacttcatgatag

SEQ ID NO: 112871 - DNA, 584 bp, Homo sapiens
tgggtatgttagctttttgcaatgtctgttgctacttattataaaaaattaaaatttatttattaactactaacttatttagtggaggaaagaaattttcaaaaagttgaatacttctgtgcattggagtttgtttttaatcttttattttaatgttataatagttttaatagctgtaagagtgattttaatggacattttctatctttgaaaagaaacagttctttaatgcttttgttcatgcatcgtgtgtgtgtgtgtgtgtgtgtgtgtgtgtgtactaraaaatagtggttgtcctgtgggaagagatgataggtgattatatcctttcaaatgcctttctttgctttctacaaaagtacatgcattatttaatttctaaaactttattagaccatatgggtcaaataattcttatctgccttctattgttaaattaatggttatgtgctcagaatcatcatatacagatcaaaactcttatttttaaaattggattttataatgtccacagtaaagacaagctttatctacctttttttactgactttatttattataggaagtagaatatgaactat

SEQ ID NO: 112872 - DNA, 435 bp, Homo sapiens
ttgtgaacttgcaacttttctatatatttgtttcaaaattttaaaaagtattttctcccatgttctcacttataagtgggaactgaacaatgagaacacagggacacagggaggggaacgacacacattgggrcctgtgggggtggggggaaagagagcaccaggataaatagctaatgcatgtggggcttaatatctaagtgatgggttgataggtgcagcaaatcaccatggcacatgtttacctatgtaacaaacctacatgttctgcacatgtatcccagaacttaaaatttaatttaaaaaagattaaaaacaatttattaaaaagtgtttttaacctaaaaaaaaatcttggtgcttttgctcttctgccgttgccatgatgaacttctccctaggcagttgctgccttctcagcctgggcccttgaat

SEQ ID NO: 112873 - DNA, 578 bp, Homo sapiens
atctcagaaactgtagttctcatctcttgatgttctatttgttttttaaaaccatcttttgtgtctctgtttaacttttttgtctgtaagcaatacagttgtaatcactgttttgtctgttatttcttccatgtatctagatctgtgtttattttggttgattgcttttttcctattatagtttatgtttttctttatccctagtgataattggcatgcctgtaattattaattcgatgtaaacaattgggaatttttgtttgtttgtttttgtttttttmtttttatttttagttctggagtcatggtgcaggatatgcaggtttgttatgtaagtaaatgtgtgccatggtggtttgctgcacctataatccatcacctaagtttaagtccagcatggcattagctgtttttcataatgttctctctcctctcaccccaaccctcaacaggcgccagtgtgtattgttcccctccctgtgtccatgtgttctcattggtcagactcccacttataagtgagaatatagcggtagttataggtttatctgtatcctgcgttagtttgctgaggataa

SEQ ID NO: 112874 - DNA, 594 bp, Homo sapiens
atagagttcatagagaagaatggttaccagaggctgggaaaggtagtgggagtgggtgtgggaaggagagtaaatggttaatgactacaaaaaaattagaaaaaataaataagacctrctatttgatagcacgacagggtgtctatagtcaataatttaattgtacatttttaaataacaaaaagagactaactggatcatttgtaacacaaaggataaatgcttcagaggatgaataccccattctccatggtgtaattgttatgcactgcatgcctgtatcaagacatctcatgtatcccataaatatatacacctactatgtacctacaaaaattaagaattaaaagacattgcttgctggtacaagaaacagaagttaaaatagccatgattcatatattcaataattagaaaatatgatgggaaactccagcagataaattgttttatgggaaactgtaataataaaaaatctgaaaatcttcaaattaaaatacaataactgaaactctgagcttaaagagaggtttaacaacaggttgcacagagttgaatagaggtttagtgaattggaagatgagtcagaagaaa

SEQ ID NO: 112875 - DNA, 630 bp, Homo sapiens
gtaaaatgctcttgcttctctgttagtaaacaattctagtttatcagaggtttttgttttctgttgactttgtatgaaatgttaaagtgacttccccccacttcaattgctaatatgataattttaatagaaaatttggtgggggtgagcctaaagaagtcacctgtaaccccaccacccaaagataattgctattaacattttaatgtataaacttctagacttttcttctatgcacttgtatggattattcctttgcttgctttttaaacaatatagacttgttctggatacttttgtaaacagtgttttgtaaactgctttttaatttaatgacagaggatgaacaaatttccaggtcattaaatattcttctacaaccttatttttaacagttgcacactgttcctttatatggatgtagcaaaattcccttaggcaattctctactgttagatatattatttatttctaatattttaactattataattaacactggactgcacctaaactaatgaatagatctttgcactgatatgggattattttcttcgcataaattcttagargtgaaattgtggagtcaaaggattatacattcttaaaaattgtttttggccaagtgac

SEQ ID NO: 112876 - DNA, 611 bp, Homo sapiens
attgatctaagttcatttatttttgcctatggatattcaaatgtctcagtaccattgttgaaaaggctgtctgcaatggattgaatgtttgtgtccctccaaaattcatatgttgaacttttcatcctcmgtgtgatggtattaaaaggtggtgcctttgggaggtaatttgatcttcaggatggagccctcataaatgggattagcacccttgtaaatggaacctcagagagctctcctgtcctcttctaccatgtaaggatacatcaagaagacagcaatcggaagcctggaagagggcactcagcagaatccaaccatgctggcatcctgatctcagacctccagcctctgtaactacaagaagtaactttttattctttataaatcacccagcttgtgctaatttgttagagcagacttaactattctttcccccactgaattgcctttgtacctctatcagcaattagttgtgtatatatgtgttggtctatttctgggcactttattctattccattgatctgtttgtctgtattaatgacaatatctcactgtcctgatttctgtaactttataattaaagtcttgacaccaagtagtgtcagt

SEQ ID NO: 112877 - DNA, 559 bp, Homo sapiens
aattccagaataaaaactgatttaaatgaaaaactaatcatgatctcaaataacaaaaatgtgcactaacacattctatttgtttaatttcaaatggataagctaataacacagctagatagataaaataagagaaaacttgtgcaaaactcttaaatgcccaccctttcataaagaactaaaagayaagtataatttttagagtcggactactaaatactgtttctatagagacatttgaagattaataattacatacatttataaaccacaaaaattgaatagtgaaataattatgaacatacgaatttcactaagtaaaacagtatttgcataagaacattgaactttgtatataacaaatgagataataataaattaaataatacaaataagaagcagagcttcctagggagtaacaaaagaaaggttcttaacatttcactgaaaaatattcttaaaaaatagttctgggaaactgaagtattcaaaatgataaagtcattagtcctggttttctgaacaaacaacaaattaacaagatcaaaagcacaaacat

SEQ ID NO: 112878 - DNA, 608 bp, Homo sapiens
ttaacctttcaatgatatttgatawcaggataaatgaaactgtctatacagcttaggcttccctaaaataaagaagttaaataaatctacctaatatgttagatctatttgggaagtttcatgactaacataatgggttggaagccaattgttcaatgttccaaccacacaatttactattatgatacagttgttaaatataaggatagaataaatctggctaaattgtggtcagaacaagttttcagtggctttaaattgacctgtgacctaaaatgaaccagcataacttagcctgtgaactcttacacttccatcaactcaagtgtgactcctcttctagaagccttattgacctcagctcattccctcccagggatgagtttgggtctcccataagggttacctacccaccatgctcatcatgttgtgtattgaaatgttctgttctttggtctgtcttccctaaagctcttcaactttcaaggaatggatgagtccacatgtttacatccctcatgcctaacccattatcactgtgtgtctttcctacaagtgtgttttttatgtacctcctaaacttatgcacctcctaaactccattgact

SEQ ID NO: 112879 - DNA, 608 bp, Homo sapiens
ttaacctttcaatgatatttgataacaggataaatgaaactgtctatacagcttaggcttccctaaaataaagaagttaaataaatctacctaatatgttagatctatttgggaagtttcatgastaacataatgggttggaagccaattgttcaatgttccaaccacacaatttactattatgatacagttgttaaatataaggatagaataaatctggctaaattgtggtcagaacaagttttcagtggctttaaattgacctgtgacctaaaatgaaccagcataacttagcctgtgaactcttacacttccatcaactcaagtgtgactcctcttctagaagccttattgacctcagctcattccctcccagggatgagtttgggtctcccataagggttacctacccaccatgctcatcatgttgtgtattgaaatgttctgttctttggtctgtcttccctaaagctcttcaactttcaaggaatggatgagtccacatgtttacatccctcatgcctaacccattatcactgtgtgtctttcctacaagtgtgttttttatgtacctcctaaacttatgcacctcctaaactccattgact

SEQ ID NO: 112880 - DNA, 556 bp, Homo sapiens
  misc_feature (1)...(556): n = A,T,C or G
gtttatttctttctcttgccggattggctagaattccagtcctatgttgaataagagtggtgagagagggcattttgtcttgtaccggttttcaaagggaatattatgcagtcataaaaacaatgagatcatgtcttctgttgggncagagatggagctggaggccattattcttagcaaatgaatgcrggaacagaaaaccaaatacatcatgttctcacttataagtgggagctaaatgatgagaactcatgaacacaatgaagggaacaacagacactggggcctgcttcaggatggagagtggcaggagaaagagaaacagaagaaacaaggtactaggtttagtatctgtgatgagataatctgtacagcaaaagcccatgacataattttacctatataacaagcctgcacatgtacccccaaacctaaaataaaagttaaaaaaagaaaatctaaatctacctgattacagaaaatgtgcaattaagtatgcaattatgcttcttctgggagacagtaccttgtaaggcttggtatctcttttgaagta

SEQ ID NO: 112881 - DNA, 556 bp, Homo sapiens
  misc_feature (1)...(556): n = A,T,C or G
gtttatttctttctcttgccggattggctagaattccagtcctatgttgaataagagtggtgagagagggcattttgtcttgtaccggttttcaaagggaatattatgcagtcataaaaacaatgagatcatgtcttctgttgggncagagatggagctggaggccattattcttagcaaatgaatgcaggaacagaaaaccaaatacatcatgttctcacttataagtgggagctaaatgatgagaactcatgaacacaatgaagggaacaacagacactggggcctgcttcaggatggagagtggcaggagaaagagaaacagaagaaacaaggtactaggtttagtatctgtgatgagataatctgtacagcaaaagcccatgacataattttacctatataacaagcctkcacatgtacccccaaacctaaaataaaagttaaaaaaagaaaatctaaatctacctgattacagaaaatgtgcaattaagtatgcaattatgcttcttctgggagacagtaccttgtaaggcttggtatctcttttgaagta

SEQ ID NO: 112882 - DNA, 386 bp, Homo sapiens
ggagttatattaccttcccccctcttggatagttgaaacartatcacagaggggtgtacacacactgcgttatggtgggtgatattatcctctccactccctgcatattaggaacaatatcataaggggggtgtacaccccctgcaatattaaaagtaatattatcttctccctgcctagatattgaaaacaatatcacagggggcgtgtacaccctctgaagtattgggagtaatgtcatcctctccctccctggatattaggaacaatatcacaagaagagtggacacttcctgcgatattgggaaaaatattgtctccttccttgatattaggaacaatatcacaggggaggtgttcacccctgcgatattgggtgtagtatc

SEQ ID NO: 112883 - DNA, 583 bp, Homo sapiens
ataattacttgatgactttttgctttagtatatatgtagttttaaaatcaacataatttctaacatcttaagaaaaaagcaacagggtaagattcttcgcacacatcaaatatcttttacaagaaaatgctgaatttactaacatatataggtgttgtgaagatgttaaatgagcttaatgtatagttttttttttctactggttcaattattctggaaaaatattcaatgctagtgtttattttgtctcccagaaatgagtcaagaaactcgtatctgcaatttagtgtattatcttaccaattcctgtgtagttggtaccaaacaaaccaggattagaattcttgagcaattttatgaatactaatttgttttgttgtttaattcctggaagtgtaattaatgtacagttttcatataaataatatgtaagatataaatataatttttaaatagcatattacaygagattatatgtgttggagtatatgtacaatattggcaattgcatgtagatcaagagaatgatcagtttttaccaaaatagaaaacaggattttacattgatcaaaaaaacataaat

SEQ ID NO: 112884 - DNA, 613 bp, Homo sapiens
acttagacagctcacctctgtcacaaaaaaattctctatgtcatgtgaaggtactgtgcttgcactgttggtggtggcattggcagcagtgccaataatagtgcagagagggccaggcctggtggctcacgcttgtaaacccagcactttgggagcrcgaggcaggcagatcacctgaggtcaggagttcaagaccagcctggccaacatggtgaaaccccgtatctactaaaaatacaaaaaattagttgggtatgatggcaggcacctgtaatcccagctacttgggaggctgaggcatgagaattgcttgaacccaggcggcagaggttgcagtgagcgaagactgtgccattgtactccagccttggcaacaaaagcgaaattccgtctccaaaaaaaaaaaaaaaaacaacaacaacaacaacaaaaaacagtgcagagaaatagtcaagttctggatgagggtcagcatcacaagcctgtccaacttcaaaagtacacagctgagcttgaaattgaaggggaccagaacataacaccccaaaattcaccactttgatgtgttgattattctgacctgaaagtaactgagaaattgcagatgtaggag

SEQ ID NO: 112885 - DNA, 613 bp, Homo sapiens
acttagacagctcacctctgtcacaaaaaaattctctatgtcatgtgaaggtactgtgcttgcactgttggtggtggcattggcagcagtgccaataatagtgcagagagggccaggcctggtggctcacgcttgtaaacccagcactttgggagcgcgaggcaggcagatcacctgaggtcaggagttcaagaccagcctggccaacatggtgaaaccccgtatctactaaaaatacaaaaaattagttgggyatgatggcaggcacctgtaatcccagctacttgggaggctgaggcatgagaattgcttgaacccaggcggcagaggttgcagtgagcgaagactgtgccattgtactccagccttggcaacaaaagcgaaattccgtctccaaaaaaaaaaaaaaaaacaacaacaacaacaacaaaaaacagtgcagagaaatagtcaagttctggatgagggtcagcatcacaagcctgtccaacttcaaaagtacacagctgagcttgaaattgaaggggaccagaacataacaccccaaaattcaccactttgatgtgttgattattctgacctgaaagtaactgagaaattgcagatgtaggag

SEQ ID NO: 112886 - DNA, 574 bp, Homo sapiens
tcaacagtagttgattatgacaaacgtgccatactaatgtaagagaataatgaatgagagaaaagggtgatggttatataggaactctatactatccttgcaattttcttgtaaatataactactctgaaataaaaaatatatatatttaagacaaaaaggatgagaagacagtagattttttcagaatgttctgatcaaatggaaggagtgggaacctggctataaggaaagagaagacataatcacagaccaaatgaataaaaaagatagctggccaggtgaggtggctcatgcctgtaatccaagcaccttgagaagctgaggcaggaagatcgcttgagtccaggagttcaagaccagcttggggaaacakgacgaaaccctgtctctaccaaaaaaatacaaaaattacccaggcatggtggcgcacccctgtaatcctagctatataggaggctgaggcaggagaatcacttgaagccaggaggcagagatcagagtgcactgagatcccaccactgcactccagtctcagctacagagtgataccacatcttgaaaaaaaagaagaa

SEQ ID NO: 112887 - DNA, 574 bp, Homo sapiens
tcaacagtagttgattatgacaaacgtgccatactaatgtaagagaataatgaatgagagaaaagggtgatggttatataggaactctatactatccttgcaattttcttgtaaatataactactctgaaataaaaaatatatatatttaagacaaaaaggatgagaagacagtagattttttcagaatgttctgatcaaatggaaggagtgggaacctggctataaggaaagagaagacataatcacagaccaaatgaataaaaaagatagctggccaggtgaggtggctcatgcctgtaatccaagcaccttgagaagctgaggcaggaagatcgcttgagtccaggagttcaagaccagcttggggaaacaggacgaaaccctgtctctaccaaaaaaatacaaaaattacccaggcatggtggcgcacccctgtaatcctagctatataggaggctgaggcaggagaatcacttgaasccaggaggcagagatcagagtgcactgagatcccaccactgcactccagtctcagctacagagtgataccacatcttgaaaaaaaagaagaa

SEQ ID NO: 112888 - DNA, 449 bp, Homo sapiens
attttaaagacataaatagaaactaacttaaaagagttcaattaaatcttaaatgtttcatatattggtattaatttgcattatattttctattcttaagattccatttgaaaacatactctccctctccattataaatatcctaaaatactrtatgacagtttgtaagcctctgttagacttgtcacatcctactataaatcttaagatattcctttaaaattctgaaatattttaataccaagtaaagctaaaacaatgattactgcttgtaataactaaatggattgtaattgatttttctatttaatatctaatcaagctaattatattatctttgtctctaaggtaaacactttttaacttattgtcatgtgatacttgtttattttagaggtgctctctctgtctttggaaaattttttcattattcagttttcttaatgtgt

SEQ ID NO: 112889 - DNA, 449 bp, Homo sapiens
attttaaagacataaatagaaactaacttaaaagagttcaattaaatcttaaatgtttcatatattggtattaatttgcattatattttctattcttaagattccatttgaaaacatactctccctctccattataaatatcctaaaatactatatgacagtttgtaagcctctgttagasttgtcacatcctactataaatcttaagatattcctttaaaattctgaaatattttaataccaagtaaagctaaaacaatgattactgcttgtaataactaaatggattgtaattgatttttctatttaatatctaatcaagctaattatattatctttgtctctaaggtaaacactttttaacttattgtcatgtgatacttgtttattttagaggtgctctctctgtctttggaaaattttttcattattcagttttcttaatgtgt

SEQ ID NO: 112890 - DNA, 449 bp, Homo sapiens
attttaaagacataaatagaaactaacttaaaagagttcaattaaatcttaaatgtttcatatattggtattaatttgcattatattttctattcttaagattccatttgaaaacatactctccctctccattataaatatcctaaaatactatatgacagtttgtaagcctctgttagacttgtcacatcctactataaatcttaagatattcctttaaaattctgaaatattttaataccaagtaaagctaaaacaatgattactgcttgtaataactaaatggattrtaattgatttttctatttaatatctaatcaagctaattatattatctttgtctctaaggtaaacactttttaacttattgtcatgtgatacttgtttattttagaggtgctctctctgtctttggaaaattttttcattattcagttttcttaatgtgt

SEQ ID NO: 112891 - DNA, 472 bp, Homo sapiens
tggcttatacaattatagagacaaagaagtcctaccatctgctgtctgtcagctgagcaaccaggaaggtcagtgatgtaattcagtctgaatcctaagacctcaaaaccaccaatggtgtaattcccggttagagtttcaacacttgagaacccacrgttgagagagagtactgatgtgagtactggtgtaagtactggaatctgaaagctctagaaacagaagaggggcaggagaagatagatatcccaggtcaagaaaagagagaattcactcttcctatacctttttgttctatctgggccttcatcaaaatgaatgatgcccacctaccttggtgagagtgatctctttactcagtctactaatttaaatgctaaactcttctgggaacactctttcagacacacctagaaataatgtattaccagctatttgggcatcccctaagcccagtcaagttgacagagaa

SEQ ID NO: 112892 - DNA, 472 bp, Homo sapiens
tggcttatacaattatagagacaaagaagtcctaccatctgctgtctgtcagctgagcaaccaggaaggtcagtgatgtaattcagtctgaatcctaagacctcaaaaccaccaatggtgtaattcccggttagagtttcaacacttgagaacccacggttgagagagagtactgatgtgagtactggtgtaagtactggaatctgaaagctctagaaacagaagaggggcaggagaagatagatatcccaggtcaagaaaagagagaattcrctcttcctatacctttttgttctatctgggccttcatcaaaatgaatgatgcccacctaccttggtgagagtgatctctttactcagtctactaatttaaatgctaaactcttctgggaacactctttcagacacacctagaaataatgtattaccagctatttgggcatcccctaagcccagtcaagttgacagagaa

SEQ ID NO: 112893 - DNA, 645 bp, Homo sapiens
gcatggtatcccatgcccttcatcctcacctgtgcggttccactcacactcagcatctcagccacactgatctgcttagaaatgcctgagccacctgctccctggggcccctggaatctgatagtggacactccatggcattctctcttgtctttgtacccttcttttctcacaatttctrttcatcattttaaaatcagcttgagagtcacttgatttaagaagcatttcttgacaactcacaaggagagctaggcctcccttcttccctccctccctccctccctcccttcctcccttccttccttccttccttctctttttccttgacccacacataccaaaaattgaaaatcttctgcaaaagttttaaccttctgatccttgtgttcaagggtcataattgcttttaatgaatagagcttccttgtcttcaaaaatcagtcttccctgcatcaaatttcactctcttggtggctctaaaaatcttatttggggttgggagatgcaaaggaaagaaaactattctgagttcatgacagttaggattcagagcctgcactatttatgttcacagttcttttaatcctcctgacaatcgataaagttactattattgtcccattgtaaatattgacaaactga

SEQ ID NO: 112894 - DNA, 634 bp, Homo sapiens
catctcaaaaaattaaaataaataaaataaaataatataataaaataaattaaacttcagaaggaaagagagttgtagccttgattccttttttcccaagacactccttgaggcctatgcaaattttcccaactcctcagcagtcacagctaagygggccaaagcaagggctagtggaaggagtgatcgcagaccccatgacacccttcacacagagccatagatgactactcaacttacggtcacgtcaccatgcgagagtcaccaaacagcatctctctctctgaaatgtcaacatctatacacccatctagtgtctggtttagggtggaaatgtgggtgtaagaaaagtaatttagaggtaattactggcagctgaggggaggagactgttcctcacccagccttgggttagtggagatttggtgcaatggacaaaaacagaggttttgatttggaggcgaagaaaggggacaatggctccagaggccaagagcagagaaggacagccaggaagtgggctgagcatggtggactcaggagatggggagccccatcttgggatgcctcagagacattgtggagggggcctggttttcctttttgaacattttttattgttaatttattaatt

SEQ ID NO: 112895 - DNA, 634 bp, Homo sapiens
catctcaaaaaattaaaataaataaaataaaataatataataaaataaattaaacttcagaaggaaagagagttgtagccttgattccttttttcccaagacactccttgaggcctatgcaaattttcccaactcctcagcagtcacagctaagcgggccaaagcaagggctagtggaaggagtgatcgcagaccccatgacacccttcacacagagccatagatgactactcaacttacggtcacgtcaccatgsgagagtcaccaaacagcatctctctctctgaaatgtcaacatctatacacccatctagtgtctggtttagggtggaaatgtgggtgtaagaaaagtaatttagaggtaattactggcagctgaggggaggagactgttcctcacccagccttgggttagtggagatttggtgcaatggacaaaaacagaggttttgatttggaggcgaagaaaggggacaatggctccagaggccaagagcagagaaggacagccaggaagtgggctgagcatggtggactcaggagatggggagccccatcttgggatgcctcagagacattgtggagggggcctggttttcctttttgaacattttttattgttaatttattaatt

SEQ ID NO: 112896 - DNA, 634 bp, Homo sapiens
catctcaaaaaattaaaataaataaaataaaataatataataaaataaattaaacttcagaaggaaagagagttgtagccttgattccttttttcccaagacactccttgaggcctatgcaaattttcccaactcctcagcagtcacagctaagcgggccaaagcaagggctagtggaaggagtgatcgcagaccccatgacacccttcacacagagccatagatgactactcaacttacggtcacgtcaccatgcgagagtcaccaaacagcatctctctctctgaaatgtcaacatctatacacccatctagtgtctggtttagggtggaaatgtgggtgtaagaaaagtaatttagaggtaattactggcagctgaggggaggagactgttcctcacccagccttgggttagtggagatttggtgcaatggacaaaaacagaggttttgatttggaggcgaagaaaggggrcaatggctccagaggccaagagcagagaaggacagccaggaagtgggctgagcatggtggactcaggagatggggagccccatcttgggatgcctcagagacattgtggagggggcctggttttcctttttgaacattttttattgttaatttattaatt

SEQ ID NO: 112897 - DNA, 569 bp, Homo sapiens
tgtcccagtttatctgtagctgatctttccagaggataagcagcccagacttgagtttctagatggatataaccaggtgcatgtccgaggcacagaggggggtatttataacccatggtaacattaaatgcagtgccttcttcatgcaacagtcatctgtagctctaggcatccacacacttttgttagtgtagatttctgcaggagcatcaatccaggtgagaggtcgaataagtggaggaaaaggcacataagcccartaagaataattatgtgtagcaggtaaatcagtgtaagaggaaactggtgagacagaaagtataagggggagaatcattaaataaaacctattgtaagcgagattgagtgttgaaggagaaagagaacagagggatgttattttcaggctaatagaaatggtcagattttttaggtttgtaaggagaaagagaaaggtaatcgggagaagtgggattagttagatgggtctccattgccatcagggaggattgatcagacccattgtgatttggtgtgcctgcttctgaggagttggcacagattttacc

SEQ ID NO: 112898 - DNA, 569 bp, Homo sapiens
tgtcccagtttatctgtagctgatctttccagaggataagcagcccagacttgagtttctagatggatataaccaggtgcatgtccgaggcacagaggggggtatttataacccatggtaacattaaatgcagtgccttcttcatgcaacagtcatctgtagctctaggcatccacacacttttgttagtgtagatttctgcaggagcatcaatccaggtgagaggtcgaataagtggaggaaaaggcacataagcccagtaagaataattatgtgtagcaggtaaatcagtgtaagaggaaactggtgagacagaaagtataaggrggagaatcattaaataaaacctattgtaagcgagattgagtgttgaaggagaaagagaacagagggatgttattttcaggctaatagaaatggtcagattttttaggtttgtaaggagaaagagaaaggtaatcgggagaagtgggattagttagatgggtctccattgccatcagggaggattgatcagacccattgtgatttggtgtgcctgcttctgaggagttggcacagattttacc

SEQ ID NO: 112899 - DNA, 569 bp, Homo sapiens
tgtcccagtttatctgtagctgatctttccagaggataagcagcccagacttgagtttctagatggatataaccaggtgcatgtccgaggcacagaggggggtatttataacccatggtaacattaaatgcagtgccttcttcatgcaacagtcatctgtagctctaggcatccacacacttttgttagtgtagatttctgcaggagcatcaatccaggtgagaggtcgaataagtggaggaaaaggcacataagcccagtaagaataattatgtgtagcaggtaaatcagtgtaagaggaaactggtgagacagaaagtataagggggagaatcattaaataaaacctattgtaagcragattgagtgttgaaggagaaagagaacagagggatgttattttcaggctaatagaaatggtcagattttttaggtttgtaaggagaaagagaaaggtaatcgggagaagtgggattagttagatgggtctccattgccatcagggaggattgatcagacccattgtgatttggtgtgcctgcttctgaggagttggcacagattttacc

SEQ ID NO: 112900 - DNA, 547 bp, Homo sapiens
ctggggagggaggaactagcgggaacactggaatcaccctgagacatttggaagggaaaatgacatctggaagatgacagaatcagtttcgtccctgcacggtcactctttcactggctcatggggtattcaaatgataggaaaaattagaatggttcttacgtttgttcaaatgctgtggcagcatcttaatcccagagggctttgtgcaggaagtcatccaccctccccctggtacacagtcaggaaagcttcattccactccccagcctctgacccagagtaattcttcccagacccgtttttccccaagagcttatcaagagagattctgtctccaacaaagtccatgtaaacagagtgatcctagtggtcattaaaccctagccaggagccaggccaagatctcatttaatccataaatagggataccatcttttttctacagatgaggaaatgtaggctcagagaggttgagtgacttgcccaggccacacagccagkaagtggtaaagtgggctgtgaactaggactgcctgacatgaaa

SEQ ID NO: 112901 - DNA, 530 bp, Homo sapiens
cccggtaacgtagccaatgccacataggtgtatgacctcttccctatcttttgaggtaggtgtgagactacggtgctcagaaaagtggaasgactttgggcaacttgggaacaacttgcccaaagtcacacacttgatcagaggcagaggtaggatatggaaccggatcaagtccaaccgtggactttccaccctgctgcgccgtctcaagtttgtccctgattggttctgaatccctggcgcccattctcatcccgcccatccgaagataaaacaatcttcctcccgcgccccgctgcttcccgggagctcccaggaactctagagaaaacaggaaaactgaaaagtgcgctctgcctgctgtgccaggcatgtccctcagggggagccaacaaggctttatttcgtcccggcagctggcccctgggcacggcccccagcccggcgtcccagttccagccgcgctgcaggggcgcgagggtgcccggctcgcaggtgtccgcgcgcaccgcagggctgcccgagtgcgg

SEQ ID NO: 112902 - DNA, 530 bp, Homo sapiens
cccggtaacgtagccaatgccacataggtgtatgacctcttccctatcttttgaggtaggtgtgagactacggtgctcagaaaagtggaacgactttgggcaacttgggaacaacttgcccaaagtcacacacttgatcagaggcagaggtaggatatggaaccggatcaagtccaaccrtggactttccaccctgctgcgccgtctcaagtttgtccctgattggttctgaatccctggcgcccattctcatcccgcccatccgaagataaaacaatcttcctcccgcgccccgctgcttcccgggagctcccaggaactctagagaaaacaggaaaactgaaaagtgcgctctgcctgctgtgccaggcatgtccctcagggggagccaacaaggctttatttcgtcccggcagctggcccctgggcacggcccccagcccggcgtcccagttccagccgcgctgcaggggcgcgagggtgcccggctcgcaggtgtccgcgcgcaccgcagggctgcccgagtgcgg

SEQ ID NO: 112903 - DNA, 530 bp, Homo sapiens
cccggtaacgtagccaatgccacataggtgtatgacctcttccctatcttttgaggtaggtgtgagactacggtgctcagaaaagtggaacgactttgggcaacttgggaacaacttgcccaaagtcacacacttgatcagaggcagaggtaggatatggaaccggatcaagtccaaccgtggactttccaccctgctgcgccgtctcaagtttgtccctgattggttctgaatccctggcgcccattctcatcccgcccatccgaagataaaacaatcttcctcccgcgccccgctgcttcccgggagctcccaggaactctagagaaaacaggaaaactgaaaagtgcgctctgcctgctgtgccaggcatgtccctcagggggagccaacaaggctttatttcgtcccggcagctggcccctgggcacggcccccagcccggcgtcccagttccagcsgcgctgcaggggcgcgagggtgcccggctcgcaggtgtccgcgcgcaccgcagggctgcccgagtgcgg

SEQ ID NO: 112904 - DNA, 603 bp, Homo sapiens
ttgttttattttgaaagacttatgagtagaatatcatactcattttagtgagtatggcctgaaaagatcacaatcaaagtagcctatatttccccttgtctgtaattcctctagctaaaccagggagccaattttaacagcttgatagttctgcttctgataacaaatgggggrggaaatggcactgtgatttatatattccagccctatgtaagtgaattagtgtgagttagccttcttaagtcaagaagcactttctgagtggatgtctgaaggcagaccctacctagacaattggtggtatcaccaaagcaaaggctcccgaagaccctccaatcttgatgcctagtttccactcaaacaggacctcttattgtacaatggcagggagaaccatttcatgattctctgtgtaaaagggactttgaatacttaccttgtaactggtgccccgtgaagttaccacaaatgggtgttaacagttgtaatccttttgttttaggaaggtggaagtgataatttaggtcctgaaagattttgattttagctaaaagaatactgggctgtgtatgggagaacagtttttaacaaactgtgcaaccg

SEQ ID NO: 112905 - DNA, 608 bp, Homo sapiens
ttccaacgcaggtttgtctggcgtggaaacctatgatcttactgctgtgcggtgtggcctgtgtgcatctggctgtctgcttatggcaaggcagcctcaggcactcattggaagctttctgctgttctacataagcatctcctctttctgaaccctgaagttctcagcactcagggccagttgctcagctgtcctgtctcatgctcctacttggaatgggcttcctagcaggcctatgttccctaataggagtttgctgggggtttctgtcacctgaaggtactgaccggttaggcgttgtctaattctgtgtgaggagaggcagctccccactgtactggacagaatggcagagaggagtttgaggaaataagacacatttctaagtttctaagggagrgctgccagctggttaaacctgtctccggtaactagctttctctgtggaggcagtggggtggtagtagtaattaggagtagagaggagggagttaggaagcaagaaagaggaaatggaaggcttgaggcctggggacacttcctctttatctagccatcactgaagggtctctgcctcggcctccaacttccaccccttgtgtgtttac

SEQ ID NO: 112906 - DNA, 608 bp, Homo sapiens
ttccaacgcaggtttgtctggcgtggaaacctatgatcttactgctgtgcggtgtggcctgtgtgcatctggctgtctgcttatggcaaggcagcctcaggcactcattggaagctttctgctgttctacataagcatctcctctttctgaaccctgaagttctcagcactcagggccagttgctcagctgtcctgtctcatgctcctacttggaatgggcttcctagcaggcctatgttccctaataggagtttgctgggggtttctgtcacctgaaggtactgaccggttaggcgttgtctaattctgtgtgaggagaggcagctccccactgtactggacagaatggcagagaggagtttgaggaaataagacacatttctaagtttctaagggagagctgccagctggttaaacctgtctccggtaactagctttctctgtggaggcagtggggtggtagtagtaattaggagtagagaggagggrgttaggaagcaagaaagaggaaatggaaggcttgaggcctggggacacttcctctttatctagccatcactgaagggtctctgcctcggcctccaacttccaccccttgtgtgtttac

SEQ ID NO: 112907 - DNA, 639 bp, Homo sapiens
ccctttggctgtctctctcacttacatatgatgttcatatacagccagaaggtagctggtgcggcacaccaggcacacaaatccatttacacagggcactggacttccaagctttccatccctgaaaatggcttcacaggactggctgcccacatcaaaaaatacctgtaaattcagcccaattctgtgtgattgctagttgtctgttttagagaggcacacactaaaaaaaagcagtatgaagcatggcctttttcagacaacgaagaacactatcatattggaataaattgaagcattgttggagagatggaaaaatcacaatttacagctctctatagggatgaggaaaaggattttccccataaaagaaacctattttcagtggccaatcgggctgaaagtagacagatagtttctattttgcttaaatgtgcatttttctrtaataaaaatggttggtaatgcaaaataaatggtgtttactttcctatcttgtcacagtaagttgcttggctgagtgttaaggctttttaaatgtccaatttccctctgtaacccctaagacccattaagtttgtcaagctggcataatgttttgactattgcaagccaaacacttgcactactttgaaatcc

SEQ ID NO: 112908 - DNA, 470 bp, Homo sapiens
tggattctaaagttgcttaactttagaaacaaactactgtttgctgtygatattaaaaacactaaatctgctaatcattggtcatactcaaataagagttcttagtcccaaattttaaaaactggtgaatctaatatacagttatgcatttgaggttaatgtcaactgtatacatacattttagggttctttgcttcacttgaggttttgtctaaatgatcaagtctaaactgaacatatagatcaaggttccttctgaatggtcttgattgctttagatctcttcatatatgatgattaagctttttgaaggagataccatactctataacccacagttttgcacagtgaagttgtaataaatatttactggttatatttatatatacattttattgaatgttgctaattgattagccaattacacttagtagttcatcatctcgttttattactgtgagccaaattat

SEQ ID NO: 112909 - DNA, 586 bp, Homo sapiens
ccatctgaatagaaccaacactacttcagcagtcatgatatagatgagaaaaaaaaaattaacaaaaattatgccaaaggctttgttttaaaccatgaaatagatgtcaggtggatgtctcccagcagaggacaagaggaactctggaggcctcatattgtaatattcaagaagatgccaacaatgggttgagttgaagattcaagagagaaactcaaattcatcatttaacagtctcagctggagagcaaccctttcggtttaaaataaactaatgaaatccctraggacaaatatcactatgatatgcacaaaaacagcacattaatgcaacaaaatgatctatacagccagttcaatgcactgaaccaaattcaatataattatattttaaaactgggactcgattacatttagaccttctagtgaggtaagaaaaggagatgaaggaaagaatgagaaggcaaccttcatacaacttttggaaaaatgactctccatctacaaatcttctccattcctaagatgcaggaagaactaaaattatactaatccttacatttctagtaataagtttcaaactgca

SEQ ID NO: 112910 - DNA, 599 bp, Homo sapiens
gccccatgtgagtcccggaggcagaaggtgcttccgtgaactgtgaatgtgtctcctcttctaaaagtcacgtgtgattttatgggaagccacagagggtgctgccatggcaccgatcaccccaacacagatgagaagaccgaggtcagagaggacctggcyccacagagaggcagctggctgtgagtcagatgcaggccaggcagagggtgggaaagaccaggaagcaggaggagccctggaggcagaacaggccggcccctccccagacacagatccctccactcaggaaccgtgggccccccagacacagatccctccactccggaaccgtgggccccccagacacagatccctgcactcaggaaccgtggccccccagacacagatccctccactcaggaaccgtgggccccccagacacagatccctccactcaggaaccgtgggcccctccccagacacagatccctccactcaggaaccgtgggccccccagacacagatccctccactcaggaaccgtgggcccctccccagacacagatccctccactcaggaaccgtggccccccagacacagctccctcccctgtgcc

SEQ ID NO: 112911 - DNA, 450 bp, Homo sapiens
agactgggaaacttctcttcttttatttatttatttgtatttacaaattttttgatttaaattttctctttttcttgtgttttttttttttgaggtggagccttgctttcttgcccaggctggagtgcagtggtgcggtcttgttcactgcagcctgtgctcctgggttcaagcgattctcctgcctcagcctcccaagtagctgggattacaggtgtgtaccaccacacctagctaatttttatatttttagtagaaaaggggttttgccatgttggccctgctggcctcgaactcctgacctcaagtgatctgcctgccccagcctcccaaagtgctgggattacaggcttgagccaccgtgcccagccaaaaatttttgttaaaacatcaccttgtcttcaraagaaacttttctgcgaaatcaggttaccattagtgtagggttat

SEQ ID NO: 112912 - DNA, 505 bp, Homo sapiens
ctctctctctctctctggttccttatatcctgattgttcatgagaggccccataggacatgtgagaacaccccctttttttttttgagacagtctcactctgtcgcccaggctggagggcaatggcacaatctcggctcactgcaacctccaccttccaggttcaagcaattcttatgcctcagcctccggagtagctgggattataggcgtgtgccaccacgtccagctaattttttgtattagaaacctttttttttttttttttttyctgataaaccagcagaaaggcattagtcctggtaactaatcaagtcaggaattgccgagaggagggagaaggggaggtgcagggccaaggctgggactattaacacatttggatttttggaggaatagtttattactcctcctcctccagctccttctatattcaagggttttcaagcgggaaaagttgaggtcttggccttgggtgactttcatagccacatgaccttagcaat

SEQ ID NO: 112913 - DNA, 631 bp, Homo sapiens
atgttctttggcattatcttcatatctgccatccttagcacaggctacaacacaaaatgttcgttacatgttggttcaatggaagactaaataaacaaatcaatgagagaaggactgaatttcctttcaaaactccagatctagggttatggtcaaagtagaagacagtcacatttcacatttactgagataatcactctcatctttcaagaatccaygaataccattctttccctgtttgttgctagtatttaaccagatttcaagaccttctgaagacactaaaaaagtcctctttcttctttaacctttatatcactccagtccattgtcctcactgaagccagagttaattttctaaagcacactcacattgacttcctcacctgctttccatgggtcatggtactcaggataaaggtaaggctcttaacaaggccttcaaggtcctacacaatctctattctgcttatctccagtcttacttgtaagttttattacttacaagtaataaataataatagtttgattctagtctaacatgaactactgactattctttgaatgatcagtcttgcctttggcctttgctcacgctgttcccttggtctgaaatgaccaccatgtccca

SEQ ID NO: 112914 - DNA, 591 bp, Homo sapiens
cattctagttgacagatattctcttttaagtcttttgctkttataatgctaatggtccttttttacatgggaacatgtaatgcaagtttgacttaatttgtttccatatttttggcatataggaggaggatgggattacagtcatgcatttatttttaaaagttgaaaatactaatcttagaagtcaaataacttctggaataaagttgtgttctaaatgctttaatctcttcgagggtctgaaacgttattcctttaattgatcttgacctgagctgaggttgtaaattatgcccagtaattaagagacatttaataaataaaatatgtattctagtgtttcctttggaatagcaattcctaaatattctaagttgggtactaaaaattgacacctattttctcctctgctcacataataggataaaaaaggaagttgagtaaagacaggatttgacccgaagtccactgaccacaatttaaagagactagggaaaatactgttttaagtgcataatattcttctatcttagacaatttaatagctgatgacaatattgcatggaaaactcatcagcagaagtttctggc

SEQ ID NO: 112915 - DNA, 591 bp, Homo sapiens
cattctagttgacagatattctcttttaagtcttttgcttttataatgctaatggtccttttttacatgggaacatgtaatgcaagtttgacttaatttgtttccatatttttggcatataggaggaggatgggattacagtcatgcatttatttttaaaagttgaaaatactaatcttagaagtcaaataacttctggaataaagttgtgttctaaatgctttaatctcttcgagggtctgaaacgttattcctttaattgatcttgacctgagctgaggttgtaaattatgcccagtaattaagagacatttaataaataaaatatgtattctagtgtttcctttggaatagcaattcctaaatattctaagttgggtactaaaaattgacacctattttctcctctgctcacataataggataaaaaaggaagttgagkaaagacaggatttgacccgaagtccactgaccacaatttaaagagactagggaaaatactgttttaagtgcataatattcttctatcttagacaatttaatagctgatgacaatattgcatggaaaactcatcagcagaagtttctggc

SEQ ID NO: 112916 - DNA, 565 bp, Homo sapiens
tttttgttactgaagcgctattgttgaactgtcagataaaattttacaaacacatttccttaccaaagagtgcaatattatccttgtctcatatccccaaaggttgagccaaatattgacttgtttgtttttatttcaactcatagagtaagcatcagatgtattcttgactttctttcttttcttctcctacccccgtaagttttcgtctccttaaaagtctgagtactttttaaaacattttttaattaattatttttttaccagttatgagaaagaaacatttgtggctttatcccagagagaagtgatgggcccttactgttttcagagttaagcaataaaaactgcatctaaaataatagacaccttgtctcattatagttctgatatattgtcatgataraaaaacaaagtgaggaggttttttttaaggattcacttacgtttataaatatggacaaacataatttatgagaaaattcaagaaacataaactatgataaaatggtaatcttttcttttattaaaacttagcctaatctgaatttcacattgtactgat

SEQ ID NO: 112917 - DNA, 669 bp, Homo sapiens
atattaaaatacattttactatcttatctctactttgttagagttttcacttgtttcaagattttgtaattaaactcttatcagagtccctgtctgcagggtaaccattgtactaaatttgtgtttatcattctaaagtattttgaatrctgttaactttatataatcctgtatgtagcattaatctccttttcttcctgcacagaattatattggatatttatccatgttgatatattttattcatttttactgattaacagtatttctattttataaatatacaacagttcaattacaaatttactgttggagaacatagaagtttcacatcttttatctctattaatgctgtttcctaaacttcagtctttatgatattaatattgtctccatagctctatttatttaatgtttgtatggatattgtcttttccagctctttaattttattgccttgtgtaatttgaaatattatgtctcttagaaacataatatagttgaattctttaaaaatctaatcagaaaatttctggctctaattcatgatactataattatatttataattatttgtatattttgatttaacacatatactaaggatgcctgttgatcattctttgttcttcactttttttctcctatatcatttgttgatttaaaaat

SEQ ID NO: 112918 - DNA, 669 bp, Homo sapiens
atattaaaatacattttactatcttatctctactttgttagagttttcacttgtttcaagattttgtaattaaactcttatcagagtccctgtctgcagggtaaccattgtactaaatttgtgtttatcattctaaagtattttgaatgctgttaactttatataatcctgtatgtagcattaatctccttttcttcctgcacagaattatattggatatttatccatgttgatatattttattcatttttactgattaayagtatttctattttataaatatacaacagttcaattacaaatttactgttggagaacatagaagtttcacatcttttatctctattaatgctgtttcctaaacttcagtctttatgatattaatattgtctccatagctctatttatttaatgtttgtatggatattgtcttttccagctctttaattttattgccttgtgtaatttgaaatattatgtctcttagaaacataatatagttgaattctttaaaaatctaatcagaaaatttctggctctaattcatgatactataattatatttataattatttgtatattttgatttaacacatatactaaggatgcctgttgatcattctttgttcttcactttttttctcctatatcatttgttgatttaaaaat

SEQ ID NO: 112919 - DNA, 669 bp, Homo sapiens
atattaaaatacattttactatcttatctctactttgttagagttttcacttgtttcaagattttgtaattaaactcttatcagagtccctgtctgcagggtaaccattgtactaaatttgtgtttatcattctaaagtattttgaatgctgttaactttatataatcctgtatgtagcattaatctccttttcttcctgcacagaattatattggatatttatccatgttgatatattttattcatttttactgattaacagtatttctattttataaatatacaacagttcaattacaaatttactgttggagaacatagaagtttcacatcttttatctctattaatgctgtttyctaaacttcagtctttatgatattaatattgtctccatagctctatttatttaatgtttgtatggatattgtcttttccagctctttaattttattgccttgtgtaatttgaaatattatgtctcttagaaacataatatagttgaattctttaaaaatctaatcagaaaatttctggctctaattcatgatactataattatatttataattatttgtatattttgatttaacacatatactaaggatgcctgttgatcattctttgttcttcactttttttctcctatatcatttgttgatttaaaaat

SEQ ID NO: 112920 - DNA, 597 bp, Homo sapiens
ttttggccttgttcctctgagaacaaaaacatgtaataagagatacctgctttcatcttttgcaatgaatagaatactctcctacttagaaacaggctttttctccttgccactttattttttccttacctatgaattgcatgtgcctttgatgaaaacaatgaactggacatgtacaacggtacatgtaatagactgaatgcaacttagaagtggccactcttccagtgtacataggcttggaaatgaactaatccaaacctgataatttgtttatagtacctcctttcacttttgtttattggtatctacagtctctcattctttttctttaataatatctctttatatagaattttatattcagccatgactctattatttcaatagtcacattaccacttcgaggattgataccatgaaaaaaggttatctagtagttttgagtgaagatacgaggcacaccttcaataccaataagaaggtatactacaaaggtctaatgaagaaaaatayctcattttgaaggtagcacatagctttcaactgactgggcctgttatggtctttgctgtgtttgttatcacagtatctaat

SEQ ID NO: 112921 - DNA, 607 bp, Homo sapiens
catgtgtgagcatggcaagagggcagccatctacaagccaagaagagaggcctcgctggacacctcccctgatagcaccttgatcttggacttctaacmtgcagaactgtgagaaaataaaagtctgctgtttaagccatgactctatggtgctttgttatgagggatggcctgagcagattaaggtacttaccatctacaggagactcatggcctcatctctgcttatcacatcattgtgttgatttccttcatctcatttatcataattaataatggttttaatttatttacttatgtgtttattttctgtcttccttcctagagcataaactccgttaagatcattctgaatgtttcgtaaattgtctatgggaggagagaggaagtaaggacattacgaagccatggtagttcaaggaagagaaaatggcagcttgcaataaggtgtccatgggagaggaacatggatgaattgagacctgtttgggtggtatgaaccaaaaggacttgctggtgatgtgatcttggaggcagcggtgaaggaaagagaataatctataataacaccaaagtctgggacttgaggaggtagagaatggtgggg

SEQ ID NO: 112922 - DNA, 607 bp, Homo sapiens
catgtgtgagcatggcaagagggcagccatctacaagccaagaagagaggcctcgctggacacctcccctgatagcaccttgatcttggacttctaacctgcagaactgtgagaaaataaaagtctgctgtttaagccatgactctatggtgctttgttatgagggatggcctgagcagattaaggtacttaccatctacaggagactcatggcctcatctctgcttatcacatcattgtgttgatttccttcatctcatttatcataattaataatggttttaatttatttacttatgtgtttattttctgtcttccttcctagagcataaactccgttaagatcattctgaatgtttcgtaaattgtctatgggaggagagaggaagtaaggacattacgargccatggtagttcaaggaagagaaaatggcagcttgcaataaggtgtccatgggagaggaacatggatgaattgagacctgtttgggtggtatgaaccaaaaggacttgctggtgatgtgatcttggaggcagcggtgaaggaaagagaataatctataataacaccaaagtctgggacttgaggaggtagagaatggtgggg

SEQ ID NO: 112923 - DNA, 562 bp, Homo sapiens
tttaaatcatttaaaattttaaaaagttcctactagaaacaatcataaaatcacagaatatttgagcagcccaggattttaggactcacttcctagccttattttacaaaaaaagaaactcagaggttaagtaatttgccataggtcatcctgctagttagtagcagatyttggtgttttgaggaatcaatattactaccttatttttactgtacctcttctatatttagctatgtttagatgcacaaatacttctgtgttgttacaattgcctacagtattcagtgcagtaacatgctgtacaaataacatactgtatgcagtacagtagcaggtttgtagcctaagaacaataggctataccgtaagggacagacttaggagtcagagagataaagtgttaactttcctggtgatgagaataattagagaaaaagaaatcttaggcatgacaccaaatgggcatactaatattcattcctgatttaggaatcttacttacccagtcattaggtaggcaacttcaggtgtctctttctagataaaaacccctattacctca

SEQ ID NO: 112924 - DNA, 498 bp, Homo sapiens
tatggatctcctgcacagggcttgagctctgctaagggacagactgcctcctcaagtgggtccctgatccccatgcctcctgattaggagacacctccctgcaggggtcgacagacacctcatataggagagttccaactggcattaggcgggtgcccctctgggacgaagcttccagaggaagaaacaggcagcaatctttgctgttctgcagcctccactggtgatayctaggcaaacagggtctggagtggacctccagcaaactccagcagacctgcagaagagaggcctgttagatgtaaaactaacaaaaagaaagcaataacatcaacatcaacaaaaaggactcccacagaaaaaccccatccaaaggtcatcagcatcaaagatcaagggtagataaatctatgaagatgaggaaaaaccaatgcaaaaatgctgaaaattccaaaagccagaatacctcttctcctccatatgattggaactcctctc

SEQ ID NO: 112925 - DNA, 498 bp, Homo sapiens
tatggatctcctgcacagggcttgagctctgctaagggacagactgcctcctcaagtgggtccctgatccccatgcctcctgattaggagacacctccctgcaggggtcgacagacacctcatataggagagttccaactggcattaggcgggtgcccctctgggacgaagcttccagaggaagaaacaggcagcaatctttgctgttctgcagcctccactggtgatatctaggcaaacagggtctggagtggacctccagcaaactccagcagacctgcagaagagaggcctgttagatgtaaaactaacaaamagaaagcaataacatcaacatcaacaaaaaggactcccacagaaaaaccccatccaaaggtcatcagcatcaaagatcaagggtagataaatctatgaagatgaggaaaaaccaatgcaaaaatgctgaaaattccaaaagccagaatacctcttctcctccatatgattggaactcctctc

SEQ ID NO: 112926 - DNA, 498 bp, Homo sapiens
tatggatctcctgcacagggcttgagctctgctaagggacagactgcctcctcaagtgggtccctgatccccatgcctcctgattaggagacacctccctgcaggggtcgacagacacctcatataggagagttccaactggcattaggcgggtgcccctctgggacgaagcttccagaggaagaaacaggcagcaatctttgctgttctgcagcctccactggtgatatctaggcaaacagggtctggagtggacctccagcaaactccagcagacctgcagaagagaggcctgttagatgtaaaactaacaaaaagaaagcaataacatcaacatcaacaaaaaggactcccacagaaaaaccccatccaaaggtcatcrgcatcaaagatcaagggtagataaatctatgaagatgaggaaaaaccaatgcaaaaatgctgaaaattccaaaagccagaatacctcttctcctccatatgattggaactcctctc

SEQ ID NO: 112927 - DNA, 551 bp, Homo sapiens
gctagtcagtgcaacactggtgaccaacaggattcacatagagtttttccaaataacagagcaagtgaaaattcatcttcccatctccatgcaataagtgagagaaaacatgagagatgaacaaaagtttttgtaaggttcatttgtraggagagaacacagattatccctggagatcaattgatgagaagaaaggcagtgattcacttagacggaggcacaaaatagaaagaacagggccatgtattttcttggcaaatgggggtttttcattcttttggggtatattttcagtttggataagttgtatttttccaacttacagctccaaggtgataaggcaacagcctttgaacctattgaaacaaacatttcattattaaagaaagactattagcccttttaagtaaaagttttgggcaaaataagatccattttatgatgacaccatatattatagaataagtatcctttttttttttttttttgatacagagttttgctctgtcacccaggctggagtgcagtggcgcgatctcggctcactgcaa

SEQ ID NO: 112928 - DNA, 581 bp, Homo sapiens
gctgggcatggtggtgcacacttgtaatcccacccacttgggaagttgaggcaaaaaaatcacttgaaccccaaaggtcaaggttgcagtgagttaaaattgtgccactgcactccagcttgggtaacaragggagactttgtttcaaaaaaaaaaaaaaaaaaaaaaaaaagaaatgctcagggtccacctttggggcagccacgacttcccagggtgccagcttgcagtgtcatgctccccacctacaggctcacaaaaatcctgtgatgggctggactgtgttcccaaagtcctaacccgtttctcagagtgtggtcttgtttggagatacggtctttacagaggtaatcaagttgcaatgaggtcattagggtagaccctaatcctacacgacacgcatccttatgaaaggggaatatgtggacacaagcacagagggaagacagagtgaaaacacagggagaggctgggtgtggtggctcactccagtaatcccagcactttgggaggccaaggcaggaggatctcttgaagccaggagtttgagaccagcctgggctacacagggagaccttgac

SEQ ID NO: 112929 - DNA, 510 bp, Homo sapiens
tgttctttttttagaaagagcaaagcagagggatttggcagggctattcaaactgccactcagagcagctctagagaaggaaggctagcctggaccctattgcgttctagttggcagcaaatccttcattcaaggtctttctgtggaaaggcaatgctggcttgtcccctcacccacactgacgtctgtcctgtgtgtcagagataactttccagccatgaaatggcagctactattaattttacgaaggcttctaaaacagcttttctttaatctgttcttttgccccaagtgagattttttccctctttgttgtttacaataatgcagtcagtgaaaagaagccaagcttctgatttaggtgtggtgggataaatttgttcaaaatatktttaaaaaattgagtcttttgtgccctttgtggacaaggcaaactataatagggagaacttccttctgaagctcttttccacccctttcagccttgcttatttttatcatgtctcatca

SEQ ID NO: 112930 - DNA, 529 bp, Homo sapiens
gaagctggaaccatagggactaatttggtgtgaaaggatggagagtatcagacgtaaaattatacaaattagatggagaagacccaagaattaacaaaggtgtttctaaggctgtgggagaaatttgggcttgtaggaatctctggcaaagggaaaattattaaaaaacttacctttctagtagagatagtactaaagggaaatagtgaaggacgattaaatgtaaaatgaatccagaagattttgatttctgaaggatgcacatacttcagcctagcacatctcgaaatctagtacatggagatwctgttggagggcttgttaaagcaggtagacagtcctgggctcaactctggaaattcttactcactgagtcttggatgggacctcgtattctgcatttctaatgagatccaggtgttgctcataacagttgactcacagaaggtatgttgagtagtactgtttcagcatttaaattcaccacttactgattgagtgagtaaataagtggtaggtcttcagaaga

SEQ ID NO: 112931 - DNA, 542 bp, Homo sapiens
ctgcatttctaatgagatccaggtgttgctcataacagttgactcacagaaggtatgttgagtagtactstttcagcatttaaattcaccacttactgattgagtgagtaaataagtggtaggtcttcagaagatctgatcacctagaagaagatgaatattattatacccaacatatagaatatcaccttctcttctcacagtcacccccatcatacaaacaaaaaggttggcatgcagtagcatttcatttgttcattcagctacagataaatatctctgccagacaaaacattattttgatacaatttgttcccttaaaaatgaaaataaaagtcaatcaaccattatttcaaagtattgtcatgatcatattaaatagttagaaacctaagccagtatggtggttcatgcttgtaatctggcattttgggaggctgaggtaggtagatggtttgagttcaagagttcgagaccagcctgggcaacatggcaacataccatctctacaaaaaaatacaaaaattagctgggcactgtgg

SEQ ID NO: 112932 - DNA, 566 bp, Homo sapiens
ataaagaccacttatgaaaaacccacagttaacatcttactgaaaaagcactggaatgagccaaggatgcccactgtcatcattcttattcaacatattactggaagtctagccagaacagtaaggcaaaataaagaaatcaaataattcatattgttaaactgataatactacccaaaccaatctattcattccatttaactcctatgaaaacacctatgtcatttttcacagaaatgggaagaaatctaaaatttgtgtggaaccacaaaataccctgaatagccaaggcaatgctgaacaaaaakaccaaagctggaggtaccacatttctcaacatcaaactatactacaaggctacaataaccaaaacagcatggtatcgttacaaaaacagacacatagattaaagaaccccgaaataaagccacatacctataaccatctgatgtttgacaaagttaacaataacaagaaataacaataacaagaagaaaagactcctattcaataaatggtgctgagataaatggctagccatatatgcagaagattaaaactggaca

SEQ ID NO: 112933 - DNA, 566 bp, Homo sapiens
ataaagaccacttatgaaaaacccacagttaacatcttactgaaaaagcactggaatgagccaaggatgcccactgtcatcattcttattcaacatattactggaagtctagccagaacagtaaggcaaaataaagaaatcaaataattcatattgttaaactgataatactacccaaaccaatctattcattccatttaactcctatgaaaacacctatgtcatttttcacagaaatgggaagaaatctaaaatttgtgtggaaccacaaaataccctgaatagccaaggcaatgctgaacaaaaataccaaagctggaggtaccacatttctcaacatcaaactatactacaaggctacaataaccaaaacagcatggtatcgttacaaaaacagacacatagattaaagaacccmgaaataaagccacatacctataaccatctgatgtttgacaaagttaacaataacaagaaataacaataacaagaagaaaagactcctattcaataaatggtgctgagataaatggctagccatatatgcagaagattaaaactggaca

SEQ ID NO: 112934 - DNA, 620 bp, Homo sapiens
ccttcctttgtgttcttcccatagattttagtaggtaagtttggtacatgaatctcattaagacagcagttcccaaccattttggcagcagggaccgatttcatggaagacaatttttccacagatttgcaggggaggcagtttcaggacaaactgttcgacctcagatcatcaggcactagattctcataaggagcatgcaacctagatgccttgcacacacagtttacratagggttcgtgctcctatgagaatcgaatgccaccgctgatctgacaggaggcaaagctcaggcagtaatgctggctcgccctctgctctcctcctgctgtacagcccagttcccaacaggccaaggatctgtatgggtccatggcccagggtttaaggacccctatattaagaagtcactgtattcaaaattattgaataacaaagacagtatggcccctatcttcaaaaacttaaccatctggttgatgaactaaggaactccgtaactatttatgaaatgaaggcattcactactctggcatgattaaaaacaaatttaaaaaaacttttaaatgcaatgtcagcatttacagggtaagagactgaacattaacagtcagatttt

SEQ ID NO: 112935 - DNA, 620 bp, Homo sapiens
ccttcctttgtgttcttcccatagattttagtaggtaagtttggtacatgaatctcattaagacagcagttcccaaccattttggcagcagggaccgatttcatggaagacaatttttccacagatttgcaggggaggcagtttcaggacaaactgttcgacctcagatcatcaggcactagattctcataaggagcatgcaacctagatgccttgcacacacagtttacgatagggttcgtgctcctatgagaatcgaatgccaccgctgatctgacaggaggcaaagctcaggcagtaatgctggctcgccctctgctctcctcctgctgtacagcccagttcccaacaggccaaggatctgtatgggtccatggcccagggtttaaggacccctatattaagaagtcactgtattcaaaattattgaataacaaagacagtatggcccctatcttcaaaaacttaaccatctggttgatgaactaaggaactccrtaactatttatgaaatgaaggcattcactactctggcatgattaaaaacaaatttaaaaaaacttttaaatgcaatgtcagcatttacagggtaagagactgaacattaacagtcagatttt

SEQ ID NO: 112936 - DNA, 617 bp, Homo sapiens
atcaatacaagtatttgtgagaagaaagtgaggctctggactacaaataattagtggaatcattgcttagtaaagtccaatttcttaacaataatggttgaaattaataatatggagtaagcaattaaaatgtccaattatgaactacatctgaaactttacttgcaaaagattaacaacaaatgaaatwgtgattctaggtttttattattactctttgcttatcatttttttctttttaaaaaatacacaatcaaagaattatggaaagttaaagctgaaattgtactaagatatcaaatccaatgtgttcattctagaggcaaacacactgaaacttcacctatgtttactttagttctgcaaatgtcaaatctgatttcagacactcttcaaatatatgtttatttgctctttgaatatgcataattctgtttcaaacttacattgcacatatctttgatcaatgtacagtgtttagtaatttgtttaatcctaaaggtgatcttcaaatatttccatttcccttgttaaataagggcatgaattacatacggggaaatagagggacagaatgagtaagtgactgtccttgaagataggtaaatgctaactaa

SEQ ID NO: 112937 - DNA, 619 bp, Homo sapiens
agctacaagcagttgtcaaatgctgtgaagtctctgaagaatgctgacacaggcctctgtccagggccctgtcaacacttagtgtcaagcagatgaagactgatttttaattattcatagaatctttggtgaataaatgtgtgcgtgtgtgtgtgtgtgtgtgtttgtgtgtgtgtgtgtgtgtgcatttgtagtattttgagtttggatttctgatraaatcttatgttagattaactctggataaaatggagagttctctatccctgatatggttgaagagatgcttagcatggtttagtgcaaatgagagactttggagactagcaaagactgggtggaagtgcacatcacgtcttatctttatagaccacttattacctttatctttttcacatctgctttgtgatcatgggcaaattgcttaatcatagaaagccagtttcctgatttctatgaatcagtattgaaagagctcccactttgcagatttcttataaaggctaaatgagaggagatgtgggtgacgaagtgaaaagcaatccatggcctcatgcaaggcccttgatttccatacaaggaaactgcagttgatttcttaacaaggcgtaaacccagg

SEQ ID NO: 112938 - DNA, 619 bp, Homo sapiens
agctacaagcagttgtcaaatgctgtgaagtctctgaagaatgctgacacaggcctctgtccagggccctgtcaacacttagtgtcaagcagatgaagactgatttttaattattcatagaatctttggtgaataaatgtgtgcgtgtgtgtgtgtgtgtgtgtttgtgtgtgtgtgtgtgtgtgcatttgtagtattttgagtttggatttctgataaaatcttatgttagattaactctggataaaatggagagttctctatccctgatatggttgaagagatgcttagcatggtttagtgcaaatgagagactttggagactagcaaagactgggtggaagtgcacatcacgtcttatctttatagaccacttattacctttatctttttcacatctgctttgtgatcatgggcaaattgcttaatcatagaaagccagtttcctgatttctatgaatcagtattgaaagagctcccactttgcagrtttcttataaaggctaaatgagaggagatgtgggtgacgaagtgaaaagcaatccatggcctcatgcaaggcccttgatttccatacaaggaaactgcagttgatttcttaacaaggcgtaaacccagg

SEQ ID NO: 112939 - DNA, 629 bp, Homo sapiens
acacaatggaatactatgcagccatataaaggaattagatcatgtcctttgcagggacatggatggagctggaagccattatcttcagcaaactaattcaggaacagaaaaccaaacaccacatattctcacttataactgggagctgattgatgagaacacctggatacatggtgggaaacaacacacactgaggcttgtcagcagggggcagaggggagggacagtatcaggaagaatatctaatggctgctgggcttaatacctaggtgatgggatgatctgtgcagcaaatcaccatggcacacatttacctatgtaacaaacctgcacatcctgaacttaaaagtggaagaatacatacacacacacacacacacacacacagaatggcaggcaccgccgctgcagggatgcagactcatttctactgcttttactactggtttcctgaacctgggaagtgaataaagagggtctcagagaaaatgaaatgtaatagaatatgctagatgcatgtcctttttttyttaacctcccatttcctccttatgtgtgataattgaaggaatgaaaaaaacatcctaacttgagctgaaaaaaaaaaaatgagggctagctgttgtagc

SEQ ID NO: 112940 - DNA, 636 bp, Homo sapiens
tgaatttagtatttatttatttatttagagcagcctcttctctaaattttttttcctttttagtaatggtttataattttcttcatcaatgtcttgaaaatcttttgttagagttattcctacacacaaatttctttgatattataaatgaaatattttgtattatattttctaattgttattacatgtggaaaaaaggctgttcatttttcttcctgatgtagcatctagaawccttgctaaattattttagttactctattagtttgttggtagattatctaggaattcctacaattatattgtttgcaaattgacacaaactttcctattacttttcctttcttttatattatttgtttctcttggctatggccttatacattgctgaatgtaaacaatgttagttgtatacttctcttacccttttattctaagatattattctaaagtttggtcacattaaaaaaatttagtgtggtttttggtatatgacttttattaagaaaaacaatgtttcttctttttcagttggcttgaagatgttcattatgaaattatttttgtcagatgatttttctacatttgttgaaataattatatattaaaaaacatgttagtctgctgactgataga

SEQ ID NO: 112941 - DNA, 573 bp, Homo sapiens
gatgcttaattacatggttttatgttgctaattgagaaacattcttattagctactgaagcctctatttcaaccatcagttctctagatcttttgcaatcatttcctttaatttgtaagagtgataaaatttctatcttattaatagaaaatatatttgagcaaacagttttatatgccttggttacctctgggggaattaataaaccatgttataagttatcttaaaatctaatggagtggaggacattactcccagttgtaaaggagtaactaagatagacttgtccacccatcataaagaactagaaaaatggactacatatgtgaaacaactgtttttgctaattggarcatatatttcaaagaactatgatccctaagttaagataaataatcaaaatggacaatacaatcactctggctttcttcctgctggtactttacaatccatgctggaagaaagaacccgggcagagcataggagagtcactaagtttgtgaagggaagattggaattcagggacgctcatgtggttggaatctgtaggaaagaaccagagatgaggggact

SEQ ID NO: 112942 - DNA, 577 bp, Homo sapiens
ttctgctctctagaattgttgagataattaattatttttttgagacagtctcactgtgtcaccaggctggagtacagtggcccgtgatctcatctcactgcaacctctacctcccaggttcaactgattctcctgcctcagtctcccaaatagctgggcctacaggctaatttttgtatttttactagagacagggtttcaccatgttggccaggatggtcttgatctcctgacctcataatccgcccgcctcagtctcccaaagtgctggaattacaggcgtgagccaccgctcctggcccamtttgtgttgttatacccaaatttgtggtaatttgctacagcagcaatagaaaaccagtatagataccgtaatataggcttttttgtttgtttcctccttttctgctggtgccaatggtgaagtcatgggcaggatctctcaatgtcagaagaagtataaccataatatttcctgattgaatgtacttcttggaagtttagtaatgaaaattcattgagtttagagattgcatggctctgattcctagcccaacacatttgtgaccttgggcaa

SEQ ID NO: 112943 - DNA, 611 bp, Homo sapiens
attttatcaaataatcagtagtattagcagcagaatagaccaagctgaggaaataatctcaaaacttgaagacttgttctttaagtcaactcagacaaaaataaggaaaaaaatgggaaaaaaaagtgaaacctccaagaatatgggattttgtaaagcgaaaaaatctatgactcattgtcattcctgagagaggagagagaatacgcaacttggaaaatatatttgaagatacasttcatgaaaattcctcttatctctttagggagatttacatacaaatccaagaaacacgcagaaccccagatagatatgacatgaaatgactacctccaaggcacatagtacaatattcatcaaggtcaacactaaagaaaaaagtcttaaaggcagggtaaagtcacatacaaggaacttcatcaggctagcagcagacctctcagcaggtatcttacaagtcagaagagattggtagcttattttcagcatccttaaagaaaataaattttaaccaataatttcatatcccaccaaactaagcttaaaagtgaagtgaagcaaatgctaagggaatatgtttcaactagactagccatacaagaggtccttaa

SEQ ID NO: 112944 - DNA, 664 bp, Homo sapiens
tgcagcataaagtataatgaaatcatgtcccatgcagcaacatagatggacctggaggccatagtcctaagcaaattaatacaggaacaaaaagcaaaactccacatattcccatgtatatgttggagctaaacattaagcacacatgaaaattaacatgggaacaatagatactgcacacaactagacagaaaagggaggaaagtggcacaggttaaaaaactacctactgagtactatgctcactacttgggaccaatatacccatgtaacaatcctacacatgtgtctcctgtatctaaaataaaagagtaatttaaaaaaataggcaaatgactgaaggaagtgagaagacatattctgaaatcctgagagtgaaagttggggaaaggggtggagagagaagcgtgattgatggtggtgatgaggagaggatgataatcaataggttaatgaagagcacacattctaaaggaaatcactcaagaaacgaaggaagatttcatacaaatactcccttatgattgaaaacgaatgatattattacaacaatttaagttggaaaaaaagayatagggtttaaaaagccatgcaatttgaaaaaataaaaagtaaatttgagaagcttacaacaaaagtaaaatattataaccattacggaaat

SEQ ID NO: 112945 - DNA, 600 bp, Homo sapiens
tggaaaaaaagacatagggtttaaaaagccatgcaatttgaaaaaataaaaagtaaatttgagaagcttacaacaaaagtaaaatattataaccattacggaaattaaagtcacatgagtaggctgcctcagarcatatagtacattccattggaaagatggtcctgccataacatatagcatcaagttaaagcaggagaataaaattatatgatcaagtgtggtagtagttttccattgctacataacccatcaccacatacgtagttgcttaaaacaagacaacacaaaacaacacggaaattactatttctgtgggtccagagcccagccctgagttatgtaggtcttctgctaaggagcccatcattctgccattaaggcactggcttcctgtagttctcatccagttgctggcaaagttcagttcattacaggtgtaagactgaggtctctgtgttgttgcaggctgttggccacgccctgtgacaacatggctgcttactcaaaaccagcagaagcatctctctccagtgggctaggaagaagtcttatgtagctttatatactcatgagagtaactatccctcatagtcacag

SEQ ID NO: 112946 - DNA, 552 bp, Homo sapiens
tttgcacctctggaaatcctcatgttctgtttcctctttctgtgaagatctggacaaactgactcacaaccttatttatttttatgacatattttagcctttggtccagattgctggtctgtaaggacctcactgattggaccagattctaaagagttacttatttcattttctgaaagttcatagaatcatatgctttcttctttttattttagagtctctctctttctctctctctccatatatatatatatatayacacacacacatagtcttccaaaactcctcggaagaaagggaagcattctgtaagactttgggcagattttttttttttttttttggacagagtctcactttgttgcccaggctggagggcggtggcaggatgtcggctcactgcaacctccacctctcaggttcaagcaattctccaggatcagcctcccgagtagctaggattacaggcctgtgccaccacactcagctaatttttgtatttttagtagagatgaggtttcgccatgttggccaggctggtctcagactact

SEQ ID NO: 112947 - DNA, 552 bp, Homo sapiens
tttgcacctctggaaatcctcatgttctgtttcctctttctgtgaagatctggacaaactgactcacaaccttatttatttttatgacatattttagcctttggtccagattgctggtctgtaaggacctcactgattggaccagattctaaagagttacttatttcattttctgaaagttcatagaatcatatgctttcttctttttattttagagtctctctctttctctctctctccatatatatatatatatacacacacacacatagtcttccaaaactcctcggaagaaagggaagcattctgtaagactttgggcagattttttttttttttttttggacagagtctcactttgttgcccaggctggagggcggtggcaggatgtcggctcactgcaacctccacctctcaggttcaagcaattctccaggatcagcctcccragtagctaggattacaggcctgtgccaccacactcagctaatttttgtatttttagtagagatgaggtttcgccatgttggccaggctggtctcagactact

SEQ ID NO: 112948 - DNA, 448 bp, Homo sapiens
tttttatagaaccttttacaggttttacatattctggatacaacccatcagatatgtgatttgcaaatattttcttctagtctgtggcctttttattgatttcccaatatcttttaatgagcagaagtttttrgttttgacgaagtcgaatttatctttttttcttttatggatcatgcttttggtgtcaaatctaagaaaccgtccaaagattttctcctatgttttcttccagaagttttgtattttcagattttatgattaggtctatgatatattttgagttaatttttgtatggtctgaggtacgggtcaaagtttattttaattttttgcacatggatagccaattgtttcagcaccctttgttgaaaagactgccctttttctgttcaattatctttgcacctttgttgaaaatcaaaggctatgtacgtgtgggtgtatt

SEQ ID NO: 112949 - DNA, 448 bp, Homo sapiens
tttttatagaaccttttacaggttttacatattctggatacaacccatcagatatgtgatttgcaaatattttcttctagtctgtggcctttttattgatttcccaatatcttttaatgagcagaagtttttggttttgacgaagtmgaatttatctttttttcttttatggatcatgcttttggtgtcaaatctaagaaaccgtccaaagattttctcctatgttttcttccagaagttttgtattttcagattttatgattaggtctatgatatattttgagttaatttttgtatggtctgaggtacgggtcaaagtttattttaattttttgcacatggatagccaattgtttcagcaccctttgttgaaaagactgccctttttctgttcaattatctttgcacctttgttgaaaatcaaaggctatgtacgtgtgggtgtatt

SEQ ID NO: 112950 - DNA, 385 bp, Homo sapiens
atccatgagagtttccaaactcattccttcatctatttgttttgctatctctagttatatccctgaaattcactttgcagtgttactctttgttatctctttgatgactccatacttcagtttctaccttgtacttttctaagaggctagattttataccccaatatcacatggaaatgtgtttatgtcatgtgttctcagtaggaagatacttcataaagtctatcttattttagttccaaggcctctcacgtgtctcagaagagtatctcgaccaaactgttagagtcrcatgatattttatttcatttaacttaaaagtgttattaattatagtaatattttttaattctttgaatatcaattgattattttttgttttatt

SEQ ID NO: 112951 - DNA, 554 bp, Homo sapiens
ttgacacttactccagtttcttctggattcttcttcctacacaataaaatcttgttaatattctaaattaattttctctggttcttgcaatattatgraatacataatggatcacagtgttactgctcaccaggctatgcttcccttagcctataacacactgttatgtaaggaactacatcatctatcaaatgtaattttcttgaagacagggtactcttgtataacaaaactcagcagagaagaaatagaaaacctaaatattcctacaaatattttttaaatggaatccatattttaaaaccttgaaaagagaaaacttaagacccagatattttcactggcaaattctactgaacattaaaagaagaaataacaccaattctatacatcccttccagaaaatagaaaaggagtgttatggttaattttatgtgccacttgacagggctaaggaatgcccaagatagcagctagaacattatttctggtgtgtctgtgagggtacatccagcagagattagcatttaaatcagtaactgtgtaaagaaaat

SEQ ID NO: 112952 - DNA, 554 bp, Homo sapiens
ttgacacttactccagtttcttctggattcttcttcctacacaataaaatcttgttaatattctaaattaattttctctggttcttgcaatattatgaaatacataatggatcacagtgttactgctcaccaggctatgcttcccttagcctataacacactgttatgtaaggaactacatcatctatcaaatgtaattttcttgaagacagggtactcttgtataacaaaactcagcagagaagaaatagaaaacctaaatattcctacaaatattttttaaatggaatccatattttaaaaccttgaaaagagaaaacttaagacccagatattttcactggcaaattctactgaacattaaaagaagaaataacaccaattctatacatcycttccagaaaatagaaaaggagtgttatggttaattttatgtgccacttgacagggctaaggaatgcccaagatagcagctagaacattatttctggtgtgtctgtgagggtacatccagcagagattagcatttaaatcagtaactgtgtaaagaaaat

SEQ ID NO: 112953 - DNA, 579 bp, Homo sapiens
cccttggcctgaattgcttggatccccagtggaaaggtgagtcacagagataggctctctgcctctcttgtgtactggtgcttcactcactttaatcagccccatgtcatcacaggggctgtttgcccaccccttctcctccctgggatctggggtttcctttgtgattctagtggattcccattttccttcttgaaatgaagctcaaagagttgatctttgtgtactacctygctgtttccgagtggatgaggcatgctgaaagcctctaatccaccatcttggaaaaaataaatttttttttaaaaagcaaaatccaaatatgtaggataaacaaattgaaatatctagtgtacaatgtaaggactatagttaatagcgtattgtatttgggattttgctaaatgagtagactatggctgatgccacatggaagaggaataggtaactatgtgagatgatagaaatgttcatttgctccactgtagtaaccattttacaatatatatgtattttataatatcgtgttgtataccttaaatatacacaataaaatttatttttttaaagaaaccaacc

SEQ ID NO: 112954 - DNA, 470 bp, Homo sapiens
gtgcttgacatacatttataaataaaaaggctcacctctcaaggtgtgtacaagttagtaggggaaacaagcaaacaaaaactaaaataccacagaaggttgtattacgctcaaaatctaacatgcatgctgagaacagaagatgtactaagagctacctctgccgggagccatgggaaagccccgtggagaatgcaagaaattagggttttgaagagtgaaaataacatgtgaagcaaaattaaaactgggggacaaagctcctctgtgttttaagaacaaaaatttggccttctaaatctgagcagaaggcttctttctgcacatawccatttcttcggccacataaaaacttactacttcaactggatatttatctattgacacaaagatagctgccccacttagacatggaagtctgcttctttgcagaatgtgtgtaaatacccctggtgtactgacagtggtgt

SEQ ID NO: 112955 - DNA, 572 bp, Homo sapiens
agacaacaaatgttctcggcagcattattcacaatcatcaaaaagtagaaacaacccaaatgtccaccaactgaatggataaataaaaggtgatatattcatacaatggaatattatttggttaaaagaagaaaaagtaatgaagttcttatacattctgcaacatacctggaaaaaacatgctaagtgaaagaagccagtcacaaaaggccacatattgtatgaatccatttatgtgaaatgtccagaatatataaatccatgaagacagaaagtatagtagtggttaccagagtttgggggaggaggaaataagggrtgactgctaatgcatatggagtttctcttgcggtgatgaaaatttctttgttttatttatttttattttttagagacagtcttgctctgtcacccaggctggagtgcagtggcgcaatcatggttcactgcagcctcaatctccctggctcaagtgatcctcccacctcagcttctgaagtagcagggattataggtatgagccaccacaccttgctgaaaatttctaaaagtagatagcagtggactcagta

SEQ ID NO: 112956 - DNA, 590 bp, Homo sapiens
aattttcaatctttcacagcacagtaggttagaccatgtcaacaccacctaaagatatcagctctctgtaatttattaatttaatgcaatcccaataaaaattccaaagagcttttcttttttttttttaaactgatcatacatcagaaaagttcataaggaaaaataaacaacaagaatagctaggaaaatagtgacaaggaagcactctctaggaagactagccctgacattaaaacatacagcaaagcctctttaaagcagawgaataaacgggtcaatggatgaaaatagaaggtccagaaatacccgaaccacatatgaaagtttagtacatgataaagctggtatctcaagttactgggacagtgacgacctttataataaatggtgttgggacacttgatacccatttgaaaaaaaataattagattcactcctcaaaccacacacaataacacactccaaatgtattatagatctaaatgtaaaaaatacatcagttcaagtactagaagcaagcatgagtgaactcttctataacttgggtgtagggaagagtatgactaaaagtcatatattaaaatatg

SEQ ID NO: 112957 - DNA, 590 bp, Homo sapiens
aattttcaatctttcacagcacagtaggttagaccatgtcaacaccacctaaagatatcagctctctgtaatttattaatttaatgcaatcccaataaaaattccaaagagcttttcttttttttttttaaactgatcatacatcagaaaagttcataaggaaaaataaacaacaagaatagctaggaaaatagtgacaaggaagcactctctaggaagactagccctgacattaaaacatacagcaaagcctctttaaagcagatgaataaacgggtcaatggatgaaaatagaaggtccagaaatacccgaaccacatatgaaagtytagtacatgataaagctggtatctcaagttactgggacagtgacgacctttataataaatggtgttgggacacttgatacccatttgaaaaaaaataattagattcactcctcaaaccacacacaataacacactccaaatgtattatagatctaaatgtaaaaaatacatcagttcaagtactagaagcaagcatgagtgaactcttctataacttgggtgtagggaagagtatgactaaaagtcatatattaaaatatg

SEQ ID NO: 112958 - DNA, 517 bp, Homo sapiens
gctgggaaggtgcctggttaacctgctctccaggtgattcagatgcaggtcagacctacttctaaggataatggaatctaaaggagaaagaagcatccttaagggccagatcgatggtgatgctgacctctgaagtcaaagtggggaaaaccctcaaggaaaagtgacacccaaaagagaaatgactaatatcacacagttgcccttctgagcactccttggtaaaattaatcctaggaaaacatggtattttgttttcataagggccatgagccaagcatrtctcctgtccccctccttccttccttctgtgcgccattctttttctgtttcatttttcctttttggatccctgcttgggcactctaattgcatggcctcagcctcagcctccttgcctctcctctggcccgaatgcttctccaaatctagcgacatgaaagcggaattaggggttgactagatcccgataggtcatcatccataagatgccagtggaaaaggtgcccattctggg

SEQ ID NO: 112959 - DNA, 584 bp, Homo sapiens
caataatctgtcatacaaacagataggtttttttaagagtgaaatgtgaagatgtgaatacactggaataacaggggtcaacaagaactgtcccaggcacacaggacctgtggtcactccataaagccctccctgacatttccagatctcagctctttctcttctctgaaatcccattccatrctttgtctatgcaacttttaacactatttgttatctatctcatagtggtcttgagcttcctttcccctgacacatttatttgtaattgtcttaatttcttaaactttctttgtatgaattggtagtagctatcagagtgatacatctcagtaaacttttataaatgcttttaagtttgatttaacttactggtacattgaaatattttatcttttttattctcaaaaacatttatttgaataattaggagttactaggaggctaagtacatataaaatagttaggtcctttccttgattgtaagctgcttgagatcagaaatgtttattaaaaaagtaaaactaattggtggtttaattcaaagtgccctcaagtttttaaaatgttttaagtgcaggatt

SEQ ID NO: 112960 - DNA, 584 bp, Homo sapiens
caataatctgtcatacaaacagataggtttttttaagagtgaaatgtgaagatgtgaatacactggaataacaggggtcaacaagaactgtcccaggcacacaggacctgtggtcactccataaagccctccctgacatttccagatctcagctctttctcttctctgaaatcccattccatactttgtctatgcaacttttaacactatttgttatctatctcatagtggtcttgagcttcctttcccctgacacatttatttgtaattgtcttaatttcttaaactttctttgtatgaattggtagtagctatcagagtgatacatctcagtaaacttttataaatgcttttaagtttgatttaacttactggtacattgaaatattttatcttttttattytcaaaaacatttatttgaataattaggagttactaggaggctaagtacatataaaatagttaggtcctttccttgattgtaagctgcttgagatcagaaatgtttattaaaaaagtaaaactaattggtggtttaattcaaagtgccctcaagtttttaaaatgttttaagtgcaggatt

SEQ ID NO: 112961 - DNA, 523 bp, Homo sapiens
gaattcccacatgttgtgggaaggacctggtgggaggtaattgaatcctggggtcaggtcttttccatgctgttcttgtgatagtgaataagtctcgcgagatctgatggttttaaaaagaggaatttccctgcacaagctctcttctctcgtctgctgccacgtgagacatgcctttcaccttgagccatgattgtgaggcttccccaaccacgtggaattgtaagtccattaarcctctttcttttgcaaattgcccagtcttgggtatgtctttatcagcagtgtgaaaacagactaataacactttttgtgatagattaaattttccatgtactaagaagacataaaaaagaatagtgcaaattgtaaggaaatttaaaatataagttaaccaatgtgatgaaaataaacagaagcctagatctccccatagaagaaggtgctttgggattgctggtttctgtagtcttcttttaccagcaggatggagacagggtccctgatgagaatggggtgattg

SEQ ID NO: 112962 - DNA, 597 bp, Homo sapiens
gaccccaagctcacagggtttggaagcctcctgaggacagctgcatcaccatccatcatctttttgatgaatggagctctaaatggcttagtctgactgtgatgcaacccagattttgccagtggcatcagtgatttaaatatcattgcttttcttttccttgtgcttctataggatggactaggtgtagagcaatggaggcagtgctttccctcagtctgcgaggactgggatctaggtggccatccccacccagctgtggagcagtcagacagcgggaccctaccctgccagcctacaggggagggacagcaggctgaggcctgccaataccagcaccttcatctgtagggacaaaccaaggacctggcctggcctcagaaagaaaactcctgacccctactctgcccatgctgctgggagagaaaaagaagggagtggtctagaaagaggaaaacaggctggkcgcagtggctcaccgctgtaatcccagcactttgggaggctgaggcaggcagatcacttgagggcaggagttcgaaaccagcctggccgacatggtaaaagcctgtctctactaaaaatacaaaaattggc

SEQ ID NO: 112963 - DNA, 582 bp, Homo sapiens
cacttggtgccaaacctgccagaaccatggttttgaacttttcagcctcctggactgtgagaaacaagtttctgttcttatcagtctcagctattttgttacagaagcacaagcgaactgagacctgagatgggagtgtttatgtgctaggtatggagctaatttctgaataaataaagatgaatacattctatgacctcatcatctagtgcctgttacagtcatgcagtggatattttttcttgccttcttattactcatttttgctctcctcactaaatattgaggaaaacatgaatgcatcatcagtttttccactgatacaactgtttaagaagtacatatgacattatattttttctttctgtattctgtagacttacctgtaaagtctaaggctaacattgactttatgctaattagtactgtgttcatttcagatgtgtaatatgccttgtacaaatataaatagataaaacattaaaggtgctactactcaaaacacacagggaataaaatattctatttgaaacatcaacatagagtttacamtgagggaaatttttattcattagtttaaat

SEQ ID NO: 112964 - DNA, 511 bp, Homo sapiens
gtcttaaatagattttaatatttaatcctaatgacaggataatctgatttattacagatgatataactgaggctaatacaaatctgttgactttaaattttcaaagtcttcytgaattatttgactgtgtaatattttggtaaacataaataagtggatactaatgcattgaaacagaaacagaatactgttcaagaaatagaaaaaaatgaaacaatagaaaagattgaatttgtagtatgactacaatttaagatttaataaagacaaaaatagaaaccaatatgtagttaggaggatagaaaaaagtacagtggaccctccatatccataggttctgcatgtgtggattcaaccacccatggatcaaaaatatttggaaaaacatttatgaaaaagtgaacacatatggaattctgccttgtcattatcccctaaagaacacactataactacctacataacatttacattgtacttggtatcataagaaatctagagatgatttaaa

SEQ ID NO: 112965 - DNA, 511 bp, Homo sapiens
gtcttaaatagattttaatatttaatcctaatgacaggataatctgatttattacagatgatataactgaggctaatacaaatctgttgactttaaattttcaaagtcttcctgaattatttgactgtgtaatattttggtaaacataaataagtggatactaatgcattgaaacagaaacagaatactgttcaagaaatagaaaaaaatgaaacaatagaaaagatygaatttgtagtatgactacaatttaagatttaataaagacaaaaatagaaaccaatatgtagttaggaggatagaaaaaagtacagtggaccctccatatccataggttctgcatgtgtggattcaaccacccatggatcaaaaatatttggaaaaacatttatgaaaaagtgaacacatatggaattctgccttgtcattatcccctaaagaacacactataactacctacataacatttacattgtacttggtatcataagaaatctagagatgatttaaa

SEQ ID NO: 112966 - DNA, 632 bp, Homo sapiens
gtgactggatcatgggagtggagcccttatgaaaggtgccagagagacccctccctcttccaccatgtgaggttagactgagaaatacatctctgtggtttataagctkctcagtctatggcattttgttatagcagcccatgctaatgaatacagatgaccgtgtgtctgcagaccttcctaggaaattattgagtccttcattgaatactaaactgtgaatacatgagagaaaataacagaagcctggggtaaaatgccaacacaaagggtttgaagaacaattctcaaagctcaagaaagctctgcaaatattattgttgccacaaaccaaagtagaagacagggtaatatatgagctattaggtagaatctttggaagaatcctgcttttgtgatggaactcactcattcctaaacctaaagcaactctacatcttctctaagaaaattttatagcaatctctaaaagcatcaaactgattccaaataatttaactgtgtttgagaacaaaatacaaatatacaaaaggaattcaacaaaatccatcacataacaatatagaattcacaatatctggttttgatgaacataataattagtgttgaaacatgttaattcagttgttaaa

SEQ ID NO: 112967 - DNA, 632 bp, Homo sapiens
gtgactggatcatgggagtggagcccttatgaaaggtgccagagagacccctccctcttccaccatgtgaggttagactgagaaatacatctctgtggtttataagcttctcagtctatggcattttgttatagcagcccatgctaatgaatacagatgaccgtgtgtctgcagaccttcctaggaaattattgagtccttcattgaatactaaactgtgaatacatgagagaaaataacagaagcctggggtaaaatgccaacacaaagggtttgaagaacaatkctcaaagctcaagaaagctctgcaaatattattgttgccacaaaccaaagtagaagacagggtaatatatgagctattaggtagaatctttggaagaatcctgcttttgtgatggaactcactcattcctaaacctaaagcaactctacatcttctctaagaaaattttatagcaatctctaaaagcatcaaactgattccaaataatttaactgtgtttgagaacaaaatacaaatatacaaaaggaattcaacaaaatccatcacataacaatatagaattcacaatatctggttttgatgaacataataattagtgttgaaacatgttaattcagttgttaaa

SEQ ID NO: 112968 - DNA, 532 bp, Homo sapiens
atattgtttatgctaagaacttgcaaatttgtacctctacctcttacttctcttctaaatgccaggctcttacatccaacttcttatgctgtcttcttttgagaagctaataaacatctcaactttgaaatgcacawtctcacctacgaccatttgtctcaaagcaaaaatcttagagtcaatcctacttattttctttgtcaagaattgcacatcccacctttcagcgagtctttctgcttgctctacattcagaatctatccaaagttagtcactctcttagtctctcccagaaacagatcccagtaaaaacattcaatcagaagtaatttgggatgtagagaaaaactatattctttttcttccctcagccttttgatgtgtttatttcaatgctatttttacaatgttacttactgaatacattaattaaaattgtaatctgccactattactgtgtatcctgccttactttattttcttcacaaaatatataacttttcaacacctgtctatattttatttcttttg

SEQ ID NO: 112969 - DNA, 532 bp, Homo sapiens
atattgtttatgctaagaacttgcaaatttgtacctctacctcttacttctcttctaaatgccaggctcttacatccaacttcttatgctgtcttcttttgagaagctaataaacatctcaactttgaaatgcacattctcacctacgaccatttgyctcaaagcaaaaatcttagagtcaatcctacttattttctttgtcaagaattgcacatcccacctttcagcgagtctttctgcttgctctacattcagaatctatccaaagttagtcactctcttagtctctcccagaaacagatcccagtaaaaacattcaatcagaagtaatttgggatgtagagaaaaactatattctttttcttccctcagccttttgatgtgtttatttcaatgctatttttacaatgttacttactgaatacattaattaaaattgtaatctgccactattactgtgtatcctgccttactttattttcttcacaaaatatataacttttcaacacctgtctatattttatttcttttg

SEQ ID NO: 112970 - DNA, 532 bp, Homo sapiens
atattgtttatgctaagaacttgcaaatttgtacctctacctcttacttctcttctaaatgccaggctcttacatccaacttcttatgctgtcttcttttgagaagctaataaacatctcaactttgaaatgcacattctcacctacgaccatttgtctcaaagcaaaaatcttagagtcaatcctacttattttctttgtcaagaattgcacatcccacctttcagcgagtctttctgcttgctctacattcagaatctatccaaagttagtcactctcttagtctctcccagaaacagatcccagtaaaaacattcaatcagaagtaatttgggatgtagagaaaaactrtattctttttcttccctcagccttttgatgtgtttatttcaatgctatttttacaatgttacttactgaatacattaattaaaattgtaatctgccactattactgtgtatcctgccttactttattttcttcacaaaatatataacttttcaacacctgtctatattttatttcttttg

SEQ ID NO: 112971 - DNA, 614 bp, Homo sapiens
agtaaaaacattcaatcagaagtaatttgggatgtagagaaaaactatattctttttcttccctcagccttttgatgtgtttatttcaatgctatttttacaatgttacttactgaatacattaattaaaattgtaatctgccactattactgtgtatcctgccttactttattttcttcacaaaatatataacttttcaacacctgtctatattttatttcttttgtgtcatcctayatctcactgtaatctttacaaaggcaaggatttttttctttaatatcctaaatgtagatgtttgtctctagtagattcaatggtgcctcccaaaatatgataaatatgcacatatctttccatatgctagcccacagaaactgtagatgtgacctaatttttttgtatatattaataaggatcttgagatgacgtcatactggatgatcctagtgcaccctaaatccaataagtgttcttatgaaagacagaagaggagaagatacaggaaatagaagaaggctacttgaggatggaagcagagattggagttatgcagctacaaaccaaagaatgccttgagccaccagcagctgaaagaggtaaagtaggatcc

SEQ ID NO: 112972 - DNA, 614 bp, Homo sapiens
agtaaaaacattcaatcagaagtaatttgggatgtagagaaaaactatattctttttcttccctcagccttttgatgtgtttatttcaatgctatttttacaatgttacttactgaatacattaattaaaattgtaatctgccactattactgtgtatcctgccttactttattttcttcacaaaatatataacttttcaacacctgtctatattttatttcttttgtgtcatcctacatctsactgtaatctttacaaaggcaaggatttttttctttaatatcctaaatgtagatgtttgtctctagtagattcaatggtgcctcccaaaatatgataaatatgcacatatctttccatatgctagcccacagaaactgtagatgtgacctaatttttttgtatatattaataaggatcttgagatgacgtcatactggatgatcctagtgcaccctaaatccaataagtgttcttatgaaagacagaagaggagaagatacaggaaatagaagaaggctacttgaggatggaagcagagattggagttatgcagctacaaaccaaagaatgccttgagccaccagcagctgaaagaggtaaagtaggatcc

SEQ ID NO: 112973 - DNA, 614 bp, Homo sapiens
agtaaaaacattcaatcagaagtaatttgggatgtagagaaaaactatattctttttcttccctcagccttttgatgtgtttatttcaatgctatttttacaatgttacttactgaatacattaattaaaattgtaatctgccactattactgtgtatcctgccttactttattttcttcacaaaatatataacttttcaacacctgtctatattttatttcttttgtgtcatcctacatctcactgtaatctttacaaaggcaaggatttttttctttaatatcctaaatgtagatgtttgtctctagtagattcaatggtgcctcccaaaatatgataaatatgcacatatctttccatatgctagcccacagaaactgtagatgtgacctaatttttttgtatatattaataaggatcttgagatgacrtcatactggatgatcctagtgcaccctaaatccaataagtgttcttatgaaagacagaagaggagaagatacaggaaatagaagaaggctacttgaggatggaagcagagattggagttatgcagctacaaaccaaagaatgccttgagccaccagcagctgaaagaggtaaagtaggatcc

SEQ ID NO: 112974 - DNA, 614 bp, Homo sapiens
agtaaaaacattcaatcagaagtaatttgggatgtagagaaaaactatattctttttcttccctcagccttttgatgtgtttatttcaatgctatttttacaatgttacttactgaatacattaattaaaattgtaatctgccactattactgtgtatcctgccttactttattttcttcacaaaatatataacttttcaacacctgtctatattttatttcttttgtgtcatcctacatctcactgtaatctttacaaaggcaaggatttttttctttaatatcctaaatgtagatgtttgtctctagtagattcaatggtgcctcccaaaatatgataaatatgcacatatctttccatatgctagcccacagaaactgtagatgtgacctaatttttttgtatatattaataaggatcttgagatgacgtcatactggatgatcctagtgcaccctaaatccaataagtgttcttatgaaagacagaagaggagaagatacagraaatagaagaaggctacttgaggatggaagcagagattggagttatgcagctacaaaccaaagaatgccttgagccaccagcagctgaaagaggtaaagtaggatcc

SEQ ID NO: 112975 - DNA, 590 bp, Homo sapiens
caccaacatattcattgtctgatgagggcctgtttcacagatgtcattttgcatgacttaatcacatggtaggaaaagcaaagggacaaaatggacaaatgccatgttgtcacatggcagaagaaatggaagagccaggaagctctcagaagcttccttaattaggatattaatctcattcatgagtgcayagccatcatgacttaattgcctccaaaggccccacttcctcatcactttgaggattaaacttaaacatgaatttggaggaaatatatccaaactctaggactagtttaaatgtagctaaaaaggtttcttcattctgtaatcgttaatatgctaatatttttgtaaatatccaagaggaagctaaagcatataatattccaaaatttatttctgtttgtggatattatgttttcctctcattctatcttaagaaattagtgtcctcaagaaacactatataggataattgtctttcaagttcatcaactaccagttcttgattcttcagtagctaatcctagatagtaatacttaacagattataaaaacttgggtgctgctatataaatgcgctgaaa

SEQ ID NO: 112976 - DNA, 590 bp, Homo sapiens
caccaacatattcattgtctgatgagggcctgtttcacagatgtcattttgcatgacttaatcacatggtaggaaaagcaaagggacaaaatggacaaatgccatgttgtcacatggcagaagaaatggaagagccaggaagctctcagaagcttccttaattaggatattaatctcattcatgagtgcatagccatcatgacttaattgcctccaaaggccccacttcctcatcactttgaggattaaacttaaacatgaatttggaggaaatatatccaaactctaggactagtttaaatgtagctaaaaaggtttcttcattctgtaatcgttmatatgctaatatttttgtaaatatccaagaggaagctaaagcatataatattccaaaatttatttctgtttgtggatattatgttttcctctcattctatcttaagaaattagtgtcctcaagaaacactatataggataattgtctttcaagttcatcaactaccagttcttgattcttcagtagctaatcctagatagtaatacttaacagattataaaaacttgggtgctgctatataaatgcgctgaaa

SEQ ID NO: 112977 - DNA, 590 bp, Homo sapiens
caccaacatattcattgtctgatgagggcctgtttcacagatgtcattttgcatgacttaatcacatggtaggaaaagcaaagggacaaaatggacaaatgccatgttgtcacatggcagaagaaatggaagagccaggaagctctcagaagcttccttaattaggatattaatctcattcatgagtgcatagccatcatgacttaattgcctccaaaggccccacttcctcatcactttgaggattaaacttaaacatgaatttggaggaaatatatccaaactctaggactagtttaaatgtagctaaaaaggtttcttcattctgtaatcgttaatatgctaatatttttgtaaatatccaagaggaagctaaagcatataatattccaaaatttatttctgtttgtggatattatgttttcctctcattctatcttaagaaattagtgtcctcaagaaacactatataggataattgtctttcaagttcatcaactacyagttcttgattcttcagtagctaatcctagatagtaatacttaacagattataaaaacttgggtgctgctatataaatgcgctgaaa

SEQ ID NO: 112978 - DNA, 590 bp, Homo sapiens
caccaacatattcattgtctgatgagggcctgtttcacagatgtcattttgcatgacttaatcacatggtaggaaaagcaaagggacaaaatggacaaatgccatgttgtcacatggcagaagaaatggaagagccaggaagctctcagaagcttccttaattaggatattaatctcattcatgagtgcatagccatcatgacttaattgcctccaaaggccccacttcctcatcactttgaggattaaacttaaacatgaatttggaggaaatatatccaaactctaggactagtttaaatgtagctaaaaaggtttcttcattctgtaatcgttaatatgctaatatttttgtaaatatccaagaggaagctaaagcatataatattccaaaatttatttctgtttgtggatattatgttttcctctcattctatcttaagaaattagtgtcctcaagaaacactatataggataattgtctttcaagttcatcaactaccrgttcttgattcttcagtagctaatcctagatagtaatacttaacagattataaaaacttgggtgctgctatataaatgcgctgaaa

SEQ ID NO: 112979 - DNA, 596 bp, Homo sapiens
tagctaatcctagatagtaatacttaacagattataaaaacttgggtgctgctatataaatgcgctgaaactcccagggaaccaaacataaggacttaaagagagatgtaactagggatcataatcatgaatttcagctgcttctctatctttgtcagtgagcaaatgaccatacaaaataaggtattcaattattaattctgtgcccatatcccggaattttgcccaatatatttgtaagtttagataaataaggcactaatgccagggatatgtagcattagttctgggtttataaagggatattcacaacctcttgccatccacagaatttatcagcccaaagtaaactatactcgttrgttaagggcaacctgagacatgtttaaaactgaggtggactgaagagtcaactaattgcaggaatcttttatttggttgaaatgttcaaacaagtcccactctgaattctattagaagtccatcattggcttctctctctttctcactgtcttaaatcatgtattttataacactatgaagaatgaagttcaaaagaataagctaaatttaattaattaaattatttatttatt

SEQ ID NO: 112980 - DNA, 596 bp, Homo sapiens
tagctaatcctagatagtaatacttaacagattataaaaacttgggtgctgctatataaatgcgctgaaactcccagggaaccaaacataaggacttaaagagagatgtaactagggatcataatcatgaatttcagctgcttctctatctttgtcagtgagcaaatgaccatacaaaataaggtattcaattattaattctgtgcccatatcccggaattttgcccaatatatttgtaagtttagataaataaggcactaatgccagggatatgtagcattagttctgggtttataaagggatattcacaacctcttgccatccacagaatttatcagcccaaagtaaactatactcgttggttaagggcaacctgagacatgtttaaaactgaggtggactgaagagtcaactaattgcrggaatcttttatttggttgaaatgttcaaacaagtcccactctgaattctattagaagtccatcattggcttctctctctttctcactgtcttaaatcatgtattttataacactatgaagaatgaagttcaaaagaataagctaaatttaattaattaaattatttatttatt

SEQ ID NO: 112981 - DNA, 596 bp, Homo sapiens
tagctaatcctagatagtaatacttaacagattataaaaacttgggtgctgctatataaatgcgctgaaactcccagggaaccaaacataaggacttaaagagagatgtaactagggatcataatcatgaatttcagctgcttctctatctttgtcagtgagcaaatgaccatacaaaataaggtattcaattattaattctgtgcccatatcccggaattttgcccaatatatttgtaagtttagataaataaggcactaatgccagggatatgtagcattagttctgggtttataaagggatattcacaacctcttgccatccacagaatttatcagcccaaagtaaactatactcgttggttaagggcaacctgagacatgtttaaaactgaggtggactgaagagtcaactaattgcaggaatcttttatttggytgaaatgttcaaacaagtcccactctgaattctattagaagtccatcattggcttctctctctttctcactgtcttaaatcatgtattttataacactatgaagaatgaagttcaaaagaataagctaaatttaattaattaaattatttatttatt

SEQ ID NO: 112982 - DNA, 605 bp, Homo sapiens
caaatgctcatatctaggacaggtaaatctacacgtgtttatacacacattcactgtattggggaaaatacacaccaaactggaaacactggttgtctctgaagaagagacagggctttggcaatattcaaattaggctttaactgtttctgaaagtttcagttctctataaggagaaggtattacttatgtaatttttaaaaattacatattaagtactaaatgactgaagcttcttagaattgatgggkgcaggcatcacatgggcagcaaggcattcacataatggagaatcatggtctcctgtagatgtctaggagtgataaaattaactaccttttaggtggtgtagtttcctggttgagctgataattattaagttaatgattagtaggttatttctcaacaccgaagagattattagtgtttcaaagttttcactgtaattcatctgtaaaaccattcaacctacctccagtacacctcagtaatctggtgacaagagagtattcttgctcactttatttactcttcagtgatctaatgccaataatgccagcctatagaaacaacagccaattataacaaaaagcacattagaaagt

SEQ ID NO: 112983 - DNA, 605 bp, Homo sapiens
caaatgctcatatctaggacaggtaaatctacacgtgtttatacacacattcactgtattggggaaaatacacaccaaactggaaacactggttgtctctgaagaagagacagggctttggcaatattcaaattaggctttaactgtttctgaaagtttcagttctctataaggagaaggtattacttatgtaatttttaaaaattacatattaagtactaaatgactgaagcttcttagaattgatgggtgcaggcatcacatgggcagcaaggcattcacataatggagaatcatggtctcctgtagatgtctaggagtgataaaattaactaccttttaggtggtgtagtttcctggttgagctgataattattaagttaatgattagtaggttatttctcaacacygaagagattattagtgtttcaaagttttcactgtaattcatctgtaaaaccattcaacctacctccagtacacctcagtaatctggtgacaagagagtattcttgctcactttatttactcttcagtgatctaatgccaataatgccagcctatagaaacaacagccaattataacaaaaagcacattagaaagt

SEQ ID NO: 112984 - DNA, 605 bp, Homo sapiens
caaatgctcatatctaggacaggtaaatctacacgtgtttatacacacattcactgtattggggaaaatacacaccaaactggaaacactggttgtctctgaagaagagacagggctttggcaatattcaaattaggctttaactgtttctgaaagtttcagttctctataaggagaaggtattacttatgtaatttttaaaaattacatattaagtactaaatgactgaagcttcttagaattgatgggtgcaggcatcacatgggcagcaaggcattcacataatggagaatcatggtctcctgtagatgtctaggagtgataaaattaactaccttttaggtggtgtagtttcctggttgagctgataattattaagttaatgattagtaggttatttctcaacaccgaagagattattagtgtttcaaagttttcactgtaattcatctgtaaaaccattcaacctacctccagtacacctcagtaatctggtgacaagagagtattcttgcwcactttatttactcttcagtgatctaatgccaataatgccagcctatagaaacaacagccaattataacaaaaagcacattagaaagt

SEQ ID NO: 112985 - DNA, 605 bp, Homo sapiens
caaatgctcatatctaggacaggtaaatctacacgtgtttatacacacattcactgtattggggaaaatacacaccaaactggaaacactggttgtctctgaagaagagacagggctttggcaatattcaaattaggctttaactgtttctgaaagtttcagttctctataaggagaaggtattacttatgtaatttttaaaaattacatattaagtactaaatgactgaagcttcttagaattgatgggtgcaggcatcacatgggcagcaaggcattcacataatggagaatcatggtctcctgtagatgtctaggagtgataaaattaactaccttttaggtggtgtagtttcctggttgagctgataattattaagttaatgattagtaggttatttctcaacaccgaagagattattagtgtttcaaagttttcactgtaattcatctgtaaaaccattcaacctacctccagtacacctcagtaatctggtgacaagagagtattcttgctcactttatttmctcttcagtgatctaatgccaataatgccagcctatagaaacaacagccaattataacaaaaagcacattagaaagt

SEQ ID NO: 112986 - DNA, 608 bp, Homo sapiens
taaattgtatggttagcaaaataatctttacaattactctagaataaataaaatttcttcatatctttagatttattaaagatactgaattttaatttaataccttcttaggggaaacaaattccagactcaggtgccttcactgttaaatttcattctttttaaataggtaaatgttacagtgattattactcaagtgtatatcctgagaatttttacaataatttgttacatagattaacttttttttcttcaaaatacaactaatttactgattatactttttgggtcttctattaacattattagcaaaatttagaaaatttattcatttatatacaaaattaatagatacattaaatactctgtgccacccaatgcccaattcactgagagcattttactgrataaacaaaaaattttgacccttgattaccttattgttggaggtaacaaaccatagaagatagacaatagtcaatgtaaaaataaataagtggttttgacaatggacaataagcaaaaatacctgttcacttgttgtattggtccgttctcacactgctataaagagctgctagatgctggttaatatataaaggaaagag

SEQ ID NO: 112987 - DNA, 627 bp, Homo sapiens
tccatatattcaattccttactatatatttctcatttgatattctatacccaattcaaacaaaaccatttcatgtatacaatgtacttttatttatgcttttctctatcattaagtagaaagccatttgcaccttagtctaaatctgaaatgtgcctctacctaacctttstaatacattttcactatttcttagttattagaataaatttacataatttctgaaacaactttctctatggagtattccctttagtttcttttcccttccaaacaatttaatgaattacaaatatgggggagatattttttcaatgggtaagacttgacttctacaaatacatgtttaattccttctcaaaattatttctacttcctcttattcaacactgtgctagattttagggatatataataagacaatatatgaggtccttgctgttgtgaaaggtacattcttatctttggcaaattgtagaatctttagctttggtatgcaagggcattggtgtttggtacatgcttggctctttgccttaagaattgcctctttccaccatgcatatttcacctgtgtgggaattcttgcagatctctgtattattgatagtcattttgctctgacatt

SEQ ID NO: 112988 - DNA, 352 bp, Homo sapiens
gaaaggtacattcttatctttggcaaattgtagaatctttagctttggtatgcaagggcattggtgtttggtacatgcttggctctttgccttaagaattgcctctttccaccatgcatatttcacctgtgtgggaattcttgcagatctctrtattattgatagtcattttgctctgacattttatacaaagctgaatcagcaacagtatgactaaacacaaccaaaaaagaaagctagaaagattatattagacacttacgtgtatggatcattatggtgaggactgctaaaaaaaacaaaacaaaacaaaaaaaaccttcagccaaaatagatttacagtttaatcgag

SEQ ID NO: 112989 - DNA, 545 bp, Homo sapiens
gggaattcttgcagatctctgtattattgatagtcattttgctctgacattttatacaaagctgaatcagcaacagtatgactaaacacaaccaaaaaagaaagctagaaagattatattagacacttacrtgtatggatcattatggtgaggactgctaaaaaaaacaaaacaaaacaaaaaaaaccttcagccaaaatagatttacagtttaatcgagtaatgaatgattcataaattggaaagcccccacaatcacagcagattcagagagactccaggggtgtctcatggtcagaatgaatttatagacaatacaaagtaaagtgacccatagaaatcagaagtgaggtacagaaacagctggattggttatggcttggcacttgccttatttgaacactcagctgtatgcgactagttgaagtatggctgctggaattggccaagactcagcgattgttacaggcgcatattcctaagttaggttttagtcttgtgtacctattgagttaggttgcagttcattcacaaggactgaaata

SEQ ID NO: 112990 - DNA, 587 bp, Homo sapiens
atgtatgctggcagtcaaccaacagcatatgctcctaatgaacaactggagagtcatttaagttcaatgttggggattttattagaaactgtaagatgaacacacaattcattttctctttccttgtaaatttggacaatatttgctatattcgcctatattttggcatagaaatttaggttctaagtatatagtagtgatgtagccttcttacagggtcacatagacccagaattaataatttttaacactctttttattctctctggttggctaacattaaaacaatccacagaaaacccccaagagctatgtattgaggatggcaaaaccacagatgggaaaataataaatctttgaatgaccctgcaggaaatcacagatagcattcctattatttaagcaagcaataacttttattgttttaagagttggaggtttaattttttcagcattactgttaccacaattattacaggaaatgaaaccagtaaaaaraaaatagagggaacaaggtttattgacatctatgaggcattttctttcccctaatattacatactctagattttatttctgcacaaaaa

SEQ ID NO: 112991 - DNA, 626 bp, Homo sapiens
tgtggcactggtcagttatagctccaaagaatgagcatccacttaatctcataaccaggacccaacctgcaacattagtattacaaattaattyctaattccagtctcactctttcatcaccagttctatctttgcacacttactaatcccaattattttaaagcaagttgcttaacctgctgtggcagttttcccctctccttcaactttctctccctttttttttctcctaataatacctgccaagtaagaatccctttcattacatacatcaaatagccacttcttccaacaattttattcaacctaagtattcaacctaagggcttagattcatggtctgtccttacaatgccgttccatctttttaaagctaattgcaatgcacctagtcatttttattgcagcactatgtatgatagccaagatacagaataagcctaagtgtctggcaacagatgaatgcaaaaagaaaatgcactatctgtatacaatgaagtactctttagccataaaaaataaaatcttgccatttatgacaatatggatgaatctagaggacatcatggtaagtgaaataagccagacacagacagacaagtacagcatgatctcactcataagt

SEQ ID NO: 112992 - DNA, 626 bp, Homo sapiens
tgtggcactggtcagttatagctccaaagaatgagcatccacttaatctcataaccaggacccaacctgcaacattagtattacaaattaattcctaattccagtctcactctttcatcaccagttctatctttgcacacttactaatcccaattattttaaagcaagttgcttaacctgctgtggcagttttcccctctccttcaactttctctcyctttttttttctcctaataatacctgccaagtaagaatccctttcattacatacatcaaatagccacttcttccaacaattttattcaacctaagtattcaacctaagggcttagattcatggtctgtccttacaatgccgttccatctttttaaagctaattgcaatgcacctagtcatttttattgcagcactatgtatgatagccaagatacagaataagcctaagtgtctggcaacagatgaatgcaaaaagaaaatgcactatctgtatacaatgaagtactctttagccataaaaaataaaatcttgccatttatgacaatatggatgaatctagaggacatcatggtaagtgaaataagccagacacagacagacaagtacagcatgatctcactcataagt

SEQ ID NO: 112993 - DNA, 626 bp, Homo sapiens
tgtggcactggtcagttatagctccaaagaatgagcatccacttaatctcataaccaggacccaacctgcaacattagtattacaaattaattcctaattccagtctcactctttcatcaccagttctatctttgcacacttactaatcccaattattttaaagcaagttgcttaacctgctgtggcagttttcccctctccttcaactttctctccctttttttttctcctaataataccygccaagtaagaatccctttcattacatacatcaaatagccacttcttccaacaattttattcaacctaagtattcaacctaagggcttagattcatggtctgtccttacaatgccgttccatctttttaaagctaattgcaatgcacctagtcatttttattgcagcactatgtatgatagccaagatacagaataagcctaagtgtctggcaacagatgaatgcaaaaagaaaatgcactatctgtatacaatgaagtactctttagccataaaaaataaaatcttgccatttatgacaatatggatgaatctagaggacatcatggtaagtgaaataagccagacacagacagacaagtacagcatgatctcactcataagt

SEQ ID NO: 112994 - DNA, 629 bp, Homo sapiens
catctttttaaagctaattgcaatgcacctagtcatttttattgcagcactatgtatgatagccaagatacagaataagcctaagtgtctggcaacagatgaatgcaaaaagaaaatgcactatctgtatacaatgaagtactctttagccataaaaaataaaatcttgccatttatgacaatatggatgaatctagaggacatcayggtaagtgaaataagccagacacagacagacaagtacagcatgatctcactcataagtggagtctaaaaaaaaaagaaaatacaaacatttaaaaaagttaatagcatagaagcagagagtagaaaaatgttaccagagactaaagacaggaggacgaaaagaaggatgaggaaactttgattggtggtataaaattacaactagataagagcaaaaaattctggtgttgtgttgcacgtagagtaagtatggttaacagtgaaatatcgtatattacaaaatagcttgaagagttgtcttcgaatgttctcaccacaaagaaatgataaatatgtaagataatagattcactctgaatggatcattatacaacatggataggtatccaggtatgaaattataccccatgaatatgtacaat

SEQ ID NO: 112995 - DNA, 569 bp, Homo sapiens
attaatatttggaactggtgtttaagaaaaaccatgtttgatgttggaaaatgctatgtccggtataactatagatgtttggaaagcagctcagttatgctaaagataaagaaaggagagaaaaatgacagaaggggaggtttgaacaaaacaaaataatacctgaaaatgttgaatggatatgtaatatttgtgaatgtttatgttctctatttcaccattatttaaacatttatattttcaaagggagamaataattatattttgaaatcattttatttttttatagagtgctgtattttttcttttcaatttcaatttggtaagcaaacaaaatcagtcagaatattatacataattaggtttcctttttgagatttgttgaaactctttatcctttatgtatgtatttcaagtagtataataaaaaagaaatataaaatgattagatatacataaaagtattgtagattatgtttttcatattttctttcttttaatgtattttgcagatatagccattccagattatgatttcacaaactaagatgattctcagtagggaagcg

SEQ ID NO: 112996 - DNA, 593 bp, Homo sapiens
aaacaaattaacaaaacctattgaaacccataatcatttagactatctacttacactttgggaggccaaggtgggcagatcacctgaggtcaggakttcaagacgagcctggccaacatagtgacatcccatctttactaaaaacacaaaaattaaacaggcgtggtggtgcatgcctgtaatttcagctactcaggaggctgaggcagggagaactgcttgaacttgggaaggggaggttacagtgagccaagactgggccactgaactccaactgggcgacagagggagactccatctcaaaaacaaacaaacacacaatcaaacgcttacacatccaaaaaactatctacttaaataccattctattaaaataaatatttttctgtgatcttaggtttgttttgtctcaataatataaatagtgtattggctgtctcaaagtgttaaatggaagcatattttatggcattgctgaaatatctaccaacttttcttactgtaagttatgcaatggtgcattgattaatgcattggaacttgttaagcagtttgcatgtctgaaaaaccaaggttcagaggtatgtaggtta

SEQ ID NO: 112997 - DNA, 593 bp, Homo sapiens
aaacaaattaacaaaacctattgaaacccataatcatttagactatctacttacactttgggaggccaaggtgggcagatcacctgaggtcaggagttcaagacgagcctggccaacatagtgacatcccatctttactaaaaacacaaaaattaaacaggcgtggtggtgcatgcctgtaatttcagctactcaggaggctgaggcagggagaactgcttgaacttgggaaggggaggttacagtgagccaagactgggccactgaactccaactgggcgacagagggagactccatctcaaaaacaaacaaacacacaatcaaacgcttacacatccaaaaaactatctacttaaataccattctattaaaataaatatttttctgtgatcttaggtttgttttgtctcaataatataaatagtgtattggytgtctcaaagtgttaaatggaagcatattttatggcattgctgaaatatctaccaacttttcttactgtaagttatgcaatggtgcattgattaatgcattggaacttgttaagcagtttgcatgtctgaaaaaccaaggttcagaggtatgtaggtta

SEQ ID NO: 112998 - DNA, 451 bp, Homo sapiens
gacaattaggtgctcagcacaaagcaaaatgttatgaatcaggaaaataaatagaacagagatcaaaattagatagatgcagaattggaatgatactgaaaacaagagatggaactgcagaaaatactatggcagatcattcattcctttgaatggtgaaagtagttaatacaatggctaacaattgaaatgraaaaccagacccagatgaaaaaatgcaaaccagtaaacttacctagtcctattattttactcaattgtaggaaatacatgaaaaaaaaagttgttcattatgaatccttttttctaacatgggaagaagtcaccactaaacctttctcatttttttactcaaatgtttgtgttttctcatagaacttataattttaatttatttttcaatatatgtttcccatacagtctagttggattcatagttgcgatgtttcat

SEQ ID NO: 112999 - DNA, 570 bp, Homo sapiens
taccccttcaaaaattttgaaaattaagagaaatcggtagaacagctgtattatcatttacaaaaatgtttctctacctatagaacaaacaattactttgtcctctaatttccaaataacttacagaacatttatttcctactgtcactggaatggcaggctggcaggctgagttggtagcccaattggttcctcacatcaaaagattccctttattatttccttattttctctttaattctggcactccttcatgattgaacttacagatgttcttttgtctrctaattttcgagtaagcctgtgctctctataactttcagtctcaatatccttctaccatcagccttttgtctaaacattcttattctggtttgtttccctgaactcttgacatcaatctctgttccttcaatattctgtttcttctactggaagcattctttcccagatttcacccactttactcttctcaatctctgtgtctgagttaaatgcttccttaggtttctatgtaggattgtctgtccatctgtaatttttctatatctctcatgttaacatacttat

SEQ ID NO: 113000 - DNA, 594 bp, Homo sapiens
ctttactgaaaaatgtctcctttaaaaaaaaatcaatgtgtttgtttactttmttaaaatgccgtcttaaactgcaaggtcaaagaaggtaagtatgatatttggatattaatatctaccacttaatacagaaactattctagcacttgtataggcagtataagacataattttagaactctaaaataaaaactcataaactgaagttaaatatccatttcccactgctatctccttttccttttaacacattgatatcatttggatctgtgtccccacccaaatctcatgtcaaactgtaagtcccactgttggaggtggggcctgttgggaggcaattggatcatcgggcggtttctcttaaatggtttagcaccatctccttggtgctgttcttgtgacagtgagtgagttattgtgagtctggttgttaaaagtgtatagcacctccccacctctcactcttcttcctgcttccagccatgtgaagtgctggctcccccttcaccttctgccatgattgttagcttactgaggcccccgcagaagcccagcagatgcatcatgctttctgtataacgtgcagaaccatga

SEQ ID NO: 113001 - DNA, 594 bp, Homo sapiens
ctttactgaaaaatgtctcctttaaaaaaaaatcaatgtgtttgtttactttcttaaaatgccgtcttaaactgcaaggtcaaagaaggtaagtatgatatttggatattaatatctaccacttaatacagaaactattctagcacttgtataggcagtataagacataattttagaactctaaaataaaaactcataaactgaagttaaatatccatttcccactgctatctccttttccttttaacacattgatatcatttggatctgtgtccccacccaaatctcatgtcaaactgtaagtcccactgttggaggtggggyctgttgggaggcaattggatcatcgggcggtttctcttaaatggtttagcaccatctccttggtgctgttcttgtgacagtgagtgagttattgtgagtctggttgttaaaagtgtatagcacctccccacctctcactcttcttcctgcttccagccatgtgaagtgctggctcccccttcaccttctgccatgattgttagcttactgaggcccccgcagaagcccagcagatgcatcatgctttctgtataacgtgcagaaccatga

SEQ ID NO: 113002 - DNA, 548 bp, Homo sapiens
gcctgttgggaggcaattggatcatcgggcggtttctcttaaatggtttagcaccatctccttggtgctgttcttgtgacagtgagtgagttattgtgagtctggttgttaaaagtgtatagcacctccccacctctcactcttcttcctgcttccagccatgtgaagtgctggctcccccttcaccttctgccatgattgttagcttactgaggccccygcagaagcccagcagatgcatcatgctttctgtataacgtgcagaaccatgagccaattaaactgcttttctttataaattacccagtctcaggtatttctttagagcaatgtaagaaaggactaatatagaaaattggtagaggaatatgatattgttgtaaacataccggaaaatgtgaaagtggctttgaaactggatagtgggcagagattggaagggtttggagagatcagaagaagacaggaagatgagggcaagttttgaacttactagagtcttgttacattgttgtgaccaagctactgatagagactcacaatgaagt

SEQ ID NO: 113003 - DNA, 479 bp, Homo sapiens
tgttaagctttaagacttaataactttcctactgggtttcagacttgcatgsggcccgtagccccttacttttggccaatttctcccttttgaaatgggagtatttacccaatccctgtacccccattatacattatatcttgggagtttttgttttttttttttattttacagggtcttaggcagaaggggcttgcctcatctcagataagactttagactttggatgtttgagttaatgctgaagtgagttaagactttgagggactgatgggaaggcatgattatattttgcaaactgagaaagacaaaatttgggagggactagggcaaaataatatggtttggatctatgtccccaaccaaatctcatgtcaaattgaaatacccagtgttggaggtggggcctgatgggaggttattggattgtggagtggtttctttttaatggtttaataccatttccttggtgctattct

SEQ ID NO: 113004 - DNA, 479 bp, Homo sapiens
tgttaagctttaagacttaataactttcctactgggtttcagacttgcatgcggcccgtagccccttacttttggccaatttctcccttttgaaatgggagtatttacccaatccctgtacccccattatacattatatcttgggagtttttgtttttttttttwattttacagggtcttaggcagaaggggcttgcctcatctcagataagactttagactttggatgtttgagttaatgctgaagtgagttaagactttgagggactgatgggaaggcatgattatattttgcaaactgagaaagacaaaatttgggagggactagggcaaaataatatggtttggatctatgtccccaaccaaatctcatgtcaaattgaaatacccagtgttggaggtggggcctgatgggaggttattggattgtggagtggtttctttttaatggtttaataccatttccttggtgctattct

SEQ ID NO: 113005 - DNA, 479 bp, Homo sapiens
tgttaagctttaagacttaataactttcctactgggtttcagacttgcatgcggcccgtagccccttacttttggccaatttctcccttttgaaatgggagtatttacccaatccctgtacccccattatacattatatcttgggagtttttgttttttttttttattttacagggtcttaggcagaaggggcttgcctcatctcagataagactttagactttggatgtttgagttaatgctgaagtgagttaagactttgrgggactgatgggaaggcatgattatattttgcaaactgagaaagacaaaatttgggagggactagggcaaaataatatggtttggatctatgtccccaaccaaatctcatgtcaaattgaaatacccagtgttggaggtggggcctgatgggaggttattggattgtggagtggtttctttttaatggtttaataccatttccttggtgctattct

SEQ ID NO: 113006 - DNA, 479 bp, Homo sapiens
tgttaagctttaagacttaataactttcctactgggtttcagacttgcatgcggcccgtagccccttacttttggccaatttctcccttttgaaatgggagtatttacccaatccctgtacccccattatacattatatcttgggagtttttgttttttttttttattttacagggtcttaggcagaaggggcttgcctcatctcagataagactttagactttggatgtttgagttaatgctgaagtgagttaagactttgagggactgatgggaaggcatgattatattttgcaaactgagaaagacaaaatttgggagggactagggcaaaataatatggtttggatctatgtccccaaccaaatctcatgtcaaattgwaatacccagtgttggaggtggggcctgatgggaggttattggattgtggagtggtttctttttaatggtttaataccatttccttggtgctattct

SEQ ID NO: 113007 - DNA, 267 bp, Homo sapiens
gcagagtgtattattccagccggtttaccatgcaggcttcccaatttgatactaattttaacctgacttttatatatcaatattaaagagacgaaaaataaatgtgattttctccagctctatatccctccaaggagagctttggaactgaaatcctaatcrggggatacatttttaatatttttgtctcaaatgaatttggagtcctccatagtatttccaaagttgcagagcagaaaagaggttaccaataaaattgggtagttc

SEQ ID NO: 113008 - DNA, 267 bp, Homo sapiens
gcagagtgtattattccagccggtttaccatgcaggcttcccaatttgatactaattttaacctgacttttatatatcaatattaaagagacgaaaaataaatgtgattttctccagctctatatccctccaaggagagctttggaactgaaatcctaatcaggggwtacatttttaatatttttgtctcaaatgaatttggagtcctccatagtatttccaaagttgcagagcagaaaagaggttaccaataaaattgggtagttc

SEQ ID NO: 113009 - DNA, 519 bp, Homo sapiens
tcataccatcaaattcatatggccaagtataatcccattatataactattttctatcactaagcatagtccagctataagtgtaaaaggatgacgaaaaatgttgctaaaacattaagtgaaaatatactgaaaagaatccccaaagacaagaaatacaagaacacaccaatttgccatcacactttatgttcagccctttagtgaaaaaaaaaagttttctaattaatatttcatttacattggggacaagtacataatgtagtcatcaatttgcttagattctgaaataccattcatttatgtacatattttctctattcaaatgtactattcacatcacttgtcaatttgcatatattaaatcatcatgcaaaatttaccatattttgartattttattaataatgacccttttctacaatttttatatgcacttaaattttaaacagccaaacattcaaaggcttaaaaatcaacacttgaattttaaaatactatttgtatgaaatgaaatatt

SEQ ID NO: 113010 - DNA, 504 bp, Homo sapiens
gtaaagcaatttattttagtttttgtgagttgttcttctagagtatgttatatgactctatgccctcagtttgaaactctcattgaaccatatctaaattaactaataaaatgaactttgaattayatatgccactgtgtgcaaattaacattcattgactgtatgtgtatgtaaatattggccagtaaacagagccatttacatcttcataaagagaataacacttccaactaaaattccttctaaaattggactcatatcaattggaagtatttcaaacaattactaaactgatttacttgaacaaatatagaaaatattatctaagctatgtgtacctatttttttatattcctagaaattagggggaacttttatttcctttgattgaatatgagtttctaacttaacaaaatatataatagtgagtcagtaaaatgaatacttttaccaaggatggaaagtgttctgaattatctaaaagacattttcattgcagttaa

SEQ ID NO: 113011 - DNA, 600 bp, Homo sapiens
atgttatatgactctatgccctcagtttgaaactctcattgaaccatatctaaattaactaataaaatgaactttgaattatatatgccactrtgtgcaaattaacattcattgactgtatgtgtatgtaaatattggccagtaaacagagccatttacatcttcataaagagaataacacttccaactaaaattccttctaaaattggactcatatcaattggaagtatttcaaacaattactaaactgatttacttgaacaaatatagaaaatattatctaagctatgtgtacctatttttttatattcctagaaattagggggaacttttatttcctttgattgaatatgagtttctaacttaacaaaatatataatagtgagtcagtaaaatgaatacttttaccaaggatggaaagtgttctgaattatctaaaagacattttcattgcagttaacatttgcctgtgtagatcagattaatattaaaatctatttttttcttttaacaaaatttagcaaatgaggaattttctattggttcatttcttctgacatttcttctatgttgacccttctcccacttcatgttgcaaga

SEQ ID NO: 113012 - DNA, 600 bp, Homo sapiens
atgttatatgactctatgccctcagtttgaaactctcattgaaccatatctaaattaactaataaaatgaactttgaattatatatgccactgtgtgcaaattaacattcattgactgtatgtrtatgtaaatattggccagtaaacagagccatttacatcttcataaagagaataacacttccaactaaaattccttctaaaattggactcatatcaattggaagtatttcaaacaattactaaactgatttacttgaacaaatatagaaaatattatctaagctatgtgtacctatttttttatattcctagaaattagggggaacttttatttcctttgattgaatatgagtttctaacttaacaaaatatataatagtgagtcagtaaaatgaatacttttaccaaggatggaaagtgttctgaattatctaaaagacattttcattgcagttaacatttgcctgtgtagatcagattaatattaaaatctatttttttcttttaacaaaatttagcaaatgaggaattttctattggttcatttcttctgacatttcttctatgttgacccttctcccacttcatgttgcaaga

SEQ ID NO: 113013 - DNA, 600 bp, Homo sapiens
atgttatatgactctatgccctcagtttgaaactctcattgaaccatatctaaattaactaataaaatgaactttgaattatatatgccactgtgtgcaaattaacattcattgactgtatgtgtatgtaaatattggccagtaaacasagccatttacatcttcataaagagaataacacttccaactaaaattccttctaaaattggactcatatcaattggaagtatttcaaacaattactaaactgatttacttgaacaaatatagaaaatattatctaagctatgtgtacctatttttttatattcctagaaattagggggaacttttatttcctttgattgaatatgagtttctaacttaacaaaatatataatagtgagtcagtaaaatgaatacttttaccaaggatggaaagtgttctgaattatctaaaagacattttcattgcagttaacatttgcctgtgtagatcagattaatattaaaatctatttttttcttttaacaaaatttagcaaatgaggaattttctattggttcatttcttctgacatttcttctatgttgacccttctcccacttcatgttgcaaga

SEQ ID NO: 113014 - DNA, 504 bp, Homo sapiens
gtaaagcaatttattttagtttttgtgagttgttcttctagagtatgttatatgactctatgccctcagtttgaaactctcattgaaccatatctaaattaactaataaaatgaactttgaattatatatgccactgtgtgcaaattaacattcattgactgtatgtgtatgtaaatattggccagtaaacagagccatttacatcttcataaagagaataacayttccaactaaaattccttctaaaattggactcatatcaattggaagtatttcaaacaattactaaactgatttacttgaacaaatatagaaaatattatctaagctatgtgtacctatttttttatattcctagaaattagggggaacttttatttcctttgattgaatatgagtttctaacttaacaaaatatataatagtgagtcagtaaaatgaatacttttaccaaggatggaaagtgttctgaattatctaaaagacattttcattgcagttaa

SEQ ID NO: 113015 - DNA, 504 bp, Homo sapiens
gtaaagcaatttattttagtttttgtgagttgttcttctagagtatgttatatgactctatgccctcagtttgaaactctcattgaaccatatctaaattaactaataaaatgaactttgaattatatatgccactgtgtgcaaattaacattcattgactgtatgtgtatgtaaatattggccagtaaacagagccatttacatcttcataaagagaataacacttccaactaaaattccttctaaaattggactcatatcaattggaagtatttcaaacaattactaaactgatttacttgracaaatatagaaaatattatctaagctatgtgtacctatttttttatattcctagaaattagggggaacttttatttcctttgattgaatatgagtttctaacttaacaaaatatataatagtgagtcagtaaaatgaatacttttaccaaggatggaaagtgttctgaattatctaaaagacattttcattgcagttaa

SEQ ID NO: 113016 - DNA, 600 bp, Homo sapiens
atgttatatgactctatgccctcagtttgaaactctcattgaaccatatctaaattaactaataaaatgaactttgaattatatatgccactgtgtgcaaattaacattcattgactgtatgtgtatgtaaatattggccagtaaacagagccatttacatcttcataaagagaataacacttccaactaaaattccttctaaaattggactcatatcaattggaagtatttcaaacaattactaaactgatttacttgaacaaatatagaaaatattatctaagctatgtgtacctatttttttatattcctagaaattagggggaacttttatttcctttgattgaatatgagtttctaacttaacaaaatatataatagtgagtcagtaaaatgaatacttttaccaaggatggaaagtgttctgaattatctaaaagacattttcattgcagttaacatttgcctgtgtagawcagattaatattaaaatctatttttttcttttaacaaaatttagcaaatgaggaattttctattggttcatttcttctgacatttcttctatgttgacccttctcccacttcatgttgcaaga

SEQ ID NO: 113017 - DNA, 559 bp, Homo sapiens
agaagttggtggggtgattatatttttaagctatgaagtcagatagtgtgatgtttcatctcagtaccactataaaataaagttttaatcctgttcatgtcamtcttaattttcactagctttttaggtaaggaaaattcatgtccatcccttccttgattcatctctttcaaaagcaacactttaaatggttgatgacttaacatcactgcaactattttctccttcatttaagaacataatcaaccatttatgtgagcatgtttattttacacctcaattttggctcaaggaatataacacatagtggtttctttctttcatttgccatatcaaatccatgaacacctgcctttaagatgtatcagattacttttacctcttactagccatgtccaggcaactgccaaagcactggatcattggaatagcttcataaatgatgaccctatttctctcactttcattcctagaggctgtttttcagccaggagtcagaatgattataaaacataaatcaaataatttcacagtcttgctcatagctttctaattgttc

SEQ ID NO: 113018 - DNA, 559 bp, Homo sapiens
agaagttggtggggtgattatatttttaagctatgaagtcagatagtgtgatgtttcatctcagtaccactataaaataaagttttaatcctgttcatgtcaatcttaattttcactagctttttaggtaaggaaaattcatgtccatcccttccttgattcatctctttcaaaagcaacaytttaaatggttgatgacttaacatcactgcaactattttctccttcatttaagaacataatcaaccatttatgtgagcatgtttattttacacctcaattttggctcaaggaatataacacatagtggtttctttctttcatttgccatatcaaatccatgaacacctgcctttaagatgtatcagattacttttacctcttactagccatgtccaggcaactgccaaagcactggatcattggaatagcttcataaatgatgaccctatttctctcactttcattcctagaggctgtttttcagccaggagtcagaatgattataaaacataaatcaaataatttcacagtcttgctcatagctttctaattgttc

SEQ ID NO: 113019 - DNA, 559 bp, Homo sapiens
agaagttggtggggtgattatatttttaagctatgaagtcagatagtgtgatgtttcatctcagtaccactataaaataaagttttaatcctgttcatgtcaatcttaattttcactagctttttaggtaaggaaaattcatgtccatcccttccttgattcatctctttcaaaagcaacactttaaatggttgatgacttaacatcactgcaactattttctccttcatttaagaacataatcaaccatttatgtgagcatgtttattttacacctcaattttggctcaaggaatataacacatagyggtttctttctttcatttgccatatcaaatccatgaacacctgcctttaagatgtatcagattacttttacctcttactagccatgtccaggcaactgccaaagcactggatcattggaatagcttcataaatgatgaccctatttctctcactttcattcctagaggctgtttttcagccaggagtcagaatgattataaaacataaatcaaataatttcacagtcttgctcatagctttctaattgttc

SEQ ID NO: 113020 - DNA, 428 bp, Homo sapiens
aattgtttctggctgtagctccttccatgctttgtacatcttacttgtggtaggcagaatcacagctctccacaaatgatgtgatttggctgtatccccacccaaatctcaccttgaattgtaataattccatrtgaagaatggggtcaggtagagagaatttaatcatggggaaggtttatcccatgctgttcttgtggtagtaaataagtttcacgagatctgctgggtttataaacgggagttctcctgcacaagctctcttgcctgccaccacgtgggatgcaacattgcttctcattcgctttccaccatgattttgagggctcaccagccatgtggaactataagtcagttaaacctctttcttttataaattacccagtctcagctgtgtctttattagcagtgtgaggacaaactaatac

SEQ ID NO: 113021 - DNA, 428 bp, Homo sapiens
aattgtttctggctgtagctccttccatgctttgtacatcttacttgtggtaggcagaatcacagctctccacaaatgatgtgatttggctgtatccccacccaaatctcaccttgaattgtaataattccatgtgaagaatggggtcaggtagagagaatktaatcatggggaaggtttatcccatgctgttcttgtggtagtaaataagtttcacgagatctgctgggtttataaacgggagttctcctgcacaagctctcttgcctgccaccacgtgggatgcaacattgcttctcattcgctttccaccatgattttgagggctcaccagccatgtggaactataagtcagttaaacctctttcttttataaattacccagtctcagctgtgtctttattagcagtgtgaggacaaactaatac

SEQ ID NO: 113022 - DNA, 428 bp, Homo sapiens
aattgtttctggctgtagctccttccatgctttgtacatcttacttgtggtaggcagaatcacagctctccacaaatgatgtgatttggctgtatccccacccaaatctcaccttgaattgtaataattccatgtgaagaatggggtcaggtagagagaatttaatcatggggamggtttatcccatgctgttcttgtggtagtaaataagtttcacgagatctgctgggtttataaacgggagttctcctgcacaagctctcttgcctgccaccacgtgggatgcaacattgcttctcattcgctttccaccatgattttgagggctcaccagccatgtggaactataagtcagttaaacctctttcttttataaattacccagtctcagctgtgtctttattagcagtgtgaggacaaactaatac

SEQ ID NO: 113023 - DNA, 286 bp, Homo sapiens
cagggcccagtgcaaaatgaagtggatgttgtacctcgttcaaagtgttaagcgtttcaagatggcaacagcagagcattaggccaagtatgaggtcattatgtacatgggtccttgtgtgaccacasaggtcacaggaacatgaagctagacctgagtgtatattcagataggtaaatcttacagatttttaaaactcaataaaagaaaaactacatttcatgtgtgaacacaaaaattggaatttaattggcaatagcattgggatttgtgctcagagtcacag

SEQ ID NO: 113024 - DNA, 665 bp, Homo sapiens
tattttttatttttttgtaatttgattttattatcatgttttcatacccacacaaaataatcaatacattaacatacaaccatcacacatattcaacaattatcataattttgttgtttctgcttaaggtatccctgttctcttcttgccaaattattttaaaaatatatctcagagtgtaattttatacctacatacttaaggatacatctctagaaaatgcagatatttagtaatacatttttacacagttaatttatttttcttcaggatctcaattcaaatattgtttgttattaaaaaactgtctctagcatatgttttactatatatttaagaatataatttggaaaaaaaagtctgacatatagtccatgttcaatttacctcttcaactaatctactaaaaggaaaaaaatgacrccaatacttcttactcttccctgaagttatgttatgatatttttagattttgaaatcctgtaaagtgtgcccattattggtttcaagtacatgtttcctaactcatttcaatctcttctataatcaagtgcaagagaaaatataaaataggccccatgattgtagaaataaaagtggaaaaaactagcctagagttcataaaagtagacatataaaaatcttaaaatgataaaggccataat

SEQ ID NO: 113025 - DNA, 518 bp, Homo sapiens
tcttttaaataacttgaagaagctagtattattataagcttgattttgctggtgagaacattgagatgtagagattcagwgtagctagtgtttggtataactatgatttaaatttagttctgtcttattataatattaaacaagtatgtgacttcatagtgtaatgagtctcattcaaaacatacagcagttgcagcctaacatcttgttactttaggtggtgacataatgtattgactcatattgagcatttctaagtgtaagttttaagtagctttttttctttagaaaggtgctgaagataattcaaatacttttttgcatattattttgtgtccctgtagattgctaggactatgagggcagggccatatatattgtgttcatctctctatattcattttctaatgctggtccaagaaacaggttgagatgctaagtagggaggccatagaaaacatcattgaaaagatagcatttatgcaaaaatttaaaggtggtgagggattaaacatgta

SEQ ID NO: 113026 - DNA, 518 bp, Homo sapiens
tcttttaaataacttgaagaagctagtattattataagcttgattttgctggtgagaacattgagatgtagagattcagtgtagctagtgtttggtataactatgatttaaatttagttctgtcttattataatattaaacaagtatgtgacttcatagtgtaatgagtctcattcaaaacatacagcagttgcagcctaacatcttgttactttaggtggtgacataatgtattgactcatattgagcatttctaagtgtragttttaagtagctttttttctttagaaaggtgctgaagataattcaaatacttttttgcatattattttgtgtccctgtagattgctaggactatgagggcagggccatatatattgtgttcatctctctatattcattttctaatgctggtccaagaaacaggttgagatgctaagtagggaggccatagaaaacatcattgaaaagatagcatttatgcaaaaatttaaaggtggtgagggattaaacatgta

SEQ ID NO: 113027 - DNA, 518 bp, Homo sapiens
tcttttaaataacttgaagaagctagtattattataagcttgattttgctggtgagaacattgagatgtagagattcagtgtagctagtgtttggtataactatgatttaaatttagttctgtcttattataatattaaacaagtatgtgacttcatagtgtaatgagtctcattcaaaacatacagcagttgcagcctaacatcttgttactttaggtggtgacataatgtattgactcatattgagcatttctaagtgtaagttttaagtagctttttttctttagaaaggtgctgaagataattcaaatacttttttgcatattattttgtgtccctgtagattgctaggactatgagggcagggccatatatattgtgttcatctctctatattcattttctaatgctggtccaagaaacaggttgagatgctaagtagggaggccrtagaaaacatcattgaaaagatagcatttatgcaaaaatttaaaggtggtgagggattaaacatgta

SEQ ID NO: 113028 - DNA, 277 bp, Homo sapiens
attttaaaactcacactgccttagaattttaccatcaatgaaagagagggtcactacaggtcctaagaagagaagtgacacgctcttttatgtaaaaaggatgactgtggatattgtgttggtaactgactgtaagrggacacttttaggaaaagtcccctctttagatattgactttatccaagaggaaaacagtagtaattcacacctcagtagacatggtgagaagtagttgattctacatattataaagtctttgggtttaagcaaccagagg

SEQ ID NO: 113029 - DNA, 542 bp, Homo sapiens
tagtattatgagaataatctacttcaaatgctgctgataaatcaagtaaggtgagaaaaataactataagattaacaaagtggaggacaggtttaattagagtagtggggggcaaaaatctgtatggaaatgaaatgattaaagagaaaatgcarggagcaaatgacacggtgactataaattatccttttaaagagtttgggtgaaaaagggatcaaattccctggtggtatctgacaatgaaaatggggaaaatgaagaatactggttgcttatttgcttttattttctagtatgacagaagtaatagcttatttgtatgatcatgaaatgacccaataaagaggaaaatttgattatgtataagaggggtaagtattgaaaagtatctgtctatagcctgtgtagtcagaaagagttgatgaacaagtaaaggcgtaagcttgaggtaggtgtataaacatttcatttctggcagtggttttctttaaggagagatttcactctgcaaggagccaattggcaatgtttggagatgtttt

SEQ ID NO: 113030 - DNA, 536 bp, Homo sapiens
atttttgccaacttatagatgggagaatttaaaaagatgttggtgtttttaaaaatagcttttagaaaagcaacaaagtgattttatgtctggaggtgaagacccttggaggaatttttctcatggactgtcaaaatatatacccaaaccataagtggatgtctgaataataaytcatttacttttatttgatttgtcaggttttatttttcaaaacaagagtcagaataagtgatgtcttttagttggacttgtttctattgtttattaacatatccaaggaacacgtagaatgaattggcagaatataatcatattatcaaataattattagtttagtcagtttcataaacctagataatcaaatgaaaatacataataatataattatgtcataatttttatcaaaattttaaaattaatgaattaaatccagctaccaaagataagggtttgtgaaaagtagatacaatactagagtggaggttgtaatgaaaactcagaatgggctatagtattaaaaaaaaataaagacc

SEQ ID NO: 113031 - DNA, 604 bp, Homo sapiens
aaagcaacaaagtgattttatgtctggaggtgaagacccttggaggaatttttctcatggactgtcaaaatatatacccaaaccataagtggatgtctgaataataactcatttacttttatttgatttgtcaggttttatttttcaaaacaagagtcagaataagtgatgtcttttagttggacttgtttctattgtttattaacatatccaaggaacacgtagaatgaattggcagaatataatcatattatcaaataattattagtttagtcagtttcataaacctagataatcaaatgaaaatacataataatataattatgtcataatttttatcaaaattttaaaattaatgaattaaatccagctaccaaagatargggtttgtgaaaagtagatacaatactagagtggaggttgtaatgaaaactcagaatgggctatagtattaaaaaaaaataaagacctccagtatttttttttctcaaaatggcagattagagtcattgttagcatgcctctcctatttggaaagacagaattgtgtgtggagattcacactgtaaattttttccaagaagcaacacagaaaattaacagg

SEQ ID NO: 113032 - DNA, 574 bp, Homo sapiens
tataactttatatctttcccacctctaatacttttatttggcctctaatggcggtctcaaacccagttttaaatttacttgcaccagaggaagattatacaatacccaagacatgatatttgtgtcatttaatttgactgtgccttttcygaaaggtaatttgtggtggatcaaaagttccttcctatgtaaccaattagggctaaaggtgaaggtagctccattatcaagcagaggagagacttctgaggtcctttgtctgtcacttataacatttgtttgacaacaaaccccatgacacaagtttacctgtgtaacaaatctgcacatgtacccatgaacttaaaataaaagttaaacaaacaaacaaataaaacccaaacatttgtttgggtgtgctagtaaggttcttgttattgattgtgcgggcaaacattatgcatgatgagttatacagcctgatattgggaggaagcatttggaaatagggtaaaatcatagcagatgggaaaggtgtttataagtagattacattaccgtggagggaagccactacaatattttcatgcaaaca

SEQ ID NO: 113033 - DNA, 574 bp, Homo sapiens
tataactttatatctttcccacctctaatacttttatttggcctctaatggcggtctcaaacccagttttaaatttacttgcaccagaggaagattatacaatacccaagacatgatatttgtgtcatttaatttgactgtgccttttctgaaaggtaatttgtggtggatcaaaagttccttcctatgtaaccaattagggctaaaggtgaaggtagctccattatcaagcagaggasagacttctgaggtcctttgtctgtcacttataacatttgtttgacaacaaaccccatgacacaagtttacctgtgtaacaaatctgcacatgtacccatgaacttaaaataaaagttaaacaaacaaacaaataaaacccaaacatttgtttgggtgtgctagtaaggttcttgttattgattgtgcgggcaaacattatgcatgatgagttatacagcctgatattgggaggaagcatttggaaatagggtaaaatcatagcagatgggaaaggtgtttataagtagattacattaccgtggagggaagccactacaatattttcatgcaaaca

SEQ ID NO: 113034 - DNA, 574 bp, Homo sapiens
tataactttatatctttcccacctctaatacttttatttggcctctaatggcggtctcaaacccagttttaaatttacttgcaccagaggaagattatacaatacccaagacatgatatttgtgtcatttaatttgactgtgccttttctgaaaggtaatttgtggtggatcaaaagttccttcctatgtaaccaattagggctaaaggtgaaggtagctccattatcaagcagaggagagacttctgaggtcctttgtctgtcacttataacatttgtttgacaacaaaccccatgacacaagtttacctgtgtaacaaatctgcacatgyacccatgaacttaaaataaaagttaaacaaacaaacaaataaaacccaaacatttgtttgggtgtgctagtaaggttcttgttattgattgtgcgggcaaacattatgcatgatgagttatacagcctgatattgggaggaagcatttggaaatagggtaaaatcatagcagatgggaaaggtgtttataagtagattacattaccgtggagggaagccactacaatattttcatgcaaaca

SEQ ID NO: 113035 - DNA, 578 bp, Homo sapiens
aaccaattagggctaaaggtgaaggtagctccattatcaagcagaggagagacttctgaggtcctttgtctgtcacttataacatttgtttgacaacaaaccccatgacacaagtttacctgtgtaacaaatctgcacatgtacccatgaacttaaaataaaagttaaacaaacaaacaaataaaacccaaacatttgtttgggtgtgctagtaaggttcttgttattgattgtgcgggcaaacattatgcatgatgagttatacwgcctgatattgggaggaagcatttggaaatagggtaaaatcatagcagatgggaaaggtgtttataagtagattacattaccgtggagggaagccactacaatattttcatgcaaacagctcagagtgaggatatcatacttaactatcttttgctattgtcatccaaacaaatgggctttgttggtgaaaatctcttggcctgcttactgcagaaaaggaaaattggactcctactgatttggatgttctacctgtataatttgaataaaacagatgacaaagtgccccctgacaactcagcttgtgtgta

SEQ ID NO: 113036 - DNA, 625 bp, Homo sapiens
taaccctactactaatttacacaattacatagtgaatctttgaggcttagrtgctaatatatatgaagtaactaaaataaaaactaataaattccttgtaattggtttgcatttatttcagcagaaatgatatattactattttatttataattataaaagcatgtgttaattttcagtatgctattctgtaagtgaaagtatgtttgaaaattgtaatggtggagaaaaatttagctgcactctacttaaaactaaacatacacacattacagatagagtccaatgagtttttaagaaatttattgagctataattaacatattaaaagccaaaaatatgtaagataaattattagatatgctctgacatatttatacatccgtgagatcatcattattgtcaagatagtgaacatataaatccacaaaatgtttcctcatgactacttttaataatccccttttgcaattattgtctctcctaataagcatcttagctagacaactgctgaccatctttcagtattgtatattactgtatattgtatattggtgcatccagaagttttatataaatggaatcatataaggtgcactattttttggctggcatttttgctttac

SEQ ID NO: 113037 - DNA, 625 bp, Homo sapiens
taaccctactactaatttacacaattacatagtgaatctttgaggcttagatgctaatatatatgaagtaactaaaataaaaactaataaattccttgtaattggtttgcatttatttcagcagaaatgatatattactattttatttataattataaaagcatgtgttaattttcagtatgctattctgtaagtgaaagtatgtttgaaaattgtaatggtggagaaaaatttagctgcactytacttaaaactaaacatacacacattacagatagagtccaatgagtttttaagaaatttattgagctataattaacatattaaaagccaaaaatatgtaagataaattattagatatgctctgacatatttatacatccgtgagatcatcattattgtcaagatagtgaacatataaatccacaaaatgtttcctcatgactacttttaataatccccttttgcaattattgtctctcctaataagcatcttagctagacaactgctgaccatctttcagtattgtatattactgtatattgtatattggtgcatccagaagttttatataaatggaatcatataaggtgcactattttttggctggcatttttgctttac

SEQ ID NO: 113038 - DNA, 625 bp, Homo sapiens
taaccctactactaatttacacaattacatagtgaatctttgaggcttagatgctaatatatatgaagtaactaaaataaaaactaataaattccttgtaattggtttgcatttatttcagcagaaatgatatattactattttatttataattataaaagcatgtgttaattttcagtatgctattctgtaagtgaaagtatgtttgaaaattgtaatggtggagaaaaatttagctgcactctacttaaaactaaacatacacacattacagatagagtccaatgagtttttaagaaatttattgagctataattaacatattaaaagccaaaaatatgtaagataaattattagatatgctctgacatatttatacatccrtgagatcatcattattgtcaagatagtgaacatataaatccacaaaatgtttcctcatgactacttttaataatccccttttgcaattattgtctctcctaataagcatcttagctagacaactgctgaccatctttcagtattgtatattactgtatattgtatattggtgcatccagaagttttatataaatggaatcatataaggtgcactattttttggctggcatttttgctttac

SEQ ID NO: 113039 - DNA, 529 bp, Homo sapiens
tttaagaaatttattgagctataattaacatattaaaagccaaaaatatgtaagataaattattagatatgctctgacatatttatacatccgtgagatcatcattattgtcaagatagtgaacatataaatccacaaaatgtttcctcatgactacttttaataatccccttttgcaattattgtctctcctaataagcatcttagctagacaactgctgaccatctttcagtattgtatrttactgtatattgtatattggtgcatccagaagttttatataaatggaatcatataaggtgcactattttttggctggcatttttgctttacagcaaaattcttttgaaattcattcatgttgttgcatgtgtcagtagtcgaacctttttattgctgagcagaattttgctgtacgtatatatcaccaattacttgttaatgaatatgtgggtcatgaccacattttagctattaaagagaaaatgcctatgaatatttatatacaacaatttctttttcattttt

SEQ ID NO: 113040 - DNA, 529 bp, Homo sapiens
tttaagaaatttattgagctataattaacatattaaaagccaaaaatatgtaagataaattattagatatgctctgacatatttatacatccgtgagatcatcattattgtcaagatagtgaacatataaatccacaaaatgtttcctcatgactacttttaataatccccttttgcaattattgtctctcctaataagcatcttagctagacaactgctgaccatctttcagtattgtatattactgtatattgtatattggtgcatccagaagttttatataaatggaatcatataaggtgcactattttttggctggcatttttgctttacagcaaaattcttttgaaattcattcatgttgttgcatgtgtcagtagtcgaacctttttattgctgagcagaattttkctgtacgtatatatcaccaattacttgttaatgaatatgtgggtcatgaccacattttagctattaaagagaaaatgcctatgaatatttatatacaacaatttctttttcattttt

SEQ ID NO: 113041 - DNA, 529 bp, Homo sapiens
tttaagaaatttattgagctataattaacatattaaaagccaaaaatatgtaagataaattattagatatgctctgacatatttatacatccgtgagatcatcattattgtcaagatagtgaacatataaatccacaaaatgtttcctcatgactacttttaataatccccttttgcaattattgtctctcctaataagcatcttagctagacaactgctgaccatctttcagtattgtatattactgtatattgtatattggtgcatccagaagttttatataaatggaatcatataaggtgcactattttttggctggcatttttgctttacagcaaaattcttttgaaattcattcatgttgttgcatgtgtcagtagtcgaacctttttattgctgagcagaattttgctgtacgtatatatcaccaattacttgttaatgaatatgtgggtcatgaccacattttagctattaaagagaaaatgcctatgaayatttatatacaacaatttctttttcattttt

SEQ ID NO: 113042 - DNA, 560 bp, Homo sapiens
ctatcaaaatttcagtggcatttttcaaagcaatggaaaaaagcaattctaaaatcygtgtgcaacagaccccaaacagtcaaaacattcttgaacagaaaaaacaaaagtggaagcttcacattaccttattccaaactaaattataaagctatagtaattaaaatagtatggtactggcataaaaacagacatgtaggccaagggaaaagaatagaaagcacagaaacaaatccatgcctttacaatcaattgatcttcagcattggtgccaagaaaacacaatgataaaagtttagtctctttaataaatggtgttgggaaaactggatatccacatgcagaagaatgaaactgaacccttatctcaccccacatacaaaaattgactcaaaatggataaaagacctcaacctaggagcaatattgtaaaactcttagacataaatataggagaaaagctccttgacactggtattggtaataaattttcagatttgacaccaaaagtatagacaacaaaagcaaaactagacaaatgggactaaatcaaagtaaaa

SEQ ID NO: 113043 - DNA, 560 bp, Homo sapiens
ctatcaaaatttcagtggcatttttcaaagcaatggaaaaaagcaattctaaaatctgtgtgcaacagaccccaaacagtcaaaacattcttgaacagaaaaaacaaaagtggaagcwtcacattaccttattccaaactaaattataaagctatagtaattaaaatagtatggtactggcataaaaacagacatgtaggccaagggaaaagaatagaaagcacagaaacaaatccatgcctttacaatcaattgatcttcagcattggtgccaagaaaacacaatgataaaagtttagtctctttaataaatggtgttgggaaaactggatatccacatgcagaagaatgaaactgaacccttatctcaccccacatacaaaaattgactcaaaatggataaaagacctcaacctaggagcaatattgtaaaactcttagacataaatataggagaaaagctccttgacactggtattggtaataaattttcagatttgacaccaaaagtatagacaacaaaagcaaaactagacaaatgggactaaatcaaagtaaaa

SEQ ID NO: 113044 - DNA, 560 bp, Homo sapiens
ctatcaaaatttcagtggcatttttcaaagcaatggaaaaaagcaattctaaaatctgtgtgcaacagaccccaaacagtcaaaacattcttgaacagaaaaaacaaaagtggaagcttcacattaccttattccaaactaaattataaagctatagtaattaaaatagtatggtactggcataaaaacagacatgtaggccaagggaaaagaatagaragcacagaaacaaatccatgcctttacaatcaattgatcttcagcattggtgccaagaaaacacaatgataaaagtttagtctctttaataaatggtgttgggaaaactggatatccacatgcagaagaatgaaactgaacccttatctcaccccacatacaaaaattgactcaaaatggataaaagacctcaacctaggagcaatattgtaaaactcttagacataaatataggagaaaagctccttgacactggtattggtaataaattttcagatttgacaccaaaagtatagacaacaaaagcaaaactagacaaatgggactaaatcaaagtaaaa

SEQ ID NO: 113045 - DNA, 390 bp, Homo sapiens
agaagacatattcaaaatgaaacaaagggataaggacagctcaaaacaaaacaaaacaaaacaaaatctcaaggctgccaatacagccagataactcgtggctatagttatgcctgctaaggtttgtattcatggggcttggctttgattagctcccttggtcttattttcccaaacaaagaaatctctgggttatgggcacctatttactccgatcacctggaaggatttgcaggataattgttcagaattaaaatattgatccagattttttatattactcrtccctttggttcttttgagctgcagccgtacattgctggttggtccacaggaacaagcagggtagtctaaaatgtaggcaaaaacttaaaaacaactaatgggatt

SEQ ID NO: 113046 - DNA, 390 bp, Homo sapiens
agaagacatattcaaaatgaaacaaagggataaggacagctcaaaacaaaacaaaacaaaacaaaatctcaaggctgccaatacagccagataactcgtggctatagttatgcctgctaaggtttgtattcatggggcttggctttgattagctcccttggtcttattttcccaaacaaagaaatctctgggttatgggcacctatttactccgatcacctggaaggatttgcaggataattgttcagaattaaaatattgatccagattttttatattactcgtccctttggttcttttgagctgcagcygtacattgctggttggtccacaggaacaagcagggtagtctaaaatgtaggcaaaaacttaaaaacaactaatgggatt

SEQ ID NO: 113047 - DNA, 622 bp, Homo sapiens
gaagtaaattttattttcttttttatacctcccatatatattctatttttctcattattatttattttatcccaaatcttttatctgtgatcattttcctttgtttgaaatttgtcttttgasgtttctttggaaggtgcttttggatgataaattttctgttattctttgtctaaaatgtcattattttgactcatttataaaaggagtttttgtgttttataaacctctaatgtatagaagtgtgtctaaactcattgaggatattttccaaattttttcctactttttattgctgttgataagaagtcagtgttggtattttgacatttaagttatgtgtcattttgttgtggtagttctgaagatcttccctctgttttatattctccttcacctttcataaatgtactttatatttatttggtaataaattttgaacatatactatgctataaagataatctaggccctttggttacatcttgtaaataaaatcaacaaaatctgttttgagattatattgtaatataagatacccaaagtaactaggatgtgtaccatatgtttgaaggtggtaaatacgatgagaaaaatagatcaggtcaggaagaatgaagat

SEQ ID NO: 113048 - DNA, 622 bp, Homo sapiens
gaagtaaattttattttcttttttatacctcccatatatattctatttttctcattattatttattttatcccaaatcttttatctgtgatcattttcctttgtttgaaatttgtcttttgacgtttctttggaaggtgcttttggatgataaattttctgttattctttgtctaaaatgtcattattttgactcatttataaaaggagtttttgtgttttataaacctctaatgtatagaagtgtgtctaaactcattgaggatattttccaaattttttcctactttttattgctgttgataagaagtcagtgttggtattttgacatttaagttatgtgtcattttgttgtggtagttctgaagatcttccctctgttttatattctccttcacctttcataaatgtactttatatttatttggtaataaattttgaacatatrctatgctataaagataatctaggccctttggttacatcttgtaaataaaatcaacaaaatctgttttgagattatattgtaatataagatacccaaagtaactaggatgtgtaccatatgtttgaaggtggtaaatacgatgagaaaaatagatcaggtcaggaagaatgaagat

SEQ ID NO: 113049 - DNA, 582 bp, Homo sapiens
cacttggtgccaaacctgccagaaccatggttttgaacttttcagcctcctggactgtgagaaacaagtttctgttcttatcagtctcagctattttgttacagaagcacaagcgaactgagacctgagatgggartgtttatgtgctaggtatggagctaatttctgaataaataaagatgaatacattctatgacctcatcatctagtgcctgttacagtcatgcagtggatattttttcttgccttcttattactcatttttgctctcctcactaaatattgaggaaaacatgaatgcatcatcagtttttccactgatacaactgtttaagaagtacatatgacattatattttttctttctgtattctgtagacttacctgtaaagtctaaggctaacattgactttatgctaattagtactgtgttcatttcagatgtgtaatatgccttgtacaaatataaatagataaaacattaaaggtgctactactcaaaacacacagggaataaaatattctatttgaaacatcaacatagagtttacactgagggaaatttttattcattagtttaaat

SEQ ID NO: 113050 - DNA, 518 bp, Homo sapiens
ggtaactttatgagcagttttattgaggtaaaaaagggtggcttattattggaagatagcacttcaaataaatggtctattgtctgtatttggcctgttgtccactggtttgaaaactcttcaggacatatttattgagctgttgttgagcagctggtttcttatttatcagcaggaaatcctggcttgcacatatgacattgctgattttctagtaagagtatatttggatgaaaatccttttgttcctcatataactccccctaacaaataaattakaatcaaccttcatgtggggagacctcccagtggaatacgagaagtaacaagtgacctaattgtgctgcaattgagtgatataaccccagtgaaggcggtggggaagagaaaaactaacccaagtaattatgggaaacagcattttggctgtatatcggagattaaacaaatagaactgtgcataaatactgtattatagttactgagttttttttctcacagggtatggggcagcaatt

SEQ ID NO: 113051 - DNA, 633 bp, Homo sapiens
aattgtgggagctaagaacataaagtacattgatttctttattacagctagcagatatttaagaatgttagtacgggtctttgaataaattttgcttttaagagaagttactatgtattcctaattagatagggaggaaagtctttgaagaggaacctctacttcactttttacagtaaataacagcctctggctatttcagggcactaaattgatgcaagagaaatgggtactaggtaaagctaggacaccaaaagaccatttcctgaagcattctcaatgatgrttgatcaagatgacaatgtcctctttcaggacacctgaaatccaagaaaggcatcttttatattacttaaaagtatcaagatcaggatgtcaagaacatgggaaggtgttgagagcactaaaggatcaacgtagagttttacacaagtagatgaaaagaccaaaagacactgataataaaacagtgaagaagaatttaagtaaaaggaagaaaatgctaaccctgatttgatgcctaacttaatacaactgttaagtttaacctaacgctgcctccttacatattttaaattcagcctaatgatttctttgtacatagtgaactatatctaactggatgtgtaaaca

SEQ ID NO: 113052 - DNA, 555 bp, Homo sapiens
ctttgtacccaataagtagtttttcaatctctcctcttgtattccccagtatcagttgtcccatctttataaccacgtataaccaatgtttagttcccayttataagtgagaacacatggtatttggttttctgtttctgctttagttcacttagaataatggcctctggctgcacccgtgttgctacaaataacacagttttgttcttctttatggctgtatagtattacatgttgtgtaggtaccacattttgtttatccaatccactgctgatgggcacttggtttggttccatgtctttgctattgtgactagtgttgcaatgaatatatatgggtgcatgtatctttttggtggaacaatctattttcctttgggtatatatccagtaataggattgctgggtcacatggtagttcagcttttagttctttaagaaatctgcaaactgttttctacagtgactgaactaattcacattccccccaacagtgtacaagaatttccttttctccacagccccatcgacagctgtaattttttgacttttaac

SEQ ID NO: 113053 - DNA, 555 bp, Homo sapiens
ctttgtacccaataagtagtttttcaatctctcctcttgtattccccagtatcagttgtcccatctttataaccacgtataaccaatgtttagttcccacttataagtgagaacacatggtatttggttttctgtttctgctttagttcacttagaataatggcctctggctgcacccgtgttgctacaaataacacagttttgttcttctttatggctgtatagtattacatgttgtgtaggtaccacattttgtttatccaatccactgctgatgggcacttggtttggttccatgtctttgctattgtgactagtgttgcaatgaatatatatgggtgcatgtatctttttggtggaacaatctattttcctttgggtatatatccagtaataggattgctgggtcacatggtagttcagcttttagttctttaagaaatctgcaaactgttttctacagtgactgaactaattcacattccccccaacagtgtacaagaatttccttttctccacagccccatcracagctgtaattttttgacttttaac

SEQ ID NO: 113054 - DNA, 589 bp, Homo sapiens
aatttctgggacactaatacgtgctattactattattactttttttttttgagacggagtctcccactgtcgcccaggctggagtgcagtgatgtggtctcagtccactgcaacctctgcctttcaggttcaagcaattctcgtgcctcagcctcctgagtagcaggcattacaggcgcccaccaccaaacctggctaatttttgtgttttcagtagagatggggtttcatcatattggtcaggctagtcttgaactcctgacttcaagtgatctgtccaatttggcctcccaaagtgctgagattacagaggtgagccaccaagccccacccatgctacttaatcctatcaagttctgcaaattttattttaaaraatataatcaatttacaatcctgctatgatttaatgtcatttaccagatccccaacatttggtattcttttaatttttgccaaccaggttttcttaaaagatcttctatctcattattatattaatatcaatttctgttactgtaaatttactaattctgttttaattacatctaaatttttctagtttagtttattttctcatcatattcat

SEQ ID NO: 113055 - DNA, 546 bp, Homo sapiens
ccgtataagacaggccattttgttcataagccccctttttttgcgtgtagctttgaaatcatctcacagaaatccgctagcttctcttggcctgtccatagagaaagtcaatagcttgcatttgttctgtttttgtatttgtgtcctcaaaaaaccacatttctttgtgatcatattaagaatacagtaagaaatctaaattattgagctttcaatgtttgctagtctctataygtaaaagcttattttttttctgttttatcgcatagtatctctacaagttagacaacaatcattcattccatttcagagaagggaaaaatgagtcacaggtaagtaacttgcatgctcaaaataacatggctagaaagtggatgagccagagaatagcactagtgtttaaactatctacgtgtcttaattagttatttcttttcttttaaaggattttataaaaagatgtaaagagaatggtaattgtggcagcctttttcaacttcgtgttgcaattggatgtctatattttcttaactgaaggagaacatc

SEQ ID NO: 113056 - DNA, 592 bp, Homo sapiens
gtgttatacccattgcctgcagcaaagacaagtgagggacaattcttttgttgtttgtttgttcttaacaattgtaacaaagtcaaattatttgatctcaggagtttttctttctaagcaatagaatggttaaagatcatgaaatgagataatgtaaattagatamatgtaaatctagggagcgtgaccactacaaccagagattttgagttcttctaagttaatggcatgataatcaacatcctcaagaaggagcacagtagggacacacgctcttaaatgccagctgatgtgttattcttattattatcagtattcattattttggttgaaatggtcattagtttctccctataggtaaccctataattgttagcattagccacctgagctgtgtttaggggagattccagtgtgtttagttattcaggtaactgtgtcacaacagcacatttctaaggatgccagacttctctgtgtattcctcctagcaaagtcagctgcagatggaggtaggttaactttacagaatacacaaagccctgcttctacttagactttctgccattctatcaaaataaaaggtgaattc

SEQ ID NO: 113057 - DNA, 578 bp, Homo sapiens
ggaaggaactgaggatgacatcattgtctgtctcattctctatgaacctatagcacctttgctatgcttctatggtgaactttctttccmctcaaccttgtggtcagaatttatgctactataatttgtggaagaagaagggacatctgcaaacctctccttattcttttcaacattactttccttttgaaacttaggaaacccatgatcagagttgaaaagcaaaggtgctgacaactacatctaaattgaaaataattggatgcttgtgtgtcaaagcaccaaggcataaagccaagtatctgaacatcaatggaaaggcaagtgggtcagaagataacctgtatatcctgtatccctctgtatcactatcttctgaaggctccttttggaatacatcgtgttctcttgtaacccaatgaagtcaaagcctcttattatagtatgttaatagtgctggacaattcagacgagacctctcgaatggaaaggagtcatctttaaaggcttgagagaaagtaaggacctaaaataaaccttggcaaatccctacactataaagtaaaatatttgaaata

SEQ ID NO: 113058 - DNA, 466 bp, Homo sapiens
aagaatttgttttctgcattcacattttaacttccccttgatcacttgtcagtaactaagaagcaatgaaattaagttgtcccccaatcagttgctgtctataaaatacaataataataacaactgttagactgagaacttactatgtgacttggagtatcactggcctattgtctgttaactattttaattcacacaacagccatttgaggcaaatatttttcctctcactttataaatgaggaaactaagggacagagaggycaagtaaaacccaaggtcacgaagctggcaagtggcagaaaaaggattctaacccagactagggggctgcaaaacctactctcccctcaccactacattctgtgaccactcctttggtacaataacctgtggaagacaatatactgaaaaaccacactgatgtaaataattgcagtttaaataaaagaggtatatttggtga

SEQ ID NO: 113059 - DNA, 572 bp, Homo sapiens
aacacacatatgcacacatatattcatataagcatatgggtgtatagttatacatcataactatattgatataaagataaaatattactattatatattaaaacattgtatttaacataaaattttatgttttgaatatttaaataaattaacatatttttgaaggactttaaatatatcattattccctaggtattgtgtttactatgcctaggggatgcattaatgttacttaactgaaaacatgttttctgggggaaaaatgatgaataaagtatctcagaaatatctgggggaaatcatgctaaaagatcaatagtttaaacagtctgcatttgggatcttttttggaatatacaagagaaagcaacaagtccaatgtaaacgaagtagagtgaggaaagaaaatgtgaagccaagtaggagaccaagtgagggtcctgctggagagtcttttatgataggcccacagactttactctgagcaggaagtaaagytgttgaaggaatgtgttcagcagagaaattatatgaccagacattcatttgaacagaattacatggtctgaagg

SEQ ID NO: 113060 - DNA, 588 bp, Homo sapiens
ggaattttattgatttattgaatcaaactgatggattaggaaactccaagactctataagtataaagtatttaataagacacrttaaataaaatcctgataaaaatttatataagcaaaatagcaaatttagtgatctagtgacaaattatcaggtatatcagtgactgagaaaataaagatttcattaaatctaagcttggaatcatcttagttacttcaagggaaatatttgatgtatattacatgacatatatatgaaatgtgcatatgcatttttattgctgacttgcaaacctcttcctgtaaacttacaaactattcccagtgggaaatagtttagttagactaagacatcagataagtgcaagagacataaagtaagagtggcttaaaaaatggcaggtagatttgattattacacattgtaggcctgtctaaaaacatcatgtatactttatacatatatacaactattatgaacccataacattaaaaaaattgaaaaacaaatttttaaaaagaaaaattatttctctgtcatgtaaaagttggagcttgtcaggcatgctatttcaaaaagttacct

SEQ ID NO: 113061 - DNA, 588 bp, Homo sapiens
ggaattttattgatttattgaatcaaactgatggattaggaaactccaagactctataagtataaagtatttaataagacacgttaaataaaatcctgataaaaatttatataagcaaaatagcaaatttagtgatctagtgacaaattatcaggtrtatcagtgactgagaaaataaagatttcattaaatctaagcttggaatcatcttagttacttcaagggaaatatttgatgtatattacatgacatatatatgaaatgtgcatatgcatttttattgctgacttgcaaacctcttcctgtaaacttacaaactattcccagtgggaaatagtttagttagactaagacatcagataagtgcaagagacataaagtaagagtggcttaaaaaatggcaggtagatttgattattacacattgtaggcctgtctaaaaacatcatgtatactttatacatatatacaactattatgaacccataacattaaaaaaattgaaaaacaaatttttaaaaagaaaaattatttctctgtcatgtaaaagttggagcttgtcaggcatgctatttcaaaaagttacct

SEQ ID NO: 113062 - DNA, 588 bp, Homo sapiens
ggaattttattgatttattgaatcaaactgatggattaggaaactccaagactctataagtataaagtatttaataagacacgttaaataaaatcctgataaaaatttatataagcaaaatagcaaatttagtgatctagtgacaaattatcaggtatatcagtgactgagaaaataaagatttcattaaatstaagcttggaatcatcttagttacttcaagggaaatatttgatgtatattacatgacatatatatgaaatgtgcatatgcatttttattgctgacttgcaaacctcttcctgtaaacttacaaactattcccagtgggaaatagtttagttagactaagacatcagataagtgcaagagacataaagtaagagtggcttaaaaaatggcaggtagatttgattattacacattgtaggcctgtctaaaaacatcatgtatactttatacatatatacaactattatgaacccataacattaaaaaaattgaaaaacaaatttttaaaaagaaaaattatttctctgtcatgtaaaagttggagcttgtcaggcatgctatttcaaaaagttacct

SEQ ID NO: 113063 - DNA, 588 bp, Homo sapiens
ggaattttattgatttattgaatcaaactgatggattaggaaactccaagactctataagtataaagtatttaataagacacgttaaataaaatcctgataaaaatttatataagcaaaatagcaaatttagtgatctagtgacaaattatcaggtatatcagtgactgagaaaataaagatttcattaaatctaagcttggaatcatcttagttacttcaagggaaatatttgatgtatattacatgacatatatatgaaatgtgcatatgcatttttattgctgacttgcaaacctcttcctgtaaacttacaaactattcccagtgggaaatagtttagttagactaagacatcagataagtgcaagagacataaartaagagtggcttaaaaaatggcaggtagatttgattattacacattgtaggcctgtctaaaaacatcatgtatactttatacatatatacaactattatgaacccataacattaaaaaaattgaaaaacaaatttttaaaaagaaaaattatttctctgtcatgtaaaagttggagcttgtcaggcatgctatttcaaaaagttacct

SEQ ID NO: 113064 - DNA, 585 bp, Homo sapiens
acacgattaggtgataagggctgtgcccttatgaatgaattaatgtcgtgctagttattgtgagagtgagtttctgataaaagactaagtttgtcctccatttccttcatttttcttatgtgctagcttgctcttcagtcatggaatcctgcagcaagaaggccttaaccagatgacagcatcatgctcttggactttccagactccaaaaccatgagccaaaataaatttattttataaattacctagtttgtagaattctggtatagcagcaggaaacatactaagacaactaagtcatygtatgtatatactctctagtctagagctgaatgttctagaagattccattggtattttaggtatattttcattatgaaatattgttttacagtcatttgctagatgccagggagaatgtgctagatactaagttcaactgaaactatggatcaccttccaaaatattttcattatgatctatatgtctaaactaagtattctctagataaacatcttatttgtataaattttaagccctgtctatgcaccaggtgatttttaacaactttccattaggcaatt

SEQ ID NO: 113065 - DNA, 659 bp, Homo sapiens
tttacacaccaccattgcagtgttataacattctttgtttttctgtgtacttaatattaccagtgagttttgtaccttcaggtgactattcattgctcattgatgtccttttctttctgattgcagtgctccctttakcatttcttgtaggacaggtctaatgttgattaaatccgtcagcttttgtttgtcaaggtctttatttctcctttatgtttgaaggatattttcaccagatatactattctatgattaaagttttttccttcagcactcttcatatgtcatgccactccctcctgtcctctatgctttccacaaagaagtctgctgccagacatattggagctccattgtatgttattcgtttcttttctcttgctgcttttaggaaactttctttatctttgatctttgagagtttgatcattaaatgccttgaggtagtctttgggttaaatctgctttgtcttctatgaccttcttgtatttggatattgatatctttcttctaaagtttgaaagttctctgttattattcctttgaataaactttctacccctatctcttttttaccttctctttaaggccaataactctttgaattgctcttttctagatactgtagaatctagaggctattttctagattctgtag

SEQ ID NO: 113066 - DNA, 442 bp, Homo sapiens
gggaacatcacacaccggggactgttgtrgggtcgggggaggggggagggatagcatttggagatatacctaatgttaaatgacgcgttactgggtgcagcacaccagcatggcacatgtttacgtatataactaacctgcacgttgtgcacatgtaccctaaaacttaaagtataataaaaaaaaatgtcatcctcaagaactaagcagccctctcagcctgcttcctagctatagaatttggggccccaagatttttttaagttgctgactaatctaatgcaggctggtagctttactggtactattctcagaagtacagctcataactctcaaaaacatagtagttttttcatttgttaaaactaatctattccatgtaccagtatccaaactcttgatcttgttgagatatgcccctctctcaacttaactgccagta

SEQ ID NO: 113067 - DNA, 565 bp, Homo sapiens
agaaatgcatatgcatatagattcttttaatatcaaatggcaaagcaaacaagaggttgaaacagaggaaagatcaactatgagaaaagaattactgagggaaaatggagacagactacaaatgggatagaactggcctaaaatataccactgtcacttaaaaataggtactcggttacatagtgcctgtgtyatctttacaacagcatttggttcctacactgtcttcttcctacaggcctgttatgactatgagagctatctgttccttcagtggaccaagtcttgctgccttgtggattctgcccagtcacagcttcccttctgcccttcaagggtgggctgcttgcatctaagtggtagggccatacctaattctgttctggatataacacagatgactgactgggcttggtggctgatgtctataatcccagtactttgggaagctgaggcaagaggatcacttgaggccagaaactcaagaccaggctgaccaacatagtgagatcctgtctgtacacaaaatgtaaaaatttaggagggcatgatggtgcattcctat

SEQ ID NO: 113068 - DNA, 601 bp, Homo sapiens
tggtggtaatccttccagacatttccttctgtctaaaaacacgagttgctgggtgtaacatcttatttttttcaaaaatagaatgataacattgttctaccacttgcttcttttttcatttaacatccagggcatctttccctgtcacgcacatttttgacctcttactgcagagcatgctatggtatggaaggaaattaactcatttagccacctgccctgtggacatttagcaaatacgaaagatacacttgaaatgtcacttctcattgtycattcctcttacctctgccaatgttgataactcatgatgaaagtgcacctgtgtgtggatattaacatatcatacagccacaattactgaaaccacagcgactaaggattttttatgttttaatatgagcacttaccatgtattttcccacgtgatcctcacaacagtcccaaagtaggccttattattatctttctttttgcagatttaaaaaaactgagactcaaaaaggtggtgtacgcctacccatggcacgtggcctagaggtggtgaggttggtcaggagtggggcctagcaagcttacttcagagctcctgctacaagca

SEQ ID NO: 113069 - DNA, 601 bp, Homo sapiens
tggtggtaatccttccagacatttccttctgtctaaaaacacgagttgctgggtgtaacatcttatttttttcaaaaatagaatgataacattgttctaccacttgcttcttttttcatttaacatccagggcatctttccctgtcacgcacatttttgacctcttactgcagagcatgctatggtatggaaggaaattaactcatttagccacctgccctgtggacatttagcaaatacgaaagatacacttgaaatgtcacttctcattgtccattcctcttacctctgccaatgttgataactcatgatgaaagtgcacctgtgtgtggatattaacatatcatacagccacaattactgaaaccacagcgactaaggatttttyatgttttaatatgagcacttaccatgtattttcccacgtgatcctcacaacagtcccaaagtaggccttattattatctttctttttgcagatttaaaaaaactgagactcaaaaaggtggtgtacgcctacccatggcacgtggcctagaggtggtgaggttggtcaggagtggggcctagcaagcttacttcagagctcctgctacaagca

SEQ ID NO: 113070 - DNA, 578 bp, Homo sapiens
ctggcttcgaaatcttctccaggcagtaagctgggggcaatggtagggctcatctcatttgtttctagtcccctttctgtccttcactgtttaatgtccaatgccttgagtgctatcatttaatatattttgtctatttttcagttgtttttgctgtaagaataaatctggtctttattcctcattgatatggtttggctgtgtccccacccaaatctcttcttgaattgtaatccccataatccccatatgtcgtgggaggaatctggtgggaagtaatttgatcatgggggtggttycccccatgctgttctcatcatagtgagtgagttctcatgagatctgatgattttataagtttctggcatttcccttgttggcacttattctctcctgctgccctgtgaagaggtgtcttccgccacgactgtaagtgtccttaggcttccccatccatgcagaactgtgagtccattaaacctcttttctttacaaattacccagtctcagatatttcttcatagcagcatgagaatggactaattacaataaattggtaccaaagcagtgggacgctg

SEQ ID NO: 113071 - DNA, 591 bp, Homo sapiens
gcctgcgggagctctcacctgaggaggacacaggaagggttttccttgcagcaggaacagcttacgcaaaacctggatgtgagcaagaacatgatgtgctcccagaagaataaactgttcagagcggctggcgtgtaaagggtaaaggctgagtgagcagaaatgccaccagagcagggggtgagagccagaccaggggcccttaggagccaggccgagggtcctctctgaaggatgcctgaaatgcctccgctgcagcttgctagaggccttctaattaacctgcgaagaaccgtctgcaggcccccagtccggtgttcactcgttcattcattcgctcttcactgggtgccctggcactccaagcctccagcgcacacccagccctaaccttgaccagggtgctgagcacgaggagccccaccctgagccaggcctggagaggcgcctttaagcgcaggtcctgcggctgctgacaggtcatcagagctgggaccaaagacccgccgggaggctggcagcctaggtcgcttcccaagctctccgggcccttcccttcggcggytaatttccacttttcataaggatgtg

SEQ ID NO: 113072 - DNA, 540 bp, Homo sapiens
actgtccatgatttcctttattagtggcactttaaagaaaattacattttagataatatatatttatataagaagtagagataggtatatattgtatacttacatatgtatatgcacttatttatatacttaaatatgtaatataaataaaaatatataaatacatatacacacacatttatttagactatactctaagataaattttgtgcttcagaagctaacattgcrgaattgttataaaagtgtgatgtcctttggggaagtcattgcatttcccattcttgaagctcacttttaacttaatctgaaattaaagaggcctaactggctaaaacaatgtaaaggatgagtttaaatgcacagtttccttcctttttatatatgatagcagtgaaaggatgtgttttaatttgtggacctcccacctaggaccatttcaacagctttgaatacctgagaaaaatatcaactgctaagccaaaattatccttcttgtaggagactaaaatagaataattcagattgaagagagagctc

SEQ ID NO: 113073 - DNA, 540 bp, Homo sapiens
actgtccatgatttcctttattagtggcactttaaagaaaattacattttagataatatatatttatataagaagtagagataggtatatattgtatacttacatatgtatatgcacttatttatatacttaaatatgtaatataaataaaaatatataaatacatatacacacacatttatttagactatactctaagataaattttgtgcttcagaagctaacattgcggaattgttataaaagtgtgatgtcctttggggaagtcattgcatttcccattcttgaagctcacttttaacttaatctgaaattaaagaggcctaactggctaaaacaatgtaaaggatgagtttaaatgcacartttccttcctttttatatatgatagcagtgaaaggatgtgttttaatttgtggacctcccacctaggaccatttcaacagctttgaatacctgagaaaaatatcaactgctaagccaaaattatccttcttgtaggagactaaaatagaataattcagattgaagagagagctc

SEQ ID NO: 113074 - DNA, 564 bp, Homo sapiens
agttaaatgagttttagtaaaaaagactttgagaatatatggaatctcaatcacaatataaaaaataaatgttttcttcaaaaaatgaattaattttagttaagtgtcatacttatattcttacatactttaaggtcatataatttagaattcaaaatttcagacagttctattttgaaatggtgagagaagtcactaccttcaatgaaaactagaggaggacaaacttctctgagtgctgcgctttctcttccttcccccttaataaccagaatcagtttaataatatttaaactgagtaartcttccaggaatgcttttcttatttatacatctctcctatcaattagctgacaaaaagcaatactgcttctggaatttcacaagggtaatactataaaacaaaatgagggaaagattggctattttcttttcccttttaattttactttttcatttataatgtttccaatttgataacttatggagtctgtaaaatggacctgtgtgtaagtcttggtatttcctatttgccacaagctttcttcttgaatgtagtgtttg

SEQ ID NO: 113075 - DNA, 561 bp, Homo sapiens
tgagggctgtgcctcagctcccaacactgttgcactggagattaaatttccaacacagatattttgagggacacattcagactatagcactcactaaattaattaattaattaatttatttgtttttgagacagagtttccctctgtcacccatgctggcgctatctctactcactgcaacctctgcgtccctgcctcaagtgattctcgtgcctcagcctcccgagtagctaggattacaggcatgcgccaccatgccctgctaatatttgtatttttagtacagatgggttttcgcaatgttggccatgctcaaactcctggcctcaagtgatccgctagccttggcctcccaaagtactaggattayaggtgtgagtcaccatgcccggcccagactatagcattcactaaatttaattttcaactcacaaaaggtcttatgacatgcaattcaaaatgcattaaattggtagcatttggaataagtgtaaggagtttttttaatgaaagggtacactagaatgaaattgagatgaaaataaaacagttataagaatg

SEQ ID NO: 113076 - DNA, 561 bp, Homo sapiens
tgagggctgtgcctcagctcccaacactgttgcactggagattaaatttccaacacagatattttgagggacacattcagactatagcactcactaaattaattaattaattaatttatttgtttttgagacagagtttccctctgtcacccatgctggcgctatctctactcactgcaacctctgcgtccctgcctcaagtgattctcgtgcctcagcctcccgagtagctaggattacaggcatgcgccaccatgccctgctaatatttgtatttttagtacagatgggttttcgcaatgttggccatgctcaaactcctggcctcaagtgatccgctagccttggcctcccaaagtactaggattacaggtgtgagtcaccatgcccggcccagactatagcattcactaaatttaattttcaactcacaaaaggtcttatgacatgcaattcaaaatgcmttaaattggtagcatttggaataagtgtaaggagtttttttaatgaaagggtacactagaatgaaattgagatgaaaataaaacagttataagaatg

SEQ ID NO: 113077 - DNA, 548 bp, Homo sapiens
gaactagttcacatagaagaatcaagaatgtaagttctgtgacagatttttgtgtggcttataatattcaaggaagtgtaggatgaagtttggcatggttgtaactaaactggttagttcagttcattttcaccaaaaaattattttaattaccttttataatttcagatgtgaaaattattaaaacaaaattactgataaaccacaaggcatgaacttgactacataaatttaccaacatattaaggaaaataaatctatccatattatatattcctctaagtgtcttgaggcagacatctattttattattatgtgtcatagttgtattttgaattctttttctctgtccacaacagtattcaataagtattaagataatcaagttgagatataatttgataccttaattatttgyaatttgattctttccccctaactcagcattctggggattggtgcatgcatttataaagtgtatggtgctatctgtacatagatttttgtgacaatgtttatattgtttcttccttgaggaattatgttta

SEQ ID NO: 113078 - DNA, 470 bp, Homo sapiens
atgtgagtaaagtcaatttgccagtcctgggtgggggcaaatccctgagcttgatgtatagggaagggagggggcctgaataatccctgaggagtagtagaatagcagatggaacactgagaagtgattttttgaggatagatttccacaatggaaaggaaatgagatgttctaagaggtgggctagcagcttgtaacctacatggaagaggttatgcaatgacgacagaatagaatgggcctgtgaggctggaaggagatattttccttggtcaaagaaccatttgccttgtgtgggaagagactgatagaagtttcagtcrgtgagtaggtgggagtgaccgatgagaaggagaaaaactggccatgagggacagaagttggaatgctagctgcttctttagctatgttatcagcataagcaatgccctgagcaatgggatctgatgccttttgatggcctttgcagt

SEQ ID NO: 113079 - DNA, 470 bp, Homo sapiens
atgtgagtaaagtcaatttgccagtcctgggtgggggcaaatccctgagcttgatgtatagggaagggagggggcctgaataatccctgaggagtagtagaatagcagatggaacactgagaagtgattttttgaggatagatttccacaatggaaaggaaatgagatgttctaagaggtgggctagcagcttgtaacctacatggaagaggttatgcaatgacgacagaatagaatgggcctgtgaggctggaaggagatattttccttggtcaaagaaccatttgccttgtgtgggaagagactgatagaagtttcagtcagtgagtaggtgggagtgaccgatgagaaggagaaaaactggccatgagggacagaagttggaatgctagctgcttctttagctatkttatcagcataagcaatgccctgagcaatgggatctgatgccttttgatggcctttgcagt

SEQ ID NO: 113080 - DNA, 470 bp, Homo sapiens
atgtgagtaaagtcaatttgccagtcctgggtgggggcaaatccctgagcttgatgtatagggaagggagggggcctgaataatccctgaggagtagtagaatagcagatggaacactgagaagtgattttttgaggatagatttccacaatggaaaggaaatgagatgttctaagaggtgggctagcagcttgtaacctacatggaagaggttatgcaatgacgacagaatagaatgggcctgtgaggctggaaggagatattttccttggtcaaagaaccatttgccttgtgtgggaagagactgatagaagtttcagtcagtgagtaggtgggagtgaccgatgagaaggagaaaaactggccatgagggacagaagttggaatgctagctgcttctttagctatgttatcagcataagcawtgccctgagcaatgggatctgatgccttttgatggcctttgcagt

SEQ ID NO: 113081 - DNA, 608 bp, Homo sapiens
tctgttgcttaataaatgctaatttgccttactcactctccggtatttgtgtgccttattctcttggttgtgggacaagatcttggacctcactaaattaaggagtgaggagactgcaacactaattataaatggatcaattcaccagtaaacataacaattctaaatatatatgcaccaaataacaaagtcttaaacaacatgaagagaaaaattatagaactaaaaaaaaaataaatgatagttgtgggttttaacagccttatctcagcaattgatagaattattggacaaaaatttaacaatcagcaagcatgtagaagatctgtacagcacaatcaaccaacaagattttattcacacacacacacacacacacacacacatatagataaatatatatgtcaattatatatatatatatctaaatatagaatcagtccacamaaaacagcagaatatacagtttttcaggagctcatgaaatattaactaaaatactagatgatttcttgcaccataaaacaaaccctgatacatttaaaagaatttatgtcatgtagagtatgttctctgaccatagtggaattaaaataaaagtcagtaac

SEQ ID NO: 113082 - DNA, 580 bp, Homo sapiens
tatattgttcttaaagtaatytacagagatacctagtaaagataaagaaaatgattctatataggaagtcatcattccaggatttgaggaatccttccaagtaattttggcagaagcagtaagcatcatactttcaaagctaataaagaatgcaaggaaacaggacacattttgcaataagtagcaggaaaaataacagaaaaaagtcacaaaaattgcagatccggtattattacagacacattgaaaaacatgtatttgtattatgttctaagaagtaaatttgaaaatatctgccaaatgaaaacaatacaatgtaatctttcagttttaacatgaaactaataacaaattttaaagataaatgatattatcactaaaattaaacattaggagcatgagtatgataatattttggacacagcaaaagaactagatcactggaagctaaatcagaaaagcaaatgagcacagttcaatacagtgagatgaaaaaatggaaatgtagaagagtggttatcacaaataatgagttgtgtgaggtgatatatttaaatagagagctagaataaaataaatg

SEQ ID NO: 113083 - DNA, 582 bp, Homo sapiens
tagtgccaggataacctgctgaccatacacagaagatttaaactggacccctacctttcaccatacacaaaaatcaacccaggatgggttaaagacataaatgtaaaacctcaaactctaaaatctctagaagaaaaccttggaaataccattctggaaatattatgcaagaaataaaacctacttgattgtggtggattagctttttgatgtaccgctagatttggtttgctagtattttgttgaatatttctgtatctatgttcattagaaatattggtctgaagttttttgtttcattgcatctctgccaggatttggtatcagaatgatgttgtcctcatagaatgagttaggtatragtccctcctcctcaattattttagatagtttcagtaggtgtggtatcagctcttctttatacatctggtagaatttggcagtgaatcctttggggccaacactttttctgattgataggcattgtattgccaattcattttggaacttcctattagtctgttcaaagtttcactttcttcctggttcaatctttgaagattgcttccaggaatttatgca

SEQ ID NO: 113084 - DNA, 544 bp, Homo sapiens
ttttcaaaaatttcttttcttttgttttatctttcttttctttctctctctttctttcctttctttcttttctttgagatggcgtctcactcagtttcctaagctggagcgcagtggcacaatctcagctgactgcaacctccaccttccaagttcaagcaattctcctgcctcagcctcccaagtagctgggactacaggtgtctgccactatgcccagctaatttctgtatttttaatagagacagagttttactatttatattagagatggggattggcccagctggtcacgaactcctgacctcaggtggtctacccgmcttggcctcccaaagtgctgggattataagtgtgagccactgcacctggcctctctttttaaaatttcatttgcagattgttcattgttagtttatggaaatgcaactgacttgtgtgtgttactgtatcctgaaactttgttgaatttcattattttaccagtattttgtggaatttcaggatttttcccattacatcctgttgtctgtgaacaaaattt

SEQ ID NO: 113085 - DNA, 544 bp, Homo sapiens
ttttcaaaaatttcttttcttttgttttatctttcttttctttctctctctttctttcctttctttcttttctttgagatggcgtctcactcagtttcctaagctggagcgcagtggcacaatctcagctgactgcaacctccaccttccaagttcaagcaattctcctgcctcagcctcccaagtagctgggactacaggtgtctgccactatgcccagctaatttctgtatttttaatagagacagagttttactatttatattagagatggggattggcccagctggtcacgaactcctgacctcaggtggtctacccgacttggcctcccaaagtgctgrgattataagtgtgagccactgcacctggcctctctttttaaaatttcatttgcagattgttcattgttagtttatggaaatgcaactgacttgtgtgtgttactgtatcctgaaactttgttgaatttcattattttaccagtattttgtggaatttcaggatttttcccattacatcctgttgtctgtgaacaaaattt

SEQ ID NO: 113086 - DNA, 544 bp, Homo sapiens
ttttcaaaaatttcttttcttttgttttatctttcttttctttctctctctttctttcctttctttcttttctttgagatggcgtctcactcagtttcctaagctggagcgcagtggcacaatctcagctgactgcaacctccaccttccaagttcaagcaattctcctgcctcagcctcccaagtagctgggactacaggtgtctgccactatgcccagctaatttctgtatttttaatagagacagagttttactatttatattagagatggggattggcccagctggtcacgaactcctgacctcaggtggtctacccgacttggcctcccaaagtgctgggattataagtgtgagccactgcacctggcctctctttttaaaatttyatttgcagattgttcattgttagtttatggaaatgcaactgacttgtgtgtgttactgtatcctgaaactttgttgaatttcattattttaccagtattttgtggaatttcaggatttttcccattacatcctgttgtctgtgaacaaaattt

SEQ ID NO: 113087 - DNA, 611 bp, Homo sapiens
acacaacttggcctcccaagttgttgggatgacaggtgtgagccactgcacctggccaagtttcagtcttcttgctgatggagagacttgccttaatgtaaggtggtggttgctgagcgttggggtggctgtggcaatttcttaaaataagacaacattgaagtttgctgtgtcaattgactctctgtttcacaaaagaattatctgtagcatacgatgttgtttgatagctttttacccacagtagaactttcaaaattggattcaatcctgtcagaccttcgtactgctgtaccaactaagtttatgtattattgtaaatcactgggttcaatcctgtcaagccctccttctgctgtaccaactaagtttattctaaatctgttgtcatctcaacaatgtttacactgtcttcaccacgagtagatttcatctcaagaaaccactttctttgctcatccgtggaagcaactcatccactcacgttttctccggaggctgctgcrgtctcgccacatcttcaggctctgtctctgtttctagtgctcttgttatttccaccatatctgcagttacttcctacagagaagtcgtgaacccctcagtgtcat

SEQ ID NO: 113088 - DNA, 417 bp, Homo sapiens
gagtcagggctgggggaccgctcatattctcccgagacctgtgagtctctgggggactcctgggtgcatggggctgactcccgcaggaacctggggwtggctggagagtaactgggagccacaggagggtccctgaggcctgggggtgaagagatgcaagacacaggggtggagcaacgtgaggctcgtgagtttgtaggtgattcctgggtgtggggggctgactccagctgaaatctggggttgtttggagagtagctgggagacacaggagaccccccgagagctggggatgagctgctgggtgatggcagtaagaacatgtggtatattattgatgaacgtggggactctgaggagtcctcagaggaggacacggcagagcccaatggcttcattgatttcccatcaaggtga

SEQ ID NO: 113089 - DNA, 417 bp, Homo sapiens
gagtcagggctgggggaccgctcatattctcccgagacctgtgagtctctgggggactcctgggtgcatggggctgactcccgcaggaacctggggttggctggagagtaactgggagccacaggagggtccctgaggcctgggggtgaagagatgcaagacacaggggtggagcarcgtgaggctcgtgagtttgtaggtgattcctgggtgtggggggctgactccagctgaaatctggggttgtttggagagtagctgggagacacaggagaccccccgagagctggggatgagctgctgggtgatggcagtaagaacatgtggtatattattgatgaacgtggggactctgaggagtcctcagaggaggacacggcagagcccaatggcttcattgatttcccatcaaggtga

SEQ ID NO: 113090 - DNA, 563 bp, Homo sapiens
ataaaataagaatagttatactagatataaatcatagatatgattatatatgaatatcattaatcattagtttgtagcaattactctttattccaatattataataatccttgctctacaataaaaacctaggaaaatccagaccatacagagatgggagctgaggggacatagtgagaagtgaccagaagacaacagtgtgagccttctgttatgcccggacagggccaccagagggctccttggtctagcggtaacaccagcatctgggaagatgcccatgacctaaagggaccatggtctagcagtagcatcagtgccaaggaaaagcacccctacttarccgactgggaaatggagtctccctttccccgggggagtttagagaagactctgttcctccacctcctgtggaaggcatgacgtcagtcattcccacctgcagttatctggaggcctgaccatctccctgtgacactgtgtttcagtggtcacactcctagtccactttcatgttccctcccatacacctggcttgccttttagatagcagtagcaaaatt

SEQ ID NO: 113091 - DNA, 495 bp, Homo sapiens
tctttgcatattagtaaactgtgttttaaggttctttacatcataaaaatgtctgttgactttaaaaaaatgcaaaaaaaggatctcttacaagtgagcattgtactgtattttacttaagttttaagatactggttggaatagaagtgagacactgtctaatcttccctttttaaatatgtaaaatactctattgttttcctacagaatttataatttccaagaacagattactgacactgagcggtaaacacttgtgtcatttgtccttgaggtcacataattcacagaaagagttgggtataaaaaggaacagagatggttaaggaaatgtttctgcttggttggttggtttgagacaaactctcattctgtcacccaggctggagtgcagtggcacaaccatagctcactgtaacttcgccctcctgggctcaagtgatcttcccacctcagccccccaagtagttagakccacaggtgcatgccaccacg

SEQ ID NO: 113092 - DNA, 607 bp, Homo sapiens
atttgaagtgtggaaatgacaggcttggatttataccttagaaagatccctctagtccctgcccagagggtgactgccctggcagtgggcatgagttgggggctgggcaggtagagcctctcggtaggaggagatgcgtcatcatarggaagagggagggctctggagctgggtagcctggtgttgactctgtcactccccagttacagaaccttgagcaaaaggcctaatatctgtgtggttcagttctttcctctaaaatggggtgataataacaccatcctagtcgtgtgcccatgtgaatcaatgagttaatacaagtaaggtactttgaacaatgcctgccattctgagatttgtaggtgctcagtaaatgtgagctgactttgcttgttctgatattgccaagacgagtaaggtaggaagacaccaacctatgtctgccctgggggctgtatgtacccagtagctgtcacaacctcctgccagacgaggcagaacataaacatgtgtcaaacacatacatgatgtttgatatgtcccagacatgttctaagggcatctacaaactcacttattttccttgacaactctatatggtaggtgg

SEQ ID NO: 113093 - DNA, 629 bp, Homo sapiens
ggttgtttatgggatagagaagcagagtggtctgaagcatggggaaaggtgattgggggtaaggagaagtgaggcaatcagtttctgcacaagcgtagtcaagcttcatggcccttcataggacaaagtctgaaaaaaatggcagcatcagcatgacctgagggtggagctcttggccctgtgacgtcaaaagaggactcattacccatccatcatttgtggaggtccagttgaagggtcagtggtctcactcagtttgaactggacaggagcagactctaaattcctgaaaaacaacttagacaaccgttarcattgtgatccatacgtcagaggtgttatctctagtgaggttggagagagtctttttaaaaaaacagctaaaagcaagcaaagctggctaaggtttgacaagcctattcaggtttgccctcggcttctcaagcacagattggccaggggtattatcaaggggccctggattcctttcactgtgaaattctaggcacgcccaactgtgcggcaagagatgccataaaaatccaggttttccgagctccctgaaaaggccagtgcctgctcctggctatgcaaactccaggaaggtcaagcctggtagtggttgtgaa

SEQ ID NO: 113094 - DNA, 424 bp, Homo sapiens
gtggaaaaactacctgcgctagtttgcatgtgatctaaatgatccaaactaatgggtgagctttgggtgcttgaggactatatgcaggagaaaagaggagggatggataaaacttttccaattttaaaataaaaattattttctgamtgtgctttaaatgcatctgctacatgtactcaagaatgttgagtctgacccctcaaatttattcattaagttttgctacatcagactacacaaaggtcgggaaatcatgtgtccaaaataaaatcagatttgagctccaccttattctggcctatacaatgtccctgttcttaccaccttttctcgtctttcacaaccttgaatcagaatctctagttcaacatcatttccttttttccctcccccacttaaacataaaatatagatatgtgaattc

SEQ ID NO: 113095 - DNA, 412 bp, Homo sapiens
gaattctaagtgaccattttggtggaaaaactacctgcgctagtttgcatgtgatctaaatgatccaaactaatgggtgagctttgggtgcttgaggactatatgcaggagaaaagaggagggatggataaaacttttccaattttaaaataaaaattattttctgaatgtgctttaaatgcatctgctacatgtactcaagaatgttgagtctgacccctcaaatttattcattaagttttgctacatcagactacacaaaggtcgggaaatcatgkgtccaaaataaaatcagatttgagctccaccttattctggcctatacaatgtccctgttcttaccaccttttctcgtctttcacaaccttgaatcagaatctctagttcaacatcatttccttttttccctccc

SEQ ID NO: 113096 - DNA, 565 bp, Homo sapiens
tacacgtgacttcttagaagtctttctatatataaggtgttgaagatcttattttgtaccagcgactttgctcagtgctttacatgtatggtgctgtttagtctrtgcatttatttaaacattacagcaactcatgaaatagggactatcatcagtgagattttgcagatgaaaaaattgaagcttaaagaaataaaacaacatattcaatttcacagaactattcagtggctggtattggcttttagatcagatctgcctaattacaaaacctattttcttcttttacttctttttagaaatagggcctcgttctgttgcctaggagcatagtgttgagatatcggctcattgcagccctgagttcctgggctcaagtgatcctcccacctaagcttccccagtaactgggactacaggcaccctccacatgcctggctatacgtatatttcaatttttttgtagagacagggatctagctgtgttgttcacactggtctcagactcttggcctcaagcaaccctcccactttggcctcccaaattgttgggattacaggcatg

SEQ ID NO: 113097 - DNA, 605 bp, Homo sapiens
tatgagaccattcaccttaaatactaagcagtaaaatcagtcaaaataatgaacccagcaatccctgtgtgtgtgtatgtgtgtggatgcggggtgggggtgtaggtctgtattattattatttttttaataactgataggaaaagtcttaagagaaggccaaattggcttctggagattgaaagastggtcatggtgccatggactcttctataaaaaatctcagccacctggagaggccacagtccttggtcttcatccagggagggataaagagatggtatctggtctctcagtgaaggaatttgtgctttgtccctcagggggttctcactttcagaatctaaggagaatctcaatttggttaatttcttcttcaaagttagtatagaaatggccccggtcacgaattcccagttggaaatgactaaatttcctttctctaacatcatttccttgttttattaaagtatttccaagaatagttataagaataagtattcacaaggcattgttaaaatcattgattatttaaaacatcctgaggcatgcacattaatatttcactactcttgcactctccataccaaaagccaatatgtttt

SEQ ID NO: 113098 - DNA, 672 bp, Homo sapiens
ggtatgtatagaaggaaagcatgggagctgaattaaatactgcaaacggcataagaaccaccttcmtttcatggtgggagggtggaacttttcttccagatagccaggtacaagagaaaacacagcagatgtactttgcattgaataaagactacacatcctccttaatcaccacctttcctttttatggagtaagtgtgaattattgtcagtttcatcatttgtaatcagtggctgaaacagatgctgaaggtttagtttaaaatgatatgtgtctcttataacaatttgcaatatgctctccaaggactatttaccttccacattgcagaaactcactgcaaaggagtttattcttaaaagcatttgaggtaaattaagcacaatgaatgcaactttcgttagagataacatttagcagagttattatagggcttactatgtctgcagtgagtgggcatttgccttaatgactttgtttaacaagctttcaattccttgcttatgtgatttaaatgctcttataactatttgcccttaggagtttggtaccaacacaaggcaatcacaatttgtttttttgttatttttaaaccaagttagtatgtaagagaaatatatttatagttctgatatcaagggtaatgacaaaattcttaagtttgttgtgca

SEQ ID NO: 113099 - DNA, 672 bp, Homo sapiens
ggtatgtatagaaggaaagcatgggagctgaattaaatactgcaaacggcataagaaccaccttcatttcatggtgggagggtggaacttttcttccagatagccaggtacaagagaaaacacagcagatgtactttgcattgaataaagactacacatcctccttaatcaccacctttcctttttatggagtaagtgtgaattattgtcagtttcatcatttgtaatcagtggctgaaacagatgctgaaggtttagtttaaaatgatatgtgtctcttataacaatttgcaatatgctctccaaggactatttaccttccrcattgcagaaactcactgcaaaggagtttattcttaaaagcatttgaggtaaattaagcacaatgaatgcaactttcgttagagataacatttagcagagttattatagggcttactatgtctgcagtgagtgggcatttgccttaatgactttgtttaacaagctttcaattccttgcttatgtgatttaaatgctcttataactatttgcccttaggagtttggtaccaacacaaggcaatcacaatttgtttttttgttatttttaaaccaagttagtatgtaagagaaatatatttatagttctgatatcaagggtaatgacaaaattcttaagtttgttgtgca

SEQ ID NO: 113100 - DNA, 628 bp, Homo sapiens
tctggcttttctgtctctctctgtgcaaatggttgcatgaatggttaaaaatcactgcttatctcctctgtaaacttttactgtgaaaaataattctgaggctagttttaagctgtagttcatctgctctatttygtgctatgaattcacttttctgtgtcaaaggataccttatgataaaacatgggcttatgaccccataagctggctgctcaagatggcccagcaacctggtcagtaacaaactttgctgcaattccctaaaacaaacaaacaaactgggtagggtctccatcttgttttaagtccttaggagtttgaccttgtaaccaggtggcagtactttctcttggtctccaccttccagggaacagtaattttagggtttatgtcatagtttgctctaaaaattatctagagtaattaaaagtctttgcaagctcaaaattaactactccaaacttcctctgggaaaagtagcagagatttacctgtgctatatagcacggtagctaaggattttgccctttcacactggcggtctgggttcaattcccttcttagaaagtgagtcctttctggtttaatatctgcatgaccttgcttattctcttttccttcatggact

SEQ ID NO: 113101 - DNA, 667 bp, Homo sapiens
ctttgactggaatgacaagagctgaaggaaatgtacaaccatgaggacaccataacytatgaatgacatgctgagactggaaactcaaaatgatggtaactgagaatggcgataaggccctaagtttcggtcacactgtcacctaagtgagaacctgtccaaaaagaaggaatttttaaaaaattatcggaggccattattttggactaagctcatgccctaggcaacagcaaactaaaccaaattaaaatggagtcactcatgctaaatgtgatgtaatcaaactaaggctttaaggaaacacatagatcctagaacagaccaggtttgtttttcccctgtaaataggatgttccagcataaggaggtaccctctactcagtccttattccctccttgcaaaacctgttctaccgttttccagtgggtctcaaaaccctatacttctccaaaatacagaggccatcgtctccctgcctgtgcaggggattgggttaggctctgaagctgagcgtggagactagccaggttgaacttctcattgtgcttctgaaagtagccgctcagttttgtggttgggctatccagttgggtggtatttccgatagaatgtcacagctgtcaggaacatagaggcactaccaaggtcagtgggctggtcacttgt

SEQ ID NO: 113102 - DNA, 471 bp, Homo sapiens
tgaattcgtataaatgcaactagaaaccattattctaagtgaattaacacagaaacagaaaaccaaataccacatgttctcatttataagtgggaactaaacactgagcacacatgcacataaaaatagcaacaatagaaactaggaactattagtgggggagagatgaaagtggaaaagagttttattgggtactatgttcagtactggagtgacaggatcattcataactcaaacctcagcatcacacaatgtaaccagataacaaacgtgcacatctaycccatgaatctcaaataaaagtttttaaaaaaaagaaactgtggtacatccatacattggaatactactcagcaaaataaaacaataaattacttatattcactacattatttatgaattttaaatttgcttttgctcagaaatcatagcctaaaagccatttactacatgcttacattatatggcatc

SEQ ID NO: 113103 - DNA, 565 bp, Homo sapiens
gcaactagaaaccattattctaagtgaattaacacagaaacagaaaaccaaataccacatgttctcatttataagtgggaactaaacactgagcacacatgcacataaaaatagcaacaatagaaactaggaactattagtgggggagagatgaaagtggaaaagagttttattgggtactatgttcagtactggagtgacaggatcattcataactcaaacctcagcatcacacaatgtaaccagataacaaacgtgcacatctaccccatgaatctcaaataaaagtttttwaaaaaaagaaactgtggtacatccatacattggaatactactcagcaaaataaaacaataaattacttatattcactacattatttatgaattttaaatttgcttttgctcagaaatcatagcctaaaagccatttactacatgcttacattatatggcatcttggaaaatgaagactatagggatgaagaacaggaccgtagctgccaaaaatgggaggcgagaagaattcttgactgccaagagatttgggactgattgaattacacta

SEQ ID NO: 113104 - DNA, 568 bp, Homo sapiens
atctcttattcgaccaatttcctagtacaatcaaatgcctgctttaattacattaacaaactatgtaaatgtaatttacttgaaagccaaatatcttatgcttgtgcagctttttcatttaccaaaagtttttaattttttctttttacccattgtatctctttattccaatattatatttaaactgttcatcttttcaggtattgtataaaactttctttctttttttcttcttccactggtcatctggacaagttcctttttaggtttgcttcaaggtggttatccagaagttcttgttcgttaggctatgtttcctggaactcaagtctttgtttttcttggtttacacactcattttgctagagcaaagagtatgtgagaagtgatatttctgaaaacttgtatgtctgaaaatgtgtttagtttagtacaaatgtttagcaaaaatgtttagtacaaacatttgaatgacagtttcgtgtsacatggaattttagtcaaaatatatttcacgcttctgaaatctttgctctatgactatggagtatccaatgttgttgatgag

SEQ ID NO: 113105 - DNA, 439 bp, Homo sapiens
acttgcagattctgcagaaagtgtgtttctaaactgctacatcgcaaggaatgctcagctctgtgagttcaactcaatcatcccaaagaattttctgagaaagcttctgtcttctttttataggaagttatttcctttactacggtactcctcaaagagtgcaattatccccttgcagtttctacaaaaagagtgtttcaaacctgaactatcaaagaaaggttccacactgtgagttgaatgcagacatcacgaagaaggttctgagaatgcttctgtttagttctgtgcrgtttatcccgtttccaacgaaatcctcagagaggaccaaatatccacttgcagtttctacaaaaagagtgtttcaaagctgaactatcaaataaaggttcagcactgtgagttgaatgcaaacatcacgaagagggttctgagaatg

SEQ ID NO: 113106 - DNA, 500 bp, Homo sapiens
tgtttctaaactgctacatcgcaaggaatgctcagctctgtgagttcaactcaatcatcccaaagaattttctgagaaagcttctgtcttctttttataggaagttatttcctttactacggtactcctcaaagagtgcaattatccccttgcagtttctacaaaaagagtgtttcaaacctgaactatcaaagaaaggttccacactgtgagttgaatgcagacatcacgaagaaggttctgagaatgcttctgtttagttctgtgcagtttatcccgtttccaacgaaatsctcagagaggaccaaatatccacttgcagtttctacaaaaagagtgtttcaaagctgaactatcaaataaaggttcagcactgtgagttgaatgcaaacatcacgaagagggttctgagaatgcttctgttttagttctgtgcgggttatcccgtttccaacgaaatcctcagagcggtccaaatatctacttgcagtttctgcaga

SEQ ID NO: 113107 - DNA, 587 bp, Homo sapiens
ttccacactgtgagttgaatgcagacatcacgaagaaggttctgagaatgcttctgtttagttctgtgcagtttatcccgtttccaacgaaatcctcagagaggaccaaatatccacttgcagtttctacaaaaagagtgtttcaaagctgaactatcaaakaaaggttcagcactgtgagttgaatgcaaacatcacgaagagggttctgagaatgcttctgttttagttctgtgcgggttatcccgtttccaacgaaatcctcagagcggtccaaatatctacttgcagtttctgcagaaagaccgtttcaaacctgaactatcaaagaaaggttcaacactgtgagttgaatgcaaacatcacgaagaaggttctgagaatgcttctgtttagttctgtgcggtttatcccgtttccaacgaaatcctcagagaggcctaaatatccacttgcacattctacaaatagtgtgtttcgaaactgctccatccaaaggaatgttcagctctgtgagttaaactcagtcgtcaccaagagttttctgtgaatgctactgtctagcttttatatgaagctatttcctt

SEQ ID NO: 113108 - DNA, 587 bp, Homo sapiens
ttccacactgtgagttgaatgcagacatcacgaagaaggttctgagaatgcttctgtttagttctgtgcagtttatcccgtttccaacgaaatcctcagagaggaccaaatatccacttgcagtttctacaaaaagagtgtttcaaagctgaactatcaaataaaggttcagcactgtgagttgaatgcaaacatcacgaagagggttctgagaatgcttctgttttagttctgtgmgggttatcccgtttccaacgaaatcctcagagcggtccaaatatctacttgcagtttctgcagaaagaccgtttcaaacctgaactatcaaagaaaggttcaacactgtgagttgaatgcaaacatcacgaagaaggttctgagaatgcttctgtttagttctgtgcggtttatcccgtttccaacgaaatcctcagagaggcctaaatatccacttgcacattctacaaatagtgtgtttcgaaactgctccatccaaaggaatgttcagctctgtgagttaaactcagtcgtcaccaagagttttctgtgaatgctactgtctagcttttatatgaagctatttcctt

SEQ ID NO: 113109 - DNA, 587 bp, Homo sapiens
ttccacactgtgagttgaatgcagacatcacgaagaaggttctgagaatgcttctgtttagttctgtgcagtttatcccgtttccaacgaaatcctcagagaggaccaaatatccacttgcagtttctacaaaaagagtgtttcaaagctgaactatcaaataaaggttcagcactgtgagttgaatgcaaacatcacgaagagggttctgagaatgcttctgttttagttctgtgcggkttatcccgtttccaacgaaatcctcagagcggtccaaatatctacttgcagtttctgcagaaagaccgtttcaaacctgaactatcaaagaaaggttcaacactgtgagttgaatgcaaacatcacgaagaaggttctgagaatgcttctgtttagttctgtgcggtttatcccgtttccaacgaaatcctcagagaggcctaaatatccacttgcacattctacaaatagtgtgtttcgaaactgctccatccaaaggaatgttcagctctgtgagttaaactcagtcgtcaccaagagttttctgtgaatgctactgtctagcttttatatgaagctatttcctt

SEQ ID NO: 113110 - DNA, 622 bp, Homo sapiens
aaggaatgttcagctctgtgagttaaactcagtcgtcaccaagagttttctgtgaatgctactgtctagcttttatatgaagctatttcctttactaccataggcctcaaagcggtccatatctccacttgcagattctacacaaagagagtttccaaactgctctgtcaaagggaatgttcaactctgtgacttgaatgcaatcatcacaaagtagtttctgagaatgcttctatctagcttttacgggaagataattccttttccaccacaggcctcaaagccctccaaatgtccacttgcagattctggaaaaagagtgtttcaaagcttctctctcgaaaggaaagttcaactctgtgagttgaatgcaagcatcacaaagaagtttctgagaatgcttctgtttagctttcctgtgaagattctcccgtttccaacgaaatcttcaaaataggtccaaatatccacttgcagattccacasaaagagtgattggaaactgctctttgaaaaggaaccttcaactctgtgagttgaatgcaatcatcacaaagaagtttctgacaatgcttctctccagtttttatgtgaccataattcgttttccaccacaggcctg

SEQ ID NO: 113111 - DNA, 513 bp, Homo sapiens
aaaaggaaccttcaactctgtgagttgaatgcaatcatcacaaagaagtttctgacaatgcttctctccagtttttatgtgaccataattcgttttccaccacaggcctgaaagcgctccaaatgtccacttgtagacactacgaaaagcatgtttcagaactactctatgaaaagcaaygtgaaactctgggagttgaacacaaacatcacagagaagtttctgagaatgcttctgtttagtttttatgtgaagatattcccgtttccaaagacatcttcggagaggtccacgtatccacttgcagattccacaaaaagagagtttcaacactgctctatccataggagggttcaactctgtgagttgaatgcaatcatcacagagaagtttctgagaaggcttctgtctagattttatgcgaagatatacccgtttcgaacgaaggccacagagtggtccaaatatccacttgcagatcctacaaaaagagtgtttcaaacctgaactatc

SEQ ID NO: 113112 - DNA, 513 bp, Homo sapiens
aaaaggaaccttcaactctgtgagttgaatgcaatcatcacaaagaagtttctgacaatgcttctctccagtttttatgtgaccataattcgttttccaccacaggcctgaaagcgctccaaatgtccacttgtagacactacgaaaagcatgtttcagaactactctatgaaaagcaatgtgaaactctgggagttgaacacaaacatcacagagaagtttctgagaatgcttctgtttagtttttatgtgaagatattcccgtttccaaagacatcttcggagaggtccacrtatccacttgcagattccacaaaaagagagtttcaacactgctctatccataggagggttcaactctgtgagttgaatgcaatcatcacagagaagtttctgagaaggcttctgtctagattttatgcgaagatatacccgtttcgaacgaaggccacagagtggtccaaatatccacttgcagatcctacaaaaagagtgtttcaaacctgaactatc

SEQ ID NO: 113113 - DNA, 565 bp, Homo sapiens
gttcgctcccattttctaacacctgaaatgtaaaggtcttgagtccagaggctgcaaggacaggttctggataaggctgcctaggttcaacacctggttccattacttaccaggtgtgtgagcttgggcagacctcagcttcctcatctgtaaaatggcaataagaataaaagactctgyctcattgctttggtatgaggactaaataaggtagtacaggcaaataacttggcatttagtgagcactttataaatgtttgcgttcattcttgatacataataaatgggtaaactagattttctaaactgttttagacattcatgtgcatctgttctgctctctccaatcccttcttgtttctgtctagcctttggttcctctcattcacctacttctcttcccttgctgcaatgttagactaggcaggtgtttttttgttattttgtttttaaatcaggacaaaatggttatactcaactgagcataatttattaaaataattgccttaatgaatactaattattaaatgttcatttagttatgtgcttccctttgcttgtatat

SEQ ID NO: 113114 - DNA, 569 bp, Homo sapiens
tgacatactggtttcaactaaatatggaatggaaaaacattacaagaaatgagagaactgtatggtgataaaagataattcccaataatatgcagttcgacaaggtcattgtgagcttaaaagcccaacaaaagtgttaattttgtgttttgttcatagattttaacaatgccatcttagtacctgattgagactatactgatatgcatcttgcctgtttatttactttctactaattttttgtttaatctgatctttatgaggattacaatttgacaaacatctgttgaatatctgtgtaaatggtattgttttatagactgggaataaaaagatgaattaatakagccactgccttcacaaatttaatattcagtaaattagtaaaggttaataaaagcaggaaatgaactaaatttttttcaacagaaaagattaaagttagatcagttttgctatttgggcactccaatatcctgtttattcctcatcaaggttgaaaaaacagtatttgatatttttctagtctcatcagtagatattgttctttatatggcctctgtaggcag

SEQ ID NO: 113115 - DNA, 569 bp, Homo sapiens
atctttcaaaatatataagtgtaagaatgtgaacagcggtatcaaatgtaaaagcctccaaatgggaaacttctgaaatgttcgtcaacagcagaatgaataaataagatgtggtatattcactcaatgtaataccagagagcaataaaaatggacaaactacagcgacactaattagtgtttttattttttcactgtttttaacttttttaaaaaatacataatgcagatacactatctcattggatggtctagtcaataaaacaattttcgtaacaccagtggaaaagtctcagaaacatcatgttgagtaaaaacgccatatacgtatatactgtagattccctgcatatgaaatacaaaaagaggcaaaattagcccatgataccagagtagtgatcatccttggggatacatggaactgaaagaggacacacaaaggcttcttaggtgctggttgtattcttttatgatttrcatgctgtttacataggcatattcagtttgtaaacagtcaagatgtacatttgtaatttatgtttttttctgtatatgttagatttcaatta

SEQ ID NO: 113116 - DNA, 530 bp, Homo sapiens
ggagccgaatgtcaattcccaagacactgggaaaaatgtctccagggcatctcagargtcttcatagcagcccctcccatcacaggcctggaggcctaggaaaaagtggtttcatgggccaggcccagggtctctgtgctgtgtgcagcctagggacttggtgccctgcatccaagctgctccagctgtggctgaaaggggccaacacagagatgtggctgtggcttcagggggtggaaaccccaaggcttggcagcttccacatagtgttgaacctgcgagtgcatagaagtcaagaattggggtgtgggaacctctgcctagatttcagaggatgcacggaaatgcctagttgcccaggcagaagttgttgcaggggcgagactctcatggagaacctctgctagggcagttcagaagggaaatgtgggtttggagcccccacacagggtccctactggggcactgcctagtacagctgtgagaagagggccaccatcctccagaccccagaatggtagaccaaccaa

SEQ ID NO: 113117 - DNA, 647 bp, Homo sapiens
ttttacaggataaaatatttagacatttacttctacaaaggggtgtaggactatcattattctttgtatccatgagccctgcattgcataattatacatatgtatggtttcatataatttgaataaaataggaaaatatcccttggtttctcatgctttcaagcttattaaaaaaatagaatagatacacttcctgcaagccagaaataaaatttctacatatgatgtctgattgtcactttggattttattataaaatcaggatgctatttctcatgaagaaactctactttggaagattacacacttttacacattgaatgtatatacactgggaactcagccayatttattttaataaatcaatgcatattagtgaaaagtaggtgcaattgggtaatttaatggtctgcaataacggtgaaaaactttttgcatgatgacaagctgagaaaaattaaaaatgtttttaagtggaacattaataaattcagtagtaagtagctttatatttccaagtgaaaaatacttttctaacttgaatattttactgtataaaataatgatttttttttcactactgatatgtgatgtcttgggaaatagcataactaggagcaactttaatttttttcccttagattttt

SEQ ID NO: 113118 - DNA, 662 bp, Homo sapiens
catcaataagcatgataaaacaaagttggaaagagcagctacctctcattgattacttatagcttgtgcattttatttctcactatctaaacctaaccataggatttggcaaccactccagcaatctgaattttgtaagacagagataagaggttatagtcatagctattttcaatgccaggaatgagaatgctatgtgtggagtttatagaaattattctcatgattatttaaatgttaggcgtgccatagtaatttagataggcaattttaaaaggaaaacaatttcattgaaaattgggtgtatgtaactttaaaggtttttggcttgggmtcaggctttctccaataggctgaccagtttgggtagtgattggcaacttcttttctaggtttcccaattggtgcggtttcaaacagcaggagggcaacctctctgaattcagaacaccgaacaattctagttcaaatcaaatctctgccttttaaacctcgcctaaaaagattctctctctgaaatctcctacagagacagaggtatctttattacttctaacattagctgagtatttaaaatattacagagtataatatcaaactagctctgtcccagggcctcctccacctatactaatacgcatctatgtactaagacaatctat

SEQ ID NO: 113119 - DNA, 580 bp, Homo sapiens
tataaaaagctaataatataatagayattttcatcttatgataagatattaaaaatatatatatttcatacctaattttatacctaataacataatagatctttttgtatcaacacagcagtgctacatcattctttttagtggctacttaaaattctattgtatgtttgtgtcataatttaattaacacaaccctagtgatggacatttacagtaagttttgtttgtggtataaaaaataccacatagaatgtttcttgtggacatgtctctttgtatttgtttaagtatatttttaggataattttcttgagaggaattgccaggtttgataatattatgacattatcatgatgtctatgataatatcacagatactatcatatctatgataataaaggcacaaaaatacatttgtgtattatcttagatatgtcaaattgtgtcagtttacattccctccagcattgcttgaatgtgcctttctctgtacacttattttaatatttgtgcaattcccacttccatagttccagtttttcctttttaattaaccagttagctagtatgacagaagatt

SEQ ID NO: 113120 - DNA, 616 bp, Homo sapiens
tgaattctactgttatcatgttcaataacatttaaggacataaaagaattttataaaaacattttatatattttaagattgaaaagtttaggcaaatgtaagggcagagcatcaccaaacattatagtgggaaaggatgtaagaaacaaagtctagtgacttcatttttaaataagcaaattgaggcacagggtagggcacaaaggttacacaaaccatattgaccaccatcgcagatcatccttagagacctagacgtgatagtctatctgaatttacaatctgaggcttcaatctttccactacaatcagggtctamgcaatgtttcctgaggagcaaattgccttgggctcattttttgagacttgttgaattgtagtccccttcatcagaatctcaaattcatatataaaggagtatcctgaaaacattggttgttatcaaaagaggtttttttgtgtgtttttttttgtttttttgttttttaattttgttcctagtatcatgcctttggttgagcaacgagtcctgtagaggcaaatttatttggttgacttaatattctttatgatgatttacaaagtggacataagaccattagaacttcagtagttt

SEQ ID NO: 113121 - DNA, 556 bp, Homo sapiens
gctgcactgaactaatcttggaggtaaccaaagggctgtgggactaacagcttttgatattacttagtgcttattattgttattattattatttctttttaattatgcaaagtgctaatcagtttgattatgcacagtgctaatcaggttaattatgcaaagtgctaatcagttcttcttgaagcacacgaggagagcagaggtgctggyggtgaatggcatagctagatgggggtagtcacggcagtcattccttattaagataggagtagacaagatagcaagggggatttatccataaaaataaataggaaaagaaagaggactatgagcacatgaaagattgtagtttgggcaggacattgcttacacatagaaagctcctcccccctgtagcatagtttggttggatagtctctgctatattttgaaggcactcatttgaagccaaaaagactgtagagggaaggaaacagagtattgtatagctagacaagttgtcaaaacaacttattgtagttggcaagcaccaattcctgggaggacagtaaaggaa

SEQ ID NO: 113122 - DNA, 621 bp, Homo sapiens
ggaggaactgggaccaggagacagaaacgaagacaagaagggaagattaggagyatattttgaaggtcctatgtgttgtttagtcttacttgaataatcttagctttccaaaataagtatatatagttgtggtatagagagtgtggtgttgcaataagatgatcattagcttttttatgaagaagaaataataagacttagcaactgattaatacaagaaaaaagacaatgagagatcatgtcagaaagaacatctggatctgggttgcagccccactccacacttgatttgtgaccttaaatacttaacttcatcttcctaaaccacatatcttttaagatcactcactcactgattattattgaagagggcccctattccggatgctttggatcccagaggttgagaataattggtgttttttaaggagaaagatacattttataccagtagcacatttagcctaagctggtattagggcatttgggaagatgaaaaggaagacatataaaagcaatatgttctggccagaaaaaggcaaaaaggaccctaaaactaaagtagagttatagcttagagtatctaagaaggcagagatactgaaagatgtatttagcaga

SEQ ID NO: 113123 - DNA, 598 bp, Homo sapiens
gtaaatagttcattgcacaatgtgataaaataggcttttgctaccttaggcaataatataccaaatccaaaagaaatcatgtataacttttatccaagggtgttggcaaatgtgtcttgaaaaattttgtaatctgagaaaaccctccatattaaaaattaaatatacattttaaagagtcataattattaacctacaccattttggaggttctgaattcagagcatctcaatacagattcagctctaccctaratggaaatatgtacaaaacagggcaagatagaaaatcctcaccaatttgagatactttaattaggcttctctaaaacaatatttctatttatgactttgtttggtcacagaggtgtttacactctgggacaatccaccagaataagattctacttaggggtaaatatgaatacaggtgagttctcagagagcattaaaaaaatacaaatggaagacaagcaaagatcagaaattgattaaaatcaatttctgcacacacgtaccacttggaaagtcaacatacacctttagcggtacacacagttgaaaggctggtgtcatgagctagttcccaaactgaggag

SEQ ID NO: 113124 - DNA, 597 bp, Homo sapiens
tttccaaaattcttcttattgatattcagatttatttcattgtggtcagagaagatgcttgatattatttcaattttttttgaatgtgctaagacttgttttgtgacccaacatacggtctattcttgagaatagatcatgtgctgaggaaaagaatgtgtattctgcagctgttggatgaaattttctgtaaatatctattaggtccatttggtctatagcacagattaagtccaatatttctttgttgattttctgtctggaagatctgtccattgctgaaagtggggtgttgaagcctgcagctattattgtgttgggatcaatctctctcttcagctctaataatatttgctttatatatctgggtgctccagtgttcggtgaatatataattgttgtatactcttgctgaattaacccctaaaattycctacttacatgtttcataaaatatgattttatgctctgtgttagctttatattcccatgtaacaaagtatcacgaacttagcatattaaaacagtaccctcttattagagcattcatcttcaggtcagaggtctggcatgacacagatgggttctctgatcagg

SEQ ID NO: 113125 - DNA, 344 bp, Homo sapiens
caacgaaatcttcaaagaggtccaaatatccacttgcagattccacasaaagagtgattggaaactgctctttgaaaaggaaccttcaactctgtgagttgaatgcaatcatcacaaagaagtttctgacaatgcttctctccagtttttatgtgaccataattcgttttccaccacaggcctgaaagcgctccaaatgtccacttgtagacactacgaaaagcatgtttcagaactactctatgaaaagcaatgtgaaactctgggagttgaacacaaacatcacagagaagtttctgagaatgcttctgtttagtttttatgtgaagatattcccgtttcca

SEQ ID NO: 113126 - DNA, 624 bp, Homo sapiens
atatttggaccactctgtggccttcgttcgaaacgggtatatcttcgcataaaatctagacagaagccttctcagaaacttctctgtgatgattgcattcaactcacagagttgaaccctcctatggatagagcagtgttgaaactctctttttgtggaatctgcaagtggatatgtggacctctccgaagatgtctttggaaacgggaatatcttcacataaaaactaaacagaagcattctcagaaacttctctgtgatgtttgtgttcaactcccagagtttcacattgcttttcatagagtagwtctgaaacatgcttttcgtagtgtctacaagtggacatttggagcgctttcaggcctgtggtggaaaacgaattatggtcacataaaaactggagagaagcattgtcagaaacttctttgtgatgattgcattcaactcacagagttgaaggttccttttcaaagagcagtttccaatcactctttctgtggaatctgcaagtggatatttggacctctttgaagatttcgttggaaacgggagaatcttcacagaaaagctaaacagaagcattctcagaaacttctttgtgatgcttgcattcaactcacagag

SEQ ID NO: 113127 - DNA, 624 bp, Homo sapiens
atatttggaccactctgtggccttcgttcgaaacgggtatatcttcgcataaaatctagacagaagccttctcagaaacttctctgtgatgattgcattcaactcacagagttgaaccctcctatggatagagcagtgttgaaactctctttttgtggaatctgcaagtggatatgtggacctctccgaagatgtctttggaaacgggaatatcttcacataaaaactaaacagaagcattctcagaaacttctctgtgatgtttgtgttcaactcccagagtttcacattgcttttcatagagtagttctgaaacatgcttttcgtagtgtctrcaagtggacatttggagcgctttcaggcctgtggtggaaaacgaattatggtcacataaaaactggagagaagcattgtcagaaacttctttgtgatgattgcattcaactcacagagttgaaggttccttttcaaagagcagtttccaatcactctttctgtggaatctgcaagtggatatttggacctctttgaagatttcgttggaaacgggagaatcttcacagaaaagctaaacagaagcattctcagaaacttctttgtgatgcttgcattcaactcacagag

SEQ ID NO: 113128 - DNA, 624 bp, Homo sapiens
atatttggaccactctgtggccttcgttcgaaacgggtatatcttcgcataaaatctagacagaagccttctcagaaacttctctgtgatgattgcattcaactcacagagttgaaccctcctatggatagagcagtgttgaaactctctttttgtggaatctgcaagtggatatgtggacctctccgaagatgtctttggaaacgggaatatcttcacataaaaactaaacagaagcattctcagaaacttctctgtgatgtttgtgttcaactcccagagtttcacattgcttttcatagagtagttctgaaacatgcttttcgtagtgtctacaagtggacatttggagcgctttcaggcctgtggtggaaaacgaattatggtcacataaaaactggagagaagcattgtcagaaacttctttgtgatgattgcattcaactcacagagttgaaggttccttttcaaasagcagtttccaatcactctttctgtggaatctgcaagtggatatttggacctctttgaagatttcgttggaaacgggagaatcttcacagaaaagctaaacagaagcattctcagaaacttctttgtgatgcttgcattcaactcacagag

SEQ ID NO: 113129 - DNA, 624 bp, Homo sapiens
atatttggaccactctgtggccttcgttcgaaacgggtatatcttcgcataaaatctagacagaagccttctcagaaacttctctgtgatgattgcattcaactcacagagttgaaccctcctatggatagagcagtgttgaaactctctttttgtggaatctgcaagtggatatgtggacctctccgaagatgtctttggaaacgggaatatcttcacataaaaactaaacagaagcattctcagaaacttctctgtgatgtttgtgttcaactcccagagtttcacattgcttttcatagagtagttctgaaacatgcttttcgtagtgtctacaagtggacatttggagcgctttcaggcctgtggtggaaaacgaattatggtcacataaaaactggagagaagcattgtcagaaacttctttgtgatgattgcattcaactcacagagttgaaggttccttttcaaagagcagtttccaatcactctttctgtggaatctgcaagtggatatttsgacctctttgaagatttcgttggaaacgggagaatcttcacagaaaagctaaacagaagcattctcagaaacttctttgtgatgcttgcattcaactcacagag

SEQ ID NO: 113130 - DNA, 434 bp, Homo sapiens
gaagcattctcagaaccctcttcgtgatgtttgcattcaactcacagtgctgaacctttctttgatagttcagctttgaaacactcttcttgtagaaactgcaagtggatatttggtcctctctgaggatttcgttggaaacgggataaaccgcacagaactaaacagaagcattctcagaaccttcttcgtgatgtctgcattcaactcacagtgtggaacctttctttgatagttcaggtttgaaacactctttttgtagaaactgcaaggggataattgcacttctttgaggcctaccgtagtaaaggaaataacttcctatagaaagaagacagaagctttctcagaaaatyctttgggatgattgagtggaactcacagagctgaacattccttgtgatgtagcagtttagaaacacactttctgcaga

SEQ ID NO: 113131 - DNA, 532 bp, Homo sapiens
agaattctcatagaatattaaaagtgtgacttgttacagcttcttttcatagtaatttggrtagaaattagcaaattcagaaatgtataaatactttggtctgacaattccatctccagttatctacggagaaatagacaagtgatgcacgacagatacatgtgtcagtctggtccctgcagttgtatttgtaataatacacattggagcaatttcatggccatcggttagagaatgtttgaagaatgacccattaatatcaggaaggacgtttcaaagatcaaagcctgatggaaatgctggaggccgtgacgctgataggagctcatgcgtgttgaccaactgctatgtgacaggcattggctccacgcttttcctgcgctgctcatttaaacgttggacaaattaagtgttctgatttagcccattagacagatagaaatggaagaacagaaaattaatgtgtttaactttaaacgctagcagattaagtttttcacccagagcctgtggtttcaccataggcgtgatt

SEQ ID NO: 113132 - DNA, 557 bp, Homo sapiens
tcgaactcgatatcttgtctctatctctttcgttaacaatgtgttactttagcattttgagcactatctgtagcctgtgctaagtactttaaatgcagtctctgctttagttgttttctcatgacaattagtggtaggtactattattatcactatgttctattatagttactacctgtcctactgatcgcccatttcttccaatttcatcatattatggccaatttatgctttctatccacgtggctcctggatagtagacaaactcattccgatttttttaacctagtatgatctcctaattttggtgagctgtttcatagatacatatggctatggagtgtctgtggcttctgtgtgtgtgtgtgaatgctatgaggatggggattattattggggttttcttcaagacagattttagtagtgatgtgatcagatgtagagctrtcacaataaaacaactgctacttacatccagccccacctttagtgtctggccaaaaatgctggaaagaaggaagaccgttttctcactaattggacaatggacagggttg

SEQ ID NO: 113133 - DNA, 620 bp, Homo sapiens
gactttggataaaaaggcaggagctgggaagtgtttcttttaagaggtatctggatgctacatcaccttgtctaccacaatacatgagtgataataatctataagtaaacatttccagaaaacatatcaaatgttatagaaaaacgttatatcttctattcttgatataaaattctgcttggcaatttatccaaatcagcaaataaccaaataatatcaaccctatttgagatgtttttgaaggtcaaaagtagcattttaatagcatctattcattcactttgtaaactgtcatctaattatatatttacatawatataataaatgttttctacctctgttcacagtcttcaaacatgaacaaattattctttttcagcgagaggaataaaggaaaagaaatcttctcttttctcttcattctgaaatactaaaatgaataatttatattcccagattccgttccctaatctttcccccaaaatagaaatgttcactccatggagcagggtttgaatttggttctctcctatactgacccaataatcatgaggttgctattagtttccctattttaaggtgaggtcgagtgacttgtcacagattctaatactcattat

SEQ ID NO: 113134 - DNA, 609 bp, Homo sapiens
tcttttctttgattgaatctcgtcyatatcatttcacaatcatctatatatatattacatctttatgtccctgccccccactttaacatgggcatcttgggggatgagcatgcgtcttagccatctttgtggtgaagaacctgagtatcttccatataatagacacttcatcaatgcttcatgaatttcctgctacattcttgaataaaattaggaagtacaagccaggaaagtatttttgcaggagaaatttctgataagactcagttcagaaagacatgctagaaagagatatttgaggaaacttagggactttgattatatttctaactttgagttaagggtgccttctctttgggaatcagcattagctcaggggagccagaggagttagattagacttcaaaacagaagaaacagacatttggtgactaagtgctactttgagattctaaaatgaagggagtacccacaaaaaattgaaaagaaaaattgaaaaaaataataataaaatgaagggaaagagtcaaaggagaatgcttacttcagcagcacatatactaagaaaaagataggggtcaaaggagaaaaaggtcagtttgtaaacag

SEQ ID NO: 113135 - DNA, 475 bp, Homo sapiens
ttaataaacaatatttcactaagcaggaagtaagccaacagtttatctttgtgccattatactttctaagctactttgcttagcatgtttgcccaataaataactagctatcaccaccctactccacctctatacaacaccttagtatgggttagttctagaaaaggaattattctgttcaacaacaaatcatttgaagacacgcccagctgctatccacttcyaatcttaccaattccagaaaagatgggctgaaacgtttttaaaaagatggggccactaagctaagatcagtcccatcagattttaggcaaaattatcaaatgagcaagatacgattttgtctttcctacttccttttaaaagccctcctctccctcccctttctccatactttaggctaagggttgactttccaaatggcctctatactataacacttgaagtcttctctaaacctgataccaaattgcaa

SEQ ID NO: 113136 - DNA, 626 bp, Homo sapiens
gtgggcatccttgtctttttcctgatcttaaaggaaaagtcttcagctttttaccattaaatatgatgttaggtgtgaatattggcatcattttcaacaataaaaatgtttttaaaattttrtgttgtggcaaaaattggctatgcaagatatttttatcattttataaaagattatggatcaaaaaatattaatgaaaataaaacaaaatatattaaagcttcctctattatctttattcaacttaggtttaaattgtatgataaattagaaatggaagatattaagaaaataaaaggctttatagaacttttgtagaaatttgaaagatttgcataatttgtatagagtaaaattggggaccgttttccatgaggtcataagtacaggataggagggcattaaggtggtggaataaaattggtacatactggtatgggacataattacagcaaaatgtgtgcagggggtaggattcatttattcagtcagttggacagtcaattatatattttacaaattgtctagttagtgttattttgtgccagtcattatactaggttttgggatttcagtggtaaataaaaacagacaacatgaagtataactgtataagcattcattga

SEQ ID NO: 113137 - DNA, 626 bp, Homo sapiens
gtgggcatccttgtctttttcctgatcttaaaggaaaagtcttcagctttttaccattaaatatgatgttaggtgtgaatattggcatcattttcaacaataaaaatgtttttaaaattttatgttgtggcaaaaattggctatgcaagatatttttatcaytttataaaagattatggatcaaaaaatattaatgaaaataaaacaaaatatattaaagcttcctctattatctttattcaacttaggtttaaattgtatgataaattagaaatggaagatattaagaaaataaaaggctttatagaacttttgtagaaatttgaaagatttgcataatttgtatagagtaaaattggggaccgttttccatgaggtcataagtacaggataggagggcattaaggtggtggaataaaattggtacatactggtatgggacataattacagcaaaatgtgtgcagggggtaggattcatttattcagtcagttggacagtcaattatatattttacaaattgtctagttagtgttattttgtgccagtcattatactaggttttgggatttcagtggtaaataaaaacagacaacatgaagtataactgtataagcattcattga

SEQ ID NO: 113138 - DNA, 626 bp, Homo sapiens
gtgggcatccttgtctttttcctgatcttaaaggaaaagtcttcagctttttaccattaaatatgatgttaggtgtgaatattggcatcattttcaacaataaaaatgtttttaaaattttatgttgtggcaaaaattggctatgcaagatatttttatcattttataaaagattatggatcaaaaaatattaatgaaaataaaacaaaatatattaaagcttcctctattatctttattcaacttaggtttaaattgtatgataaattagaaatggaagatattaagaaaataaaaggctttatagaacttttgtagaaatttgaaagatttgcataatttgtatagagtaaaattggggacmgttttccatgaggtcataagtacaggataggagggcattaaggtggtggaataaaattggtacatactggtatgggacataattacagcaaaatgtgtgcagggggtaggattcatttattcagtcagttggacagtcaattatatattttacaaattgtctagttagtgttattttgtgccagtcattatactaggttttgggatttcagtggtaaataaaaacagacaacatgaagtataactgtataagcattcattga

SEQ ID NO: 113139 - DNA, 618 bp, Homo sapiens
cacttttaggcagtcatcaagaatgcctgttagtgagatgaaattgagtaagaaatttgggaggataatattttgacttaattataacataagaattttaaattttagattttaaacttctaaaaacaagataactgattttaattgcttcaaactttctatctttagattttaacttgaaaaatgtttaaatatttaacctttaatttcttccaggaaatttgaaaattgcctgggattaaaactggggaaatatctcagctgacattattaattagaatttatgtattgtgtttatgcatcttatcttactgcttacttgtaggctcacagtactttgtggctggacatgagttttaatacgagaagaaatagaatggaaatgagatgcctgaggaattgattttcagaatgtatttttgtgattcatggtaaagacctgagaggggctgtattagtccattttcaagctgccaataaayacatacctgagactggaaaaaaaaaagtagtttaatggacttacagttccacatggttggggaggcctcacaatcatggcagaaggcaacgaagagcaagtcacatcttatgtggatgtcagcaggcaaagagaga

SEQ ID NO: 113140 - DNA, 563 bp, Homo sapiens
ttattatgtgacagagtattccaggtgccaattaaaaggtgtataattcatttaaaatattaaaattcaagaaagaacatgaaaaatataataagaaagtatgtatactccccttcaccgtcaccactaccactacttgtcttactgtcctagttcattacrgctttacttccacacctcggattctccagtcatcagataaactgagtatcaatgcagggagccacagatgaaacacagaggtggggtcctgacaccagtgatgaatactatttgtggtacattttctccaaaagaccagatgtgatggcacagtggttccccaaaccgctgcaattgacaaacagggtttcaatctttaacctatttaatgaggcttacaaggagatccaaggctattagaagtcattttaaagccacttttgtgaaacttagcctttactcagcttaaaatttaactgggaaaggattataaattaccttttttgtttccaaagtggatatttttcagtttttcctgatcaccattcgtgccccatttataataggaagccagtttttag

SEQ ID NO: 113141 - DNA, 573 bp, Homo sapiens
catgatctctttaaatattacttctctgcctggcacagtggctcacgcctataatcccagcacyttgagagactgaggtgggcagatcacttgatgtcaggagttcgagaccagcctggccaacatggtgaaaccccgtctctattaaaaatacaaaatttagccaggtgtggtggtgcatgcctgttaatcccactacttgggaggctgaggcaggagaatcgcttgaacccgggaggcagaggttgcagtgagctgatatcacaccactgcactccagcctaggcaacagagcaagactctgtctcaaaaaataaataaaatattacttctccctgagttgctccatgctgtgcttcctagaatacctattagatgcatgttggactttctcaccctatcttctatatctcttaacctctcttttatagtctcctttttatcattatgtattgcatttgggagaatctcatcactgattttctcctggtgtctaacctgctatttaacctatctactgagtgtcttcatttccttgttttaagctatctcttacagaaggatgaatggctt

SEQ ID NO: 113142 - DNA, 586 bp, Homo sapiens
aatacttagaaatgtgattaagtgataagtatcaactgacttgaactgttcaattttgtaattgttatggtaatctactatttcctttagaaaagattctaggattcttccattctgtgtatatataaaagtaatcaggtcagtytgagaagcatagttgctatagtttacagtttatcttttagtaatttcatacaacatctaaatactgtactaacaataatatgactctggctgtttcattaagatatttttaagtagaaaaatggcctaccagcctcaaatatttggggaagggagctattgtctgtgaaaattgaaacaaggcaaatacacacatgcgcacacacgcactcatatgcacacaaccttctcagagaaacttccatctccacattcaagtaagagtttgatcccctggaccctgccacctaagctgatttgaacctggcttcatttcctcatttaactttgatttctagtatcagcaaagctaagcataagctgtaattaaaagaataatgcaggaacagaggagacaaaatagaaattgaaaattaattaagattaagtaaaattagtttca

SEQ ID NO: 113143 - DNA, 633 bp, Homo sapiens
tagcctcctctctacccatatacataataactactatgaacaagggaaaccaatgactctttttatagcatcttcacacaaaatcttcaaaccatttgttcagatgactgatctcagcaaagtgggtgaagggcattaacagacatttggaaatccctgtaaatccatcatcctgaaagacagcacagtgttcatggtgactccagagggagtgaaatgaaatatgccatcgactctccagaggttaatcgatcatatttctggtgctacttggtttgacataaccaaatttgcactgaaaatcaastcatctatctttgttctggtcaacttaaaaaatttaatcctatttgacctttgctgaggtgcagtcaaagaaaaacagattcttttctgagctaggcaacctcctcttatctatattacagtcacctgagcgggtccatctttgctctaattcaagagcactgagcagcccgtgacaaatctcatcactggctttttggaccccagcagcagggagactgggagatttttgttttacttcgagatggtaaaggaaatttattttaagaaaaattaaagcgagagaaagcaacagaggaagagtaacatgatgctttcatttaccat

SEQ ID NO: 113144 - DNA, 551 bp, Homo sapiens
cgtgtacgcaccttaaccccgtctccttcccacagccagccccagtcccccgaggtctgacctgcagtggaggtgcactgygggcaggcaggatgcctcacccaagatgcctggaccagaaaacctgccacttctcgtcaccgtctcattaaaataaatgacttcctctgtcctgagccgcatgctgagcactctatggacgttatctctttcagtccccccacaggccttgtccctgggaaccatgttgtccccatttgggggaagttgaggcaccgagaggcattacctgccccaagtcttgccactcacgcaaggagggctggatggcagctttggcctcagactccaccatgcagcccttgggcctccaccaagggcctctgcagggactgtgggaggaagaaggcccttcatgcacaggcattggacaccttcacaggcacgaaacccagtgtctgaaataaagagagctaagaacgaagctaagaaagggcctcataaatcaaaatcagtcagcagcaaataaatggacgggtgctgctgatctg

SEQ ID NO: 113145 - DNA, 551 bp, Homo sapiens
cgtgtacgcaccttaaccccgtctccttcccacagccagccccagtcccccgaggtctgacctgcagtggaggtgcactgtgggcaggcaggatgcctcacccaagatgcctggaccagaaaacctgccacttctcgtcaccgtctcattaaaataaatgacttcctctgtcctgagccgcatgctgagcactctatggacgttatctctttcagtccccccacaggccttgtccctgggaaccatgttgtccccatttgggggaagttgaggcaccgasaggcattacctgccccaagtcttgccactcacgcaaggagggctggatggcagctttggcctcagactccaccatgcagcccttgggcctccaccaagggcctctgcagggactgtgggaggaagaaggcccttcatgcacaggcattggacaccttcacaggcacgaaacccagtgtctgaaataaagagagctaagaacgaagctaagaaagggcctcataaatcaaaatcagtcagcagcaaataaatggacgggtgctgctgatctg

SEQ ID NO: 113146 - DNA, 551 bp, Homo sapiens
cgtgtacgcaccttaaccccgtctccttcccacagccagccccagtcccccgaggtctgacctgcagtggaggtgcactgtgggcaggcaggatgcctcacccaagatgcctggaccagaaaacctgccacttctcgtcaccgtctcattaaaataaatgacttcctctgtcctgagccgcatgctgagcactctatggacgttatctctttcagtccccccacaggccttgtccctgggaaccatgttgtccccatttgggggaagttgaggcaccgagaggcattacctgccccaagtcttgmcactcacgcaaggagggctggatggcagctttggcctcagactccaccatgcagcccttgggcctccaccaagggcctctgcagggactgtgggaggaagaaggcccttcatgcacaggcattggacaccttcacaggcacgaaacccagtgtctgaaataaagagagctaagaacgaagctaagaaagggcctcataaatcaaaatcagtcagcagcaaataaatggacgggtgctgctgatctg

SEQ ID NO: 113147 - DNA, 551 bp, Homo sapiens
cgtgtacgcaccttaaccccgtctccttcccacagccagccccagtcccccgaggtctgacctgcagtggaggtgcactgtgggcaggcaggatgcctcacccaagatgcctggaccagaaaacctgccacttctcgtcaccgtctcattaaaataaatgacttcctctgtcctgagccgcatgctgagcactctatggacgttatctctttcagtccccccacaggccttgtccctgggaaccatgttgtccccatttgggggaagttgaggcaccgagaggcattacctgccccaagtcttgccactcacrcaaggagggctggatggcagctttggcctcagactccaccatgcagcccttgggcctccaccaagggcctctgcagggactgtgggaggaagaaggcccttcatgcacaggcattggacaccttcacaggcacgaaacccagtgtctgaaataaagagagctaagaacgaagctaagaaagggcctcataaatcaaaatcagtcagcagcaaataaatggacgggtgctgctgatctg

SEQ ID NO: 113148 - DNA, 600 bp, Homo sapiens
ggataagctgtgatgttgttastgctgagcgtctttcgacataaaaagtgcccgggtatctccgggaggtgggtggaaattgctgatcctgtttttaaagcagaaatccctccccaggctccaatgctctccccctccctgctggtgcccagccagacaaccatatgttcattacctccaagaatttctctttagaaacaacgctgtcatgtctgaacagaggtgccaggcacaaaggaagcgctgcctcttgcagggggaggaggggcgggtggaagaagtcactgtctgcatccaactgcaaagacccagatttgggcacagcagcctctgaacaatgtcccttggccttagggaacccaagcaggctgtggacctctaaaggcctacccctcagaattgtcaggaaggtagaggttggaggttctgatgccaacttgggaagaagccacacagagccctcttgagctccgtaccaaattatcttctcaagaaagctgctgggagaagcatccatgacacgaggccctgttttgaaatccgcccctcagcagccccgcggggcatgaggactccgtgggatcgaagcgctggagtctt

SEQ ID NO: 113149 - DNA, 600 bp, Homo sapiens
ggataagctgtgatgttgttagtgctgagcgtctttcgacataaaaagtgcccgggtatctccgggaggtgggtggaaattgctgatcctgtttttaaagcagaaatccctccccaggctccaatgctctccccctccctgctggtgcccagccagacaaccatatgttcattacctccaagaatttctctttagaaacaacgctgtcrtgtctgaacagaggtgccaggcacaaaggaagcgctgcctcttgcagggggaggaggggcgggtggaagaagtcactgtctgcatccaactgcaaagacccagatttgggcacagcagcctctgaacaatgtcccttggccttagggaacccaagcaggctgtggacctctaaaggcctacccctcagaattgtcaggaaggtagaggttggaggttctgatgccaacttgggaagaagccacacagagccctcttgagctccgtaccaaattatcttctcaagaaagctgctgggagaagcatccatgacacgaggccctgttttgaaatccgcccctcagcagccccgcggggcatgaggactccgtgggatcgaagcgctggagtctt

SEQ ID NO: 113150 - DNA, 600 bp, Homo sapiens
ggataagctgtgatgttgttagtgctgagcgtctttcgacataaaaagtgcccgggtatctccgggaggtgggtggaaattgctgatcctgtttttaaagcagaaatccctccccaggctccaatgctctccccctccctgctggtgcccagccagacaaccatatgttcattacctccaagaatttctctttagaaacaacgctgtcatgtctgaacagaggtgccaggcacaaaggaagcgctgcctcttgcagggggaggaggggcgggtggaagaagtcactgtctgcatccaactgcaaagacccakatttgggcacagcagcctctgaacaatgtcccttggccttagggaacccaagcaggctgtggacctctaaaggcctacccctcagaattgtcaggaaggtagaggttggaggttctgatgccaacttgggaagaagccacacagagccctcttgagctccgtaccaaattatcttctcaagaaagctgctgggagaagcatccatgacacgaggccctgttttgaaatccgcccctcagcagccccgcggggcatgaggactccgtgggatcgaagcgctggagtctt

SEQ ID NO: 113151 - DNA, 582 bp, Homo sapiens
ctgtgagaatccaatgcaggcaggtctggaagcagtccttggcacatggtaggagtgcagttggtgacaattgacctctgcatctccattcacgctgaagcctgcctgggcaggactctgcttctgtgtgccatgggagcaaacaggatctcttttgtagtacaatttttccctggttgtaaatataaagcatgcttattatagaaaagctggaaaatatgcaaagagtaaaaaaaaaaaaaaaatactggctgggcacggtggctcatgcctgtaatcccagcactttgggaagccaaggctggtggatcatttgaggtcaggactttgagagcagcctggccaacagggtgaaaccccgtctttacgaaaaatacaaaaattagccgggtgtggtggtgggcgcctataatcccagctactccrgaggctgaggcaggagaatcgcttgaacccaggaggtggaggttgcaatgagccaagattgcgccactttactccagcctgggtgacaaagcaagactctgtctcaaaacaaaaataaaaacaaacaaaaccaattcactaatacccagaggtcat

SEQ ID NO: 113152 - DNA, 588 bp, Homo sapiens
tctcttaaaaaataataatttgattaagtgtttttaaacttaaaaaaaaaatttgagactgtggattagggcagagctgcaggccttttctgtctgtagcttctcactttgcctcaattcagcccctgttatttgatctgctgtctatgaaggcagtgtcatgtacaacggctgcagtctgaattctggttttgccccttactggctttgggatcttgggcatcacttcctgagcactggattcctaatctgaacttctgaggtcattatgagacttaaatgagataaygtgtgttaagtgcttaactcgtctactcagcatattgtaagtgctcagtaaacagttgctatttatattattatcagaaattagccattgagccatagaccagaacttagagaaacctttgagatggttgaggtagaggtgagcaaggattagacactgttaacaagatcttctgatccctggcccagagctttctctaatcaacaccaagtccccacagccttgtctgtggcaagatttcaacacaactattaatgatgtggggaaacttcctctgaaatatacagacctctgttcta

SEQ ID NO: 113153 - DNA, 506 bp, Homo sapiens
atattttaattatttatgtgcctgtgtgtttgtagagcaaagaccttgccttcttcaactctgtacctaaacatctgacccattcaagtccctgaatgcatgcatgcatgcatgtacgaactaaggtaacacacaggctaaacctggctatcttgatggcttcttagtgatggagtgagaattgtaagggagaaggaagccttgagtcctggctcaactctccacrtgagcttttctctagggcgggaagccaaagactccatggctctcctgaagcagacaatttggtaaaaaaaaaaaatagattactcgaaaacacattgaacaaagtaacaaattggttaaaatgactgtgtgaacaaagcattaaaatttcaattcattggggttttacatattgatatgtttttgcatcatgtagataatattacaatattatacgtagactttaaagcattattatccatattcaggatttattcaggtttagggatcagttttgtgca

SEQ ID NO: 113154 - DNA, 567 bp, Homo sapiens
actcaattatgtaaacacttggcacttttgattcttctggaatattattgaattttaaaaatgccctttagcatactaaggataaaatttatcctgtctgcaaatctagarggataatataatatgaagataaaaaatgttttaagaagcttttttttgagatatgtaaacaatcaattttcaccttcagttattaattgcacataattttgaaaaataataaatttagccaaagtcaagtctgctaggctgttgtatgctctggctatagtacttcatttttgtaaaatttgttgttttcaaaggtggaatctcactccataggagtgaattaaacattctgctatggttgcctgccactaggtgaactgtggcatctgaattcttgagctaaaatacactgatgcccttaaggtccagatgagaagaagcagggccaaagtactgatccattcatctgcatcattttctacaaaatattaattttaagttgaaaaagagacacagagtcattgcaaaaacaagagttctaaaaatacttttagaacttttgtataaattcactgc

SEQ ID NO: 113155 - DNA, 550 bp, Homo sapiens
ttatgtatttctagttctggtaccataatagtttataggtacaaatttttctactcccgttttcttccttccccatctatgtaccaaacctagaaatgtttgacacttggttggcctttaattgctgcatatgcccaataccaaattttttagcactgtgctttgttcatgataagcatgttagttattgctgcttcaatctaaatgaaacaaatgaattagcaaattccttttaactattacatgttagtatagtttawaccaactatttggatacatggctgaatttctctagtttttatccaagtatttgatgttacaaaatgataacctctgtgacttgtttttttttttttttttgctaaaattgccaagaggaatacatttgctttccacttagccataatataaaatacaaccttgggaatggctgctttaaagaaacgtttccataagacacatcatacttgacatactttagggaagcttcttcaaggagttgtggttaatatttttgtaatgagaaaaaagaatcacttcaatgaccttt

SEQ ID NO: 113156 - DNA, 550 bp, Homo sapiens
ttatgtatttctagttctggtaccataatagtttataggtacaaatttttctactcccgttttcttccttccccatctatgtaccaaacctagaaatgtttgacacttggttggcctttaattgctgcatatgcccaataccaaattttttagcactgtgctttgttcatgataagcatgttagttattgctgcttcaatctaaatgaaacaaatgaattagcaaattccttttaactattacatgttagtatagtttaaaccaactatttggatacatggctgaatttctctagtttttatccaagtatttgatgttacawaatgataacctctgtgacttgtttttttttttttttttgctaaaattgccaagaggaatacatttgctttccacttagccataatataaaatacaaccttgggaatggctgctttaaagaaacgtttccataagacacatcatacttgacatactttagggaagcttcttcaaggagttgtggttaatatttttgtaatgagaaaaaagaatcacttcaatgaccttt

SEQ ID NO: 113157 - DNA, 617 bp, Homo sapiens
gtgccttagccatggtcaacccaccatgttctttgacatcgccatcaacggtaagcctttgggccawgtctgctttgagttgcttgcagacaagtttctgaagacagcagaaaactttcatgctctgagcactggagagaaaggatttggttataatggttcttgccttcacagaattattccagggtttatgtgtcagggtttatgtgtcacttatttctacataccataatggccctggtggcaagttcatctacggggagaaatttgatgatgaaaacttcatcctaaagcacacaggtcctggcatcttgtccatggaaaatgctgaacccaacacacatggttcccagtttttcatctgccctgccaagactgagtggttggatggcaagcatgtggtctttggcaaggtgaaagaaggcatgactattgtagaggccatggagcactttgggtccaggaatggctagaccagcaagaagattaccattgctgactgtggacaattctaataagtttgacttgtgttttatcttaaccaccagaccattccttctgtagcttaggagagcactcctccaccgcatttgctcacagtatcctataatttgtgt

SEQ ID NO: 113158 - DNA, 443 bp, Homo sapiens
caccaccaccaccagtccatgggggttctgccaggccaccgttgatgttcacttaaatcccaagggctcttttgtaagcttgtggtgaatgctggtaggcctggagcttacccttcagggaagtgggctctcttctggccaaaggtagttctagaaattctgtccaggaacttagggctggacttagggattccaagagccttcttgttgctttgccctactgtggtcaaactggtgttaaagatacaagacaatgttccctttatttttacctgtacttttctcaaacaggagtctttcatcatagccaccacagctggaaaagtgcttggtaaactctgagstagcatgtctcagatcccaaggcccatgatgtgctttctgggtatttctgctggttattcagcacccaagggttcttgagtcagcaggtgctttagtcc

SEQ ID NO: 113159 - DNA, 548 bp, Homo sapiens
agtcaagaattgaggtttgggaacctccacctagatttcagaatatgtatggaaactcctggatgcccaggcagaagttttctgtggggacaaaggcactcatagagtcacagagaactctgctagggcagtacagcagggaaatgtgggtttggagcccccacacagaatccctactggggcactacctcttggagctgtgagatgagggccactgccctctagaccccagaatggtacactgayggcttggaccgttcacctggaaaagctgcagacactcaatgccaccctgtgaaagcagctggaaggggagggtgtaccctgaaaagccacaggagtggagctgcccaagaccatgggaaccctcctctggtatcagtgtgatctggatttgaaacctggagtcaaaggagataattttggagctttaaaatttgagtgccccactggattttagacttgcatgggccctgtaacccctttgctttggccaatttgttccatttggaatggctgtatttacccaattcctgtacccccattgt

SEQ ID NO: 113160 - DNA, 577 bp, Homo sapiens
ggatttgctgctttctgtccttttttaagagtccctaaactccacaatagccaaaatgaaagcaaactaccacacctctgccagccagttaaaagcaactcatgtggctgctggacttaagatacagaggacaggtttgctgaagaggacactgtcaatcccccatcaccttaggcgttgggaatgttggctttgttctaatccagtttcccttcagaaaggtctagttgtcaagtgggatcagaaaaaggtcctggggcaactgagagtatatggttaaggttacaacttggtgttatccaaaggcccctggactaactccagttcccaactgccagttagagtgycagcactaggacctccagtctttccttttctttcttttctttctttctgtctttctttctttctttctttctctctctttctttctttttctttattttctttctctttctttctctctctctccctccctctctctctttctccacccccccacctccctccctcccttccttccttccttccttccttggctcctagatcttctttatatacaatgttaagggtgttg

SEQ ID NO: 113161 - DNA, 597 bp, Homo sapiens
gaaaatccctgatttaaactatgatttgcagacctccatttgtattcttgtctcagacctcaaatgtggtacagacaggcctgcaaagaacacaatcataaactaaatatatatatwttttcctttttagagataggtcttactctgttgcccaggctggagtatagtagtgagaccatagctcactgcagcctcagcctcctgggctcaaacaatcctcctgcctcagcctccaagtagctaggactataggcatgtaccaacacacctggctaatttttaatttttctgtagaggcggggtctatgttgcccaggctggtctagaactctcagccaaaagcgatcctctcttcttggcctcccaaagtgctggggttacagatgtgagccactgcacctggccaaattataaaacttttataacactatctttatgggaaaaaaaagttccggttatggtatccaaagaataacttatctgactccagttacaattcaatctattctgcatataggccagaagcatgtgggggagcaaggcggatgaagagaggttggttaataggtaaatcatacagttagacggagtaagttc

SEQ ID NO: 113162 - DNA, 594 bp, Homo sapiens
gtgatcttggacaagtaatttaacttctctgaacttctattttattgcatataaaattggaataaaaatcatatatacttcacaggactactgaagcataaaggtaagtagcatttcatagaaatgatatttctgatcaggaatattctgatgacaatgtatatctctaacacagaaataattattttagctatatcataaaaatgacaaaatgccttagtggctctcattcctatggagactccctccagcagctcagcagtccctttgaagtcacagtagagtggaagtcatggtcttcacagccagctccctccagagagtaggggctactattatggactgaattgtattcccacaaatttgcacgttgaacccctmacctcccatatgactgcatatgaagatagagtctataaggaggtaattacagttaaataaggtcataaatccaatcttataggattgggggccttctaacaagaggaaaacaaagagatctttctttctgtgtacacaaagaggtcatgtgaagacccaacgagaaggtgaccattgacaagtcagaaagagagcccacaccataaactggtc

SEQ ID NO: 113163 - DNA, 534 bp, Homo sapiens
taagtacttactctatgtcatgcaccatgctatgatatatgagtgaacaagatatgctctttgccctcaaggaactcccaggttgttaagaaaggcagacgagaaaacaggcaattataatacaacatgatatgaattttgataagggaaggttccgggtgctttggaaacatgagtttctgaggaggaacttgtatcctgccttggaaaggggaaggcatagaggggatttcagggaagggttagcagtgggctcttaggaaggttagtgagagaggtggcatctaagctaacaaaatgaaatgtgttctgttccatgaccgtgctgatcatcaaaatatggagacatgctattttacaatgaggscatctgctgaaccatggacttcttacataaaacaaaagttaagcaccatgggggagatgcttttataatgttttgatgtcgagtggtctttagtctctttggcaaacatttgtacgtcatctagaccaagaatctcatgtgtgtgaaacaagtattttcaacatgca

SEQ ID NO: 113164 - DNA, 396 bp, Homo sapiens
agttagatacttaagtctgaaactcaatgtcgagttatcccctcattcctgggtgtgtatcctctcaaaacctccaccacgatcttaacccctgtgggttctgactctctacaacacaggatgtctcagattggaccatctcaatgagctccccrtggttcaagtaaactaattttcctcttgggaacctcagctgactccaatctcaaggttcttctttactcgctactgaaattggttacactagggaattccctcaccctgcactttagagatcacagagaagttggaatgtgtctactcaacagagcttttcaaatgactcttatttgagttttctctctctcctatactttcttaccattttgtacctcttcaagttctcccctaaaggga

SEQ ID NO: 113165 - DNA, 584 bp, Homo sapiens
acacagggatttagtgtgtatccactggtaccttgatctaggactttccaggctccaggctgtgagaaataaatttttgttatttataagccatggagtctatggcatttttgttatagcagccctagcaaactaagaaaatcagacttaaccacctttgctggaaaactgccagtttgatctgaaggggaaagagacaggaaggaatgaaggaaggctgttggacttcttggattttacaggatggtaccatcgagttaattggctggtagcatattattcttctagacaaggaagaatgactctgaagacaattcagagatcatcagggttgcctccttggtttcagaagggtgaaccatagtcttgctttcaaaaggccagatggcctctgctcaaaagaacactaaggatgagaccccagctgggtaaagctgcagggaaaggayttccctgtgggttctgaaggcaggacctctaccccagtagacctggagggcagagcattaagccaaggaggattactcttaagccttaaggtctaatggaatttgtattgttgggttttggactaactcctaacc

SEQ ID NO: 113166 - DNA, 601 bp, Homo sapiens
tataaattgaccatttgagtggagcatgaaaggattggaagataatttcccatctacatgtatgattttgttgtacctggttctgcctgtttttttgtttgtttgtttgtttgtttgtttttgcagattgggcacagggaagaaagcatttcctaagctgactgagtacctttatttttccttaacccctagttccagatacacatttgatttcagagttttacatgttcctcaaacttaggaatgattaacatatttcatcagcaaagttgattcttgggggtgaggagggaggcatttcatctgccttaaattcacaagctgtcaagcagatccatgctcttttgcgtagtaatttattcctaaataattatcttttagataaattgactacttttcttttcttctgatgtttttgtcagtctcagatttaaataactacaatayagtctttcatgctgtttgtgaaaatcaagggaatctttctacatcacagtcagtgagttactttttattacttggttggtggtataatattttttcagtctccaatttggaaagctgttctattgaaatgtgtatggaaggtttctgaaacgga

SEQ ID NO: 113167 - DNA, 645 bp, Homo sapiens
atcttgggcagggcatggtggctcacgcctgtaatcccagcactttggaactggtctctaattgtaatttgatagattattcatgtcccatttaaaaaaataacttttcagcctttgacacaaatcttcttcttcttctaatcacgttttctttatgggctaccaatagaatagagcagactattgatattttttctttttcgtctccttggttggttcctcctcttatttctttttttaaaatctttttaatatttctttttatattgagaacaggatcttgctctgtcttccaggctgaattgcagtggggcagtcacagttccctgcagccttcatttactgggctcaagtgatcctcctgcttcagcctcctaagtagatagggccacaggtgtgcaccaccacacccagctaattttctctctctctytttttttttttttttgtagagatagaccttgctatgtttctgaggcttgtctcgaactcctgacctcaagtgatcttcccacctcagcctctcaaagagctgggattataggcatgagccaccacatctgtcccctcttttctttctaaattataatcttggagtgtcccctagggtttagtccttggtcctcatctccaatgaccctcatt

SEQ ID NO: 113168 - DNA, 496 bp, Homo sapiens
aaaataccatgtgtatgccaactagccggaaccaaatcctgaaaatttaacaatcagtccttacaagctggtacaaacttcctccagaacacrtctacctgtcttcccatgccccctttacacaagaattagtaagctgcactgagcctttgtttttgttctgtgtttttacttaatagcacgtggtcagatactatgaactggttgtcatatacatcatcagaacactttcattaatatctcatattatgtagcatgatttaccactttttcctaagacttggggagagagtttgaatttggaatcagaaagatttggattctaaccccgaatcaggccttatcttgccttatctttctgaacctcgagtttttcatctatgaaatggagaccataatataaaatctgtgatataatcaaagaaataaaatgttcagatataatattaattataatattaatagtcagcacatataagtgccctgtttttgccag

SEQ ID NO: 113169 - DNA, 446 bp, Homo sapiens
gtatagttggtttgttctttcattcaagtgtttattaagatgcctaatatggggcaatcactttactggagtctagggatacagctatccacaaaacagtctttgctatcatggaacatactcactamcattgggaaaggaaggtagtaaaaacacaactacaaggtagtatgtaagttctgtgatggagataagtacatggtaggtagtatgtaagttctgtgatggagataagtacatggtaatatggaagcacagagaaggggtcactagcttggtgtaagggtgttagggaagcttccagaggaagtgtggggcaaaacaagaattgagcgatgtatagaagttagccacagaaagggggggctttctatgctacctagacatctttgcaagaagcctccaattccaaaggtcatctatgcatgactttggatccctgagca

SEQ ID NO: 113170 - DNA, 536 bp, Homo sapiens
aaactaagctggtagagagatgaaagtaaaaatataagcaatgacagatgtcaaagcttcatgcaagagagaagtctactttcttggtccctgttattgttttttggcattatatgctacttgagatgtagtaaaaaaaaaaaaaaaaaaaaaggatgataacagcaggtaattctgagtcagcatttttgacagtcttctaatcagaatccatattttgaatgtagactaaaccacctcaaaaagggtatttatctagtgatgtgaaaaaaaaacaaataaatgaataggaagcaaataatttaagtaaaaagattaatatctaatttgtctccaamctttctggcagccagagcaaaaagaaaaaccatggtgagttactaaattttattgtcacagtaagaaaagtctcaatggcccagaggagttgagacaggataggaaaagtctcatttcaaacttcaaaatgaatttccacatgggtcattctactagggttactcttcagtacagcagccactctcctccatgataat

SEQ ID NO: 113171 - DNA, 560 bp, Homo sapiens
caccacatataaaaaagttgaggaatgcagtgaatgctatacatgtaggggagggcacagttagacagaatttgtagtcatagatattcatacaagaaaagaaaaattaaaattataaatggcattctycaactcaagaacttaaaataatgataaaacaaagaaccatgcacatcaaaaaaaaaaaaaggagatgaaagtaataaaaacaagaggataaataaaagagtgagcaaagataccattaaaaagagccatgcaactccaaaaagagctgatgcccaataagtagtagcttctgccttcaccatcacaattgcctacctttggttttgtcagactgatgggaactagttttctatcacattctgctgtaacatatgaaagtttcagctggatgttaaaaaagtacaaagctgcagagtgtgtcattttcataccaactcaactggtggaaaatgcagggaaaggagtaggctctgcttttgcatccaaatctcatttaatccttccaacatcttgtatcatttaactgtggtcacaataatgctatgtaacaa

SEQ ID NO: 113172 - DNA, 560 bp, Homo sapiens
caccacatataaaaaagttgaggaatgcagtgaatgctatacatgtaggggagggcacagttagacagaatttgtagtcatagatattcatacaagaaaagaaaaattaaaattataaatggcattctccaactcaagaacttaaaataatgataaaacaaagaaccatgcacatcaaaaaaaaaaaaaggagatgaaagyaataaaaacaagaggataaataaaagagtgagcaaagataccattaaaaagagccatgcaactccaaaaagagctgatgcccaataagtagtagcttctgccttcaccatcacaattgcctacctttggttttgtcagactgatgggaactagttttctatcacattctgctgtaacatatgaaagtttcagctggatgttaaaaaagtacaaagctgcagagtgtgtcattttcataccaactcaactggtggaaaatgcagggaaaggagtaggctctgcttttgcatccaaatctcatttaatccttccaacatcttgtatcatttaactgtggtcacaataatgctatgtaacaa

SEQ ID NO: 113173 - DNA, 501 bp, Homo sapiens
tgaattctgagctaaaagtagatcaatatgtcttctttcctaaattaaaaaataaattaaacagcattacaatggcattcccagtattcatctcataaacaattctctccccttcctcactgacccacttrgccacatcctgcctgccatcactgaagttagactgatcagttgaactaataccattattccaattgtacatgttagaaaaaataatgaagataactagcatctattgagatttctttatatgtcacatgagtgtggatgggtaggtgtttttccctacacatggatgcatattcagttgtttcaacaccatgtattgaaaaaagtctcattcttatttcatttttctacttgatatttttgtcaacaacaaattgacgatatacatttcagttatttctgaaattttttatttaatctttttatggggatgtcttctcagcaatatatgtgtgtgctggggtgtgggtgggggtctttaatcttcagcac

SEQ ID NO: 113174 - DNA, 568 bp, Homo sapiens
agttttcttcgttccatatgaagaagaactaataaagttctttccactttacagagttcaattccatcttacaggagcatctggtattcttggactttactgagtccttaaagtctttccgctttattggttgctcaagccgcggcacggaattctgctttagaattcrtttggctccctggctccacccaaaggccatgagatcccccatgttcctatctcccagagctgcccctggtgctttatggtcacttggtcatttgttataccaaagcttctgcctcggtgagttaggatctctgctgcacaagacctactgttaaggaacaaaaacagggtttatctgcagtgcagataaaactcccgaagagtcaccacccacccatgagtccttctggacattaatgggcccttctgtggtcttgctatcagccttggtctttaattcgtgcttttgtttattaagaaagatgctcacccatctccccagatagaactaacacactttttctgggttttgcattaagggattatctttgagccaggaatagggctccccctgctttca

SEQ ID NO: 113175 - DNA, 594 bp, Homo sapiens
gaagcatccaaggaggcctgtagcagtccatcatgtaggatcttccccaaacgctgtgataggagttgcagccttagagcaatgggaaacctttcatgacktgtgtgtgtgtgtgtgtgtgtgtgtgtgtgtgtgtgtgtgtgtgtgtgttgtgcacacagagagatgcacacgtgtggcccgaaagtgatggatttgaattttagaaaaatagcctggcttttccttagccttttccttccaatatctttccttgccttctttagaaataactttcttggatttcttcctgttttctttcaccaaaaagccattaagcagactcaaccagggtagatgttctaaacaagggaggcaagccctagcagagatcaggacccatgtgtgaatgggctgctggctcagcaagattgagagacaagctatatacagggagatttaaaaataaatttgaaataatggaaactgtgggaacagaggtataaatatggaaagcataaaagctagaatgaattgtatgctgtggaatcaaaattggaggtattagtgtgaaccggtggttttaaatatatagaaatggagaaataaatatag

SEQ ID NO: 113176 - DNA, 626 bp, Homo sapiens
cctaggtgcctgtggatgggggttgggttttcttgggaacattctctctgagaatttacaaagtaactgacttcctaatggatgacaggtcttcactccgcagttcagcacccagccctctgccagctcatgcctgccacatcttccacttcttagtgcccttcagggaaactaggaaagtgatcagatcaaggcagcaaaagacagttgatcaagtctccacataagcagagcaagtgtgcactgtctcctgtcatgtttgataagccccactgtgtgccaccagaggaggcactttagatacrtgatttcgccaaaactccacaacctgcatgagagaaagaaattctttttcccattttatatgtaaggagactgaaattcagaggaggaatgcctcacctgcaattagatgctgagctgggagctgaactctttttaatctattagatttcaaagttcatatttgtcctactgtgttgtgctatgtactaaatttattgaacatgaatttagtgcaggtgttttacatacacctgatttgatccttacaactactctgaaggaaatgtgcttgtaatattgtccttattttattagaaaggcaatgaatgtgaaggagaggt

SEQ ID NO: 113177 - DNA, 469 bp, Homo sapiens
ggagtgaaatattgtatgagcatttataatgccataagaaacaatatgtatacattgatttgagttcagacaacacacacacacacacacacacacacaaacacacatgcacacacatacacacaacttgggaaggtcagtgaaaagattgaggttagtgctatgtaagctccaagccttcaggaagatcctccaaggaagagatcctgaaggcaaaacygagttagcgggcctttgcacagctttcctttgcaagtccggtgtccagaaaatatgaacctcctcttttagcattatcctggtacctgttataaaagtaggaccttcttctaccaattacagtggggatgacgtgagggctgacatttctgaaggtctaccttttggcaaattagatggatggattaagtacataaaatttcatgtgattctcatgaccacattacgatattgggtatgaaaggctaga

SEQ ID NO: 113178 - DNA, 577 bp, Homo sapiens
tagggattagattgatacataatccaagagttttttccccctatgacttggattatttgttgaattgtttccttagacttccaaggataatgatgtattaagaccctacatggtataatgaaaggaacatagatctggcaagagaccaaatttgcacgtgaccttagtcaagtcacrtttcttttctaggctttaattttttcaactctaatataaggagttttgggcaggacacatccgactgaaggtttgcagaagtcctgagagacagtatgaaatgagattggtctgtctttaggagaggtaggctggaaggctaccttggtgaatttactatagttcagtatctggtttctaattttggaagtccagaaacttctcatcaatgctacagagatctggacttgagtatctgatctacacagactaaatttagaataaactatatacatatagaccaatttattgatttatagtaaatactcttgtcagcttgccctaaaatttattaaaaattatagggaaatctacattttaatcaaaagttactcaagtatggacttccagcaaaaagaat

SEQ ID NO: 113179 - DNA, 574 bp, Homo sapiens
aataaaactcatcacgataaaaaggtaaaacaagaatcagcagtatcagaagcaaaagaagggacctttctacagacattataaagatgataaagaaatattatataattttatgctaattagttttacaatatagattaaatgggcagattccatgaaacaaaacttaacaaaactaatagaacaggaaatggaaagtgtgaccaaccctgtatacattttagaaacttaattttaattaaatatttcttargcacaaatggcttcactggtgaatactatcaaatatttaagagctgtacaatatccatttagcatattctttttcagagaatagagatggaaatcttcgcattttattttatgaaaatagcatatctttgataccaaatccagacaaaggggaaaaaaacccctcaaaatcctgaccaatacctctcatgaacccagacacaaaaattcttaacaaaatattagtaaacaaaacccaataacacatttttttaaaaaaaggttctatataatgactaaatgaatttagtacaggaattcaagcttggctaaatatacaaaa

SEQ ID NO: 113180 - DNA, 510 bp, Homo sapiens
tgtgaagataaaattttatttcttctctcgtttttttttttttttttttttttttgaacaaggtctcaccctgtcacccaggctggagtacagkggcatgatctcagctcactgcagcctggacctctcaggctcaagcaatcctcccacctcggcctcttgagtagctgggactacaggtgcatgccaccacacccagctacttttttttcatctttttttttttttttttgggagaaatgagggctttttatgttgcccaggctggtctcaaactcctgagctcaagggatcctcctgccttggcctctcaaagggctgggattacagcatgagtcagtgcccctgggcagtttttatttctttagtgcaaaatgtctccaccttgaatttaaaggggaataaccctttgttggggggaatgtcctgtgcattgcaggatgtttggcagcatccttggatctatccattagggacccgtaacagcctctgaaccagttgtgaaaacca

SEQ ID NO: 113181 - DNA, 510 bp, Homo sapiens
tgtgaagataaaattttatttcttctctcgtttttttttttttttttttttttttgaacaaggtctcaccctgtcacccaggctggagtacaggggcatgatctcagctcactgcagcctggacctctcaggctcaagcaatcctcccacctcggcctcttgagtagctgggactacaggtgcatgccaccacacccagctacttttttttcatctttttttttttttttttgggagaaatgagggctttttatgttgcccaggctggtctcaaactcctgagctcaagkgatcctcctgccttggcctctcaaagggctgggattacagcatgagtcagtgcccctgggcagtttttatttctttagtgcaaaatgtctccaccttgaatttaaaggggaataaccctttgttggggggaatgtcctgtgcattgcaggatgtttggcagcatccttggatctatccattagggacccgtaacagcctctgaaccagttgtgaaaacca

SEQ ID NO: 113182 - DNA, 510 bp, Homo sapiens
tgtgaagataaaattttatttcttctctcgtttttttttttttttttttttttttgaacaaggtctcaccctgtcacccaggctggagtacaggggcatgatctcagctcactgcagcctggacctctcaggctcaagcaatcctcccacctcggcctcttgagtagctgggactacaggtgcatgccaccacacccagctacttttttttcatctttttttttttttttttgggagaaatgagggctttttatgttgcccaggctggtctcaaactcctgagctcaagggatcctcctgccttggcctctcaaagggctgggattacagcatgagtcagtgcccctgggcagtttttatttctttagtgcaaaatgtctccaccttgaatttaaaggggaataaccctttgttgkggggaatgtcctgtgcattgcaggatgtttggcagcatccttggatctatccattagggacccgtaacagcctctgaaccagttgtgaaaacca

SEQ ID NO: 113183 - DNA, 577 bp, Homo sapiens
tattctgaatttaatgtctgtcatttcggccatttcagcctggttaaaaaccactgctggagaaccagtgcagttgtttggagctaagaagacatcttggctttttgatttgccagagttcttatcctggttctttcttatctgtatggrctgatgttcctttttatatttgatgttactgtcctttggatggatttcattgcttttttttccctttgatgcctgtgggtgtttgattgcggtataaagtgggttcagtcaactggcttcatttctggaatattttagggggcaaaggctcagcttagtatttctgggctgtatgctctaactctgggggcctggtacccagcccccagctttgttctctggtcccttgaggttagaaagctgctgtacaagaggggctgaggtattccctagccacaatactccaatagggggtgccagccaaagtgttttgttggggcagtggccatgggatctgtgctcactcacacatgccagcaactgcagcagcatcatggggtacacgtgttggctaaagaaaggtaccagtgggagtagggtgtcagtg

SEQ ID NO: 113184 - DNA, 644 bp, Homo sapiens
tctgtttctttgagttttacttctttagattccacatataaatgagattatacaatatttatctttctatgtctggcttatttcacttagcaaatgtcctccaggttcagtatttttaaatcagatatattttctccaatgctaaagaaaatctttattaaagaaagaaagaaaaaaggcatgcagtcagaaaaactatttttctgatcaaatatgctgcagaaattttcattttacatatctaaatttagattttttatgaatttttatacaaattcatcttcttatagttgggatgttattacaaaagtttsgatatcttaaaaatccctaatgttttagagtttcatatttattgacctgaaacaaatatctttattgatcattttattaagatggattccctgttacgtctccctgctccccaacagcaccaactgtttctgtaacaaaacatataccgagactagtgctgtatattgatgtcaggatctctagaagctaaacttaccaactacttgaagcatattatatagtgagacagatttttctttatgattccaacctccatttgaatattttttaaccatcctccaatctgaaagaaaaggtagaattacttgaccttgatgatgctgacttag

SEQ ID NO: 113185 - DNA, 644 bp, Homo sapiens
tctgtttctttgagttttacttctttagattccacatataaatgagattatacaatatttatctttctatgtctggcttatttcacttagcaaatgtcctccaggttcagtatttttaaatcagatatattttctccaatgctaaagaaaatctttattaaagaaagaaagaaaaaaggcatgcagtcagaaaaactatttttctgatcaaatatgctgcagaaattttcattttacatatctaaatttagattttttatgaatttttatacaaattcatcttcttatagttgggatgttattacaaaagtttcgatatcttaaaaatccctaatgttttagagtttcatatttattgacctgaaacaaatatctttattgatcattttrttaagatggattccctgttacgtctccctgctccccaacagcaccaactgtttctgtaacaaaacatataccgagactagtgctgtatattgatgtcaggatctctagaagctaaacttaccaactacttgaagcatattatatagtgagacagatttttctttatgattccaacctccatttgaatattttttaaccatcctccaatctgaaagaaaaggtagaattacttgaccttgatgatgctgacttag

SEQ ID NO: 113186 - DNA, 644 bp, Homo sapiens
tctgtttctttgagttttacttctttagattccacatataaatgagattatacaatatttatctttctatgtctggcttatttcacttagcaaatgtcctccaggttcagtatttttaaatcagatatattttctccaatgctaaagaaaatctttattaaagaaagaaagaaaaaaggcatgcagtcagaaaaactatttttctgatcaaatatgctgcagaaattttcattttacatatctaaatttagattttttatgaatttttatacaaattcatcttcttatagttgggatgttattacaaaagtttcgatatcttaaaaatccctaatgttttagagtttcatatttattgacctgaaacaaatatctttattgatcattttattaagatggattccctgttacgtctccctgctccccaacagcaccaactgtttctgtaacaaaacatataccgagactagtgctgtatattgatgtcaggatctctagaagctaamcttaccaactacttgaagcatattatatagtgagacagatttttctttatgattccaacctccatttgaatattttttaaccatcctccaatctgaaagaaaaggtagaattacttgaccttgatgatgctgacttag

SEQ ID NO: 113187 - DNA, 608 bp, Homo sapiens
gaacaaagatcaccaagattcaggagatggcaaaacccaatccaasgaaaataaggatccaataaagctatacaggagctgaaggatgaaatagcttgtatgaaaaagaacctaaagtgtctgacaatgctaaataacacaatataagaatttcacaatgcaatcacaattattaacagcagaaaaaaaaccaagcttaggaaaggatctgaaaaattgaacactggctgctgaaataagacagtcagacaaaaaaaaaatataataaaataaaaaggaatgggaatgaaaaaaacctctgagaatgggattatgtaaagaggccaaatctataaatcactgggattcctaaaaggcagagggagaaagcaaacaacatggacaacatatttcaggatgttataagaaaacttccccaaccttgctagagtggccaacagtcaaattcaggaaatacagaaaactcctgcaagattctacacaagaggaccatccccaagacacgtaattgtcagactttctaagggcaaaatacaataaaaaatgctaaaggcagctagagagaaaggacagttcacctacaaagaggaccccataaggttaacagt

SEQ ID NO: 113188 - DNA, 552 bp, Homo sapiens
gtcacagctttttaaatgtctccttgtcgtgtctcaatttgtgaatttggattgtgatagctctagaacaaattatttttattactatttagactcctacccaagtgccacattaattaaagccatctttaaaaaaaattggaatcaggattccaattggtctataaagaacgagttaataaacagtgatgtaaactgcacatcaacagaaagtaactttgaacatttatgcatctataccaaaaaaatatagcattggggatattgggacagatttgatctcagtctctgcatttggtccattcacttctgtatgatacttatttcctacatgttagaggtaattccacacaaattaataagcttaaaactgtcatatctcataatctaatgggaawttatgctttttaatagttagtaaaattaagggttgcctgtaattgacttgtgttccctgtttgtagcagcagacagaaaagctttggttaagatgagaagttttagattaatgactccaaaactctaagtgacattacatataaaagaaaggat

SEQ ID NO: 113189 - DNA, 580 bp, Homo sapiens
attatcaacttgaacaaagcagagggaaagaagggggaaattacagtctgcagccatttgataattcagaaatttcagtctctgcctaagtccatcctggtgaaaggaggttggtatgtatgccttttcaattttttgtctgagctccagttggctgctgggatcttttataactggcctaaaaattaagccatattttctttgaggttgacattgtttacatgttatttcctcttggttaactatcatagaagccttttgaaacacattttcgaagtaaacatgagagctagcatttaaagctcagtcttgtattggttaccaaacgcacctggggcaactgatgtttgaagggagcagaaaggatattctgacttccatattctggattccctaatattgaaccctgcaamaatctggttcttagaaaacaatgtacttgacattagcttattatccacaaataacatttcttattatacatttagactatgtcttactcagttcaggctgctatcacagagtgtcatagactggatggcttataaacaacaaaaatttatttctcccagctttggag

SEQ ID NO: 113190 - DNA, 628 bp, Homo sapiens
gcttttttgctcagtttcacacgttgtaactcaaattactctaaacgtgtttaactgccaaacagctacctgcatgttagaaaccagacaatacaaaccacctaataagaaaggttccctaatagaaatactaatacaaaaaaatgccttagctggagcaacttaaaaatcaaataatcatgacaaaagaaaaacaaatataaataccgactcgctctttattcaaacagtgtgctgtttcgcttatgattccacgtcctaaattacgtcaacgccgtttctgagtgccatctcgtcaccaactgctgctatcgactcctgtattttttaaaaagtctttttttacatcatataacaaagtacaattcaatttatttagggataaagccactataactaaaccagggttcactcaaattgctaccaggcgacaccaagaaaatcccaactatagaaaaaatcaccaagaaaaacacatggacacaagaacatcactaaaagctcaagcataaggtamgaccaacaattgtggaaaaaaaccctatgtccacaatctgggcaatgtttacaagttttcccactttgttctcatcaaccttccctagtacaaatttaattacatcatctt

SEQ ID NO: 113191 - DNA, 601 bp, Homo sapiens
gaagtgctcagaggataaaccaatgagggagtgggttcaggggcaggacagggaagggaactaaactgagcaagggacaatttcagggcaagtctcggcctcagcctaatcccgtckggagctctggacatacattaggcttcagagtttgttccaactggaggcaagagaactgggctcttctatgcctgcaccctttaggcacctcaggccgtacagacttactcccatatagggtggctccagcagcccaccagaatccttcaaagagtcacagagaagcaaggcccacagaagcatgccaaggaaatcagaggatgccaaaggaatcagaggctatctggagaacacacaggcagcacccatcaggacacccatggttcttattaaagcccagtagctctttcaaaaaccctaggttttaaaccccaagaaccaatttccctcctgtctggggagaaaaaagcatcctttcctgatattctgaagatcacctcaagaaccacttacaagagctgattactgacttaaacacagctctaatctaaggaaagtgtcccatttcccacctctagagagagacacgtcatggagtaacttg

SEQ ID NO: 113192 - DNA, 588 bp, Homo sapiens
attgtgattttgagatgcatttcccgggggaatcccactgctgggtatatatgcaaaagaaaagatactagtatatcaaagagatatatgcactcccttgtttatagtggcattattcacaatagccaagatatggaatcaacgtaaatgtccaccaaagaatggatagagaaaatgtggtatatatacacagaggaatattactcagccattaaaaagaatgaaatcctgtcatttgcagcaacatagatggaatccgaagacattatgttaagtgaaataagtcaggcacagaaagacaaattattgcacgttctcacctgtatgtaggaacgaaaaaagtttatctcaaggagctagagaatagaayggtgtttaccataggctgtgacaagtagtggggaggtggaaatggggaaaagttggttaatgggtacaaaactgcagctagatagaagcagtaaattctactgttcagtagcacagtagggtaactataattaataacaatttattacatatatcaaaatagttagaagagaaaatttggaatggtcccaacacaaagaaataataaatgtttgaggt

SEQ ID NO: 113193 - DNA, 634 bp, Homo sapiens
atcgtttggctgtgtccccacccaaatctcatcttgaattgtgcttcccataattcctacatgtcatgggagagacctggtgggaggtgatttaatcatggagggcaagtttttctcatgctgttcttgtgacagtgaataagtctcatgagacctgatgggttttttaataaagtgcagtccccctgcacatgctttcttgcctgccaccatgtaagatgtacctttgctcctccttcgccttctgccatggttgtgaggcttccccagccatgtggagctgtgagtccattaagcctttttttctttataaattacccagtctcaggtatgtctttattagcagcatgagaacagactaatacaagtaataacactcatagttagcatttatgggatatttgctgtatgawaggtgtttcaaatatatcttatttaatttacttcacaactctgcaaagtgggtaggattatctagatttttttcttttttgagatggagtcttactctgtcacccaggctggagtgcagtggtgcgatctggactcactgcaacctctgcctcccaggttcaagagattctcctgccttagcctcctgagtagctgggattacaggtgagcgccaccatgc

SEQ ID NO: 113194 - DNA, 606 bp, Homo sapiens
ttctgaaaagacctttaggcttatagggcctagctgtgatacatttaaatgttgtctccactgcaaggtgaacatgaaatgcatgtagcgtgtatgttttcttattacacatatgcacaacctccccctttatgattattcatagcttttcctatgatgtgttgaatatgtgtacttagctaacctcttcagcatacgtttctgtcatacctttcctccttcwaagtgcctaacttgcgggctgtgctggaggatacatttcccagactgttagaatggtcaccttgaaggcagtaaccctttttaagaaataaagctctctttccaaatttatagatctcatgatttttcagctgccaaggagaatgtgcacacccagctgttaaccatcacatttcctgtgagtcgcgtagctgttcagcatattagcatgaagaagatagaataaaaatgtggaggacacaatgccttatgtcatgggttgaattattccctccccccaaataatttgatgtaccaaatcccagtacccatgaatgtgacttcatttgaaaatagggtgtttgtagacataatcaagttaagatgaggtgatgaacataggcc

SEQ ID NO: 113195 - DNA, 610 bp, Homo sapiens
gattaaaaggcaaaaatgcaggtattaaatggaattttattgtttgtgaaaatcaagtacaaattgaagagagaatttgtgtctaagtacctctcagatctacccacgtgtacagtgagtgttctgtcctaggtacacctataccacacatgaccagatgaagccatggaaaagacgggtgtacactgtggctatttaccaaaactatcctatcttattttactgcaataattaaaaataacagtctagtaaagaatagctctggaacacacactaagactgactgaacatgtgaaagtaggcatgagaaggactttgtggacagacttgggatcatggtgtccctcaacatccctttgcagtgattgatgttcctgttgggagtcttgccttgtagtctgaccttgaacttgtgtggagaggcagacaggtggttttgcttttgaaagtttkgtgtgagcaaatattagcaaatgtgatctaaaattgtgctgtttacataggtataaggcaagaagactttggtctcctggtttcttgagctgtgtggtgaccatctgtttgcatagggcttggctactctttccagggaggcagggatgtgcacagt

SEQ ID NO: 113196 - DNA, 576 bp, Homo sapiens
atcatttaacatgaaaagccgtaagcatccctgagtagtggcaggtatcagtggattgatactcagggtggcaggaggggaaaagacataatagcaaaatacacaaaataaataaccaggcaggggaggcaactgacctcagtattgagaccatgttattccccctgttagcttccttcaaagttcttaaaatccttcttatggcccttaggatcaaatcacactccagccctgacctccaaggcctgccctccagctcgtctcatctcattctttctctcatcacatgcatgctgcccccagcttctcacatgactggctcattcttcrggtctcaatgcagagatcatctctttagggaggccttccctgcctacctgatgtaacatggaccccctccaccatcttgattccatgttccactttgaattctctgaagggcacttaggacatttttgtttaactacttatttggtcatgatctgtctttccattctagaaaatgagatccatgaaagcggggacctcatctgtcctgtgttcctcgcaatgctcagtggggttcaataaatgttg

SEQ ID NO: 113197 - DNA, 581 bp, Homo sapiens
tctttatcctcattctcttgagctactaagacaagatcttgccaatttctaactctcttgagctgataggcctactgtactcttcaggtttcttcaaatgtcacaactttccatctattttccagtggctcccttcctgtcctggtataggttaccattgaggacactcttatttttaaacttagacactcagaagatttatttcagtatagaattaataggaaccagaaggttgttatggtttctagtaaaagtaaactaataattaattccagtggctccttttgtgcactgccttctgtcttctgactcaacctgatakatatatatatatatatatatatatatatatatatatatatatatacatatatatttttttttttttttttgcctcctcagaagaaagaattcgactcaggagcataagacagaggaacgaccaaggcaagttcagagcaggagtggaagtttattaaaaagctttagagcagtaaggacaaaaaggaaaggaaagagaaggaaggacttggaagagggccaagtgggcgacttgagaaaccaactgaacctcagcctga

SEQ ID NO: 113198 - DNA, 611 bp, Homo sapiens
gacaatttattaaactttgtttttgatctttacagttttgaggaatagggttaggcatgtttagaatgtgcctcatttggggtttttctcatgattatcctggcattatgggtttttggaaggaagatcacagaagaaaagggcagttttcatcgcatcacatcatgggtacatactctgaacattatttaccactattgatattgaccttgaccacctgcctcaaayagatcttatcagatttttcccatgtaaagttacccctttcctccttttccatactggaagaaagtcagattcatccattttggggaggaactcaaattactctgaaattccagttttgttttaattttattccggcattactttctgcaccagtcatacagaggtatgcacacatgcacaagtgttcacacacaaactctttctttctctctcatctctactcagaaataccaaaaaaggtctacacagagagatctcaaattcgaaacacaggctatcaacaagctctccccatacaaaaagtttatcagtaactataggttgaaaccatagatcaatacaggaatttttccccactgaagtacattcaaagatgaaaaaga

SEQ ID NO: 113199 - DNA, 562 bp, Homo sapiens
cacttcacttttctccgtatgtccaattctgcttcctcccctttccacaggtgttgatttctaataaactcctgaacaccaaactatctccgagtcttctttcggttatctctgagaacccacattgcagcaggaggtattactactgccattacaaagatgaagaaaactgaggctgggcaagtctgtctttttgaaaagtttgatagttcatccatcccccaaatcctagaatttttttctctactccaatatttataacagattacctttgccagttctctaaccacacttccgtaagatctttaataccataagatataattatcttcatctgaaaacctaactagttagtgcagtttagtgactctcttggcttaccaatctcaccgtcttggtttgccattctcctctttacctggtcttagtgtttctactttgaggaaaattcttctcaatagaaatcatgaaagcaaaacataaattgtatagagctgttttttgttgatcrtcaattactgattatacagtctgcagcgggtccattccttccttgttattt

SEQ ID NO: 113200 - DNA, 625 bp, Homo sapiens
gtgtagggagcaaacctgactcacctatattgaggcagctgagagcacatccatgggggttgagaaagacagcaaatcacactcaggtataactcagagtttcctcagcayactcataatttcatctgaaatcaacaaccttggaaatcatatccaagcattactgagctcctacttaaagaaccatagggaagccataaattaataaaacacagtccctattcataagttgattatcatctcgctgggatgtaactagaatgccaggcaaaatgtagtaagaactgtgacagtaggatcaagagagaagggtggacagggggaaacctgctgtgctttaaagattatgtaatgtccatacttgcaaatataagggagaaagacatttcaaatagaggaaagaacttgaggaaaagcttggagacatgaaagtgtgttatgtagagataaagcgcagagaggagaaaagcctgggatagaacggcaactctcacatgtaacatgtgtattgtagagccacaaaataggcttggtccctgttcatttcttccctgcacctattacaattggtaactacatacttatttatttatttattacctaattctgtagaagtttatggatt

SEQ ID NO: 113201 - DNA, 625 bp, Homo sapiens
gtgtagggagcaaacctgactcacctatattgaggcagctgagagcacatccatgggggttgagaaagacagcaaatcacactcaggtataactcagagtttcctcagcatactcataatttcatctgaaatcaacaaccttggaaatcatatccaagyattactgagctcctacttaaagaaccatagggaagccataaattaataaaacacagtccctattcataagttgattatcatctcgctgggatgtaactagaatgccaggcaaaatgtagtaagaactgtgacagtaggatcaagagagaagggtggacagggggaaacctgctgtgctttaaagattatgtaatgtccatacttgcaaatataagggagaaagacatttcaaatagaggaaagaacttgaggaaaagcttggagacatgaaagtgtgttatgtagagataaagcgcagagaggagaaaagcctgggatagaacggcaactctcacatgtaacatgtgtattgtagagccacaaaataggcttggtccctgttcatttcttccctgcacctattacaattggtaactacatacttatttatttatttattacctaattctgtagaagtttatggatt

SEQ ID NO: 113202 - DNA, 540 bp, Homo sapiens
tttaccctctggctccaacaaagatgctgtttttattttctatcctgttctaggccgttttcagtcattttacatttgaaaagatatctttgacctactgaaaatcttactagcaaatttgctcaaaatagctctaccaatcctagagttttaagatgaggagcagaaaattaattagttgcatgagcctattactaccattgagcatagattgaaggaagtcatgagagcccaatgagttagagacagaaggaccttataggtcacctaggctattcccctcatgtcacagatgaggaggcagaggcagggagaaggtaacagattgtatctaaagcaatakcagggcttagaggagcaggtgtgttatttaactttcagtctgggaatgtttcactgtaccatgatgacctaagcactctgcttgagctgggcactacagaatatatgatagaagtccaaggcatggtctttgccctcttaaaattttaccttttcacccaagattttaaaaaaagtttctctaacattaaaagaggc

SEQ ID NO: 113203 - DNA, 494 bp, Homo sapiens
tgcacttggggttagcaaggcgaagaggagcaagcacaggcttatagaccagcagaaagcagaggtcgaaggaagggagcatttaatatagtacctatggctctgcatgtgggaagtttgggcaaagtattgagtgtaccaagcttactggaatacaaggaattaggttttgaggtttaaattctagttataygtaattttgtgacatagaatttataataaatgctattaatagaaaaattatactttctctgagcttcagtaacctcatttgtaaaatgagtctaatgatgctattcagagttgtttttaaattaaatgagattatgtgaaagccctttgtggctagcaacagtctatatgaatgaaagacacatttgatttattgtaaattaaaagtgaatgatggctttaggttacacgtggccattcaattccaataaggccattataaaataattgtaaatttatgtatttttattacaaggtgagaa

SEQ ID NO: 113204 - DNA, 627 bp, Homo sapiens
aagtgggagaacacgtgaatataatccactctattacgtatcctgcccactcaacacataactttggtttacttttaaaaatatgtatcattgctattgcctacgccagtatccacgaaaatgcaccaagcctccttgaaaacaaagacaacactcccgttgcatcaggcataattttttttttttaaataaaaataactttccttctgcttgggaaaaaataactttagctattgaaaaataatacaggaaatggaacccagagcaccaattcttctaaactttgagaaataattgtagtaaattcttataattttatgttgtctttgcatttattgtgaatatagatttaaatttctcatttcagaagsagaccttagtcaaccttgacttggtttcccatttctgccttctccagttccctaatatagttgatccagatatctgtcttatacagtcacctctgggtggccactcctttatgggacagctagattcaacctatttgacttactctgctgaccccataacctgcacagactgcacagatatgcttcggtgaccacctctccttcacagtgtgactcaagaaaacttgtgtcagcctgctctaaagtcactaatcac

SEQ ID NO: 113205 - DNA, 520 bp, Homo sapiens
acaggcacctgccaccatgcccagctaattattttgcaatttcagtagagacgggggtttcaccatcttggccaggctggtcttgaactcctgaccttgtgatccacccacctcggcctcccaaagtgctgggattataggcatgagccactgcgcccggcctggagataaatttttaatcatcaacatataatatccacatttcagacactcagaaaacccaaccttgaattgaagataattcctaagaacagtaactatagaatactctccagtccactaccacagtgcactgtgcttaaaccrctgatccctggtaacacatgcaatagccttgcgatacgttatttccatttttcagaggaaaaaaatgagacacagtgagataaaactgtcctaggtcatgcagtgagtaaatatttaaacatgatatatctgagcctaaaccactgtcagaaaccatgatgtctgtctttcaggcttctgcagtgagtacttctcaaagcatagtccctggacc

SEQ ID NO: 113206 - DNA, 496 bp, Homo sapiens
gaaggtaaatactatgtcttatttacctctgcactgctagcacatagaatagarcccaataactagtaagagattaatactgaactaatgactgaataaaatatagtatgttacaaatgactcatgtgtgagtcactgtttcatgtgacagaaaacccaaaatgacaatggtttaaacaatttacaagtgtttttctctcttatgatggaagtccagagtgaggcacagtagagtcaatacagaggtcttacagtcattgtcatcatgactcagcctccttcacatgctcagtccctgggatgtggctctggtattcatggtgtcaaatgaaagctggtgcttcagccatcatttcagtgtcctatcatatttcagcagcgaaatggaaaactaggataaaggtcatcttaagacaacatcttggaagtacaatagtccccccttattcacaggagtatgttcgaaaacccctgttggatacctgaaaccacagta

SEQ ID NO: 113207 - DNA, 447 bp, Homo sapiens
tgactgttgttggtgtgttgaaatgctagtgatttttgtatgttgattttgtatcctgaaactttgctgaaattgtttatcagcttaatttttgggctaagactagggggttgtctagatatagaatcatgtyatctgcaaaaagggataatttgacttcctctcttcctatttgaatgctttttatttctttctcttgcctgattgttctggccaggacttccaatactatgttggatgcaagtggtaaaagagggcatccttgttgccagttttcaaggggaatcaatgttattaaaatggccatactgcccaaagcaatttatagattcaatgctattcttatcaaattacccatgacattcttcatagaactagaaagaaactattttaaaattcatatggaaccaaaaagaagcagaatagccaaggcaatcctaaacaaaa

SEQ ID NO: 113208 - DNA, 560 bp, Homo sapiens
ttgtttgattgagtggactatgaattaatacccagatgaataggtcagttaaagaggccaaactgaccctattagaacctgccctgggaactagaagctttaagtaaggttttctcagtcttggcactattgacattttggtccagaaaattctttattttatgggactatcctatacatttaagaaattttagcaaattccctggtctctattaggtagatgacagttacaaccctatacatatttatagggtggaacctatatatgtttcttccttactatctgaaatagctttaataaatataatttttctrttgtctttggccctcaattttcccttcttcttacaagagtaacagatccattggtctcttcctttatatcattaactgataattattgaaaggcatcttttatgtctctacctcctttcccatttcaaaatttctacatatcttattttacttaatttttaaactttttcacaaaagtttaaagctctatatagtaatggtattattcctgaaatcagatttaaaaaaatgtaaaaaatacaagt

SEQ ID NO: 113209 - DNA, 560 bp, Homo sapiens
ttgtttgattgagtggactatgaattaatacccagatgaataggtcagttaaagaggccaaactgaccctattagaacctgccctgggaactagaagctttaagtaaggttttctcagtcttggcactattgacattttggtccagaaaattctttattttatgggactatcctatacatttaagaaattttagcaaattccctggtctctattaggtagatgacagttacaaccctatacatatttatagggtggaacctatatatgtttcttccttactatctgaaatagctttaataaatataatttttctgttgtctttggccctcaattttcccttcttcttacaagagtaacagatccattggtctcttcctttatatcattaactgataattattgaaaggcatcttttatgtctctacctcctttcccatttcaaaatttctrcatatcttattttacttaatttttaaactttttcacaaaagtttaaagctctatatagtaatggtattattcctgaaatcagatttaaaaaaatgtaaaaaatacaagt

SEQ ID NO: 113210 - DNA, 499 bp, Homo sapiens
ggcaaattcaaaactagagtttttagaaaagttaaggctacaggtaaggatttggcatttgtctgcatagatgacccaaaccaaaagagctagtgaagatattgagagagcatgaaggagaaatgaagagagttaagcctatagttgataattgaaggtcttctctatgaggctataacactccaatactacgttgttgtcagtgtaaacaagggcgtagcccaaaacactgagaccactgacaacccatagccttcctatcaaaaatccttaacccagtaagccacaaatgcattcaatcggtagtggcaactgmtttgctaacagaagaaagtagaaaaaataacctttagaggaaacctcattgagagcacacctcaccagttcagagctatcctaagtcaaaaaaagcaaaaaggtagcttactaactcaaaaatcttaaagtatggggctattctgttagaaaaaggtaatttaacattaaccactgaaaattc

SEQ ID NO: 113211 - DNA, 475 bp, Homo sapiens
gaccatcccgtttctctcatataggcaacctctcctcactcctgctcctagaagcagcctttatatttgctcatctctcccatcataaaaacaaaacaaaaacagaactgaaaacacagaggacttccctaaacacacgtccctgtctggctatcactgccttcctctacttcacagtgaacaggagtcagtcttgacccatccccactccgacccctcatgcccaagcaggcacaggccatcagcttaggtacaagtttagaaaaagagacttccaagaaaacccaagctactccacagaagtgcatatttcgaacatgaccccacaggaatgtctgccaaggacagggcagcagtgcagtgtgtgygcgtgtgtgcgcgtgtgtgtatgcgtgcctgtgtgcgcatgcatcacacttaaaaaagactatggtctttttatgacaccaggcatctcgtccttcccagagaattc

SEQ ID NO: 113212 - DNA, 475 bp, Homo sapiens
gaccatcccgtttctctcatataggcaacctctcctcactcctgctcctagaagcagcctttatatttgctcatctctcccatcataaaaacaaaacaaaaacagaactgaaaacacagaggacttccctaaacacacgtccctgtctggctatcactgccttcctctacttcacagtgaacaggagtcagtcttgacccatccccactccgacccctcatgcccaagcaggcacaggccatcagcttaggtacaagtttagaaaaagagacttccaagaaaacccaagctactccacagaagtgcatatttcgaacatgaccccacaggaatgtctgccaaggacagggcagcagtgcagtgtgtgcgygtgtgtgcgcgtgtgtgtatgcgtgcctgtgtgcgcatgcatcacacttaaaaaagactatggtctttttatgacaccaggcatctcgtccttcccagagaattc

SEQ ID NO: 113213 - DNA, 525 bp, Homo sapiens
caattttagattcaggaaacatgatcctgagccctgtgaggtcaggagtggaaagcttcagaagtagaaaaagattttgtgaagatcattccattttgttccaaagtttaatttttggtttttttaaaatagggcctgctctgttgcccaggctggagtacaatgatgcaatcactgtagcctcatactcctgacctcaagtgatcctcccaccttagcctccctgagtagctgggactacaggtgtgtgccctcgcacctggttaattttttactttttgtaaagactggatcacactgagttgcccaggctggtctcaaagtcctaagctcaagcagtcctcctgcctcagcctcctaaagtgctgagactacagacatgagccaccatgtctggcccaaagtttaatttgtgtgtgcgacataaaatggtcccaacggaamcatgaatgaggagggagagataaagcaaaaagatcttagaatgagtaatgggaagattccttttgtcgggggagggaattc

SEQ ID NO: 113214 - DNA, 605 bp, Homo sapiens
attagctttgtgttgcttttagtacattttccctggctatagttagttgtattcagtaagcagttttcaagctgtgccccctgaataaaaaatagacattctgggtgaatatctactggatgtctgaatggaggaagctctcggaggcttgttgttttcatctggagtatgggaataagaatcttcaccttataagtggtcctgcgattcattgggatacagatatttcagactcggcagagcccctggcacctattaggcagttggcaaatgttgattggctttcttttgtctgagagagattgtcagttttgattccatcaaaattgtggaataaacatttcctctttccttaaaaaagatgaaggcaagccagaggcaaaatgtagtcagtaagggccgggcaggkaggttcatgtctgtaagcccagcgctgtggcaggccaaggcaggaggactgcttaaagtcaagagttcccgtccagcctgcgcaacatcaagtgagtccccatctctacaaaaaaatttaaaaatcagccagatgcggtgacacatgcctatagtattagttacttgggaggcttaggcatgaggatcacttgggc

SEQ ID NO: 113215 - DNA, 605 bp, Homo sapiens
cccttgggatcctctgagccagtggggtaaacaccattctgagaggagagaccagcactatggagggttcctttggggagaagatgggtgaagtcagccaaatttgggggctcaaattccaggacaccttgagaagagttgcttccctggtgcagtagatccaggtgaggctgtgagttaaaagaaagccatcccccgctacccactcccctgcccccacttagggcctcctttagcagtgtgagggtcagaggtcaggagcctcactggtctccagagatttggggtgagtaacaggtggtaccaggcataagaaaagctggagggtgactgaggtgggagtttcctgagtccacacttcccctgcctatggacccctagaatcaggtgttctgctaacactccccatgcacagccaggctcagggagatggggtgggagcccagcagggsctatgcccggcaggtgaattctccttcgtctcctgaaaccacctggggcagctccaggacctggggatgcaagagctgggaggggatcatggtcaggctgccctgggaccagcacagcctggcaggggggctgccatcagcatcacagaccag

SEQ ID NO: 113216 - DNA, 490 bp, Homo sapiens
  misc_feature (1)...(490): n = A,T,C or G
ctgggctttacaaaaccttaggtatttgagttttataatgatgcaatgagatcagtataataggtaactttacttttccaaatagaaatggcaaagagagaagcgattcaccctatatcatccaaccagtacaaaatagagaggaaatgatcacagattgggctgggaaggggcagagtctaagggagaactgggctggaaaagggagacagagtaggagctaccactagcacatgtagtctatgactcangtaaggggtcagaatgtagaatcctcattctacaatgtagagcctcagaaaactactcaccctcagtctttgaagaccagagttcaggttcaagctctacaaccttgagtagttctcttcagttttatcacctggacgctgggctgttccccttccacacagagaaaggaaatctatttgygaaaaaccattaaaccacaacaatcccaggtttcacaaggcggttggggaggtgaggg

SEQ ID NO: 113217 - DNA, 577 bp, Homo sapiens
tctctctctggtgcacaaaacatcatctctcctaggactcaggttcctctccaccctgggtctttctgaaatgaacctcagacatagcccctgaaggactgtgaagctctgagcctcttggatgagagagagagaaagcactggaatgctgataggccttgtctcttctttcttcccactggccccatcacttagggtcaaaggtggtccttttggccttmaaaagggcctggaagcagggtggggcagggaggtggttctcagaccttcttagacccagacagttctcctggacctgcctggctgtgccttctaggtcccaacactcagagtcaggggcgtgtctctgagcatcattgttaacagtttgataaccactactgagggaactgttcctgctctcactgggctcactgtccactgaggtgccagatgccattattaattggaatagggcagtggagagagcactggtctttggacagaggccagggctaagggttgaggtatggacagtagaaaaaaatgccctaaagagatttttagggaagtgtgactattctatatgatactctca

SEQ ID NO: 113218 - DNA, 570 bp, Homo sapiens
cagcagcagcatcagggcatagtaaaaatggagggaaatcaccagcttttgtggaggaatgccatacctccgtcatcttccagagcttttgatatatgctgactggaatcataagccatgatttgttaaaatcaccaaaaattattattctggggctctataacaaagacataaaaataaattttaaaaatactgaaaaatcactcagttgaattaatttggatggaatgttttgtcatatatatccgtagagttcagaaatgatcagrtatttcagtggataaagaagtgctaacaatgtatttctttcaggggtttaccctggtctggcttcattactgtaaaatctgaaaagtgggaactcggtaaaatccccaagtgagatgacacaacactgtcataaaagctttcagacaagtaatgagaaatatccttttatacagtagggaataaattccttgacctaacacccagaggtaagactatataaagaaagcataacctattataatttatataatttaatacctgttataattttaagaatttataaagtaatgttgaggctat

SEQ ID NO: 113219 - DNA, 559 bp, Homo sapiens
aaaaaatggagcttgcagtcttgctgtgctttctgtgccttcctcagagtgcccagttaacaggctgttgagatgggtgtacctggagtggctttgtctcttactacagcaatgaatgttttctgattgctttttcttattgagaaagacttttataaatccagtttttctatatttcaaataagtaaggatcatttttagagcatcactatacaaattaccagataatttcctcttatgttaaagtccctaggaggcaatgtgggctatgcttcamgcaggggtattttttatgggtatatttttctaccgttaatcaatgtattgatgccttgtccaaataaagcagacaattaccaaataagcatattccaggtaagcaactacttaaatccattaaattcttaccctacaccatcaatcaccattttgaaaccttactttatcagggctttactataaagatccgttaagatgcagaggaaaattaatttaaaattacattaattcacatattctgcctttcaaacttctgtcatgtctaaggattcaattagtc

SEQ ID NO: 113220 - DNA, 471 bp, Homo sapiens
ccttacttagtagacatatgtctgttgttaccagtagcaataaatttcaagtttgaatgactaggacaattgtgtatctgcactcataatgcataatacgatggaaatgtcattcaattgaaactattattattattttgcttgaacttcagaaccaagagcaattattctttaactgttctyctgccagagttcgaagcatgatgtgacagtctgaaacatttatacagtccacatgatcaccagcttccatgccatttgtactatgaaaaaaatattctgtttacttcaagttctgagtaattcttttcgatttttggaaagcttgattagctgaaacaagcctggctgaaacagaatatgcaagtattgtataaattctgttggggtatattttttaaagattgtgaaaaatactgccaaatttgatccatctgttcacatatgagttcttcaatattaataggctgg

SEQ ID NO: 113221 - DNA, 407 bp, Homo sapiens
gtatgcatgtgtgtgtgatatatatatatatatcatatgtgttcataatgtgttcttgtgagataatcagatattttgtttatattaagaataaatattraaatgtgtgtgatagaaaatgtgtactagaatgaccaagttctagaaaaaaaaattaaaattactttcccccagtactgatttccctgctgactaatattgtgacatgctattgactataatgctggctccttcttttctgtattcattcacatttccaggcctggttcaagacaactcttgaatatttttttcaagccacctatgtgacaacagaatcttaacataaagaactggccaaactctttcaaagtaatgtatttttttccaatcattctatgtactgattcttatagaagaacatatag

SEQ ID NO: 113222 - DNA, 407 bp, Homo sapiens
gtatgcatgtgtgtgtgatatatatatatatatcatatgtgttcataatgtgttcttgtgagataatcagatattttgtttatattaagaataaatattaaaatgtgtgtgatagaaaatgtgtactagaatgaccaagttctagaaaaaaaaattaaaattaytttcccccagtactgatttccctgctgactaatattgtgacatgctattgactataatgctggctccttcttttctgtattcattcacatttccaggcctggttcaagacaactcttgaatatttttttcaagccacctatgtgacaacagaatcttaacataaagaactggccaaactctttcaaagtaatgtatttttttccaatcattctatgtactgattcttatagaagaacatatag

SEQ ID NO: 113223 - DNA, 407 bp, Homo sapiens
gtatgcatgtgtgtgtgatatatatatatatatcatatgtgttcataatgtgttcttgtgagataatcagatattttgtttatattaagaataaatattaaaatgtgtgtgatagaaaatgtgtactagaatgaccaagttctagaaaaaaaaattaaaattactttcccccagtactgatttccctgctgactaatattgtgacatgctattgactataatgctggctccttcttttctgtattcattcacatttccaggcctggttcaagacaactcttgaatatttttttcaagccacctatgtgacaacagaatcwtaacataaagaactggccaaactctttcaaagtaatgtatttttttccaatcattctatgtactgattcttatagaagaacatatag

SEQ ID NO: 113224 - DNA, 592 bp, Homo sapiens
ctttaaaaagagaatatactttgcaaaattataatttaaaaatcaaaggatagcctgcaaagctttcagaaagtaaatatgagagaaatatctggctcctgtacttagctaagttgccaaatagactagagtataaaaatcattttgaaataacttttgagctactggctgcataacatattgtcaataagaagtatggaagttccatttttggcctttgttttctatttatttacattccttataagtatatataaaataaaatttttaataaatgtcaatgtaaaaatgaaaatcacttattcttcaaattcttatcctattataataaaatcatttaaaaatcatgagtaaaattaaaattgaaagccaccaaacargcttcagtcacacagcttataaagcagtaagatttgacatatatggagctcccacaatggtgtaaatgttgaaatacaggtaatagcttgtggagaggttttccttatttttgtttttcttgctcatttaataagatcattgattaaaatgtcttatatttggtagtataaataactctaaaaaatggaactaaaatagcacttcatcaact

SEQ ID NO: 113225 - DNA, 621 bp, Homo sapiens
ggttttgtttttactgttgagtttcttgcatattctttttactagtcccttgtcagatgaatactttgcaagtattttctcccattcaacaataggttttctctctattccattaactgtttccattgtgaagaagctttttagtttaatacagttcaatttgtctacaattgtttttgtgrcctgtgtttttgaggtcttaatcataatatttttgcctagaccaatgtactgaagtgtttccctatgttttcttccagtagtttaacggttttgagtttttttgcttaagtctttatctatctttagttgcttttgtacgtggtgaaaggtaggggtctagtttctttcttctgcatgtagatatccagttactatagcattgcaatatattttgaagtcaggtagtgtgatgcccccagctttattctttttgctttagatagttgagttcttttttgtttcatacaaattttaggatttttaaaaatttctgtaaaatataacattgatattttgatagcaattgcacggaatatgtacattgctttgggtaatacagtcattttaatgattctaatttttctgattcatgagcataagatgtcttttcaattattt

SEQ ID NO: 113226 - DNA, 621 bp, Homo sapiens
ggttttgtttttactgttgagtttcttgcatattctttttactagtcccttgtcagatgaatactttgcaagtattttctcccattcaacaataggttttctctctattccattaactgtttccattgtgaagaagctttttagtttaatacagttcaatttgtctacaattgtttttgtggcctgtgtttttgaggtcttaatcataatatttttgcctagaccaatgtactgaagtgtttccctatgttttcttccagtagtttaacggttttgagtttttttgcttaagtctttatctatctttagttgcttttgtacgtggtgaaaggtaggggtctagtttctttcttctgcatgtagatatccagttactatagcattgcaatatattttgaagtcaggtagtgtgatgcccccagctttattctttttgctttagatagttgagttcttttttgtttcatacaaattttaggatttttaaaaatttctgtaaaatataacattgatattttgatagcaattkcacggaatatgtacattgctttgggtaatacagtcattttaatgattctaatttttctgattcatgagcataagatgtcttttcaattattt

SEQ ID NO: 113227 - DNA, 536 bp, Homo sapiens
gaagagtgaagtagggaacagagaaaatatctgatttctaattcaagtttttgttaaacatcaatactttatagagaaatgcagcatgaccacaattaatttctatattttccacaaatttagtgggatcacctgctgatcttgctttcctttttgttccccatttgtgaacaatccaatatcacctctttggccaagctggagggtttagatgaaggcctagtgctgactgtgactgaatacagtactgtgttagtccattctcacactgctgtaactacctgatactgggcaatttatgaagaaaagaggtataattcactcatggttccacaggtttaacaggaagcatgactgggaggcctcaggagcctacaatcatgatggaagggtgaaggggaagcaatcatcttcttcacatggcagcagaatagagacagtaaatggggaagtgccacacacttttaaaccatcagatctcatgagaactcactcactatcacaygaacagcaatggggaaatctgctcctatgat

SEQ ID NO: 113228 - DNA, 617 bp, Homo sapiens
caagggaaatcctcaaggcaaaggtaaagaatagtccttttgacaagaagactatttttttttatatgtttggtttcttcttcttcttcttmttcttcttattattattattattattattattattattattattttactttaagttctagggtacaggtgcacaacatgcaggctccttacataggtatacatgcgccatgctggcccactgcacccatcaacccgtcatttacattaggtatttctccccatgctatccctccccccacccctaccccacgacaggccctggtgtgtgatgttccccaccctgtgtccaagtgttctcattgttcagttcccacctatgagtgagaacatgtggtgtttggttttctgtccttgtgataaaagaatgacttgtatttagaaatgctttgtgtcagtgtcatttgtgaaaaatggtgaaaaagatgaacagaagtaggagtctggaagcagaaggaactctgggtatgtaagtgacaagatgttgcaaaaattgtagcagagctgtggtttcctcaagctgtggttcggggggtgggggattaatgcaattgtacctataatttaagggccagagaaaccccacc

SEQ ID NO: 113229 - DNA, 599 bp, Homo sapiens
tggttttaaaaagcgttttcccttttgctaggtcactcttctccttcctcccatcatgtaaattaggatgtttgctactccttctgccatgattgtaggtttcctgaggcctccacagccctgtggaactgtgagycaattaaacctctttcttatagaaattacccactcatcggcaataaggacggactaatacaatcagaatcacattgaatctgtaaattacttcaggcagtatggccattttaacattattgattcttcctattcatgagcatggaagattttttcatttgtgttgtctctgatttctctcagcagcaatctgtaagatcgctgtgtagagatcttccacctccttggtttgttgtattcttagagatttcattttatttgttgctattgttaatgagattgtgttcttgatttgactgtcagcctgaatattattagtatggaaacactaacaatttttatacattaattttgtagcccgaaactgtgctgaggttgcttatcagctctaggagcctttgggcagaggctatggcattttctaagtacagaatcacatcatctgagaacagagataatttgac

SEQ ID NO: 113230 - DNA, 572 bp, Homo sapiens
gaaaaccagtaattgttttaatttgctgattaagcaaaggcagtgtattccagtgggaaaaagttaattgttgagcaattttttaaaaatttttgagataaaccaccacaactatggcaatctctgaaactgacaaaatttatataattttacaatagaaataatttcagaatccttttagtgcaactcctcccaaatatagtatataaactgagggagctagtgtgtttagtawaacatcatagggtatatgaattttccaaaagaaattttaaactattttcattttgttgatcacatctagtgtaatataagcatattggggactatgagagggccttctataaagatccctagtttcagtggtcatatttgcatttctgtttttgatagtatgctcagccaagaaatcttaaatgatatcacagtgcatgccattaataaatgtagcatggaagattaaactgataaaattagtaggagcactgaatcttcatgaggcacacaaaacagatataccacactaagcccatatttccaatgcaaacaggtaccttgcatgaatttggttt

SEQ ID NO: 113231 - DNA, 417 bp, Homo sapiens
ggccatttcctctctttaatctatcagcggcacttagcagcattgaaatgtttccaaaagtctttatagctactatttcctcagtatatctcaaaagccagatacacccttaggtgaatgctattgtacctgcattccactccaattcaccacaggtggaagccttagtgattggatcactgcagatgccagggtctggcaattctccacctgccattgaggctagggtgttaattactatacagctgtcaatgatcttatcccctgatatggtttggctgtgtccccacccaaatctcatcttgaattacagctcttacaattctcacacgttgtggtggagggttggggggagggtggtggggaaccccagtgggaggtaattgcatcayggggtgagtttttcctgtgctgttc

SEQ ID NO: 113232 - DNA, 644 bp, Homo sapiens
taaaataaattaccattgttgttttaaagaaaaatctcatggatatgactcaaactctcaaatctattttagatgctatcacacttaaaaatcgtgtttctatttacttttcatttatgctttcatccccagtgagggcaaattttaaagaagatttaccttgataagtcattgatataaatttaacctagagctttacagtatttaatacatttatctggtttatgaatttttctatctcaaatttacttaaaatttttttaccattacagattatcagtggctttattggatataaccttggcattctagagaatacatgtcacaaattgaccgaaggaaaagatctacctgctacagtctcatttaaaaattacccaggctgctcttatatatgtggctggaacttcttacacctcatcatcattatcattcccttatcacttccatcaataggcaattaacatttacagaactctaactcagctacaagctgaggaaaatgatatgaaaagcagatatagttactgttcttatggagcttacagtcaagttatatagatggacattagttgaatagccacmcacctaatggaaaatgtaactggagtgatcgttttggtgatgattttgaatataatcat

SEQ ID NO: 113233 - DNA, 579 bp, Homo sapiens
ttttttggaatagtctgagtaggattggtattagtccttctttaaatgtttggtaaaattcagcagtgaagccattgggtccwgggcttttctttgctgggagacttttattatggctttgatctcattacttgttattggcctactcaggttttgggtttcttcatgatataatctaggtaggttgtatgtatgtaggaatttatctgcttcttctaggtttttcaatttattggcatagagttgcttatagtagtctgtaatgatcctcagaatttctacattatgagttgtaatctctttttccatctctgattttgtttaggtcttccctcttttttcctggttagtctaactaaaggtttgtccattttgtttatcttttaaaaaaacaatttttcatttcattgattttttatattgttttcatttttatttatttctgctttgatctttattacttttttcttctaattttgagtttggtttgcccttttctaggtttttagatgcatcattagtttgtttatttgaagttttttttactttttttgatgtaggcacttattgctataaatt

SEQ ID NO: 113234 - DNA, 615 bp, Homo sapiens
agacacattttttttttaatggcaagacagattttatttgggctactgcactgggggagagacacttcatgcaggattgaactcatcaacacagtaggggcaactggggatttatagctaaaggggagggtgagggagtgaatgaataggaaattactaagaggaacttggttcagagcaaggaccggggagggattcttgctaacatgccttgatgggattcttgctaaaactaggttctgcaggctaaggatgaarcctaattgagaagaaggcttaaaggagcctgactaaagtttggtcaaggagggagtccctgtcagccatctctgggacctctgcctccaggctcactcctctggtccaggctcatacacagtcagaatttgcccaaaactcagtactgatgttattgctttcccacttgacaccctgcactggccctcgcattgtcctcaggataatgtacatactcctaggcggatgggccacaaaggccattcaatcatagccagagaatcccaagaaaacctgatccagaaggaggaaaacttgtcttcgttcattttctgttacttataacccaaaactgagtaatttataaagaaaaggaat

SEQ ID NO: 113235 - DNA, 615 bp, Homo sapiens
agacacattttttttttaatggcaagacagattttatttgggctactgcactgggggagagacacttcatgcaggattgaactcatcaacacagtaggggcaactggggatttatagctaaaggggagggtgagggagtgaatgaataggaaattactaagaggaacttggttcagagcaaggaccggggagggattcttgctaacatgccttgatgggattcttgctaaaactaggttctgcaggctaaggatgaaacctaattgagaagaaggcttaaaggagcctgactaaagtttggtcaaggagggagtccctgtcagccatctctgggmcctctgcctccaggctcactcctctggtccaggctcatacacagtcagaatttgcccaaaactcagtactgatgttattgctttcccacttgacaccctgcactggccctcgcattgtcctcaggataatgtacatactcctaggcggatgggccacaaaggccattcaatcatagccagagaatcccaagaaaacctgatccagaaggaggaaaacttgtcttcgttcattttctgttacttataacccaaaactgagtaatttataaagaaaaggaat

SEQ ID NO: 113236 - DNA, 544 bp, Homo sapiens
acataaaacattctccaggatagaccatatgttagaccataagacaagcctcaataaattcaaaagaattaaaattatgcaaagtatgctctttgaccactacggaataaaattagaaatcaataacagaagaaaaagtgagaaattcacaaatacrtttaaattaaacaatacattcctaaataaaaaatggattaaaggaaaaaaatcacaaggtagttagaaaatactctgaaataaatgaaaatgaaaatgtaaacacaatataccaaaatgtatgggacacagcaaaagcagtgttgagagaactttatagctatcagcacctatgttaaataaaaaggcagatctcaaatcaatgacctacatttccaccttacaaaactagtaaaagaaaagtaaaccaaaatcaagcaaaaggaagaaaataataaagattagagtagaaatgaataaaatagagaataaaaaatagagaaatttaatgaaaaccaaaagtcagtttttgtttgttttgttttgttttgtttttgagatggagtct

SEQ ID NO: 113237 - DNA, 545 bp, Homo sapiens
tctagttgtctaatgcattttaagctattaatttgagattttttttccttacttgcctgagttcagtagatgagataaataaaaaagaatactccaaacatttttattttattttagtacactaaaaacatgagacttcttgcatcagaaaacatacctcattccttggctgtcagagcttctgcacactgtggaaccagggactggcctaccaggcacatatcaccaccagcaatgctgtcaccatgaccagtggaaccactgtatgtgatgtgcaattccagggttgagaaccagcctgtcaggcagccccaacccccagaaaatccacatcactgcttccactaacaactgtagtctaggccactgaggcactcacagataccaatgacattgactatagcaaaaaaaaaaaaaaaatttggagactacactcctgcactcacccagattaaagccaaagtaccctacccaactgatgctataggacatacttacagaaaagagtcyttccctacaaaagccactccataaaactgaaagag

SEQ ID NO: 113238 - DNA, 604 bp, Homo sapiens
gctactatttttcattataagcctttttattattaattgatgttttaaactatgtcttattttgatggaatatataaataattagaaaaaaatcaatcacccttccctgaggaatacatagcctagaaagccaataaaatcagtattcatttctacttgcctaaagatatatagcccagtataaaatgtcatattcatttcaaatayccggggagaaaagatacctagatattatctaaatactcagtttaagaggggctcaggtgatgcacgtgaattaactacattacaaatctcatcatacagaagcacctaaccatctgaaaatgtccaggaaaaaaacatacaaattcttcctggaggcattgaggaggaaatccaagccactttgtaccttcactttcatctcccacagttcaattttatcgcatacacacaaggcttccaagagcgtcctgagctgttttacagcaagattgctaatgaagttcttgatgttaggtatactttgcctgagcttatttatttatttatacatgagttttcttttagtgcctatttctgaagtttgaagcatgtaggaaattataaacttcaaacttca

SEQ ID NO: 113239 - DNA, 500 bp, Homo sapiens
agagaaatgctaaatattaatacataaaaaaatttctgatttgcctcctctgggcagctaaatcagtatgtaattatataactagagttatagttaggttatgtgattttacagttatatgatattttagtggctttgctttggataaaatcaataatattagagtttagttacatmattatagttggtagatttgcttttggttaaaaatcaatgataatattagacttttacctttcacaaaatgtgttcccttaattatctcatgtctaccccatgacactatgggagatgcgttattattatcttcattttttagataggaaaactgaaattcaaatcaattctattaaggttactcagtttctttatagcaatgagtcactttacaaagctcttgactcaactgggtttttttttatagctaatgtgaatataaaatttttaccaaaggactagttgaagttggagttttgataatataaatgactgctaaattt

SEQ ID NO: 113240 - DNA, 573 bp, Homo sapiens
gattaagttaaaataaagtcattagagtgggccccaattcaataygactggtgtccttataagaagaggagattaggacacaggcaactacagaggacagcttatgggaagacacagagaaaagaaggcaatcttcaagccaaggagagaggcctctgaagaaacgaaccctgctgatgccttaagcttggactcccagcctccagaactgagagaaaataaatttctgttgtctaagccaccaccctgtggtacttggttatggcaggcccagcaaactaacccacagtaataaaggacaggaaaggaagctgttcatcagtgcagcctcactacctctgaggcagctccggttcctggagtgaagatcaagagacagtgcccttttgatgccggtttcaggaaaaagcctccagctaataagtctaaatgttagcacctgaggacttcagctaagtaaggctggggacattttcctggaactgggcatctagaaggaatatatctaagtgatatgggctcacagagagatggatcccatatcactgtaccccgctcttgctaaaaagactg

SEQ ID NO: 113241 - DNA, 527 bp, Homo sapiens
agccacaatccaagtaatgtgggcaacctctaaaggctggaaaaggcaagaagctgattctcccctacagcgtccagaaagaacagatttctgcaacatcttcattttmgccacatgagacccatttctgacttctgacctccagagttgtaaagtaatacaactgtatttttttaagctactgtttgcattaattttttacagcagcaataggaaacataatacatttgtcaaggtcacacagccattaggtcataggggcagggatataacctcacactgtctgattccagaacccaccctcaatttgaatccttgcaaaggtatttaggatctaccctacagggatgtgaatgtcaagtgagatgaggacacatggatattctctcccatgtcgtcttctttcctcatcaatccccaatctagctatgagaaggctctttatttcttggatgaggctttgtggcaaacggggacattccacatggattactttaactcctcctctaaatgtgttactagctgaa

SEQ ID NO: 113242 - DNA, 611 bp, Homo sapiens
tcacatagctgttttgaggcagcagattgaaccataaggcatatagaagttatagttttatgtctgcttataccataataaataacttcaaaaatagacaaattctttgcaaaataaaactgtaggataaaccagaaggctagaaacacaaaatactgaatgatcaagtcaaaatagaatcctcactttgcttagtgaccaaacctgattcagaataaagcaattatgcaaggtataagaacatcaggtgaaaatgcctctaaataaataaaaygcagcatttgtttcacaaatatttgaaatttcaatataatagaacacaaattaaaatggcttcattacagaaattatagccttaagtttgcctttttgtaaaaaaaaaaaagaataattatattctatctttaaatagattgtaaacaccacaagcagggtgtgtgtgtgtgtgtgtgtgttattcactaatgtatgtccggcatatagaaggtgtacaataaatagttgttggatagattttataaaagagtttcctgtatataatctcatatgatttcacctgatccagcagtcttaatgtatagtagacactagtcatatgtattagcccatag

SEQ ID NO: 113243 - DNA, 584 bp, Homo sapiens
attcaccaaaataaacctgtctttgactgttgagctgctttttgtctttctttcctctttctttaactcttacacctccccttttggttcctaaataagatatctacgagatgaaaagttacacaccttccccatattttkcccagaaagaaattcctggtgagctccaagatctttaccctaaaatactcctgttgaaatttcaccatggaaatgtaagtggatagcttatctttacagatgcagccacaccccctgcccacctgacgcaaatgcatatctgatggttccccccgtcccattatctctatgttatcttacgtaaaaatacagataccctgcatctttccttggccccaattgtctatgtcatcttatgtaaaaaaacgcagattcactgagcccgacaaaggcatgagtgactattttccctactccccttccaaatgaaaactgtgtacatctcaaaatcctgccctttcccctttaaatttggagccctcaaaatcatcttcagagggaagcatagacctggttcctggcagcatgtccttaactttggcaaataaacctcctaaaatgat

SEQ ID NO: 113244 - DNA, 584 bp, Homo sapiens
attcaccaaaataaacctgtctttgactgttgagctgctttttgtctttctttcctctttctttaactcttacacctccccttttggttcctaaataagatatctacgagatgaaaagttacacaccttccccatatttttcccagaaagaaattcctggtgagctccaagatctttaccctaaaatactcctgttgaaatttcaccatggaaatgtaagtggatagcttatctttacagatgcagccacaccccctgcccacctgacgcaaatgcatatctgatggttcccccygtcccattatctctatgttatcttacgtaaaaatacagataccctgcatctttccttggccccaattgtctatgtcatcttatgtaaaaaaacgcagattcactgagcccgacaaaggcatgagtgactattttccctactccccttccaaatgaaaactgtgtacatctcaaaatcctgccctttcccctttaaatttggagccctcaaaatcatcttcagagggaagcatagacctggttcctggcagcatgtccttaactttggcaaataaacctcctaaaatgat

SEQ ID NO: 113245 - DNA, 584 bp, Homo sapiens
attcaccaaaataaacctgtctttgactgttgagctgctttttgtctttctttcctctttctttaactcttacacctccccttttggttcctaaataagatatctacgagatgaaaagttacacaccttccccatatttttcccagaaagaaattcctggtgagctccaagatctttaccctaaaatactcctgttgaaatttcaccatggaaatgtaagtggatagcttatctttacagatgcagccacaccccctgcccacctgacgcaaatgcatatctgatggttccccccgtcccattatctctatgttatcttacgtaaaaatacagataccctgcatctttccttggccccaattgtctatgtcatcttatgtaaaaaaacgcagattcactgagcccgacaaaggcatgagtgactattttccctactccccttccaaatgaaaactgtgtacatctcaaaatcctgccctttcccctttaaatttggagccctcaaaatcatcttcagagggaagcatagacctggttcctggcagcaygtccttaactttggcaaataaacctcctaaaatgat

SEQ ID NO: 113246 - DNA, 609 bp, Homo sapiens
atggttttataagggtctgttcatttcccctgctggtgcactcattctctctcctactgccctgcgaagaggtgccttctgccatgattgtaagtctcctgagggctcctcagccatgcagaactgtgagttgattaaacctcttttctttataaattgccagtcttgggtatttcttttaacagtgtgagaacaaactgatacaagtggggaaggtaaagtgaaaagttctggttctgttcctcatccacattcctagacaagataatacaccaaaamctccctacaggagtggacatgaaatgtgaaagtttgtgggattttttttttgtattacaagttaacactcatcagaggaaaactaccattgtcgcagtcccatcgacactgcagtgcagcacaacgggctcataagtggagtaggcctgatggaggagatggaaacttaaactatcataaacccagcaatatgggcttcaaatttctagctgttgcttaatatcaatctgctatcaacagagaccatatgaccctgccccatttcttaagcagatcaatccgttattttcttttaagatgtttacattgaaccccttacatcagaaagga

SEQ ID NO: 113247 - DNA, 600 bp, Homo sapiens
gtttaacatataatctttccttgtatgtccgtgggcttgaggcagcacattctatttttgaacaactcctaatgttggaaaagttatcttttcgttgattcgagttcttgtgatatccctgcattaatacaggttgtgccaaataaaactgaaattccctgcatatctgccctagaaatgtgtgaagacattaataatgttttcccacaaatgttaccagttcctgcaacctttctacrtataagttagcatctttagtatcatctcgggagtactggagtggccctctctgtaaatactgtattaataaactggtttataactggcttgtcttcataggactcagtctgagggtctcatactaaggcttcagaatgatgacagtaggaatttgggggtttcatctgcatttgactttcacactaacattcagagtcgtaggtactagggatgtccattaggccattcttgctcctctgtatgacacctgggaaatcccgtgtgactgttctcccaggagaaactgaggctcagagacactaaggagtttgtgaataatcacattgactagcatccatggaagaggcaggatgagaattc

SEQ ID NO: 113248 - DNA, 613 bp, Homo sapiens
catgttggccaggctcatctcgaactcctgggctccagcaatccacccatcccggcctcccaaattgctgggattacaggcatgagatactgtgcccagcctaatcttcacttttaaaaacaggaaaccatttgttaaaatccatgattaargtttttctaatcataaatagagctagactcttatgtaaatactccccaaagaaaccacatggactccaaaaaccattagcagcctctagtcacaaatgctatgatcattcttaataggagaaattcaaaaccaagaaaagccgaagcaagatgaaacatttataaaacgtctaactttccaccccaagctaatggattcttgccaccactgcaatatcttacattgcttaaaacaaatgttcccagatctaattgtacaatataatctcggggggagcttttctaaaatataaatacagaacctttctgatagaggaggtctggtgcaggacaaggcaatctgtttgacaagagtctgatgtgactctgatatactggtccaagcctgacatttgccagccataggaagacgcttttacacttgcaatatccgccgtctttttcctgcaacatcagctttc

SEQ ID NO: 113249 - DNA, 566 bp, Homo sapiens
ccttgggaaacgcttgaaaccagtatctagaagtctaaagaaattcctaaaacactaaagtttctatggggacattttcaaagccattggcagttcacccagctaaggggagctctaaattttcattatgttttggggtatgtatacctgctgtatctcagcctgcaggaggagcattccattgctctaacttccccttttgcactagtttgctctccacttgtatcctggggccccatctagataagaggaatcttgcctgcttaggggcctcagtattcttgaaaacctatatgtatcccagtacatcagtttcctcatctgtaaaataggaataataayagaccacacttcatcaaataattataagaatctgaagtgttaatatatgaaaagtacttagaatagtgtctggcatatggcaagtgttcaagtatagctattactgttgtcattaataaaaagtcttttccatatgattaggacctaagagaccagccagtccaatttcctcaattcattttacagacaaggaaactgcagcccaatgaagttacgtagtctat

SEQ ID NO: 113250 - DNA, 505 bp, Homo sapiens
aatataactctgccgtaaaatatatttaaagtattgaattaaaaattgattgacagaactaaccaataagtcattttttcttaaatatatacttaaataattagatttatagctgcttaatgctaaaataaacaatttttaaatgaagcctaagaaaataaaaattgttatttcatattcagaaaaaaaagaaagatcgacttttttaaatgtttwaattagcgctttgatgaaatggtgacacaattacaatgaatgtattctcaaatgtgaaaagaataatacatagtttggcaaattttggtgctaggggcagtttgctgtagtttggaatttctggagctgtgtgatagctaatgggaataacaggagagatgataagtttatatttggaatttcatgaaaatctagtttatatagtttctggagatagaaagggaatcttggcttcttagaaacaggtctgttagctttgctggggaagagacacatttgttccagaatt

SEQ ID NO: 113251 - DNA, 505 bp, Homo sapiens
aatataactctgccgtaaaatatatttaaagtattgaattaaaaattgattgacagaactaaccaataagtcattttttcttaaatatatacttaaataattagatttatagctgcttaatgctaaaataaacaatttttaaatgaagcctaagaaaataaaaattgttatttcatattcagaaaaaaaagaaagatcgacttttttaaatgttttaattagcgctttgatgaaatggtgayacaattacaatgaatgtattctcaaatgtgaaaagaataatacatagtttggcaaattttggtgctaggggcagtttgctgtagtttggaatttctggagctgtgtgatagctaatgggaataacaggagagatgataagtttatatttggaatttcatgaaaatctagtttatatagtttctggagatagaaagggaatcttggcttcttagaaacaggtctgttagctttgctggggaagagacacatttgttccagaatt

SEQ ID NO: 113252 - DNA, 505 bp, Homo sapiens
aatataactctgccgtaaaatatatttaaagtattgaattaaaaattgattgacagaactaaccaataagtcattttttcttaaatatatacttaaataattagatttatagctgcttaatgctaaaataaacaatttttaaatgaagcctaagaaaataaaaattgttatttcatattcagaaaaaaaagaaagatcgacttttttaaatgttttaattagcgctttgatgaaatggtgacacaattacaatgaatgtattctcaaatgtgaaaagaataatacatagtttggcaaattttggtgctaggggcagtttgctgtagtttggaatttctggagctgtgtgatagctaatgggaataacaggagagatgataagtttatatttggaatttcatgaaaatctagtttatrtagtttctggagatagaaagggaatcttggcttcttagaaacaggtctgttagctttgctggggaagagacacatttgttccagaatt

SEQ ID NO: 113253 - DNA, 505 bp, Homo sapiens
aatataactctgccgtaaaatatatttaaagtattgaattaaaaattgattgacagaactaaccaataagtcattttttcttaaatatatacttaaataattagatttatagctgcttaatgctaaaataaacaatttttaaatgaagcctaagaaaataaaaattgttatttcatattcagaaaaaaaagaaagatcgacttttttaaatgttttaattagcgctttgatgaaatggtgacacaattacaatgaatgtattctcaaatgtgaaaagaataatacatagtttggcaaattttggtgctaggggcagtttgctgtagtttggaatttctggagctgtgtgatagctaatgggaataacaggagagatgataagtttatatttggaatttcatgaaaatctagtttatatrgtttctggagatagaaagggaatcttggcttcttagaaacaggtctgttagctttgctggggaagagacacatttgttccagaatt

SEQ ID NO: 113254 - DNA, 622 bp, Homo sapiens
tattgtgggagcttgttttcttatcttcaagacagctctacagtacaaaaaaactgaagagctggctgttatttcttcatttttatggtatgtgctgcctaacaggattctagagtgagtatttgtgtcctaaataacttggcttgactatcttcacattttgcagtccctactcattctaaattaccagtcagaggtaagctttctctcacttttcgttcaacttcaattagtaaaagctttcaagattcatgatttatcatgtcataattccaaccgttagatatcgtggatagtaaggacacatgacaaacccttacttttaacctaaggcacatggccagcagaaggaaggccattactacatatgttaaacagatgaactaccaaaggcaatcactgaaaaaccataccttgatttcttgccagatttcaaactgagctttccaatacacagttcttctcattaatgaaacagaaactgttactgcagcatgcagtattttttcctctgaaagctcttggaacaggggtrctaccattcatagattttggagggctttttttttcattctgccctactggaggaaaaataaaatctctattagaagcatgaaaaggc

SEQ ID NO: 113255 - DNA, 487 bp, Homo sapiens
ctcaccaaagggaggtccctgcctgtgtggggtttccatatttatactgctttgtgtgtttattggtagttaaaattgtttcacaagtcaaataaatttaaagatgacctacaatgcacatgcatgagaaattaagccaaaactcagattcttgactgaatcactgtttgttttatcttggtggtgggacatgtgctttgcctaaacttcaaacttcttatccttctgcctccataattgcaatcatctcactctccacactggstacattttatttaaaccttccaactgtggaggaaaaaaaaggagcatctaacccaagacaggtgtcacctagacaggaactatctgagagctaagagaatttcttttctccatgaaatgctgtggtggttagtgtcaggcctctgagcccaagctaagccatcatattccctgtgacctgcacttttacatccagatggccggttcctgccttaactgatga

SEQ ID NO: 113256 - DNA, 538 bp, Homo sapiens
agggtggaccagtccccctggcactgaccctacgtccctggagccatctctgctgcccttctcgcttcccacattgagcactgcctgaccacctactggaggccragacccagtagtaggtgcagggaaggctgctctagagaaacactcaggatccaaaccatcatcaaattccattgcctctgaggcacccaccttcttgcccatcttcattcaatgacagtgtggattcttgttattcacggcagttacgttctataaagtcactggaacacggaattagcagaatactgaatcattgctcctggggaaatatgtacacatgcacacaccccctcacatagtttataattttaaccctaaaaacaacttatctaacagattctgttttattttacataatagactatggggctcagaagtgttaagtgacttgtctgaggcagccctacgaacaggtgccagagttgggattcaaatctcatccaactggccccagagctagagcttcttatgctactctgcactgcccactctg

SEQ ID NO: 113257 - DNA, 513 bp, Homo sapiens
agaggaaaattattataaaaatgtttaatcaaagtagagttcatcattcaagaaagaaaacaggaaaaaatgggtttgcaatgctcaccatgactcctccagaacaatgaatcataaagagacatttaatacttgcaagaggaaacaaaagatctcaaataaagaccaaatatttttatagagtcaaacccaaaccagagaaaacaaattcagtctttgggaagctggtagtgctgttggccagtaatacccacagatttgagaaaccagatgcatttttctactccttttgctcctgcaatctgagcttatgccccaaaccaaccttcctattcatcacggacactactatgcatatagttaatcctctaggtgcccatatgmgtatataagcggtgacaatattaaattctgatctcgccaagtaaaaatcccccaggcgctgactcattcctgacaaataagttaggtgtgaatagtcttgagcctttgaggaactctcgtggccattaa

SEQ ID NO: 113258 - DNA, 538 bp, Homo sapiens
agggtggaccagtccccctggcactgaccctacgtccctggagccatctctgctgcccttctcgcttcccacattgagcactgcctgaccacctactggaggccgagacccagtagtaggtgcagggaaggctgctctagagaaacactcaggatccaaaccatcatcaaattccattgcctctgaggcacccaccttcttgcccatcttcattcaatgacagtgtggattcttgttattcacggcagttacgttctataaagtcactggaacacggaattagcagaatactgaatcattgctcctggggaaatatgtacacatgcacacaccccctcacatagtttataattttaaccctaaaaacaacttatctracagattctgttttattttacataatagactatggggctcagaagtgttaagtgacttgtctgaggcagccctacgaacaggtgccagagttgggattcaaatctcatccaactggccccagagctagagcttcttatgctactctgcactgcccactctg

SEQ ID NO: 113259 - DNA, 538 bp, Homo sapiens
agggtggaccagtccccctggcactgaccctacgtccctggagccatctctgctgcccttctcgcttcccacattgagcactgcctgaccacctactggaggccgagacccagtagtaggtgcagggaaggctgctctagagaaacactcaggatccaaaccatcatcaaattccattgcctctgaggcacccaccttcttgcccatcttcattcaatgacagtgtggattcttgttattcacggcagttacgttctataaagtcactggaacacggaattagcagaatactgaatcattgctcctggggaaatatgtacacatgcacacaccccctcacatagtttataattttaaccctaaaaacaacttatctaacagattctgttttattttacataatagactatggggctcagaagtgttaagtgacttgtctgaggcagccctackaacaggtgccagagttgggattcaaatctcatccaactggccccagagctagagcttcttatgctactctgcactgcccactctg

SEQ ID NO: 113260 - DNA, 571 bp, Homo sapiens
aggaactcaatctatgctttttctcatcacactgcataagttgaacattttttgtcaccctttgtcaccagctgtccagtatttggtttctgaagaggtggagacctattggcaagaacagagaagtctggccactttgcacatgggcttgaattgtacctaagaggaggactgatcataygtctggagttagaggagagagtttctcaactcttcaataccactatttacctttgttaaggagtaaaacttcagaattaattcaagtggcactgtgagactcttccagacttggctaacactcatcgagagccactcatttctagtgtatttcttgtaagttgtgcatcaattctgttgggtggctactattttctattcacaaaaaggaaaacccaaaaaatcccaagccagagagcatcattttatcatttagggagtagcaaatatagtacttgactcagagttcctgggtctaactttattttatcacaatctactaacagaaagaatttgaattttagtgataaagaaaagaagatatgaaaaaggcaataaatcatggaagaaa

SEQ ID NO: 113261 - DNA, 605 bp, Homo sapiens
catataaattcacattaaccaacccatcatttgattcgaaacaatagcagtgtaaagaaaagcggccactaaattcgttttgaaaccacaataaattggcttgtctatgcttataggaattacatacaaacaaagtctgcagcatcttgctgccatctcatctaaaaacacattttagtttaacgaagtctcaggatatagtgcgaggccccaccttgcctgaccaggcactacagtggactgtgtctagaactatgcctgtgatgttatgttacttccttctcatctcccactatgttacttaccatctataagcctcaatttctgcacctgtagaaagggagtggggtaatatttctatcgatttttagattctcttgtagcaggacgagccgcagacaagaacccctcaggcaccragttgtggaaggaaagggctttattcagctgggagcataggcgagctcacgtctccaaaaaaccgagctcctcgagtgagcagttcctgtcccttttaagggcttacaactctaagggggtctgcatgagagggttgtgacagattgagcaagcaatgggtacgtgactgggggctgcatgcacca

SEQ ID NO: 113262 - DNA, 614 bp, Homo sapiens
aacagtgaaagaagtttgccatagaagggagtgacataaaaccagccaaaatcaaaaaactgtagcagttgcctgtgagcttgcaagatggattaaaatcccaaggagttccagactcagagaaggtctccacctatccactaactctttcccaaggggttcacctagtgttggggaatagaatgctgaaggctgcagtcacggcaggagaatgaagacaaatcctgaggatctccaggccttctttgaaagaaatgtagcatctgctgaaggctgagaatagggcaggagagtaaaatctcttccaggctctcaagggccccatcgaatgcattatctcagatctccaaagataggccagaaatttcctgggataaaaagccaataattgcrctagaaagcaaagaggttttcccagaaattaaaaaagctggtagtcacaggctgtaaaggtgtctcccacattcagaaagccaggtgacctcctggctatagagcacaaagagatctttggagttttatgagtggtcagatctcaagtcctgctggaggaaaggtcctgattccaacatcaaattatttgaatccagtggtgaactgaataactaaagctt

SEQ ID NO: 113263 - DNA, 443 bp, Homo sapiens
ttgagacaatgagttaagtgaatttatttggcaaagagaaagagaataaagtgtatataagatttaaggcaattgttttcaattcagagcatcagtgaatgcaaaaattaaaaaaaaaaaaaaagggaaggtccaattactctactacctacttactcccaacagtactatcactatttttaagtcttttaaaatatatgtctgatccattttactgtatttaccaaagtactatacttagctatctgcagtgttttcaataccaaatgtttcttctgtgttttatatctctaatacttggcacaataaaaaacttaaaaggtattctcctacctatgaaattggatttgtataccaataagctctagtttacaaacaaaaasagtataattaatatactagaggatgtctgtaatttttcttctcagaaaaagtggttttca

SEQ ID NO: 113264 - DNA, 627 bp, Homo sapiens
tgttgtttttcaaaagttctctgaaaaataaaatggattatgcaggaaaattttgtaaatggaaaatattgcatatwcagagtttgaggcaatccaggacattttaagccagaaagcagatggaataagagcaatataaattactgtaactgtattttgccaattgcaaagtgactctaatgccaaacagaacttcttctccccaacttgttgactgcatacgtatttgtttttaatttacacttggtagagtttggtgagatgtttggagttcgaatgatagaatctacaggtctagggaacaccaaatctagccaaaccacccacagagtatccaattaaggaaacaagcacataatgtacaaaaaggtattttcagtgaaaaataatattcatgcatgttatataagccaattaacaaaaactgtgcctgtagcaatttttaaggaatgtcttacaaataggaagtacgttaaatactgaacagaaggacaaaacttcatcagcagtccttcctggccttggtgctctcaacatgatctccagcctgtctcttagatgtcttggcagcttcccaaaggaagagtcttggcctctggtcgtcagactcagagaatcctgacttta

SEQ ID NO: 113265 - DNA, 596 bp, Homo sapiens
taagcaatcatgcagtctgctccagtaaacttgatgaagtctttgtccttttaggcacttggactagtaccctgcatgaaagttcatttcaaggcaaacagaacaatattcttggaatgggaggaaaaagcttcgagtttgaacaggtaacaaagtcyatcacgaagtggtggaaggctagatgagacctagggtctcacactgaagctgaaagtggcggagatttttatactgtgttcgtgcaaaggttgaggtgcctgcatacaatttttcatctgaccacatacctggagcacttcttattttacccatgaaaatttatttaacatcctttatgctaagcaatgttctggtgcagatttggaaagcaatctttaaagctgcttacagcagccttctttgggataattctaggttaggacattttaaatgctgattgccctttgggagttgaggttaaggttcatagagacatatatagccctgtttacacaaaaatattcttaaagataccataatacagtattgagaactgatagtctctatgcttctatcaataaagatatgattagggtccttctatgtatacataaagg

SEQ ID NO: 113266 - DNA, 596 bp, Homo sapiens
taagcaatcatgcagtctgctccagtaaacttgatgaagtctttgtccttttaggcacttggactagtaccctgcatgaaagttcatttcaaggcaaacagaacaatattcttggaatgggaggaaaaagcttcgagtttgaacaggtaacaaagtccatcacgaagtggtggaaggctagatgagacctagggtctcacactgaagctgaaagtggcggagatttttatactgtgttcgtgcaaaggttgaggtgcctgcatacaatttttcatctgaccacatacctggagcacttcttattttacccatgaaaatttatttaacatcctttatgctaagcaatgttctggtgcagatttggaaagcaatctttaaagctgcttacagcagccttctttgggataattctaggttaggacattttaaatgctgattgccctttgggagttsaggttaaggttcatagagacatatatagccctgtttacacaaaaatattcttaaagataccataatacagtattgagaactgatagtctctatgcttctatcaataaagatatgattagggtccttctatgtatacataaagg

SEQ ID NO: 113267 - DNA, 585 bp, Homo sapiens
tggatggaagatgcaggtgcaggttgaaaaaggatcctgctcackggggactggctgagaagaaatcaaccatgcagcatctcacttttctctccagcctgagttacttgcctttcaacagaacacctgtttaaccccaggccagatggcaagagcttcaagtcggtgtcctgtagtacaagtcctctaagcaccagggactttggccttgggaagaaaatgcatttctttcttcactgggcttttattatattttttctgctggatgatatcccagctgtttagctgaaaaaaagctgagtggtggaggatgacaggataatatgaaaaagatttgaggggaggtaagagattaaatggggcagggaaaactagcttctattttaaggccctcatagaccccaagagctctcagttttggaaaccacacccaccttacataacaacaaatgttttcaaatgcagctatgccccacattaaaagaaatttatatatagtgatgaaagaagacttatggactgttaattcaagatttattatttcttactttgaaggttttgtttgtttagtcagtttttttcatg

SEQ ID NO: 113268 - DNA, 566 bp, Homo sapiens
tcaaggtctccacttggatctccaatgtagcatgccttaagctgttccattgactgtcctcctttgtgggagtgtctgataatcagttagcattgtaggaatccattcctacaatccaaaatagaaatcaaacttgtccctttctggcctggagtgatataaaatacatttcctagactctcttttcagatagcttcctgtcagtttctgctgatgtgagatactggcaggagattggaaggtggtaggagttataaaatatttttatggcttctgagaatgtctctggcaatggttacccaagcagtgccagtagaaaaggcagtatttagaaarcttagagagcaggagtaacagtggaaagagcaccgtgacaggagcagcatcagttatggtggtaggagcagcagcacaaagagtgagtagtgtagagtagagatgagactctggctttctgctcggccagtacaagcacagcagtagacgcctcaggtgacaaagcaacctcggacttggagtaacactatttctcatcctcctccagccctaaaagtaatagtgaattc

SEQ ID NO: 113269 - DNA, 183 bp, Homo sapiens
gggcggtgccctgaaatgctccagtttctgactttttttattcccatagaattatatcagttctccrtaggaggagatgcttacactttctatttgtgtaagcatactgggagagcaagcctggttgggtgctggtgaggcacactgagtgtatggagtgcccaatggccagttatgggaggt

SEQ ID NO: 113270 - DNA, 569 bp, Homo sapiens
tgcctagtgactaccatactgacagtgttgttctagacacaccagagattctgtgttctagtagaagttagcaggagagcacctacaaagtaggtggttggcattcaggaaaacttaaccatgacagtgaaccaggaactgataattccagttcattgaagggtcagtgtgattaatcacactttttcttatgtcctgacctctttcttctccaatctttatttcattttctttatttcagaaaaaaatgtagctccttcaatattttcccaactttaaaactctcaatgttctatgacatattgctcaacttattatgattacctatttttcaatgtctatgtgcaacataaacaaaagcagaacactaaaaaattatttgcaaaagaccatgtaccttctattagtttatattcagtagtagaaaataatgcttmtttaataaaataccctaaattaacgcataataagccttaagtttagtgactatgaatttctctcatacatttcctcaaagatgtaatctaaagaacgattacctttcctttcttcaaaaagaaactgtattc

SEQ ID NO: 113271 - DNA, 578 bp, Homo sapiens
aaagatatactatgcaaatattaacttcaaaaagaagaagtggttatcataatattagctaaaataggtttcagatcatagaaaattgctacagaccaaaagagatactacataatgttaacagaaagcctacaaagtcataataatcctaaatgtayatgtaccaaatagcagtgtctccgattacatgaagtgcaaactgatacaactgaaagaagaacagggcacatccacaatcatagttgtggagttttacatcaagtggtagaactactaaacaaaatatcagcatgtttacagaagaactgaacatcaactaactgcatataattcatattttaaaaatacctaaccccacaacagcaaaatatatgttttccctatggaatatttactaagaccatatcttgggccataaagaaaaccttaagaagttttcaaaattgaaataatacagtgttttctctgaccataatggattaaagctagaaatcaataacagaagtacaacaacaaaaacttctaaacaagtataaatgaaacaaaacatttttcagccatttattggtaaaagaggg

SEQ ID NO: 113272 - DNA, 548 bp, Homo sapiens
gaaaccaaagttattcacgctcacttctcaaaccctttccatatgttcttctctcgctggaaaaactgataagtaacaatgtgtgtgtgcacgcgcgcttaaattgcgtttagatttcagatacatcagaagagctaaggtcttkggtcgacaccacttgctgacggctctttctcccttaaattggggacttgtgtccctcccttgcattggattcagaggagacacgcgagcagctgctcaggaaagagttttctctgctacacgctcactcgcgctgcatatctcctcatgtccactagaggtcactggcccctcgcggctcgcggtgctaccggccgcctcccgctcctgaagctcaaattagcgcgttaattaacacccgagtccatcaaggcgcgttcctcagtacagtactccagcagggcttatatagacaaaccaaacccagccaaatcaaacctccccaaatccaacatttcctgcatgtccaaaatgggagacaggcgcctgagtaacccggggcaaggtatagtgcaatcacgctt

SEQ ID NO: 113273 - DNA, 434 bp, Homo sapiens
cactgcctagcttaacaaatagaatgtgcaattatagttaacctctcaggcacacactaccttggcagcagtaataaagtagtaatgacaatccttccatctcagcctcctgagtagctcggtctacaggcatgcaccaccacattcagataataattattattttcttttatagaggtgggtctcaatgggttgcccaggctggtttcagactcctggcctcacactcttggactcctcttctacgacaactactttcttgattaaaaaaaaaagtttttcttaataactaaactgcataagcactgtttcagatggcgtattttggaaatttataaagttgacatttgagacttgctttttcattcagtattacatttytaagatccaaatatcatattaactatagctattttcaccactctatagaattc

SEQ ID NO: 113274 - DNA, 441 bp, Homo sapiens
tgattagacagcagggaagatattagtggtaaagagtgaatgatagtagtgaatataaatggggctgaggaaactttaagcataaaagrttcctgagatgactttacaagtctgtacgaatctgccttgactgtatatttcatactgcccaacaaaacaataaaaaacaattttaaatgcatatttttaaatgtacacagttttctatttcatcagacttaagtaaaaagcttccacatgaagaccctttataatatgtgtgtggttatgcaaagagcaaaactcaggtaaacactaaagtgagaatgaaaaacaaacctaaagtaagtttcaagaagatagaaacttaaatggaaggagctgacttctgaaaactaagtcatcaattacaacacagttttacctaaggaaaaaatacagcaatattcgttaaaagcacac

SEQ ID NO: 113275 - DNA, 619 bp, Homo sapiens
cacatgttattatcattacccccatggtaacaattataatactagctatcacattttgagtttttgtcgggtgctagggggcactatgctaagcacatccactawtttgtttgcttttctataaggtaaataacattctttccatttgcctcatgaggaaactgagggcctgcgagcttaaatgatgatttcctacactattaggcaaaaaaaaagcattatgctgaaaaacgcatattatcctttgaataagaaaggaaaataagaaaacagatttacatttgcttggtttttatttaaaaatgccggaaagattaacaaaaaactagtaagagtggtaacacgttggggctggagggagatagtaaatggtaaagggagcacacagtgtgcacttttgtgtatcattgtgaatatattatctcacctaaaaatgaactcattctaagtgctaactaataaacaagtaaataacatccccagtgtaacacagcttccaagtgagagaggcaggatttgaatccaggtttctctgagcctgaagcgtaggttttcttcccccaacaccatgtaacactctccttgtagggacagttttttatgatgactctcccattag

SEQ ID NO: 113276 - DNA, 393 bp, Homo sapiens
gtgggttctgtggcatccttaagtgctcaacatttcttgcaaaattatttcatggaagcatctgttggtggaagatacgagttccttttgaaaccagaaatatggtccttacaataggagctgattaagtaaagtatgcacaagcatgcaaagaaatacagcatgacaattaaaattatgatattttatgatatgataaaaacaccattcacataaaaacattattatcattttggtgtcatattctttaatctgtgtctctgtgtttcagttaatattattttatgcatattaacaaatatggaactatatcataattttcagctttaaaattaatrtagtaatccttgccttatccacagtttcactttcagtgatttcagttgaggccca

SEQ ID NO: 113277 - DNA, 406 bp, Homo sapiens
taatttataagcctaatttaatttatcttgaggaaatatatttttttaagttggtggatcagcagaaatatgatttccagaattcagtgttcttcccattattcaagaaattttttatatcccttcctgtgtcctgagagttaggcctcctggattttctggcctaaccctctgagacttggggcaagtcaacttgcctgtgaggtgcgtaaataccctaccccctcccytaccatacatcaccctggtgtgatcataagacctccctgcctctacaatatcacctgccaaaatgcaggtgaattcccaacttagaaagaaaattaattactcctgaacttttgatgagatgggtggtaaaagctatttcatagaaaagcagaacctttctttgatgaagaaatta

SEQ ID NO: 113278 - DNA, 639 bp, Homo sapiens
aataagtttaccataatggctcttgaaaattacactactttgcaaacaatgattctttgcattagtttcctatttctgctgtcacacatatccacaaatttagtgccttaaaaacaacatattatcttccaatttccaggatgaaamgtctaaaatagaaaggcaaagactacattccttctggaatctccagggggaatccatttccttgcctcttccagcttctagagaccccctgtctgtatcctcatctagcggttccttgcttgcaactgcttccgtcatcactttgctttctctgatcccctgcccttcccctactcataaggacactagcaatgacaatggcccacctggatgatccacaataatccctccaccccaagatctttaacataaccacatctgcaaagtctcttttgccacataaggtaacatattcacgagttacgagaattttgacatggacatcgttgggcggaggccattattctgcctatcacgtgccttgtttcagtataatgacttttgtatcccaagacatactaaataagtgagatatgcgaaatcatattctgaaactatatgttcaggcaaagccacattcaccaatttactcagtccaatggtttctagtta

SEQ ID NO: 113279 - DNA, 639 bp, Homo sapiens
aataagtttaccataatggctcttgaaaattacactactttgcaaacaatgattctttgcattagtttcctatttctgctgtcacacatatccacaaatttagtgccttaaaaacaacatattatcttccaatttccaggatgaaacgtctaaaatagaaaggcaaagactacattccttctggaatctccagggggaatccatttccttgcctcttccagcttctagagaccccctgtctgtatcctcatctagcggttccttgcttgcaactgcttccgtcrtcactttgctttctctgatcccctgcccttcccctactcataaggacactagcaatgacaatggcccacctggatgatccacaataatccctccaccccaagatctttaacataaccacatctgcaaagtctcttttgccacataaggtaacatattcacgagttacgagaattttgacatggacatcgttgggcggaggccattattctgcctatcacgtgccttgtttcagtataatgacttttgtatcccaagacatactaaataagtgagatatgcgaaatcatattctgaaactatatgttcaggcaaagccacattcaccaatttactcagtccaatggtttctagtta

SEQ ID NO: 113280 - DNA, 639 bp, Homo sapiens
aataagtttaccataatggctcttgaaaattacactactttgcaaacaatgattctttgcattagtttcctatttctgctgtcacacatatccacaaatttagtgccttaaaaacaacatattatcttccaatttccaggatgaaacgtctaaaatagaaaggcaaagactacattccttctggaatctccagggggaatccatttccttgcctcttccagcttctagagaccccctgtctgtatcctcatctagcggttccttgcttgcaactgcttccgtcatcactttgctttctctgatcccctgcccttcccctactcataaggacactagcaatgacaatggcccacctggatgatccacaataatccctccaccccaagatctttaacataaccacatctgcaaagtctcttttgccacataaggtaacatattcaygagttacgagaattttgacatggacatcgttgggcggaggccattattctgcctatcacgtgccttgtttcagtataatgacttttgtatcccaagacatactaaataagtgagatatgcgaaatcatattctgaaactatatgttcaggcaaagccacattcaccaatttactcagtccaatggtttctagtta

SEQ ID NO: 113281 - DNA, 639 bp, Homo sapiens
aataagtttaccataatggctcttgaaaattacactactttgcaaacaatgattctttgcattagtttcctatttctgctgtcacacatatccacaaatttagtgccttaaaaacaacatattatcttccaatttccaggatgaaacgtctaaaatagaaaggcaaagactacattccttctggaatctccagggggaatccatttccttgcctcttccagcttctagagaccccctgtctgtatcctcatctagcggttccttgcttgcaactgcttccgtcatcactttgctttctctgatcccctgcccttcccctactcataaggacactagcaatgacaatggcccacctggatgatccacaataatccctccaccccaagatctttaacataaccacatctgcaaagtctcttttgccacataaggtaacatattcacgagttacgagaattttgacatggacatcgttgggcggaggccattattctgcctatcacgtgccttgtttcagtataatgacttttgtatcccaagacatactaaataagtgagatatrcgaaatcatattctgaaactatatgttcaggcaaagccacattcaccaatttactcagtccaatggtttctagtta

SEQ ID NO: 113282 - DNA, 552 bp, Homo sapiens
aattttcctttattaaaattatatgtaaactagaagtctaactacttctttgagtttcacttcttttctgtgaactcttgtgcatataaatattagcaaaaattgcacgctttttctctcattaatctatcttttgttagtttaattcacaggcccccagatactgaacctaagaggacagaggaaaagttgtttctccctgaaagactataccctaaataatacaagggtcacaaggcatattgctctcctttataacaatggctgtgtggtccagctgccacacaatatccaagactggttccacaatgacaactgcatctttcaggaacagcttccataacttgttctctgcctattagaagtctcctctgactagaacaacatcgaaagatgtttctcttctatatctcatgacatctggagaatttggggcaagaatgaacrgcaccttgtaggatgctcttggaaactttgtcttcttggaaacaatatacatattccccatgatcttttggccttggagtcagccagcttgcaacaaattcaagc

SEQ ID NO: 113283 - DNA, 490 bp, Homo sapiens
ggaacatttttctgtgaaaggccagataagagatagtataagcttttcagagcatacagtcgctgttgtgactattcaactctgctactgtagtgtgagagcagccatagatagtgtgtaaaccaatgagacagctttgttgatagaaatttatttacagaaacagggccaggcatggtggctcactcctgtaatctcagcactttgggaggccaaggcgggtggatcacttgaggtcaggagttcaagaccagcctgggaaacatggtgaaatcctgtctctactaaaaatataaaaattagctgggcatggtgacgggcacctgtagtcccagctattctggaggctgaggcaggaraatcgcttgaacccaggaggcagaggttgcagtgagcctagattacaccactgtactccagcctgggccacagggcaagattctgtctctcacacacacaccaaaaaaacaacagatggtggactcaaatt

SEQ ID NO: 113284 - DNA, 562 bp, Homo sapiens
agccagtctgagatgcacttatatattatagttacgtgtattatgtgcatttaatatatacacatgttatatgcagaaacatgtcaaaaagcacaggaggcaggctggcatgtattttttcagaaagaagagtagacaaagcaaatrgtaacgacttggttatttatataactcatataaaaactgtaagtagcaccattgtgacaagatttgtcctactcacagtcattttcattttgcgtgtcattttcaaataaactttgtatatgtatataagtgtgaatcatggtgaaatttcttaaaaataacataaaacattgcaatatccatttagttatctgaactttcatcatataattcatacaatattattctacaaacattaattgccaactcaactctggtctacatagtgctccaaaacagcttctcaaactttaaggtgtatattattatgaggcgattttattaaaatgcagattcagacccactgggacagggactaagatcctgcatttcttacaaactccaaactgatgtggatgatgctggtatggagcac

SEQ ID NO: 113285 - DNA, 603 bp, Homo sapiens
tttctttatattgttcctactttcatcatatcctctaccattttcctataaaatattattttctatattatatattgtatgtgtgtgtgtgtgtgcatctgtgtgtcttttctttttctacctgccgcaaaaaaaatcatgatgattgtattagtccattttcatattactatgaagaaatacctcagactgggcaatttacaaagaaaaagaggtttaatggactcagttccacatggctaggaaggcctcacaatcatggcagaaggtgaaggaggagcaaacgcaagtcttacatggtggcaagcaagagagcatgtgcaggggaactgcccttcataaaaccatcagatctcatgagacttattcactatcatgagaatagcacrggaaaaacttgcccccgtgatttaattacctcccaccaggtccctcccacaacacttgaggcttatgggagctgcaattcaagagattttggtgaggacacagtcaaaccatatcattgattctcatccccttggtgaaattcctaataattttgtgactattttgctctgtatcttattaactctgactctgaataaaagtatctaaaaatgt

SEQ ID NO: 113286 - DNA, 623 bp, Homo sapiens
ttggtgaggacacagtcaaaccatatcattgattctcatccccttggtgaaattcctaataattttgtgactattttgctctgtatcttattaactctgactctgaataaaagtatctaaaaatgtgtctcagcttatcatgctctacattaaaacttctaacaggtgtctcagtggcatttttcaaagttcccacatttatcagcctttggcttgaagaaactgtgttatctttacacttacgtattatttcttttatctcttaggcgttttcacttgtattatatgaatatgtgcactgctttaacctctccagggagactttartgtgtcttgaaatgtcttattatccttctgtctcatcctacctccttttctttccctacgaccctcacatatggctggaatgaagagaggtaggtgatgaggcaggcatgagtatttggagaggaggatgcatagaagggagccagaacatgaggtattatatgggcaactttcttgactataaacttctagttttgggcttggcttcttgagaataaaaattattttgggacaatgaaggattcttttttaaattttattttattttaagttctaggatgcatgtacaggacatg

SEQ ID NO: 113287 - DNA, 659 bp, Homo sapiens
ttcttttatctcttaggcgttttcacttgtattatatgaatatgtgcactgctttaacctctccagggagactttaatgtgtcttgaaatgtcttattatccttctgtctcatcctacctccttttctttccctacgaccctcacatatggctggaatgaagagaggtaggtgatgaggcaggcatgagtatttggagaggaggatgcatagaagggagccagaacatgaggtattatatgggcaactttcttgactataaacttctagttttgggcttggcttcttgagaataaaaattattttgggacaatgaaggattcttttttwaattttattttattttaagttctaggatgcatgtacaggacatgcggacgtgcatgtttgttacatatgtaaacgtgtgtcaaggtggtttgctgcacctgttaacccatcacctaggtattaagcccctcatgcattagctgtttatcctgatgctgtccctccccactcacccacctccaaaaagacctcattgtgtgttgttcccctccctatgtccatgtgttctcattgctcagctcctacttataagtgagaacatatggtgtttggttttctgttcctgtgttagttttctgaggataatgacttccagttccattcatgtct

SEQ ID NO: 113288 - DNA, 194 bp, Homo sapiens
gggccaaggggtctgctgccttggcctgtagtcctctggggagccatgtggcagagaggtctgggcactgttgtgctcacccacctggtgacacagktgcaaatgtaacagaaggcacactttgggctctcacttgctccaaagtaagagagatatgccagcaatgaaaactgagaaataatgaaatactccca

SEQ ID NO: 113289 - DNA, 523 bp, Homo sapiens
ggcatttgggatatccatcacctggggtattaattatttttgtgtttttggaacatttcaagtcctctcttacagcgactttgtaatatacaatacattgttactaactaccgtgaccatactctgctattaaacattagaacttatttcttctaactgatatttgtacccattaaccaacttctcttcaccctcttctcccacccacatactcttcccagactctcgtatttatcattctactcactacctccatgagatcaacttttttagctctcacatatttagtgataacatatggcatttgcctttttgtgcctggcttattttacttracataatgacctccagttccattcatgttgctgaaaatgacaggatttcatttttttatgactaaatgatattccattgtgtatcaatgacacattttctttattcatttgtccactgatgaatacttagattgattccacatctttgctattgtgaatagtgctgcaatacacatgcaagtgcagac

SEQ ID NO: 113290 - DNA, 523 bp, Homo sapiens
ggcatttgggatatccatcacctggggtattaattatttttgtgtttttggaacatttcaagtcctctcttacagcgactttgtaatatacaatacattgttactaactaccgtgaccatactctgctattaaacattagaacttatttcttctaactgatatttgtacccattaaccaacttctcttcaccctcttctcccacccacatactcttcccagactctcgtatttatcattctactcactacctccatgagatcaacttttttagctctcacatatttagtgataacatatggcatttgcctttttgtgcctggcttattttacttaacataatgacctccagttccattcatgttgctgaaaatgacaggatttcatttttttatgactaaatgatattccattgtgtatcaatgacacattttctttattcatttgtccactgatgaatacttagattgattccacatctttgctattgtgaatrgtgctgcaatacacatgcaagtgcagac

SEQ ID NO: 113291 - DNA, 564 bp, Homo sapiens
tttatgtattgatatatattcgggtatggtgtgggttttctactttattctgacagttcaatctcatgccagtttcactgttttacatgcaggagttttaaatttcaaatacccaactgcaatgcctcctacatttatcctctttctccctcaccaattctccatttttaagattttcttggccgggcacagtggctcacacctgtaatcccagcactttgggaggccgaggagggcggatcacgaggtcaggagttcaagaccagtctggccaacatggygaaaccccgtctctactaaaaatacaaaaattagctgggcgtggtggtgcatgccggtaatcctagctactcggggaggctgaggcaggagaactgcttgaaccaggacccgggaggcggaggttgcagtgagccgagatcgcaccattgcactccagcctgggctacagagggagactctgtctcaattcttgaacagtctcaccacttatttttctctttataagtttaatacttcttgtattacagatatatgttactttgtggagaattgccatcttta

SEQ ID NO: 113292 - DNA, 610 bp, Homo sapiens
gtttggcatcaagtttgccactaaacagaatattgggttctctggacctggtaccttttcttaaaagtatttaaagagaagctttaagcatgaacttctgtagaaataatacaacaaagctcagagaataactgaacttaagtttttcaataaactgaccaacttactatatacagatagatatggaaactacagaaaaatataggatgtttctatgttctacttgactagtactattttgagtttttaagtgagaaaaagataactatatcaaatgtctcttttttcatgagaaaatacgataaaatcttcctgaaaaaagcaaagaagttaaacataaatttttaaacaagaagtacaatttactcaggaggaagttaaatataaatacataagaacattattgatgtttgcattagataagaaattaaaatttttgagaagstttcaaaagagctatggacattctctttgtaatgcagtcaatttcatttttttaatgacaacaaataaataaattatttaggacatattttagcaaattataggtgatgtcagtttcttggccagaaaaggataggttaattcaagaagcacctagatcttctaa

SEQ ID NO: 113293 - DNA, 596 bp, Homo sapiens
aatcccactgctcaatgtcatgtggtgaattagtgtttcggtttgcacttcgatcttctcatgcactctggtgctcttttcaccacatcacctttctttcccttatctaaatttactcgattttatctctgcaccactaactctaagaaaaaacactccaaacaaaagaaacaggatttttaaaaagataaaccatagggaaatacaaaaggttaatgtacaggctataaatctcagtacaatatgatttctaacccttgtttcccttagtgaggaayatacccagaaaaaaagccttatattagagatattcattgaacttgcttctggctttttaacttcttttttcagtttccaaggagcagctattgatattaacaactaaatctcaagctctctttttaaatttccaccagttgtagttaaggcatatgcctttcacgttctttcaaaattctctatttcataatgcaatccgaaaacattactttaagaagggtacctagccctaaaccttcacaaatcctgcatagctatggtactgcttatttttcaaacactgcctattctctttgcagacgtcacttaaacagagt

SEQ ID NO: 113294 - DNA, 445 bp, Homo sapiens
ccaccccctctaaattcttggtttaatgtacttttcatttaaaaagaattccacaacttgggaaacaggcactcaccctcgccagcttcagtcacacactcatcccaaaaggccttctaaacccttgtctgacctggatactgaaaacgctggcacttgcctccagattttcctttctctcacctgtcattttctccagactcttattatctgcaatatgaaatgctgggtgctgatagatattggcagaacctggttaaaattcatttcacatagcttgctcttacttcaaaggaacaaagattttgggttttttttktttttttttttttttttttttggcttttcttttcaatcctgagaacagaaaaccaagttatcttttaggtgttaagcatgaaactgggtctttgtttgaaaaagcaatatctgatgtttcctcttt

SEQ ID NO: 113295 - DNA, 604 bp, Homo sapiens
gcctcccggtttgtgttgaaggagggaattgagaatggaatggtaaattgtggctctcacgaggggttggtaggggctatgtttcagggatctgctctgatagtctccacggataaaaatgtgagatcttgttgagaagagaacaaactgcttcctcaaaatggttcaaagtcaagtcagctcagtctaaatctaccttactgatatttatgaatgaagcttctgtttaaccaaagaaataaaactacagagcaaaaamatcataacaaaaccacccacattagtaataaaattataaaccacaattaaagtttccatctgaaaaacattattaagtttccttaaaacacttccaagcttggaattacatttatgacaattcaagtaatcaagaatcacatgcattaagttctttgcaaattcagttaatcctcacatcaactaaggtgtgagtgctattatttgcccattttacagctaaagattccaagaccagagaggttaaatagcctgttagaagttacacagctagaagtagtgcagctgaaatttaaacccacgccctgtatccagagactacgctttacccattaggcatactgct

SEQ ID NO: 113296 - DNA, 602 bp, Homo sapiens
gaatttgttttaaaattcagtaaaagaatgccatgctctgtatattaggcttaagtctccaggatggggaattatttagtcagattcccaagggaatgggttccattttatttcattaatctgaagtaagcaattcatattttcacacaacctcatttccattcattcagctgtattgaagccagttcctgtggttggcttcttcgttgttcaggagagatttcatcaactaattgaaaggaacacagctctgtcctcagcagagctaaatacatacaacaatttcaccaccaaygccagacacattatcagtgtcctgatctttggcctttgatactttcaagagatgtcccaggggaaatctttagctggaatgttaatctgttgcttctctgaccttctacacatgtaccacattattattacaacccacatgcttctcttttcacgctgtcattttgacaatagaaccatcgggcaattcatcgttagactagatggctggaacaaagtgcataccagtaagtgaaatcagattggctaatggtattgtttaaaatgcagtaacatttctcttctgaaattcacccagatttcaaatg

SEQ ID NO: 113297 - DNA, 595 bp, Homo sapiens
aatgtgcttacgtgtaattttctttgtatttatattacttgagtttgtaacacttttaaaacctgtagtctgattttttaatcaattaaaaaaatctcagccattatttcttcaattacttctgttctactccgtctgcaccatttctgagactcatacaatacacacacaattcaattacacatatgttagacatttttaccatgccctacagttctcatgtctcatgctcttgtttacttgtttccttttctttctgtgcttcrgtatggatattctttaatgacataccttccaaatcattaatcctctttttagtggtgtctaatatcctttgaaacacatctcttttagttattgtacttttcagttttagaatttccatttgatggtattttaatagatttcagttctctagtaaaattctctattttgtcttaaagtctgtcaataacagcgagagtccagtctctaaactctttttaacttagatcacctggggtgtgtttttattgtcttttcttctttttcctgtctcttatatgtcctgtctcttgatatacctgctaacttttcattgaatgctgtaaattga

SEQ ID NO: 113298 - DNA, 607 bp, Homo sapiens
ttatctttatgatgttttagagtagcactaatacatatttttacataataatatttatttttaaaccagccagtttaagttcaggagaaagtattagaacagcaaaaagcaaaaacaaacaacagatacacacacacacacacacacacacacacacacacacamacacacacacacacacacacacagagaagaaacagcctcttaaatgaaactggctgtgttcaaatatcagtgctacctatagtcatgttatttcaattttgttacttattttttttttactggatccatttttctaattggtaacatgaaagttgtaagataatttgtgtaattagtatatggaaatcaattttgtggcatgcaagtcatggagtgagtttttaataaatgtgaattgttttgtcatcattgtcattatcctttttattcagtaaatcagagaagtattttctaaggcaatctttctttaaatgaggatgaaagtattaatcatttttcttccaataaaataacgctggttttcagacaagttattgggtcaatttgaaattatagctaaatgaaacacagttaaaaaaaaaaggaaggcaaaactgttatt

SEQ ID NO: 113299 - DNA, 635 bp, Homo sapiens
aggggtaggttgggggtggacaggtaatggttggtatgaatctctggacctctagacctcctttccccacaaactttccccacaattattttgacaaggactgaggatccttgtcaaagttaattatttcattgagaatttaaaatggctgttttctgtgttataacttytttcacatttattgggaagttcagttaaaagatccttacattaattctctctctctttaaaactctcatttaaaaatccattaatgtaattcaccatattaattgatataaaaagagaaaaataatatgatcaccccataactgctaaaaagaccttcctttaacaaaatttaatacccattccctaataagataaaaattaatgaatactttcttaatatgataacatatattaaactagaaagaacttagactattacacttagaagatctggtttcagtgtcagaaggctctgaattggctccagtcccaaaatttactttctctgtgactttctgtacctcaattacttcatccatgagttgagttaatagagtttggcccattacatggtgcataggtaatattccataaatactaaccaatataattcctttaggtataattactatttttttcttcag

SEQ ID NO: 113300 - DNA, 620 bp, Homo sapiens
tatgtaggttttcgaaatctaaatctaagtgaggaaggccctgtgttccaggtcctgaagtctgaatgcctgtgttagaaacctagctcctctatctatttgctaaatgatcttcagtgaacatatgacctttctggctcctcattcctcatttataaaatggagtaataataaggaatctgccccctgggggtgcttgaagaagtaaaggaaataatgtgtataagatattttacacagtacctgcaacatagggagtatttaagaaaaawgactatgttacctttagaacaggaaagttgcttttatgcttttctgtattcctatattatgtagcgttttaaaaagggaataatgaataaaggatagtagttctggaagatagtcatttagtcattttctctaactcttttttcaccttacaggcagatgatcaaattactgagtctttttgttacaaagtggtattggcagaatatttcctttagaatattgtagtgtggtttccccttctaaaattactaaaatgccaggaaattatccattctggagtcatagtgggtttagtgtgcttgagaccttgagtattttcttgtgtttatggtcatataaatgcagac

SEQ ID NO: 113301 - DNA, 393 bp, Homo sapiens
atatgattaaatttgcattacaaatggcaaactccttatatataccctgcagaggagtaattctcatcaactgaaaattacctggctgtgtaacgctgcgttcatttgctgagtcaagtctgtatgatggaatatgtccgcttgaacacacacagcctctagcacccaggaaaataaacattcattcattgctaactctctcttccaaatctcccacaaacaaaactggaactttagagcaaygaaatgcaaagagaatagatgtgtgaaaatgctgactgtgtatagaactgatattacatcttaaatatagctgagctgccaagtgtccccaggcatgcagcaagcgaaacatgttagcaaaagaaatgaaactccaaaatcaacttcaaa

SEQ ID NO: 113302 - DNA, 393 bp, Homo sapiens
atatgattaaatttgcattacaaatggcaaactccttatatataccctgcagaggagtaattctcatcaactgaaaattacctggctgtgtaacgctgcgttcatttgctgagtcaagtctgtatgatggaatatgtccgcttgaacacacacagcctctagcacccaggaaaataaacattcattcattgctaactctctcttccaaatctcccacaaacaaaactggaactttagagcaatkaaatgcaaagagaatagatgtgtgaaaatgctgactgtgtatagaactgatattacatcttaaatatagctgagctgccaagtgtccccaggcatgcagcaagcgaaacatgttagcaaaagaaatgaaactccaaaatcaacttcaaa

SEQ ID NO: 113303 - DNA, 571 bp, Homo sapiens
atgtgtttcattataaaacattcatataaacagatagttaaaactaccccgatcaccactttcatttccagaattctctacaatggtagttgttatttgtcatttttccccgtatttacacagcaacatacatgttgccaaaaatacacaatcaaggtgtgttttacagaaatgctatcttggtctgtatatttctctctgatgtgctttattcacccaacaatttattttaaagatctttccattttgatttactaaattagttttaactgctgcatggtctttcatagtacatagttgacttcagttgattttatctatttcactacttctggaaatttagatatttctaatgatctgttattgcaaaaagtgctgctatgaacattctkaaaacatgcctccttgtatatatataaatttttttctagggtagatatcaagtaaaattacagggacatagagtttgtgcatttaaaattttaagtgggtgctggcaaatggtccttcaaaatgtttttttgtcccttaatggcacaaatatagatcatttttttcttctgagtgtaac

SEQ ID NO: 113304 - DNA, 606 bp, Homo sapiens
attttttttcttagacatagcttttaatggggaaatggaattttgttattaatacccattatattcctgtaagtaaatgactatttttcccttaactcagtgattagacaggaaggaagacattagtgattagacaggagggaagatattagtgattagacagcagggaagatatkagtggtaaagagtgaatgatagtagtgaatataaatggggctgaggaaactttaagcataaaagattcctgagatgactttacaagtctgtacgaatctgccttgactgtatatttcatactgcccaacaaaacaataaaaaacaattttaaatgcatatttttaaatgtacacagttttctatttcatcagacttaagtaaaaagcttccacatgaagaccctttataatatgtgtgtggttatgcaaagagcaaaactcaggtaaacactaaagtgagaatgaaaaacaaacctaaagtaagtttcaagaagatagaaacttaaatggaaggagctgacttctgaaaactaagtcatcaattacaacacagttttacctaaggaaaaaatacagcaatattcgttaaaagcacacagtttttatggta

SEQ ID NO: 113305 - DNA, 606 bp, Homo sapiens
attttttttcttagacatagcttttaatggggaaatggaattttgttattaatacccattatattcctgtaagtaaatgactatttttcccttaactcagtgattagacaggaaggaagacattagtgattagacaggagggaagatattagtgattagacagcagggaagatattagtggtaaagagtgaatgatagtagtgaatataaatggggctgaggaaactttaagcataaaagrttcctgagatgactttacaagtctgtacgaatctgccttgactgtatatttcatactgcccaacaaaacaataaaaaacaattttaaatgcatatttttaaatgtacacagttttctatttcatcagacttaagtaaaaagcttccacatgaagaccctttataatatgtgtgtggttatgcaaagagcaaaactcaggtaaacactaaagtgagaatgaaaaacaaacctaaagtaagtttcaagaagatagaaacttaaatggaaggagctgacttctgaaaactaagtcatcaattacaacacagttttacctaaggaaaaaatacagcaatattcgttaaaagcacacagtttttatggta

SEQ ID NO: 113306 - DNA, 546 bp, Homo sapiens
taccatcttcattgtgcttggagaccacgatgctcaggaaagatagaaaagacaaatgatattataaaaaaggcacctcagaaaactatctccctcagactaatcttccctagactaaccttctcaccatagctctactacatatttaaaacagccctttaaagctaggtttgagtccttttgaaatgatgtatggacagccttttctcaccaatgatttcttgctagacaaataaatctctgatttgctagacaaataaatctctgatctttggcccatttccaacaggaactggagcaactgtcagaggcccaatcccatgaatttgggccacttctattcaacccaggggacctagtactgatgaaggtacttccttcccttcctccctctataaacccagattggaagggactttacgctgtacttstttccactcctacagcactgaaagtcactggaatatgttcttggatttattatacccaagtaaaggcctggaaagctcacagagttacctccatcaacccagaagaccaccgaaa

SEQ ID NO: 113307 - DNA, 560 bp, Homo sapiens
aaacttaaaaaggaataaatggaagggcattaatgtatggattggaagacttagtactgttgcaatarcaatactccccaaattgatctatagattcaatgcaattcttatgaaagtgtcagctgccttttttagaaattggcaaaaagatcttaagattcacatggatgcaagggacccagaatagctaaaacaatctctaaaaggaaggacaaagttggaggactcccatttccaatttccaaacttaatacaaagtgcccataatcaatatagtatggtacttgcataaggacagacatacaggtcaatggaatgaaattttgaatccaaaaatgcacccttctatttatggtgaattgattttcacaagggtaccaaagaagttcaatgagcaaaaatacatctttaaaaaaagacactaagacaactggatataatgcacaagaatgaaattgggctcctatctcacacaatatataagcattaatttttttaagaagagcagagtatgaagtatgagagttaaaactataaaactcttagaagtcaacatagta

SEQ ID NO: 113308 - DNA, 568 bp, Homo sapiens
tgaattgacagaagtagccttcagaaggtaggtaataacaaacacctccaagctaaaaaaaaaaaaaaaaaaaaacatgctctaacccaakgcaaggaagctaagaaccttaaaaaaagaggttagagaaataactaactagaataacaagtttagaaaagaacataaatgacctgatggagcagaaaaacacagcacaagaacttcatgaatcatacacaactatcaatagctgaatcaatcaagtggaagaaaggatatcagagaaattaaagatcatatataaagtgtgaagacaaaattagagaaaaaagaattaaaaggaacaaataaagcctccaagaaatatgggactatgtgaagagaccaaacctgcatttgattggtgtacctgaaagcgatagggagaatggaaccaagttggaaaacactcttcaggatattatgcaggagaacttccccagactagcaagacaggccaacattcaaattcaggaaatacagagaacaccacaaagatactccttgagaaaagtaacccaagacacaaaattgtcagattcaccaa

SEQ ID NO: 113309 - DNA, 568 bp, Homo sapiens
tgaattgacagaagtagccttcagaaggtaggtaataacaaacacctccaagctaaaaaaaaaaaaaaaaaaaaacatgctctaacccaaggcaaggaagctaagaaccttaaaaaaagaggttagagaaataactaactagaataacaagtttagaaaagaacataaatgacctgatggagcagaaaaacacagcacaagaacttcatgaatcatacacaactatcaatagctgaatcaatcaagtggaagaaaggatatcagagaaattaaagatcatatataaagtgtgaagacaaaattagagaaaaaagaattaaaaggaacaaataaagcctccaagaaatatgggactatgtgaagagaccaaacctgcatttgattggtgtacctgaaagcgatagggagaatggaaccaagttggaaaacactcttcaggatattatscaggagaacttccccagactagcaagacaggccaacattcaaattcaggaaatacagagaacaccacaaagatactccttgagaaaagtaacccaagacacaaaattgtcagattcaccaa

SEQ ID NO: 113310 - DNA, 568 bp, Homo sapiens
tgaattgacagaagtagccttcagaaggtaggtaataacaaacacctccaagctaaaaaaaaaaaaaaaaaaaaacatgctctaacccaaggcaaggaagctaagaaccttaaaaaaagaggttagagaaataactaactagaataacaagtttagaaaagaacataaatgacctgatggagcagaaaaacacagcacaagaacttcatgaatcatacacaactatcaatagctgaatcaatcaagtggaagaaaggatatcagagaaattaaagatcatatataaagtgtgaagacaaaattagagaaaaaagaattaaaaggaacaaataaagcctccaagaaatatgggactatgtgaagagaccaaacctgcatttgattggtgtacctgaaagcgatagggagaatggaaccaagttggaaaacactcttcaggatattatgcaggagaacttccccagactagcaagacaggccaacattcaaattcaggaaatacagagaacaccacaaagatactccttgagaaaagyaacccaagacacaaaattgtcagattcaccaa

SEQ ID NO: 113311 - DNA, 628 bp, Homo sapiens
cttttaacatgcatttaaaagatcaatggctcatgatgtgaaaactgattgaaataaagggatttatccttagttacaattttataccatgctaggcaacgcttttactaagaaatgaatcatttattcttttacttgaacatttattatgtacctagcttgtgccaggtagtgtgttgaaccttgaggatacagagataagaaattctccatttgatgaagcccaggagcaaatgaatataaaataacaatataattatgtgaaaagttctgtgacaatatagatcttataattttctcccaccatgtattaatgccttccagagagcaagaggtggagccccacaaaccatggctttgagctgcttttgtgrctcagtgtgtaatgttgtggtaccctatgacttttaacctgccataccttcttgtttcattgtcatataccactgagggaggaatgaaccaccatatagacacttatcagtgagaactctggttgcaagtgaaggaacactgaaatcaagtggactcttaaaagggtggtggaaggtaacatttggctcacatcactgaaatatgatgtgagaagcaaatattttgatattgaatgtccagacacttttggatc

SEQ ID NO: 113312 - DNA, 568 bp, Homo sapiens
tcttttcccagcctgctgggggaaagaaacaactcagcatggaaatacaatacagatgaataattgctgtgattgtattaaagcctgaaatcagtttgggggttcacagaagccttacaaaaggagatgatatctaaactgagacccaaagagtaagaagcagttatagataaaagggatacggaagtgttccaaacagaggactgttcaaaggccatccaggaagagaaagcatttgagattctggaaataattcaccatagctggaatctatagcgcagaggagcaaaacagaggtcaaggtgtgaaagactattcaaccctcatcaaaagcatccatgaccatgacctcctgggaggagctcatgctgctgactacagcagtgttacactttctttcttgtcatagcatcctcacttcatcatcttccccacctccaccacccagaatgccatccacctttctacagtttcctaactctcrgtgacatcaactctagtgtagaccacagagcactaactagtttggtaattcataacatcttatgtggaaatttacttattcatt

SEQ ID NO: 113313 - DNA, 557 bp, Homo sapiens
ttctactgcagaggcagtggcagagaggctttcaattgcccctggaggctctgtccagagagttgccagattgctactggcttgatagctctggggttgggggcagttgctggaggccgagggctggaggacatgcctgatgaggagatatcrgaaagggcacccatattacggtctggccacttttccatagggctgttgcagtatgctgggggtgcactccagtctgcagtcacctcagattttccagtacctagaggtatcaccattgaaggctgtaaaacagcaaagattgagctctgtcctagggaggtatggacctgttgctggcccatacacacctataggaggtggctggagatcctggttgggaggccctgtctggtgaggaggaaaggatcggggacctggttaaaaaaacagtctggccacattttcgtagagcagctgtgctgtgctgggggtccacttcagcccctgatcgccttggactctccaaaatctaaaggccagaacagctaagtcacccaaacaacaaagatggcagccccactgtc

SEQ ID NO: 113314 - DNA, 601 bp, Homo sapiens
attggaatacatttaaatgcaaatgtttattctctggtgacataaccatctaactagattagccatatggatttctcttgatttagtatattactagttaaggaactgagttggaggtttagaattcactcatattatatttattgaccacctactatgtgccacgtacctagtatatggctctggacctaaggatagtgtcttctggaagtgctttataaagacatatttattatccaaatactcattttacttagtcatctaagttccaccacttcattctcaaagaaagaaatgtatacttttagaagctttgtattttctctcttgatcctcatcataaatctgtacagtagataataattatcctattttacagttgaggaacctgagacttcaaggggtagaataacatgtttcaagttatacaattagcaggtgtcaggcctaggacctgcatactttttaactcacatatttcttaaawctgagtttatcacattccaaatatggcatgtgaaagtctttcttttgtgattctatattgccacttccatgatttggaaaatgttctaatctcatctacaaattggttcactga

SEQ ID NO: 113315 - DNA, 574 bp, Homo sapiens
cactgtctcccgtgtcatggggaccactcactgtacgctgcactgaactcactgttttttggcttcctagagtttggggtctgatgctcacagcttggctgtcaggcctccactgcatgtaagtgttcacagatgcacctctttggccaagctctggaattccctcctgctctgcactggaaacggacagtgtgtctgcctctgtctctctcttcctagactctcagcccctccaggctggggttctgcagcctaggagcatgggctctggagccgcctgcctatgtttgcaaacagagcccatgctttcctcactccaggaccatggacacaccttggtttcctcatctgttaagcaggatggagttgttttcaggaggaaatgaacgtgcaaccatagagtgctcagaaaggtgtctggctctgtaagtgttgcaggtakggttccccaggaaacaggccctgagaagggggctcacatgcaggaggtgtattaggaggttccctgggaatcaacacctccatgaaggaaggggaaggaaagaggactggacagagggagatgtcaagctgc

SEQ ID NO: 113316 - DNA, 533 bp, Homo sapiens
gagtgcaggggcatgatcttggctcgctgaagcctctgcctcctgggttgaagcgattctcttgcctcaggctcccaagtacctgggattacagtcacccaccagcacgcccagctaatttttgtgtcgttagcagagacaagtttcaccatgttggccaggctggtcttgaactcttgacttcaagtgatctgcctgccccagcctctgtaaggactgggattacagacatgagccaccacacccaattggatgatttgttttttttttgcggatttgtttgagttccttttagattctggatattagtcctttgtcagawgtacagattgtgaatattttcttcctatccctgggttctatttagtctgcttattacttcttttcctgtgcagaaggtacttatttaaaataaagataaattaagataaattgcatctatttatctttgttcttgttgcatttgcttttggattcttcgtcatgagctctttgctgaagtcaatgcctagaaaagtttttctgatgatatc

SEQ ID NO: 113317 - DNA, 357 bp, Homo sapiens
aataataacatttaatcagatgmtccccatccattaacaccaaaataacaaacaattcaatgaattattttagggtacttactatgtgcaaggcattgtcaaggtaattatttcttgcatttactgatttcctcctggggacgcagcactagcaagaagctaatggattagaaagaagtagaaggcctccagctgacaacccactcagaagagaacatggatcagaattgcctgcctccatggcaggcacagagctgggaattcataagcagaaattacttcattcaatcatctcaatagccctgtggggaagacagtagttctccattttacagatgtggaaactgagatccaaag

SEQ ID NO: 113318 - DNA, 636 bp, Homo sapiens
atttatccctgggatgtcaaggatggttctaacatatgcaaagcaattaaagtaatacaggacatttaaaaaggattcaaaatacatgatcatcccaaaagatgtagaaaacgcatttaacaaaattaaaatcctttcatgaaaaaaaagaaccctcaacaaactaggtgtagaaggaatttaccttaacwtaataaaggctgtatattaaaagctcacagtgatgtcagactcaatggtaaattaacaaaagcttttcctgtaagatcagcaaggcaaggatgctcactctcaacatagcactgaaagtatttctaggcaacattgtacaggaagtcgtagccaggccagaaaaagaaataaaagtcatccaaatcagacaggaagaaataaaattacctctttacagatggcatgatcttatgtgtagaaagccatgaagactccacaaaaacctattagaactaataaatgaattcaataaagttgcaggtacaaaaatcagtgcatttctataggctaataatgaactatccaaaaaggaaattaagaacaattcatttacagtaacatcaataattaaaatacttaggaataggcaaccaaggagatgaaagagttatatactgaaaacta

SEQ ID NO: 113319 - DNA, 636 bp, Homo sapiens
atttatccctgggatgtcaaggatggttctaacatatgcaaagcaattaaagtaatacaggacatttaaaaaggattcaaaatacatgatcatcccaaaagatgtagaaaacgcatttaacaaaattaaaatcctttcatgaaaaaaaagaaccctcaacaaactaggtgtagaaggaatttaccttaacttaataaaggctgtatattaaaagctcacagtgatgtcagactcaatggtaaawtaacaaaagcttttcctgtaagatcagcaaggcaaggatgctcactctcaacatagcactgaaagtatttctaggcaacattgtacaggaagtcgtagccaggccagaaaaagaaataaaagtcatccaaatcagacaggaagaaataaaattacctctttacagatggcatgatcttatgtgtagaaagccatgaagactccacaaaaacctattagaactaataaatgaattcaataaagttgcaggtacaaaaatcagtgcatttctataggctaataatgaactatccaaaaaggaaattaagaacaattcatttacagtaacatcaataattaaaatacttaggaataggcaaccaaggagatgaaagagttatatactgaaaacta

SEQ ID NO: 113320 - DNA, 499 bp, Homo sapiens
ggaaaataactttttcaaacgtgataaagcttaaaaaatttgycaacaaacctgaaggatggctttcaggcagaaggaaaatgataccagatggaagtatgaaggaatggtgtacgaaggaatggtgtacaaaggaatgaagagtgccagaaactgttaacacgtggataaatataaatgactcttcccacatctctcttccctagatgtgcttattgctccaaaatagatatttctcaaggaaagcactcctttctgtatatcccagttaaatgatagtctctctatcccattggtttgttttttaaaaatcagttataattatgtgaaatattttatttaatcatgtattttcaaaagttgttcatggagttaggaacactttctattctgttgaactgtttctctgggtcctgaaacaatgtgcatgtcaacaaaaacactggtaggtgggaagatgggaggaagggagggagaaaaggagggagaaagggaattc

SEQ ID NO: 113321 - DNA, 596 bp, Homo sapiens
tgaacaactggctcttcggaggtaaagtggtgaacttcaattggtgtcttacaccaagctagtttaaaaatgcattctatgtgtaaatatgcaatctataattttaaaaagtttagaggaaaacttaggagaaaatcttgatgatcatgaatttggtaaagatttcttaaatacaacactaaaagcaggatttgtgaaagaaaaatggataaattagacttcatcaaaattaataactcttctctgaaagaatctattaagagaatgaaaagacagtccaagactgggaaaaatatttgcaaagtacccatctgataagggactggtatccagaatagtaaagaactctcaaagctcaattaaacaacccaaaggtgcaaaagatttgaacagacacttaacacgaagtggcactgatgcagctaacacatgagaaattgttcaaagatcacgctcrttagagcagtataggagatattactgtaaacatattaggatgtctaaaatttaaaagactgaccatactaagtattcattagaatatgaagtaactaaaattatcatacactgttcatggaaatataaaatgatacaac

SEQ ID NO: 113322 - DNA, 564 bp, Homo sapiens
tttttttcccataagtgaacaaaactatttaccagcacataatactatccagtgcctaagcagatgtagtaaacccatcctgttgggatttgttggtggcactgaaagtcaccacatgctttagcaaagtaatctgtcagtatgcatcaacagccccaacgatgttcgtgtctttgtctcaataatcctgcatctgagcaactagtctaagaaaacaataagggaagagccagttacacacaaatgtaaatgcatgtgagcatgtgtccacctgttaatctacagctacrtgtttggtggggaaaactcttgtagtttttatgctcacacaatatttcctgtattagaagagacagagctggctttatgggtgggcctaggttcccacacttagaaaagagttccctacttggggtttaatgttctgtggtcactgtcttgaaagtctttgtagttttctgtttggattttcactttgtaagtgaaatccaatgggacaatggagcatacacaaggcatgtggagccttgattcacttgtgcccctgtctcttgctaccaccat

SEQ ID NO: 113323 - DNA, 427 bp, Homo sapiens
aaacccaggtaaattcaggtctgaaacctcatctaagcttcagaactctctgcagtgttggctgaggcattcatttagagtatatcacatctcagcttctccttgtggctagcgctgtttcctttctgccattccatgggtgttgattctaagagctccctcagaaaactcctgattttgatgttcatctcaaaatcagcttcccagkgtcctgatgtgggtcacccaccttggtctaatctgaccaacttgagaatagagactgtgtcccattcatctttgtattttcacacccagcagactgcctagctcagagcatgctctcaataagtgttggtggtcaggttgaataaatgatagtcagagtgagggacgtgtttattattgttaaaaaaaatgaacggggcaatcaggtttcctctagaag

SEQ ID NO: 113324 - DNA, 427 bp, Homo sapiens
aaacccaggtaaattcaggtctgaaacctcatctaagcttcagaactctctgcagtgttggctgaggcattcatttagagtatatcacatctcagcttctccttgtggctagcgctgtttcctttctgccattccatgggtgttgattctaagagctccctcagaaaactcctgattttgatgttcatctcaaaatcagcttcccagggtcctgatgtgggtcacccaccttggtctaatctgaccaacttgagaatagagactgtgtcccattcatctttgtattttcacacccagcagactgcctagctcagagcatgctctcaataartgttggtggtcaggttgaataaatgatagtcagagtgagggacgtgtttattattgttaaaaaaaatgaacggggcaatcaggtttcctctagaag

SEQ ID NO: 113325 - DNA, 427 bp, Homo sapiens
aaacccaggtaaattcaggtctgaaacctcatctaagcttcagaactctctgcagtgttggctgaggcattcatttagagtatatcacatctcagcttctccttgtggctagcgctgtttcctttctgccattccatgggtgttgattctaagagctccctcagaaaactcctgattttgatgttcatctcaaaatcagcttcccagggtcctgatgtgggtcacccaccttggtctaatctgaccaacttgagaatagagactgtgtcccattcatctttgtattttcacacccagcagactgcctagctcagagcatgctctcaataagygttggtggtcaggttgaataaatgatagtcagagtgagggacgtgtttattattgttaaaaaaaatgaacggggcaatcaggtttcctctagaag

SEQ ID NO: 113326 - DNA, 427 bp, Homo sapiens
aaacccaggtaaattcaggtctgaaacctcatctaagcttcagaactctctgcagtgttggctgaggcattcatttagagtatatcacatctcagcttctccttgtggctagcgctgtttcctttctgccattccatgggtgttgattctaagagctccctcagaaaactcctgattttgatgttcatctcaaaatcagcttcccagggtcctgatgtgggtcacccaccttggtctaatctgaccaacttgagaatagagactgtgtcccattcatctttgtattttcacacccagcagactgcctagctcagagcatgctctcaataagtgttggtggtcaggttgaataaatgatagtcagagtgagggacgtgtttattattgttaaaaaaaatgaasggggcaatcaggtttcctctagaag

SEQ ID NO: 113327 - DNA, 574 bp, Homo sapiens
aagagagcccatatagccaaagcaagactaaggcctttatttcattcctttgtgtgtttaggtgtgttgctgtgctgactagaaattacagcataatgttagagaaattgtactagcaattaaaatgtcaatttatgtgaatttgaaaaaaatgcataaaaatcctacatgtaaacaagaaaaaaatacaactcaaagaaaaataagcaaaagctctggacaggaaatacagagaagagtcacatatggtcaatacatatataaaaagatatttagcttcattaatgatcagagaactaaagaaacaatacaattttacatttgtcagattggtaacaatctaaaaacttttttcattgtcaattttgtacaattgtaaaaaacacgtaacacacaatttactatcttaaacattttgaagtgtgcagtttagtactttaagtatgttttcgttattgtgagcaratacccacaaccttttcgtcttgcagatctgaaactctatacccattaaacaaaaccttcgctttacacgccccctgcccccgcaatctgtccgtggtaaccgccattc

SEQ ID NO: 113328 - DNA, 574 bp, Homo sapiens
aagagagcccatatagccaaagcaagactaaggcctttatttcattcctttgtgtgtttaggtgtgttgctgtgctgactagaaattacagcataatgttagagaaattgtactagcaattaaaatgtcaatttatgtgaatttgaaaaaaatgcataaaaatcctacatgtaaacaagaaaaaaatacaactcaaagaaaaataagcaaaagctctggacaggaaatacagagaagagtcacatatggtcaatacatatataaaaagatatttagcttcattaatgatcagagaactaaagaaacaatacaattttacatttgtcagattggtaacaatctaaaaacttttttcattgtcaattttgtacaattgtaaaaaacacgtaacacacaatttactatcttaaacattttgaagtgtgcagtttagtactttaagtatgttttcgttattgtgagcagatacccacaacsttttcgtcttgcagatctgaaactctatacccattaaacaaaaccttcgctttacacgccccctgcccccgcaatctgtccgtggtaaccgccattc

SEQ ID NO: 113329 - DNA, 614 bp, Homo sapiens
ctagcagctacagagaccagaatagagatgacatcygctcttctggaagggcctctgacagttcagttcagaatgaggatggaataaagcagatctgggaggcttactctaggctgtgtcaccccctccatcccttgcacagtgatccctgctaggctccctctggtggtgcatagactggttctgtggaatgcttgagaaggactagcagtgcatgaagagataggtgttcccccagtgggaacctcttggtgatatcaaagatacactttcaggcaaacatccagcaagaggctgactctcagtagaatttgccacctgtcattttaaccatatactactttatgactattctcagcattttattcagaaggaaaatgaagacagcagaatgtatgccattctcaatttgatgacactagctatttattgagaacattccacatggcaaagtggggcttaggcaccttagatatgtgcaggttttgcactctcacagcacccctatgagctaggactgtggttatcctattcatcttagaaatgtgtaaactaggttgcaggcaagatggccaaataggaagatctttggtctgcagctcccagcaagatca

SEQ ID NO: 113330 - DNA, 614 bp, Homo sapiens
ctagcagctacagagaccagaatagagatgacatccgctcttctggaagggcctctgacagttcagttcagaatgaggatggaataaagcagatctgggaggcttactctaggctgtgtcaccccctccatcccttgcacagtgatccctgctaggctccctctggtggtgcatagactggttctgtggaatgcttgagaaggactagcagtgcatgaagagatwggtgttcccccagtgggaacctcttggtgatatcaaagatacactttcaggcaaacatccagcaagaggctgactctcagtagaatttgccacctgtcattttaaccatatactactttatgactattctcagcattttattcagaaggaaaatgaagacagcagaatgtatgccattctcaatttgatgacactagctatttattgagaacattccacatggcaaagtggggcttaggcaccttagatatgtgcaggttttgcactctcacagcacccctatgagctaggactgtggttatcctattcatcttagaaatgtgtaaactaggttgcaggcaagatggccaaataggaagatctttggtctgcagctcccagcaagatca

SEQ ID NO: 113331 - DNA, 614 bp, Homo sapiens
ctagcagctacagagaccagaatagagatgacatccgctcttctggaagggcctctgacagttcagttcagaatgaggatggaataaagcagatctgggaggcttactctaggctgtgtcaccccctccatcccttgcacagtgatccctgctaggctccctctggtggtgcatagactggttctgtggaatgcttgagaaggactagcagtgcatgaagagataggtgttcccccagtgggaacctcttggtgatatcaaagatacactttcaggcaaacatccagcaagaggctgactctcagtagaatttgccacctgtcattttaaccatatactactttatgactattctcagcattttattcagaaggaaaatgaagacagcagaatgtatgccattctcaatttgatgacactagctatttattgagaacattccacatggcaaagtggggcttaggcaccttagatatgtgcaggtwttgcactctcacagcacccctatgagctaggactgtggttatcctattcatcttagaaatgtgtaaactaggttgcaggcaagatggccaaataggaagatctttggtctgcagctcccagcaagatca

SEQ ID NO: 113332 - DNA, 568 bp, Homo sapiens
aaaagccataaatgtatccttttcccaaggagaaagtcataaatgacagtactctaaaagactggacttaatggaagccccagaggtctagtcctatgacttcctgagggtaaaaggacttttttcaccagcttcttccagtacttggagctttttctgccttatcatgattttgtcctgaacctctttctgtgtcagttgtatttcaacacacccctaacttcccacatactccctcaacttcaagacaaaccttgatcttctaactcttttccaccactattaggtacctgttttgcattttctggcacatttgactttgttttwaataataattatttttaaaacaactgtcttccattcttgacatctcagaatatttttggcttttatattatttctgcctttatttatgaagctcctgataaaatgaaggattaccattcagtttccacttaataaaggtatctaaaccaacttttatcccaattaaaatgaagagcatgctggtttatttgaaaactggaaaagtaagctttgagggcatcatagacagacaattttaaga

SEQ ID NO: 113333 - DNA, 616 bp, Homo sapiens
taccatacagtgcagacacagcactttttcattttttttcttttcttttttataatttttccattccatgaacgctctctacagtttttctttgagacttttgtgacttctgatctgcagtctttctgcctggaccgcactcctctaactcttcactcttgaaaaaatcttacatctttcaaagcccagatccagttcatttctgtgaagctttccctgacccatccaaggagaattaattactctatattttttgcttcyatatttttttcatccaaccattatagcatgcatcacattcttccagagttaatttctgagaggtctgattcactagctagattgctagcttcttgaaggcaacagctgcagctcattcatctccaaagcctatacattaagcacagtactgggcatataataggccctcagaaaatgtttgctgaattaaacttaatttaaatgatacataatgggaaaaataatatttcatatataagattggcaaactcactttagagacaactgtttagagacatatctattccgaaaatgagatgcttcaacaatcacagtgcaaaaggaaataattaggtctgccatacacacaaactta

SEQ ID NO: 113334 - DNA, 541 bp, Homo sapiens
acacattgttacttttaagtacacttagacaattttgatttatcctcagcaattatcaattatcacttaactaaatcaaacccttggattccttcccagacctgaattacaatttcctcttatctttttgtgaaggctaggagcccctggactatgccattgacagtggracacctaagctagttcaggctttgctaggaaaatccccaccagctgttccacctgatgctgagttaattgccttaattagctttcttacaatagccttcttaatcagttcttgtgaggtgatcttaaactcgcatcatgattcctttcttactacacactgaccttttacaaatacccattcagtctttttgcacaactgctcttgaagtctaaaatgaagaacataaaaagctagggaaaaataaaaccctctgctctctgtttcttccgtattcctcccctgaaactgtgacccttaacttctaatgaaggcaggttattttgactttctaaattaccaacagctacatggtactctttttttcccccc

SEQ ID NO: 113335 - DNA, 611 bp, Homo sapiens
ccaatgtagtaatctggattagagagataaggacctggagaagaggttactatttttttaaggagatgtcagtgtaagagaagtaatagattttgtgccaccaacaatacaattattctactgttattacttttgtggttttttacaagatataaaaaatttatgttaagataatatattagtctgttatcttgttgttataaagaactgcctgagactgggtaatttataaaggaaagaggtttaattgactcacagttcttcagggttggggaggcctcagaaaacttacaatcatggtggaaggggaagcaaacatgtccttctttacatagcatcaggaaggagaagaatgagggaagtggggaaaagccccttataaaaccatcagatctcatgagaactcactatcacgagaacagcatggggagaccacccccatgatctaatcacctcccrtgaggtccttcccccaacacatgggtattacaattcacattacaattcaagatgagattttggtgaagacacagagaaagaccatatcaaatatatttagataaattggatgacaggtatatgtgtttgtatgttagtatgtaagttactaa

SEQ ID NO: 113336 - DNA, 637 bp, Homo sapiens
agcatagtgcctttgaacttgaatcttgagatacaatcatgtctgatgggactaatttctgcattttaattatggcatttactggaagtgctccttgagaagagaggacaaggaagctcaagtgtcttytgtagaagtgtgtccagaacaaaaattatattggcagcaacaatcacttaatgaaggaagagaaaaatgaaaaaaagatttcaacttgaaagctattttataatcacaggaggctttagataatggcctggcaataaaatggtccgggagtagcagccaaggggagttattgttgttctttgtttagttttctttgtctgaagctcagtttatgtaaaaagaaggctttgctttgcgggtagggaaaaaagatatcataatctcacctctgcccgggtttaaaatatttctaggagaggaacaatgactctagaatgcctttgcctcagcttgaagctgccactaatggcatagcaaacacaaactacaaaaaacgtctgtgtcgccggacctgggactttggtaacctcctgcttccaattagaagaacaagcggagccacagtacagccaggcaagcttaagtcaggtatttggaaggagggagagtgacagaggaaagtcaaagc

SEQ ID NO: 113337 - DNA, 637 bp, Homo sapiens
agcatagtgcctttgaacttgaatcttgagatacaatcatgtctgatgggactaatttctgcattttaattatggcatttactggaagtgctccttgagaagagaggacaaggaagctcaagtgtcttttgtagaagtgtgtccagaacaaaaattatattggcagcaacaatcacttaatgaaggaagagaaaaatgaaaaaaagatttcaacttgaaagctattttataatcacaggaggctttagataatggcctggcaataaaatggtccgggagtagcmgccaaggggagttattgttgttctttgtttagttttctttgtctgaagctcagtttatgtaaaaagaaggctttgctttgcgggtagggaaaaaagatatcataatctcacctctgcccgggtttaaaatatttctaggagaggaacaatgactctagaatgcctttgcctcagcttgaagctgccactaatggcatagcaaacacaaactacaaaaaacgtctgtgtcgccggacctgggactttggtaacctcctgcttccaattagaagaacaagcggagccacagtacagccaggcaagcttaagtcaggtatttggaaggagggagagtgacagaggaaagtcaaagc

SEQ ID NO: 113338 - DNA, 609 bp, Homo sapiens
ctgcagatggggcttgtgagtttgaatattttaaaaaaatacctagggaagctcaaacaccaaactttcagaaactgttggagtgagttttgaagccagaaaattttgatgaaaatcctgcctctacattgactcccttctttgagctttggtgtccttatytgaaaagcgagatgaataatatctactttatgaagttgttgttagaattaaataaaataatgtactttgtgtaaagtgtctagtttacagctagacatgcagcatttgcaaacccagtatatgaaatataaaacaagtaatcaattaaaaatattttctatgcatattaagaataaaatttcttctatttttatattattaaattaaatcacaattggttcttattgatactttcttgtcaactttgtgaatcaaaacaatatcacactgaactagaaccaggaaaaccaaatagaaagtttctttgaaaataaaactgactagtaaaattatttgaccaaataaagtagaaaagatgagctacatgaggagtgcagagatgcatttttgttttccttggctgttttattcttattgctgttaataacagttgggtgcctataatgc

SEQ ID NO: 113339 - DNA, 637 bp, Homo sapiens
agcatagtgcctttgaacttgaatcttgagatacaatcatgtctgatgggactaatttctgcattttaattatggcatttactggaagtgctccttgagaagagaggacaaggaagctcaagtgtcttttgtagaagtgtgtccagaacaaaaattatattggcagcaacaatcacttaatgaaggaagagaaaaatgaaaaaaagatttcaacttgaaagctattttataatcacaggaggctttagataatggcctggcaataaaatggtccgggagtagcagccaaggggagttattgttgttctttgtttagttttctttgtctgaagctcagtttatgtaaaaagaaggctttgctttgcgggtagggaaaaaagatatcataatctcacctctgcccgggtttaaaatatttctaggagaggaacaatgactctagaatgcctttgcctcagcttgaagctgccactaatggcatagcaaacacaaactacaaaaaacgtctgtgtygccggacctgggactttggtaacctcctgcttccaattagaagaacaagcggagccacagtacagccaggcaagcttaagtcaggtatttggaaggagggagagtgacagaggaaagtcaaagc

SEQ ID NO: 113340 - DNA, 507 bp, Homo sapiens
agggtgagcagaaatgactgggccagttctgaccccaggcttttggaggcattgcttgtttgtacttgtcctctcatgcttctgttactgctgtgaggagagctggtgttcctttggcctggggcccacccagaatggacacacttgggggcagactggagcccaccttgcatctggagctaagctgtcagacctgcagcttgaagcagggcagcctggctgaggcccaccmagatcagccaacttgcaaacacagaagaaaccagtgcttcttgtggtatgtcactgaggttttgcgggtgtttgtttcgtggcagtagctgactgatacaagaccccctggttttcttttcttttcttatcttttctttagagacgggatctcaatctgttgcccaggctggagtgtagtggcatgagcacagctcactgcagcctcaaccttctgggccgaagtgatcctcccacctcagcctgctgagtagctgggacaacatgtgcacacca

SEQ ID NO: 113341 - DNA, 507 bp, Homo sapiens
agggtgagcagaaatgactgggccagttctgaccccaggcttttggaggcattgcttgtttgtacttgtcctctcatgcttctgttactgctgtgaggagagctggtgttcctttggcctggggcccacccagaatggacacacttgggggcagactggagcccaccttgcatctggagctaagctgtcagacctgcagcttgaagcagggcagcctggctgaggcccacccagatcagccaacytgcaaacacagaagaaaccagtgcttcttgtggtatgtcactgaggttttgcgggtgtttgtttcgtggcagtagctgactgatacaagaccccctggttttcttttcttttcttatcttttctttagagacgggatctcaatctgttgcccaggctggagtgtagtggcatgagcacagctcactgcagcctcaaccttctgggccgaagtgatcctcccacctcagcctgctgagtagctgggacaacatgtgcacacca

SEQ ID NO: 113342 - DNA, 491 bp, Homo sapiens
tcacctttccacaggcagaggagcccctcctggtggccaccaccaccactagctcagggggagttctgcctggccactgcagatgttcatttaaagcccaggggcacctcaggttgtggtgaatgctgccaggcttgggactcacccttcaaggcaatgggctcccctctggcccatggcaggtccagaaatgctgtctaggagcctacacctgggctcgggacccaagagcccgcttggtgctccacacccttgtggctgaactggtacytaaggtaccagcaagaaaatatcccctttacttttctcaagcagaaggaatcttttgccattgccaccccagctgggaaggtagtaagtcacacctgaaaccagcatgtctgagtctcacccaaagcccatggcacactacctgggtatcaccggtgggtattcagggcccaagagctctttagtcagcaggtgatatattctgtcaggactagctcatt

SEQ ID NO: 113343 - DNA, 544 bp, Homo sapiens
atcagtaactcaactgtctggccagtggggtgggttgaggccagtggcagagggcagaaactggctggagggtagagcgaggaatcccacacagattcctggggccagacccagctcctggggggaaggggtggtgatgagctggctggaaaccctgcaccctgcccagcsctccttgggcagcagcaccaaagacagctgaaagtcaatgatgatatttgtctgagaagaaacagagagggaggagcaggtgggcagagagggagagaagcaggcagcctgctccactgggcagcacttgaagaccacggcagggaaggcggggctgggcaaagctcaccctctggtccacttgaagattcctgcttcaaaactaaccctgatggcttccagacaagtcggcaccaagggtcatttctggaggctgtaagtgttgtcgatagcagctgtagggacaggtgtaaatcagcctgtgcattcctcccctcgacccctcccagctttctgcacctgaagcaggttccatttattactgcaagccagc

SEQ ID NO: 113344 - DNA, 563 bp, Homo sapiens
attgtcatcttcctgagtatttcacaaatgttctcgccaataartcgcattttataagaaactcatttctcaggtgaggaacccggagctaaggggtgtggccccgctgcgcaatgacccgggcgtctgattccaaggccgagaagttcaagaacgaaatctactagggagctctgatgatttcaccactcggtggtatgggctacaccagttgggtggaagtgggggtgggggcgctctccgggcccggtgtacccctaggctcatctgaatgggccttgaggcttcttcctacccacccaccgccatcctccgtccagttccataatgacagcgaggaggcagaaaccctaaatcctgaaacattttgagtggaacccagcacgcaggaacctgcgagattcttccgtttcgtcgaggtccgcatcgattgtattgacctccccgtgggccagcttgtctccttcatcgatcagccgaacgaagtctaggacagaactgtagaccaaaggaaatcgcaggcgtctttgcaaagctggtgggaagtaacccagcggctgctg

SEQ ID NO: 113345 - DNA, 588 bp, Homo sapiens
ttaaggttggacctatacacgactcagtaagctctctaaacgttaggaagatctaaactgaagcactagaaaggtctgtgactctgttcttcctagcaagccagcctcacctccccttcagattccatctatagcaatcttcttgtatccctaccagaggggatttcttttgcattttactcctgcctcacccaatctccccaactcaraaacttcataattcaactgcaatatccctgttttacagaagtctgctccactcccttaaaaaaaaatcatacgtcgaagtcaaaaggtctttcactgactccaacaattctcaaattctagatggagacatgcgatgaaggagcctgtcctggttgtattcactgcattaatacgcacacataaaagtgaatgcaacatcgtattttaacttctctgatagaaaaatcccaactgtgccataccgtccttcctcctctccctgttctcaaaagaattagagtcccaggaagtggggaaagggtggggggtgggggtcgggcaatgaagttgcttggaaaggaagaaaacaataattcgaggcactatttacacctgcaa

SEQ ID NO: 113346 - DNA, 595 bp, Homo sapiens
gcaggttgttaaactaccatgtaattgtatggttttgacagatcttcttggtaytgatttctatttttattgctctgtggtccaatagtgtggttggcatgatttctattttttttttaatttgttgagacttgctttatgggcaagcatgtggttgatttagagtatgtgccatgtgcagatgagaagaatgtatattctgttgtttttgggtgtagtgttctgtagatgtctattaggtccaattggtcaagtgttgagtttacgtccagaatatctttgttagatactgccttgatgatctgtctaatcctgtcagtggggtgttggagtctcccactattatcgtgtggttatctaaatctcttcatagatctctaagaacttgttttatgaatctgggtgctccattaagacttcttgttgaattgaatcctttattattactactactaagaaaggattattattattattgaccttttagattgttgttggtttaaagtctgttgtatgtgatataagactagtaacccccaaataggaatttttttttctctaataaatgatgcagtagtgtgctcaacggatatcc

SEQ ID NO: 113347 - DNA, 595 bp, Homo sapiens
gcaggttgttaaactaccatgtaattgtatggttttgacagatcttcttggtattgatttctatttttattgctctgtggtccaatagtgtggttggcatgatttctattttttttttaatttgttgagacttgctttatgggcaagcatgtggttgatttagagtatgtgccatgtgcagatgagaagaatgtatattctgttgtttttgggtgtagtgttctgtagatgtctattaggtccaattggtcaagtgttgagtttacgtccagaatatctttgttagatactgccttgatgatctgtctaatcctgtcagtggggtgttggagtctcccactattatcrtgtggttatctaaatctcttcatagatctctaagaacttgttttatgaatctgggtgctccattaagacttcttgttgaattgaatcctttattattactactactaagaaaggattattattattattgaccttttagattgttgttggtttaaagtctgttgtatgtgatataagactagtaacccccaaataggaatttttttttctctaataaatgatgcagtagtgtgctcaacggatatcc

SEQ ID NO: 113348 - DNA, 595 bp, Homo sapiens
gcaggttgttaaactaccatgtaattgtatggttttgacagatcttcttggtattgatttctatttttattgctctgtggtccaatagtgtggttggcatgatttctattttttttttaatttgttgagacttgctttatgggcaagcatgtggttgatttagagtatgtgccatgtgcagatgagaagaatgtatattctgttgtttttgggtgtagtgttctgtagatgtctattaggtccaattggtcaagtgttgagtttacgtccagaatatctttgttagatactgccttgatgatctgtctaatcctgtcagtggggtgttggagtctcccactattatcgtgtggttatctaaatctcttcatagatctctaagaacttgttttatgaatctgggtgctccattaagacttcttgttgaattgaatcctttattattactactactaagaaaggattattattattattgaccttttwgattgttgttggtttaaagtctgttgtatgtgatataagactagtaacccccaaataggaatttttttttctctaataaatgatgcagtagtgtgctcaacggatatcc

SEQ ID NO: 113349 - DNA, 445 bp, Homo sapiens
ctgcactcctgcatgggtgacagagccagaccttgtctcaaaaaaaaaaaaaaattttactttcccttcactgcactcaaaacaagttctagacaaatattcattgctatagttatttgtttactgtttgtctcctttgttagacagtcagctccacgtggatraggtctgtgtagttcaccactgtatgttcaatgcacagcacaatgcctggcatatagtaagcactcaataaatatatgttgaatgaatggatacaaatcaaaaagtagacattccaaatggcaaaattacatttgtaaattatgcatgattaacagtatctcactgttgatgaggcactctttcatgtgtcaaaagtcactcatgacatataagctactacctttctaacttacagagcctagaagttctagtccttgtattaataataataacacccaaa

SEQ ID NO: 113350 - DNA, 602 bp, Homo sapiens
ttccttctcctggctcagaagctctcccactgaataccttgtgactcccrcccctgcccgccagagaacaacccctttgactgtaattttccattacctacccaaatcctataaaactgccccacccctatctccctttgctgactctctttttggactcagcccacctgcacccaggtgattaaaaagctttattgctcacacaaagcctgtttggtgatctcttcacacagatgtgcgtgacaagttcttttttgatcacctctagaatgtattttttaaattgtccatgtattacaaaaaaccaaacaccgcatgttctcactcatatgtgggaattgaacaatgagaacacatggacacaggaaggggaatatcacacaccggggcctgttgtggggtgggggaagggggaagggatagcattaggagatatacctaatgttaaatgacgagttaatgggtgcagcacatcaacatggcacatgtatacatatgtaacaaacatgcatgttgtgcacatgtaccctaaaacttaaggtataataaaaataaataaaaaaataaattgtccatgtattagactacatagaagacaacac

SEQ ID NO: 113351 - DNA, 602 bp, Homo sapiens
ttccttctcctggctcagaagctctcccactgaataccttgtgactcccgcccctgcccgccagagaacaacccctttgactgtaattttccattacctacccaaatcctataaaactgccccacccctatctccctttgctgactctctttttggactcagcccacctgcacccaggtgattaaaaagctttattgctcacacaaagcctgtttggtgatctcttcacacagatgtgcgtgacaagttcttttttgatcacctctagaatgtattttttaaattgtccatgtattacaaaaaaccaaacaccgcatgttctcactcatatgtgggaattgaacaatgagaacacatggacacaggaaggggaayatcacacaccggggcctgttgtggggtgggggaagggggaagggatagcattaggagatatacctaatgttaaatgacgagttaatgggtgcagcacatcaacatggcacatgtatacatatgtaacaaacatgcatgttgtgcacatgtaccctaaaacttaaggtataataaaaataaataaaaaaataaattgtccatgtattagactacatagaagacaacac

SEQ ID NO: 113352 - DNA, 602 bp, Homo sapiens
ttccttctcctggctcagaagctctcccactgaataccttgtgactcccgcccctgcccgccagagaacaacccctttgactgtaattttccattacctacccaaatcctataaaactgccccacccctatctccctttgctgactctctttttggactcagcccacctgcacccaggtgattaaaaagctttattgctcacacaaagcctgtttggtgatctcttcacacagatgtgcgtgacaagttcttttttgatcacctctagaatgtattttttaaattgtccatgtattacaaaaaaccaaacaccgcatgttctcactcatatgtgggaattgaacaatgagaacacatggacacaggaaggggaatatcacacaccggggcctgttgtggggtgggggaagggggaagggatagcattaggagatatacctaatgttaaatgacgagttaatgggtgcagcacatcaacatggcacatgtatacatatgtaacaaacrtgcatgttgtgcacatgtaccctaaaacttaaggtataataaaaataaataaaaaaataaattgtccatgtattagactacatagaagacaacac

SEQ ID NO: 113353 - DNA, 629 bp, Homo sapiens
tcccttttcttcacatccttgccagcattcattattgcccgtcttttggataaaagccattttaactggggtgagatgatatctcactgtagttttgatttgcattactttgatgatcagtgatgttgagcaccttttcatattcctgtttcatactcatatgtcttcttttgagaaaggtctattcagatcttttacccattttaaatcggattattagatgtttttcctatagagctgttagagcttgtaatattctggttattaatcccttgtcagatggctagtttgcgaatattttctcacattctgtgggttgtctcttcactttgttgattgtttcttttgctgtgcagaaggtttttaactggatgtggtcccatttatccagttttrctttggctgcctgtgcttctggagtgttactcaagaaatttttgcccactacaatgttctggagagcttccccagtgtttttgtttagtagtttcatagtttgaggtcttatatttaagtatctaatccattttgatttgatttttgtatatggtgagagacagaggtctagtttcattcttctgcatttggatatccaattttctcagcaccatttattgaagagacagtct

SEQ ID NO: 113354 - DNA, 602 bp, Homo sapiens
tcttcggtttccctgaaacctttctcctgcaaaataactgctaacatcttatgaaaccagtattccaggaaagcacagttcagaagtcattgctgtaaagttagggtaactttctgaatctataatcaatatgcatggtctgtgaactagagaaaatggccactaaccatagatagactacttctcaccctctcttcccagccacatgcaggggatttacctatgtggttatcatttgcgtctacctttccgagcagagtcttgggtgctctamtttacacttaagtctttcattattaattccctttttaaatttgtggaatgagtatatattcttcacaatcaatccatcagtcccagatgggaaggtctgggaccctgtttacctgcaactgttagaagtcacagcacctgtgactgttagaagtgtccagcactccctggtccttctctactctcctgcgagccctttctatgagctcttcaggggctctttctttgggaactgaaatggtcctaaacattccacaatctgtgctgatgcagtgcactctcagtgtctctctgccttcttcggctttgcccagaagaatcaggaacca

SEQ ID NO: 113355 - DNA, 584 bp, Homo sapiens
caaatagctcctttctcactgtgtcttcacattcatttcctgtctttgcctgcatctctgggctttctctccccccgcctctttttttggtttaataaggacagtggttcaatcaggttaggggcctgcccctcttgcctcatttaatattaatcatctctctcaggttctgtctccaaatrcagtcacattctgaggtattggggattaaaagttcaacatacacattttgaaaagacgtaattcagtctatacagaaggaaatgttttggcctggtccctccatattatttgggatgggagacaaagagaagagggagagctgaagaatgaaagaaaaattcttggaaaaaggagaggctcagggaaacaaaaatccctaataaattagctattgttaatagttaaaaactacaaagggtagcaacaataatattactacccactaacatttattggttacttattattagggttttcttgatgattaagtgagataatcatgtaagacttcagcaaaattcagagcacacagcaaacgttcaataaatgttatgtatttttatgatttctcagtttgtgtt

SEQ ID NO: 113356 - DNA, 530 bp, Homo sapiens
gtttcttggtcatgaaatctttgcttaagccaatgtctagaatggtttttccaatgttatcttctagaatttgtatggtttcaggtcttagatttaagtctttgatccatcttgagttgatttttatataaggtgagagatgaagatccagttttattcttctatatatggcttgccaattatcccagcatcattttttgaaaagcatgtcctttcccaattttatgtatttgtttgctttgtcgaagattaattggctgtatgcatgtttagagcatcacaattcgcaattgcaaaatatggatccagcccaaatgcccatcaatcaatgagtgaataaagaaaatgtggtatgtatgtgtgtgtatatatatatatatatatatatatatatatatatatatatayaccatggaatactactcaaccataaaaaggaatgaaataatgtcattcacagcaacctagatgtaaatggagactattattctaagtgaagtaactcaggaatggaaaaccaaacatcatat

SEQ ID NO: 113357 - DNA, 486 bp, Homo sapiens
atggggtctcaccatgttgaccaggctggtctgaaactcctaacctcaagcaatcctcccatctcagccacccaaagtgctaggattatgtgcatgagtcactgtgcccggcctttactaagtatttttaatatcataatgattgtttgcattctgcatgggtatgttataattgactttatataagtcccctttatgggatagttagattttccccctccccaaatttttactattagaaacaatatttaataacaccacctgaggtaattttttcaaaaatattaaaacttaatctaatatttcctagcaagcagaaaaaaaactatttgaaggaaattaaaaataataataataaatagaaaattgtaaggctgaatctaataaaccrtctagctccaacttgaaggttataggaaatgaaaccatatgaaaagtccacgatgtgggacattttatagaaaaattcatctagtatcttcaaca

SEQ ID NO: 113358 - DNA, 623 bp, Homo sapiens
agtttatatttgtcagtgcataaaacagtatctggcatgtaacaattgctcaaaaaaaaaaaaattggctattaccgggttaattttggtgagaacagctattttgctacaaatataggtaacaatagttaacttcatatatctgaaagaagtcactgttatttttccaaaaattaaaacacctatttttatgtaagatagaatatttaattcagaagactaatcttagctattttgtaagatatatcrccttttaagaataaccaagaggacaatgctttagaaataaatcctattttataaatcttttaaattgaagacttggcacacagtctgccagtttcgaattacacaaaagcttgatttagtgctgtttatttatttttctatcatgactggtcatcgtatatgtgagatccttatgtcttaaataccatatacggtcgacatttttgcacttataagaccagaaaaattatttatccagtgatactatttatttagtggacccctgacattataattcatctataatatgatgtgctagtatttgtgctccattgtgctctcagtccaatagaattatatatctagattatatatattacagatatagattatat

SEQ ID NO: 113359 - DNA, 506 bp, Homo sapiens
atgtagaaaaaccaaagtcaagaatagagaaaaatatcaaaaaactgggaagaaatggagcctctggcacttatagatagagcaaaaattttttaaagcttaatttttagtcatattaattaaatactcacacatggttctatctaccttatttctcattacttgatggaaggtgtacaactttcaacatcaaatgataaggcacgccaaattcaattgaaaacccaatcatcagaataaaactaaaaaatagcagaaatgttggaattatcagacagsgaatgtagaaatagcaataattactatgttaaaggctctatttaaaacattacaaaatgcagtaacatacagtcattgtaagcacagaaatagaattttaagtaacagccaaaattaaattttataaattaaatataaaaagattataaataaataaattttcttatgaaatattgggatgtcttgacatggataaaaaaggaattggtgagcttaaaatataggtc

SEQ ID NO: 113360 - DNA, 351 bp, Homo sapiens
ggatgtgagcaaaaacatataccttcatgccacttttggtgtgtgtgcagatggggttatatttcctgactatcatatatggtactccccttgaaaattatgtatctgcttatttagactaattatgtatctacatttttagactaaaaaatagtattacctatttttttcatctataactccagtgaaattactggaataattacactttgaaggcattccagctgttcagtatttatcattctgtgtatacaaaataatatcataacytgtttaatatatttccatatagagctcatcaccaatatcacttctcagattattatagtcatacatattatccaccatctc

SEQ ID NO: 113361 - DNA, 570 bp, Homo sapiens
ctcttttcttaactaatggaataaattcctaattgacttttctgattttttacatatgctcttcactgtgttctactttcagcatagcaaggagattgataattttagaatttggattacttagagcttacaacatatcagctcaaagcaattaatgtctttctgtgccagaaaatattcttkcatcttcctgtgctttctcaagtactgcaaaggctaaaataccggaaccttaatttcttagattctttgaaaatcaagcttcaggttaaatgttgctaatgacaagtactcacataaaattttggaagtaaaagggaattaaatcctacttgtctgatgtctactgtgggcatgtatgtgtgctattcaataagagaaatatgcgattctgtcagcagctcccatgcgtgtttctagtaaccatctagtttgatattgaaagcaaccaacgtcattaatcattgtttccctatgagtcctacaatgtccaatgcctgaaaactaaaaatagcctctttgattgttcattacaatggctttacattatcaaaattcctctattaaata

SEQ ID NO: 113362 - DNA, 570 bp, Homo sapiens
ctcttttcttaactaatggaataaattcctaattgacttttctgattttttacatatgctcttcactgtgttctactttcagcatagcaaggagattgataattttagaatttggattacttagagcttacaacatatcagctcaaagcaattaatgtctttctgtgccagaaaatattcttgcatcttcctgtgctttctcaagtactgcaaaggctaaaataccggaaccttaatttcttagattctttgaaaatcaagcttcaggttaaatgttgctaatgacaagtactcacataaaattttggaagtaaaaggraattaaatcctacttgtctgatgtctactgtgggcatgtatgtgtgctattcaataagagaaatatgcgattctgtcagcagctcccatgcgtgtttctagtaaccatctagtttgatattgaaagcaaccaacgtcattaatcattgtttccctatgagtcctacaatgtccaatgcctgaaaactaaaaatagcctctttgattgttcattacaatggctttacattatcaaaattcctctattaaata

SEQ ID NO: 113363 - DNA, 589 bp, Homo sapiens
aaacatgcaattgattctctatattcagtttgtaacttgtgattttattaaactgcttartcattctagcaattttcttgttttggttatagaaatggtttggctctgtgtccccacccaaatctgacattgaattgtagctcccatgttccccatgtgtcatgggagggacctggtaggaggtaattgaaacatggaggcaggcttttcccatgctgttctcataatatgaataagtctcatgagatcagatggtttataaaaaaaaagttcccccgcatatgctctcttgcctgccaccatgtaatatgagcctttggcttccaccatgattctgaggcttccccattcatgtggaatggtgagtcaattaaacctctttcctttttaaattacccagtcttgggtatgtttttatttgcagcatgagaacagacgaatacagttatgattgttgcttttcatttctacaaaaacagccatgtcatctgagataaagaaaattttacgtttatattttccaatatgtataatttctttttaactttaatagactacctagacccttctctacagtatggtacagtaa

SEQ ID NO: 113364 - DNA, 636 bp, Homo sapiens
taagtgactttggaaatgagtaaagtctatgaaacaaaaggcaacaggaactgcccataaacactgtactctagttgataaagttatatcccaaaaataagggctaccaatgctgatactacttacatgtacactggaattgaacaattaaatgaatgtcagatggtggaatccaggtttctcactgtggaagtgagaatttatagacaaacaaggaggaggctagaatgatatatgtggaaaggaattagagttagagacatcagtgtgaactcatgtttagcttaatatggaaataaatggtaacatayataaatatttatagatacatgtatatatgaaggttagcatatgtccctatattcccttgctgtgtcagctgtgcaggtctaatgaaacaacatcccagtagcaatgaggacatgtagcacccagatcttaggttctaatatcattctccagtggaagaagccagggctcccctggagaaatggctaattctagtactggggcaggaaatatacatgataagcctagagtatcttatagagtcagatagtaaggaagtgtttaaaggaaaaccccatattaatgggagtgtgtcaaaggcacccaggagccactgaaaaaagttcc

SEQ ID NO: 113365 - DNA, 629 bp, Homo sapiens
ggtcaggtaatgaaaagtcatctttaatctccctcctttgactcaacagagggaagcccaattctgtcatgaaaacttgggacataaaattgagaccagtaaacatttttaaaaccttattagccaactcagaaagaaaatccataattaataatgtagacatccaggcaggaatcatgtgatcctgaagtacccagatcagttcagctatttttctctcaatttagagacaaagagagaaagaagtcctagaaaaagctagtggccagattacaactcctgttgcctttaggtgagataccactcacctctcccactgttaatacycaatcctccagaggtttcttcctgactctacaatttttcagttgcaagagaaatgggctcattgctgggaaagaattaagattgtaggatgtaacaacttttatggcaggatacagactttcccattaatatccagaattatctggtcaagtttgaaggaaccagagatgaacagagaaatagatctgatttagagacctaaaatccaccttcttggaagtttgatatgggaaattggaagtctaataggaaaagaataaaaaagatattatattttgaaatacctcctgatatagtttgga

SEQ ID NO: 113366 - DNA, 642 bp, Homo sapiens
agcagagctgccactgccacagacagttgyccagagtttcctttggaagttgtaggagaaaaaactgctgagagtacagatttaagataccactgatgagaggaatcacagggagtagccaagagaaagagaggtaaacccatgcaaatcctctaagccaaagctctttgaggacaaccagcaatggcaccaagggaagagtgaaaggcagctcccattgttgacttgctattcacagagcaggtgcgggttgtgacattcatgctcagcagaaagacagaataatcattttatttgcaaggggcatctaattgaactgaagatccagaaattctggaggtatactccatgaagaagccatagagaaaacaattataatccagccacctgacactcttaagagtgtcaacctggaaaagagaattatagatgcttatgttttaagatagactttgaattgttataactatttatctatgaccatcactgatataactgcatccacagaactctgcaatggagatgagtgtaagtaacacattttataggcagagaaattatagcatagagcatggtgggagccacattgcaaatcaggcctccaatcagttaccaagccaagaatagacccttgctgctatt

SEQ ID NO: 113367 - DNA, 445 bp, Homo sapiens
gagaagaagaaggagaaggaggagaaggaggaagaggaggaggagagatgggggacgaggaaaggaggaagaaggagatgagaaggaaaaagaaaaagaagatttgttcatattgttgaatataacagaagtttcttgttttttgaggctgaatagtattccattctatgtatatgctatattttctttatccagtcatctgtcaatagacattcaggttgttttcacatcttgactattgtgtaaggcaatgaacaaaagagtgctaatattctttgagatcattatttctattcttctgggtaaatacacagaagcaggattgctggatcatatggtagttctatttttatttttytgagaaatctcatactgttttccacagcagctgcaccattttgcattcccaccaacaatatgcaaaagtccaaatttcttcatctca

SEQ ID NO: 113368 - DNA, 526 bp, Homo sapiens
cagaatttccttttattaaagcaaaaagttcccaagcatgaggctgtatgttgagcgaacacctttgactgctctaatttctcacttctcaagatttcctgaactcgatgggggacaaaaagaccaaaaccaaacttggaggaaataaaattaataatttttttctctaaagaaaacatactgagcatatatctgtatacggtgctagtgacaatcttataaacctcaaaagacaacaattttgctttcttttctttgtgcacaggggttttaaaaccttacaatgctggccggacgyggtggctcatgcctgtaatcccaacactttgggaggttgaggcaggtggatcacctgaggtcgggagttcaagaccagcctggccaacatggtaaaacccatctctactaaaactacaaaaattagccaggcatagtggcgagtgtctgtagtcccagctactcgggaggctgaggcaggagaatcgcttgaacccaggagatggaggttgcagtgagccaagcaaga

SEQ ID NO: 113369 - DNA, 487 bp, Homo sapiens
ttccctcccacacacacttctctgaaaatatttccctcatgccaggtgaccattcttcctgggtctagctctgaaaacactctgggccgctcctctcctggtggatgaaggccgtgagctgggccagtccagtgtagcgtctatcggccttagacgacctggagccagggattactgaggatgaaaacactctgcggaaatatgcaaaacctatcacctgatgcggaggccaccaggctgtgtacggagtgtgagtaaaggccgtcatcctcgagccgctgattggagctccatgragctcctcctgccaatactccactcaggtgagccacacctgcagcgtctcatgggctgatgctcgccctctgccctgcttcctgtgttatcaacacagctgatcttgtctgccatttaggaactaggttatttgatgagcctaaatcacacaaacacgcaactctctgagttctgttaccgaaaatagtgt

SEQ ID NO: 113370 - DNA, 567 bp, Homo sapiens
gcgtcagtcatacatatttgttaactggaattaaatttcagcagaagaagaagttatctaagggcccacgcgtgcggcatgatgagatatccctgattaagaaatgtagcctggctgtaatgcctcctggaagactaagtcaatcgaarcgttggttttagtttacagttgttgcagatgcaaagaccgcatgtactctggctcctgtagaaactccaggaacattaagtaagaccaaagtctcacaccttaaatgcagcaacgcttgcagtttcagactctcagtgaagtgtctgcgtcctgagcagtgacccagcacctacacacccctctgcagcgatgtccacccacagttgaggggttcatgtagcacagctgtgctacaagcttcttctgcaagcttcagagcaaacctaagtgtttaggggcctacaggaccaagactcattccacagaaactgagaaggtgtgggtgcaaggtactgagtcatttacaaaaggtttattttgcatgcaagatgagaaccagaatgcgaaaacagaattggaaactgtcacacaagagaa

SEQ ID NO: 113371 - DNA, 591 bp, Homo sapiens
aaaaaattgtaattcatgtaaagaaaacagcttaaatttctgatttaacttaatgtaattttctcttacttgaaggtaagctgcatgagtacaaagactttcggatattatccacagcacatataatggagagaggtacatattaggccctcaatgcaaatatgcagtgaatgaatatacagagaatgaatgatagaatcaactagttatgatgtaatgaaatgaccgaatactattggagagaagccagttggaggggcaggaaaaaagagagaaaacaaggaaaagagtatgatcatggaaaggagggaagaaaaaagaaaaaaaggagggaaaagtagtattatgaattttttgtcttctttaaaaaagctattacattgtatataaaaattcataagcaccaagctgaattccttttcccagttggaacaaaaaagattcttatgtcaatttcaaattgaaaatctcattcaattcttcaaacagttggtaacytgaatgtttataatatgaataaaaagtatgatgattttgaaggaggaattgagtttttaaaattcaggtgtctcaaatgggaatagaagagca

SEQ ID NO: 113372 - DNA, 556 bp, Homo sapiens
gattttctttcctaccaccaaatagataaatcttttttagcttgctcagttcaagttttggcataactcttactaacacatcacaaacaatttagttcagttttgtcttargttaatcacactgtaatattgataactattagtctgacaagaatgagagaaaccaaagctaccaaaatccagtattattgtctaataaagtagtacgaagcatataatgcttatatgaaagggacttagtgaaatttcatgttttattcctaaatgcctcagaggttttacatgaaggaaaagttatcaaaagttataaaaaataaatctccttaactccagaagttattggttgcacaaccttatgttttataatcaatactggaagagcaaaggtaaatttaaaggacacatttctaggagttttatttaaatgataatagcacttttgaaggatactgcaactaagcaacttttttttttttctgtgaatggggttttcttttaagttggagttaagaaaatgtcacattaaatattttaaatttcttattttgatctttat

SEQ ID NO: 113373 - DNA, 556 bp, Homo sapiens
gattttctttcctaccaccaaatagataaatcttttttagcttgctcagttcaagttttggcataactcttactaacacatcacaaacaatttagttcagttttgtcttaggttaatcacactgtaatattgataactattagtctgacaagaatgagagaaaccaaagctaccaaaatccagtattattgtctaataaagtagtacraagcatataatgcttatatgaaagggacttagtgaaatttcatgttttattcctaaatgcctcagaggttttacatgaaggaaaagttatcaaaagttataaaaaataaatctccttaactccagaagttattggttgcacaaccttatgttttataatcaatactggaagagcaaaggtaaatttaaaggacacatttctaggagttttatttaaatgataatagcacttttgaaggatactgcaactaagcaacttttttttttttctgtgaatggggttttcttttaagttggagttaagaaaatgtcacattaaatattttaaatttcttattttgatctttat

SEQ ID NO: 113374 - DNA, 605 bp, Homo sapiens
aaaatttaaaagtaaagaacagagatagacaatttagaaattttcataaaaatacaaggttaaattctgtaccaatcaactggaaacttacatctggaatctagaagaatgatcaaagtcagaggtaaatattggggagttattagkagatacacaacaaattatcttcaatattaaaaaggaagaataagtagtggctagaaaagtataaggactcaatttggggtcatgactgtcattatttttactttgagggaaattggacagtgaataaaactatgaagtgagggagcaaaaaaactgaaagaaaagagtgacagaaatcaatggcaaggttttcctacctttcttctcaatgttaataatcattaaatcagtcataaaagcagacattttcttttttaaactatatttttattgtggtaaaatacatatagcataacatttgttattttaatattttttatttgtacaatttactgccacgaattacattcataatgttgtacaaccatcaccactatctagttccaaaatttgttatcaacccaaaccctctactgtactcattaggcaacaacttcccaattcgctttaaccccagc

SEQ ID NO: 113375 - DNA, 605 bp, Homo sapiens
aaaatttaaaagtaaagaacagagatagacaatttagaaattttcataaaaatacaaggttaaattctgtaccaatcaactggaaacttacatctggaatctagaagaatgatcaaagtcagaggtaaatattggggagttattagtagatayacaacaaattatcttcaatattaaaaaggaagaataagtagtggctagaaaagtataaggactcaatttggggtcatgactgtcattatttttactttgagggaaattggacagtgaataaaactatgaagtgagggagcaaaaaaactgaaagaaaagagtgacagaaatcaatggcaaggttttcctacctttcttctcaatgttaataatcattaaatcagtcataaaagcagacattttcttttttaaactatatttttattgtggtaaaatacatatagcataacatttgttattttaatattttttatttgtacaatttactgccacgaattacattcataatgttgtacaaccatcaccactatctagttccaaaatttgttatcaacccaaaccctctactgtactcattaggcaacaacttcccaattcgctttaaccccagc

SEQ ID NO: 113376 - DNA, 605 bp, Homo sapiens
aaaatttaaaagtaaagaacagagatagacaatttagaaattttcataaaaatacaaggttaaattctgtaccaatcaactggaaacttacatctggaatctagaagaatgatcaaagtcagaggtaaatattggggagttattagtagatacacaacaaattatcttcaatattaaaaaggaagaataagtagtggctagaaaagtataaggactcaatytggggtcatgactgtcattatttttactttgagggaaattggacagtgaataaaactatgaagtgagggagcaaaaaaactgaaagaaaagagtgacagaaatcaatggcaaggttttcctacctttcttctcaatgttaataatcattaaatcagtcataaaagcagacattttcttttttaaactatatttttattgtggtaaaatacatatagcataacatttgttattttaatattttttatttgtacaatttactgccacgaattacattcataatgttgtacaaccatcaccactatctagttccaaaatttgttatcaacccaaaccctctactgtactcattaggcaacaacttcccaattcgctttaaccccagc

SEQ ID NO: 113377 - DNA, 568 bp, Homo sapiens
agctgtcagtggatttaccattttggggtctggaggatggtggcccttttctcacagctccactaggcagtgccccagtggggactctgcttgtgcactccaatgccacatttccccttcagactaccatagtagaggattttcacgagggctctgcacttgcagcaggcttctgcctggacatccaggcatctccatacatcctttgaagtcaggtggaggttcccaaacctcagctcttgcctcctgtgcacccamaggctcaatatcacactgaagctgccaaggcttgaagcttgcaccctctgaagccatgaccagagctgcaccttggccccttttagccaggactggagctgaagtgactgggatgcagggtgccatgttcttacggtgtacagagcaggaatgccttgggcctggtccacaaaaccatttttccctcttccctcctaaacttccagcctatgatgggaggggcttctgtgaagttctctaaaatgccctggagacattttccttattgtcttggctattaacattcaactcctctttgcttatgcaattt

SEQ ID NO: 113378 - DNA, 621 bp, Homo sapiens
ctggtaggaacaaattccctcagcatttgtttgtctgaaaatgactatttctccttcatttatataacttgcttttgctggacacaaaattcttggttggcagttatcctgtttaaggaagctgaagacaggaccccaaccttttctagtttacaaggttactaataagaagtctactattagtctgataggttttcctataagactgatacttttgtctcattgctttcagaattatttccttaatgttgactttagatagccaaatggctatatgccttggtggaaatttttttggtgtgtgtgatgaatttaccaggagttctttgggcctctcatatttcagtatctaaatatctagcaagacccaagaaattttactcagttattccctcaaataagtttttkttttttttttttaactttttggctttctcttctcccttgagaaaaccaaatagtcttaggtttggctaacacgatctcacattgcttggaatctttgttaatttctttttgtttttattgggttaatttgaaaaccttgcctttgagctttgaaattttttcttctacattttctagcctatttttaaacctttccactgcattttgtaattt

SEQ ID NO: 113379 - DNA, 629 bp, Homo sapiens
cacatctcttggtagcatttaccccaggtagacctcaggccacaacaggtacttcctggttgtcttaaaaaagtatacattatgataatcctgttttgtcaactcagtatatcttttaaaaggaccaataaagctctcttagggcaagaaataaaggtcattatatttctcctcaacattcagcatagttaaaatgtattgaaattaagtgagtcagatctgatatattttgggatcatctagctcacaaaataaagtctttacaggataaaatcaaagccagtaactgtgtaaagtaaaattaagacaacagcataattattcactttattcattaaaactttaagattttattttaaaaaagatcttatcatggtttgcatgatcatattaaaaaagtataaagagaagataaagatagagaaaagagagagaaacatggaatgactctaattgctaattatgagatgtcataattgctaattatatgccagagataccrtcattgaaattcctacattccgttagaattaaacacagagcccctgaatttccatacaactttacaattcaaagagcattctatattgaatttgctgtcatttattgctgttgatttcaccttattc

SEQ ID NO: 113380 - DNA, 598 bp, Homo sapiens
atgaagtaaagaggcactgaaagggtagaagagtcagtcttgaattgctgaggacacttctctgcaatccctttgcagtggccatgtggcatggagagaaaatctgtgtccttgggggtgggagagcacagttattgtgggtctttatattggaacccagcactgctagtcacagtagaaagcaacacaggggagaatttagctggtgcccatgcaggagcgtttagatcagccccagccagaggggaatctttcaatccagtggtcagaacctgagctctggttagacacaccacagtgggctacggagatatggggttctaaataaacttgaaaggcagtcytgcccagtgagatgacaatttctgggcaaatcctagtgctccgctggactcagagtcagcgggcttgggctacacacgacctagtgagacacgagcttgggcagccaagggagttcttatgcaatccctcccccaaccccaggtagtgcagctcacaactctgggggagacgttttccttttgcttgagagaagagaggaaagactgaaaaaggaatttgtcgtggagcttgggttttagctcagccacagtag

SEQ ID NO: 113381 - DNA, 617 bp, Homo sapiens
caatttctgggcaaatcctagtgctccgctggactcagagtcagcrggcttgggctacacacgacctagtgagacacgagcttgggcagccaagggagttcttatgcaatccctcccccaaccccaggtagtgcagctcacaactctgggggagacgttttccttttgcttgagagaagagaggaaagactgaaaaaggaatttgtcgtggagcttgggttttagctcagccacagtagaatagggcaccaggcagagtcacgaggcccgtatttcaggccctagctcccagatgacatttctaaacacaacctgggtcagaagagaacctactgtcttgaaaggaagaacccagttctggaaagatttatcagctgctgactgaagtgcccactgggccttgaataaacaccagcagtagccaggcaggactcaccatgggcctacagtgagatccagtgtcatgctggcttcagatgtgagtgagcacattctgagctatgatggctatagagagagacctcttctgcttgagggaaggagacaaaagattaaagagactttgtcttgcagcttgggtaccaacacgaccacagtgagatagagcaccaagcagg

SEQ ID NO: 113382 - DNA, 619 bp, Homo sapiens
gaagggtttcataaaaggacaatcctgaacgttacggattttattaaaaccatatgttattttttgttgctaatcatttgacacttaatcgaaacagaataagttactgtggaaaaaaggatgatccaactcctgaggattgccrcctgtgtgtctttaattgattatctttgatagttagagttatttttcagatttttccccctcatactggattgtgatgctctgatatgagcatgcaatgactgatacagaaataggctggagcttcggtgtgtgcttttgctatacagcttacagttctaatgcctgatgtagagatgatgaatttctcctttttaaacctatcttctgtttactccttttgcattatgaaggccctcttcaatgatgtatgtttctgatggaatcagaaaatttcacactagaaaagtgtacctaacttgattcagtgtgagctcttgggacagggaggggagccaggggtagagcttaaagaagctggctctgtaagagttgtatatcaaagtaccttttgctacaaggtgcatatagaagtctaagataagaaatgtaccctctatactttatttttcatgcccctatcatgtttggtgtg

SEQ ID NO: 113383 - DNA, 608 bp, Homo sapiens
ggatgtgccttgcttttcagagaactgccctctgctttttaggcacccccctgccaactccacatccatggaaaaaatttgacttattatggttgttttaaaagagacattgttgacttcagacagaagctagactgcaatctaaggacccagaagtgagcagaacttctaagaagtgagtcaaaagtaaagcagcccatataccgtcagtgacaaagtcaaaaaataaaagcctcttaaaaatattttttgaagtcatacatgacattctatttctccaaaccatttacctgtaagtaacttttaaaaatctcccccaagaaagtatgcagttgaatcctacaatatgaggaatttgaggctttaattatgggaagataaatgtagggaaggggatcayaggattctattttcctccctcagcacctaagctactgagaggcactcaactacttcagtcaagagggatgcaaagaccccccaagctagcttttgaatccataagacttcttggtagcgcaatatatgaagcttttccatgagggcttaggaagagaaagggacccatgtttcataaacttctctgcaaacacaattaagttgccaaa

SEQ ID NO: 113384 - DNA, 492 bp, Homo sapiens
ttaatatttctcccagttggggtttgatggtgatgaatgattttggcttttgtacatctaaaaaagtatttattttaactcagcaattaaaaatttttttactgggtgtggaattcattttggcaactttgtttgttttagtacttaaagacattgctccactgttctgttttcctataagaaatctgatgtcatctttacttttgttgctctgtatataatgtgtcctttttctcttgctgatttgaagttttttttcaagattttcattatttgtgcttgattcttgcccttggtgtttgttgggcttcttgaaatttgggggttataatgttcattagattcggtaaaattttggccattayttctatgaacattttttgtcatttccctccctcctgactcccactttggggactctgattatacatatattaggttacttgaagttgtcacacagctttctgatgctttgttaattttttaaaaaac

SEQ ID NO: 113385 - DNA, 567 bp, Homo sapiens
tgcccttggtgtttgttgggcttcttgaaatttgggggttataatgttcattagattcggtaaaattttggccattatttctatgaacattttttgtcatttccctccctcctgactcccactttggggactctgattatacatatattaggttacttgaagttgtcacacagctttctgatgctttgttaattttttaaaaaaccattttctcttactattttatcttgctatatcttcaaattcactaattttttcttctgcagtatcaaatctgtcacaataccatctgctgtattttytcaaatcagatattgaaaattttatctttagaagtatgatttagatctttaaaaaatcttctatgtccctacttgaatatatggaatacagttataaatgctttcatgtccttgtctgataattctaacatctgtgtccattctgggtcagttttgattgatcattctcattatggatcacattttcttgcttctttgcatgacttttttatgatattctggacattttaaattgtcttgctggatactatatatttttgtattc

SEQ ID NO: 113386 - DNA, 638 bp, Homo sapiens
ttaatttcatgccctgcagtagatctgctttcttctctagtatgaatggcaactgtctccgattggtgacaagaataactcatttcctcagggtcattacactctagaaacttctccattcagaaagtcgattgcagattgctggcacaaccagatctgctgcacaaatatgctgagtgaatagactagaaactgtttcytctcttaaccttttttaagatatggttttggtttctcctttgtagtggggtcagtctaaactctgaagaactgatatttaggtcaacatagactttctctgtggaattcctcaaagaaaaagatgactagagatgttagcaaacataaaaagtcagtatttttaaacagtagggaatctggttgaaggaaaatttgtagtgggcttatttttgcctggaaatactgttaagggtatattaataatctcttccttgcctaaattgtagcctttggaaagatgaggtgaaacctattttgacaatgagattaatattgcactaggaagctgatagaaatatttagaacaaaaagaacaaaccctttccatttggtctgctccattattggcctggctttgagttagaataatgagaatcaaaactgccagaaatacatgt

SEQ ID NO: 113387 - DNA, 610 bp, Homo sapiens
gtgggtgagaattgcttcctctctggccattagttttcagaacaatggcccaactgagaagggctgttgtcagagggagcagcaaatattacctgctgagggtcaggggtcttcaagttattcctatcctttttgatacaaataggcctatgctttacgcctccttctccccatgttacgaaataaatgaactaattatgtgttgctttagactaattaaccactattatggcctatttaaatgattttttaaatgcaagtaaaaaaatgcaaacaaaaccaagttgtaaaaggcctttaagaaaatgaagagagataaaaatgttgaatcttggttctttagacctacacatagaaaaagaaagtaaaaggttttctagtgcagctctctcattatgcaaaatgagaaaatgggattcaaaaagcaaaatgacctgctscaggtcacacagcttcttagagccagacattttatgaaaaatccttgtttcttaaatctggggcaatttgagctcaaaataagtgatcatagtatactctaaccaggtgaataaaataaaactctcgattccataccatactgatataagcagataaacaaattggtaag

SEQ ID NO: 113388 - DNA, 562 bp, Homo sapiens
cccacaagcatgcttagtggcaccgcatattgtcttgtgcttcattctgtgtcccactgggttggagtgctctcacagcaggactgcctgagtccctttattttccagagttgaggagaaaaacttcttcatttttatttcctggtcacattgttctcccacactgagtccagtagggcctccactaggagcaatgctcarggctgtgcctagaattgttcttccctcttgacggctaggacttttcttcagctgccacgggctgtacctggcttcttttctcagaaggcttctccttctctcaggcaactccttctacctctcaaggcgctgtgctaccctgtcccactcattttttcagatatcctagggcatctgtggagactttacttccttcttcccttgccccactgccccagcctttcctaatattcattcattccacagacttctttgaagaatatttgaactatatgaaatatttttcaagctgtcaaataaaattgtgttttaactccaagcagtgctgaaaacatcccacaacttaaaaccctgtaaccct

SEQ ID NO: 113389 - DNA, 562 bp, Homo sapiens
atatctgtggtatatcaggagtggaggagtgggggcaaggggaaaagttgggactcagacctctgaagaagrggcattctaggtggctgctggcatctctgagggattataatgaggctagtttttggaatgcaaaaacaacaaacaagaaacaaatcaaaagagaaaaataaataaatatataacagcatgggcactggaacgaactactgctgccaaggtgaagggattgccgtggggagacacggagtaacaggaagcacgcaggaagactgaaatcctatctccccttctcctgctctccagtttcccaacggcaaaacctgacagggggccaggtggcaagagaacaaggttgtcttcagagttgcagtcccagcatcacaaagctgaggatagaaaggcaaacttgaagctgacagataatagtattcatcatatctacaaactgtcatctcttatccctccagcctcagctagaaggccctctcctgaccccagagatagggctaggtaagtactcccttctctttgttcttgtgtgttctgattaggagcaagg

SEQ ID NO: 113390 - DNA, 610 bp, Homo sapiens
aagtactgccctagctttgttgttactagttcatagtttatctgggaatttatcacttgaaaattttgctgccaaaataattctaacacctggtattataatcaagtacttacttacagtttctctttctttctccctcctcctaccctccctccacctctttatctttttctaacacttccatctcatttgtcccttctcctctactccctctttcttttttagttctctgtctggcctctcttccttcagtcctccctactttctaccttatctctctctctctttcttccttttctcctaagctttcttctctccattttcatcttcttagwgctcctgtctaggtaaacagttaatgtacagggaaaactctgtatttagtcagcctgaattacaataatcaatttcttcccttatattgccatcaggaaatgcctcctaaggtatattatactagttatgctttattttcattggcttagaagtgtaagatcttctggggtgatgtcccccagggctattaaagttgcccaagtttgcttcagttgctcctggtttactatagattaagcctggaagaaagaaaaaatgtagctgtgattattgc

SEQ ID NO: 113391 - DNA, 557 bp, Homo sapiens
ggctttgcgcccagtcctaagtagctcagtgtgaaagtgacagagaacagtgtctcccacatacacccatgtcacctagcaaggagcccctgtggttggacacaccagtaagatgtagttcaaagaatatcaagtattagtctgttatcagtttatcaaatgagtaaaaagaggaacagaaggaagatggccgaataggaatagctctggtctgcagctcccagcatgatcgatgcagaagacgggtgacttatgcattttcaactgaggtacctggttcatctcactgggattggttggacagtggatgtagccctcagaggctgagccaaagcagggctgggcatctcctcacccaggaagtgcaaggggtcaggggatttccctttcctagccaagggaagtcgtgacagatggtacctggaaaatygggacactcctgccttaatactgcacttttccaatggtcttagcaaacggaacaccaggagattatatcccgagcatggctcagcaggtcccacgcccacggaaccttgctcactgctagcgcagca

SEQ ID NO: 113392 - DNA, 604 bp, Homo sapiens
tgaggtggagctggggttgagatgatggaatcttgaatttacttgtctgcttccaaatcctggctgctccacttaccagccattaggccacaggcagtccacctgatttgtytgggccttggtttctccactcatggatggtaataatgactgcacctacctcatgagttaatacatgtgggagagtgccatgtcttccacacaataaagatgtgcagaattgcaggaggcctagataagatgattcacacaggaccacttcagaaagtagcaaatgtgctttaatggtgagttctaaagaaaaacagggtctcgtcccttgcaagacatagatggggtttctcagctgagtgaggcatctgtggcacagccaggagtttccacctgcacatttgtgtactagagtcccaagcagtaatcaaacatgactctttaggccacaggtcagcaatgtgcccatcaaagaccaaatagtaaatatttgaggctttgtgggccatgtggtctctgctgcaacttcaagactgctgttggcatgaaacacagccagagacacaaggtaaatgaatgggtgtcactgtgttcgaggaaaacttcctttatg

SEQ ID NO: 113393 - DNA, 361 bp, Homo sapiens
ttctaaacattaaagtttctccacactgtactccttgtcctccttccctgctttattttgcatcatagaatgttctcatcaccacctatacacatgcatattcttatacatagccatgttctcacccatacatgcacagatcacctgcacatatgtatacacacacatataattcatttactttgttttatgccttatctttctctaattgacaagtgcytttcacactttaatctgaggactctgctaaaatgcaggggctgaatttttaacacggagatgccgctggttcatggaccacactttgagaaccaagtctccagaactgtgctaatgcatagtcactagccacatgtgttta

SEQ ID NO: 113394 - DNA, 604 bp, Homo sapiens
ccttaaatacgtgtatgaggaaagtcctccctccccaaaatagaaaacctctaagaagacacttagaacaaagtctcccagactaggtacgtcgaacaaaaccttccatccatcccattggctgttttctctacaccctggtttgaatctcccccaggaaatgctccactgttagtcaacawggatatgttgtcattggaagatcagggtgaaaatatacctggtataggcaggcattacggtacggcagaggcccttcctggggcaaaactacttgagtctttgttgccccagtgttcccctctatcaaatgctttcataatattatctgtatcgttgtgttattaagaagattggatttcattcacagaagttaagcagttacaacagtgcctagcacaaagtgaacaagacatcagagttatatattatggtgcagacactaattcatgcatcagaaagaaattttcagcatattttatatgctagagaatgcttttgatacaaagacacaataatttctgacatttgttaagcacctactatgtgtcaggtagtgggctaaatgttttacatttgtcttatttcatgtcacagggaaaaa

SEQ ID NO: 113395 - DNA, 452 bp, Homo sapiens
actgcactccagcctgggtggcagagcaatactccatctcaaaaaaaaaaaaaaaaaaaaaaaagaataatactgccatgaaaatgggtattcaaagcaacgatatctccttgagacgctactttcaattcttctgggtacatacctataagtagaattattggatcctgtggtaattctcytttaaggtttttgaggacccaccacaccatcttccacggcagctataccatttaacattcccatccacagcgtacaaaggttcttatttcctggaaaatgccccatgtgcatttaaacatgtgcattctgtgtctgttgcacagagtgttccttatatgtctgttagagctagctggcttattgtgctgtccaagtcctctatttctttacctatcttctttctgcctagttattctgtctattattgagagtgaggcatgaaagtcgcc

SEQ ID NO: 113396 - DNA, 452 bp, Homo sapiens
actgcactccagcctgggtggcagagcaatactccatctcaaaaaaaaaaaaaaaaaaaaaaaagaataatactgccatgaaaatgggtattcaaagcaacgatatctccttgagacgctactttcaattcttctgggtacatacctataagtagaattattggatcctgtggtaattctcttttaaggtttttgaggacccaccacaccatcttccacggcagctataccatttaacattcccatccacagcgtacaaaggttcttatttcctggaaaatgccccatgtgcatttaaacatgtgcattctgtgtctgttgcacagagtgttccttatatgtctgttagagctagctggcttattgtgckgtccaagtcctctatttctttacctatcttctttctgcctagttattctgtctattattgagagtgaggcatgaaagtcgcc

SEQ ID NO: 113397 - DNA, 581 bp, Homo sapiens
cctgcagtaggaagtgaagggaacactatcagtagtgggaacctttttatttactcctacaacctgtgcttttctttctgagaagtctgttctcttatattcttacaagtatctagcatcttggaccactcagcttgtcaggttcctcttacrtcagtccgaaaaatacatgctgttacacagacccgcattcactgtgtagggaggagtagaagaggcagtgagtgcatattgtcaccaggtggttctgttgaatatattaagaaattcagacctacgactttaacttcccttcttcctggaggggcttcactggcaaacccctgcttcttaagtgaggagaggtcaagggcattccctaaattccaggtggaatctcttagacactaattagtaatggacacactgaggagctgttatctttcatcttgcaatccttgtagttgggctaagtgacttctagtagtgaataaattcaaacaagtatgaattagcggcaatagcaatttagattctattcaagttccttataatgagattctccttgaaaactttatggaaatcagtatgagtacatataa

SEQ ID NO: 113398 - DNA, 581 bp, Homo sapiens
cctgcagtaggaagtgaagggaacactatcagtagtgggaacctttttatttactcctacaacctgtgcttttctttctgagaagtctgttctcttatattcttacaagtatctagcatcttggaccactcagcttgtcaggttcctcttacgtcagtccgaaaaatacatgctgttacacagacccrcattcactgtgtagggaggagtagaagaggcagtgagtgcatattgtcaccaggtggttctgttgaatatattaagaaattcagacctacgactttaacttcccttcttcctggaggggcttcactggcaaacccctgcttcttaagtgaggagaggtcaagggcattccctaaattccaggtggaatctcttagacactaattagtaatggacacactgaggagctgttatctttcatcttgcaatccttgtagttgggctaagtgacttctagtagtgaataaattcaaacaagtatgaattagcggcaatagcaatttagattctattcaagttccttataatgagattctccttgaaaactttatggaaatcagtatgagtacatataa

SEQ ID NO: 113399 - DNA, 581 bp, Homo sapiens
cctgcagtaggaagtgaagggaacactatcagtagtgggaacctttttatttactcctacaacctgtgcttttctttctgagaagtctgttctcttatattcttacaagtatctagcatcttggaccactcagcttgtcaggttcctcttacgtcagtccgaaaaatacatgctgttacacagacccgcattcactgtgtagggaggagtagaagaggcagtgagtgcatattgtcaccaggtggttctgttgaatatattaagaaattcagacctacgactttaacttcccttcttcctggaggggcttcactggcaaacccctgcttcttaagtgaggagaggtcaagggcattccctaaattccaggtggaatctcttagacactaattagtaatggacacactgaggagctgttatctttcatcttgcaatccttgtagttgggctaagtgacttctagtagtgaataaattcaaacaagtatgaattagcggcartagcaatttagattctattcaagttccttataatgagattctccttgaaaactttatggaaatcagtatgagtacatataa

SEQ ID NO: 113400 - DNA, 425 bp, Homo sapiens
ccatttgctgggctgtggaagggtgaggttgagcatgtttgaagggaggatcagacgtttagttttgctgatggtgctaagtaggagaagtctcttagatgtccaagtggagagttgaaaggaggtatgatctgaagctgagatatataacttgggagtcatcagcatagcgatactgtttaaaacaaaatgtaattcatggagtagtatggggataagtttctcgtaagcataaactaagtactaaaaatgaataattgtaagagccactaaagggaagaacttgcgtaatggttaacwgtgacggtttgggctgggtctggcctctcctttccctccatgtctgtgtgcataccggatcataactaaggtaaattgtgtaattaatcatgtaatcagtgaatagtccattatgttttatatgg

SEQ ID NO: 113401 - DNA, 571 bp, Homo sapiens
taacataagatgatatttatctgtagacattatttgtttgttcagtgtttctgatctgcttaccatgtaattcctgcctctctttggtgttttaagctgcagaggataatgtactatgtccttttactctttcccagttgcctaarggtagcaggtgtctgatcattcatttgatgatattaactggcgtatttccaattactctagattaatagagtattgatcaaaaagctgttcattcaataataaacatgtgttaaatgtcttcttttgggtcaggagtggtcctgggaaatgaggaaacataagtgaatgagatttggttcctgacatgagaagattttgtggagcaaatcggacttcgttgaaataatgaaaatgaatttccattgattttgttgtattctttacaaatttgttaccacaaaggcatagaagaaattaaatatcccatgactctccctactttgaaatgtagttgtaggctgatgttagtatagactgactttggagcaaatgacattagattttacactgtcaaactttctataatataaaataaaaaaatagc

SEQ ID NO: 113402 - DNA, 571 bp, Homo sapiens
taacataagatgatatttatctgtagacattatttgtttgttcagtgtttctgatctgcttaccatgtaattcctgcctctctttggtgttttaagctgcagaggataatgtactatgtccttttactctttcccagttgcctaagggtagcaggtgtctgatcattcatttgatgatattaactggcgtatttccaattactctagattaatagagtattgatcaaaaagctgttcattcaataataaacatgtgttaaatgtcttcttttgggtcaggagtggtcctgggaaatgaggaaacataagtgaatgagatttggttcctgacatgagaagattttgtggagcaaatcggacttcgttgaaataatgaaaatgaatttccattgattttgttgtattctttacaaatttgttaccacaaaggcatagaagaaattaaatatcccaygactctccctactttgaaatgtagttgtaggctgatgttagtatagactgactttggagcaaatgacattagattttacactgtcaaactttctataatataaaataaaaaaatagc

SEQ ID NO: 113403 - DNA, 572 bp, Homo sapiens
gaagggagaaattggccaaaagaaaggaatagtaggccctatgcaagtctgaaacacagcagggcagtccttaaatcttgaatctccaaaataatttcctttgaccccgtgtcctgcatccaaggcacactggtgcaagggatgggctcccaaaactttgagaagatggggagaccgagtaatgcctggaattattgtcctgctggctggtgagataatgcagggtgttgggttgaagttggagaaaagaagatgaagaaatgtactctttctaatgcatgcatatctggtttcagatccatgcctaccgcagtggggccttccctgggattgctgagcatccttgcatattacacatttgccccacagactcattacaacccttaggcttggagccaatttgaaccatgactgtgaccctatttaagaatgtcyccgcccaggaactggaattatgaccaaaggtcccttctccagatataagtgaagcagccttccctgtggttatctgttccagaggttggcaaactagggcctgccaacaacatttggccaactgtctgtttatgctc

SEQ ID NO: 113404 - DNA, 572 bp, Homo sapiens
gaagggagaaattggccaaaagaaaggaatagtaggccctatgcaagtctgaaacacagcagggcagtccttaaatcttgaatctccaaaataatttcctttgaccccgtgtcctgcatccaaggcacactggtgcaagggatgggctcccaaaactttgagaagatggggagaccgagtaatgcctggaattattgtcctgctggctggtgagataatgcagggtgttgggttgaagttggagaaaagaagatgaagaaatgtactctttctaatgcatgcatatctggtttcagatccatgcctaccgcagtggggccttccctgggattgctgagcatccttgcatattacacatttgccccacagactcattacaacccttaggcttggagccaatttgaaccatgactgtgaccctatttaagaatgtctccgcccaggaactggaattatgaccaaaggtcccttctccagatataagtgaagcagccttccctgtggttatctrttccagaggttggcaaactagggcctgccaacaacatttggccaactgtctgtttatgctc

SEQ ID NO: 113405 - DNA, 507 bp, Homo sapiens
accctccatgttgacacaaaattaaccaccatatctgctttctcatccaccagagatcactgagtttcttttacttttccccaaactttattatttatttgkttttacttaaaataatttcttttcatttattctcaactatactgaccttttattctgctatatgtaaagtaccatttagtttagccagtgaacttagattttccataatcaaatttctaagagtagaacctctaaattgatagaaaaaaaagaactttgataacttagattatattctaaattgcaagtaaattatattgtaggtatgtaagaatagaaaggaaacaatatgtttatataaatgtgaaataaattgtttttcagctatctgctgcaccacttacctttttcccaaagtaatcattactcttcttgcatagaaataattaaatcaaatggtaaaatttaaacactataattttgaaattatatttacctacaagagttttaaaatactcactattc

SEQ ID NO: 113406 - DNA, 518 bp, Homo sapiens
gaattccttggaaatgggtacgctcagtttctttctttttttttttttttttttttttgagacggagtctcactctgctacccatgctggagtgcagggccatgatctcggctcactgtagcctccgcctcccaggttgcagcgattctcctgcctcagcctcccgggtagctgggattacaggcaggkgccaccgtgcctggctaatttttgtattttcagtagagacggggtttcaccatgttggccaggctggtcttgaactcttgtcctcaggtgatctgcccaccacggcttctcacttgatcttagccaaaaggccgagaagccatccaccacggcttctcaaagtgctaggattacaggcgtgagccaccatgcccaaccgtttctaacacttcacaaagcttttccatctgacagtggatttgaccagagtgggttctcttgcttctaatttcagcagcagttcatttctcttttttaatgtaacccttgagctgtgggggttgaaacct

SEQ ID NO: 113407 - DNA, 397 bp, Homo sapiens
gcccagcgtaggactccacagacacatttgtttggcgaacactccatactgcacagtcctgtaagacaatgcttgatgtgcatgcagatcacctggggatgatgctagctcagtaggtccatgtggggcctgagcatccgcattcctaaccagcgctccagtgacgcgatgctgctggtccataagccctattttgagcaacgaggcttctgagattctttctgcctcttggtgtattgaaggcactaagacatcttttcatgaacccaaytttatttgtctaacatggtcatttacaaagtgactacagcacaactatgggagcttttgggagcatttcaggaaactttgcactattagcctcatggtattttgctgcattatcaagcaagaattc

SEQ ID NO: 113408 - DNA, 635 bp, Homo sapiens
accaaaacacaataatcaatttacaaaatgggaaaattatctgaatagatattccacaaaagaaggcatacaaatggctttaaataaattgtcatcttttcaaatgtgaccagactactttgaggaacttatccttacttcataaagccaatagacttggaaaatgactaatctggtacctcgtctacatgatagccttacaggattcttatccttgtagttactaaataatgttagtttctgacagggttaggaatcccartatattttgggatcttgagaagagaggaaattaccgaatttatacagatattaccggaacagtctgaaggtgaatccttggttgggcttcgcagcctcaagagacttttaaatacctgacctaaaattccttattaaaaagttttagcaaagccaacttctaaaaagtctatatagtaagtaactattattactgtactttacaaaaataatcaggccaaatactaaacttactttgcaaacgaattagtcttaccaggattatctttggtaaaaaaatgggggtgactgtagagagaaaaaaaaacaggttttaggggaaaatgctatagtacacctattaatagactttacctcattgattttgagggttt

SEQ ID NO: 113409 - DNA, 635 bp, Homo sapiens
accaaaacacaataatcaatttacaaaatgggaaaattatctgaatagatattccacaaaagaaggcatacaaatggctttaaataaattgtcatcttttcaaatgtgaccagactactttgaggaacttatccttacttcataaagccaatagacttggaaaatgactaatctggtacctcgtctacatgatagccttacaggattcttatccttgtagttactaaataatgttagtttctgacagggttaggaatcccagtatattttgggatcttgagaagagaggaaattaccgaatttatacagatattaccggaacagtctgaaggtgaatccttggttgggcttcgcagcctcaagagacttttaaatacctgacctaaaattccttattaaaaagttttagcaaagccaacttctaaaaagtctatatagtaagtaactattattactgtactttacaaaaataatcaggccaaatactaaacttactttgcaaaygaattagtcttaccaggattatctttggtaaaaaaatgggggtgactgtagagagaaaaaaaaacaggttttaggggaaaatgctatagtacacctattaatagactttacctcattgattttgagggttt

SEQ ID NO: 113410 - DNA, 604 bp, Homo sapiens
aaattctgtcagattaccactatctgttctcatgccatccaaatatgcctcaagctgaacatctaacattcttctcaactggctgctttttggactcaaaaattgagtttatagtttgttctacccattaacctttgcttttctwttgtttacatagaaataccctttattaaatatctggttgctcaaatcatatagaggcctgacattggtagaagaccatcttcaacaccactgcctgaactgagacacagctttaactgtttaactggactgacctattctgagactgagagactgagtcaatggcttataagataatccattgacctaatttctggactgtgaaaattcttaaggaagtttcagaatggagaatgttggtgctaagaatgaaggtctcagaagtagcctcagaagcaatagtttctctctgacactctcatacccttctgtctctgactctcattctccctcaaagctagccatagacagtagaaggtggatcttagaaacgcaactaattcaaggtgggtcatagaaaccagaaacccttttctctaaagccagacacaaaacctaaaacgattatgtattccttcca

SEQ ID NO: 113411 - DNA, 604 bp, Homo sapiens
aaattctgtcagattaccactatctgttctcatgccatccaaatatgcctcaagctgaacatctaacattcttctcaactggctgctttttggactcaaaaattgagtttatagtttgttctacccattaacctttgcttttctattgtttacatagaaataccctttattaaatatctggttgctcaaatcatatagaggcctgacattggtagaagaccatcttcaacaccactgcctgaactgagacacagctttaactgtttaactggactgacctattctgagactgagagactgagtcaatggcttataagataatccaytgacctaatttctggactgtgaaaattcttaaggaagtttcagaatggagaatgttggtgctaagaatgaaggtctcagaagtagcctcagaagcaatagtttctctctgacactctcatacccttctgtctctgactctcattctccctcaaagctagccatagacagtagaaggtggatcttagaaacgcaactaattcaaggtgggtcatagaaaccagaaacccttttctctaaagccagacacaaaacctaaaacgattatgtattccttcca

SEQ ID NO: 113412 - DNA, 506 bp, Homo sapiens
attcatttggcaatacggattaaaacccaaatgagatattatttcacgttcattacaatggctttaatcagtaacaggacataatgcatactggtgagagtgtggagaagaaggtcttcatatattattgacaggactgtaaatgttacagccactctgcaaactattttacttcttaagaaattaaacataaaactaccataatactcagcaattattttcctatctagaaaaataaagacatatatttacacaaatacttgtatatgcatgtccatagcagcattaattcataatttttcaaaactagaaacaactcaaatgctcatyaaccattgagcagacagccaaatgacttatagtcacacaattgaatgctgttcagcagtaaaaacagaacaaatattgatgcatgctacatcatggaataattttaaaaacattacactgagcaagagaagccagattctagagctcacatgttgtaagattccatttatatgaaa

SEQ ID NO: 113413 - DNA, 506 bp, Homo sapiens
attcatttggcaatacggattaaaacccaaatgagatattatttcacgttcattacaatggctttaatcagtaacaggacataatgcatactggtgagagtgtggagaagaaggtcttcatatattattgacaggactgtaaatgttacagccactctgcaaactattttacttcttaagaaattaaacataaaactaccataatactcagcaattattttcctatctagaaaaataaagacatatatttacacaaatacttgtatatgcatgtccatagcagcattaattcataatttttcaaaactagaaacaactcaaatgctcattaaccattgagcagacagccaaatgacttatagtcacacaattgaatgctgttcagcagtaaaaacagaacaaatattgatgcatgctacatcatggaataattttaaaaacattacacygagcaagagaagccagattctagagctcacatgttgtaagattccatttatatgaaa

SEQ ID NO: 113414 - DNA, 535 bp, Homo sapiens
tttactgtaacccataaatttatttctgggctctcaattcttctctagtggtctatgtgtctgtgtttatgccactayggtgctgttttggttactatagctttgtagtacattttgagttaggtagtttgatgaccatatctttctttttgggttttttgttgtttatttgaagggattttttgttttgttttgttttgctcaaaattgctttgactggtaggggtatgatgtggtttggctgtgtctccacccaaatctcatcttgaattcccacgtgttgtgcaagggacctggtgggaggtaattgaatcatgggggggcgggtcttttccatgctgttctcatgatagtgaataagtctcatgagatctgatgattttaaaaatgggagtttccctgcacaagctctttttgcctcctgccatccatgtaaaatgtgacttgctcctccttgccttccaccatgattgagaggcctcctcagtcacttggaactgtcagttcattaaaccctttttcctgtataaattac

SEQ ID NO: 113415 - DNA, 535 bp, Homo sapiens
tttactgtaacccataaatttatttctgggctctcaattcttctctagtggtctatgtgtctgtgtttatgccactatggtgctgttttggttactatagctttgtagtacattttgagttaggtagtttgatgaccatatctttctttttgggttttttgttgtttatttgaagggattttttgttttgttttgttttgctcaaaattgctttgactggtaggggtatgatgtggtttggctgtgtctccacccaaatctcatcttgaattcccacgtgttgtgcaagggacctggtgggaggtaattgaatcatggsggggcgggtcttttccatgctgttctcatgatagtgaataagtctcatgagatctgatgattttaaaaatgggagtttccctgcacaagctctttttgcctcctgccatccatgtaaaatgtgacttgctcctccttgccttccaccatgattgagaggcctcctcagtcacttggaactgtcagttcattaaaccctttttcctgtataaattac

SEQ ID NO: 113416 - DNA, 578 bp, Homo sapiens
gattaaataaacaggagagaggaaggaaatgattaagtttcctgatgagttaagagcagatgggatctgcagctgaagttgggaaagaagcatcagagaaaaygaagattatctctttcactaaaaatgcagaaagtgtagtaaaaatgaatgtgtataacaatatggcagtgatggtttcttcttcccaatgcactctcaccagggaatagaaagaaattaaaagacatgtagtaattgttcagttataactttagaaaaagaagcaaaagtcacatctcctggcatctgtgtgctgtgaagtcagaaagtcaaccctcaaagacacttgtagacttgccaataaattaaatgaaactattcatgtaaatgggtaagaaatacattttaaaagtttggtgttgctcaattatgctcactctactataagctatgcttaaaatactaacttagtaaaataatctctttgaataataggattactcattcagtgtatgacatagcaaaagacacaaagcaaaactggtcaggtcctgtgtagaaaactgcaaaagatgagagaaataaacttgctacag

SEQ ID NO: 113417 - DNA, 578 bp, Homo sapiens
gattaaataaacaggagagaggaaggaaatgattaagtttcctgatgagttaagagcagatgggatctgcagctgaagttgggaaagaagcatcagagaaaatgaagattatctctttcactaaaaatgcagaaagtgtagtaaaaatgaatgtgtataacaatatggcagtgatggtttcttcttcccaatgcactctcaccagggaatagaaagaaattaaaagacatgtagtaattrttcagttataactttagaaaaagaagcaaaagtcacatctcctggcatctgtgtgctgtgaagtcagaaagtcaaccctcaaagacacttgtagacttgccaataaattaaatgaaactattcatgtaaatgggtaagaaatacattttaaaagtttggtgttgctcaattatgctcactctactataagctatgcttaaaatactaacttagtaaaataatctctttgaataataggattactcattcagtgtatgacatagcaaaagacacaaagcaaaactggtcaggtcctgtgtagaaaactgcaaaagatgagagaaataaacttgctacag

SEQ ID NO: 113418 - DNA, 458 bp, Homo sapiens
cccaggaaattcattgcaaaaagatcatcacctaggcacatagtcatcaggttatctaaagtcaagatgaaggaaagaatcttaagagctgtgaggcaaaagcaggaggtaacttataaaggaaaacctatcagattaacagcagatttctcagcagaagccctacaagctagaagggattggggcccaatctccagtctccttgaacaaaacaattaccagccaagaattttgtatccascaaaactaagcttcataaatgaaggaaaggtacaggttttttcagacaaacaaatgctgagagagtacaccactaccaagccagtgctacaataactgctaaaaggagctgtaaatcttgaaataaatcctcaaaataccccaaaacagaaagctcttactaaacatgcttagtatcaaggattttctgatacatagtacctgaaaaagtacagcat

SEQ ID NO: 113419 - DNA, 373 bp, Homo sapiens
ttgaaacatttgcctaaaaactatttaaataacacttatccagacatatgagttttgtcctctcaaaaaggtgctcttaccttgttgtatggcccctgtatgagacaggatcaacataatggacagcaagtctgttggctacttggatttcaataaatggcaacyagaaatgaacaactcattgagtgaggtaaaaaacaagttggaggctgatttgaggaaagaatgcatgctttggggaaaatatgtacttattactgtaaattgtttagctcagtcacagtgagtgacagctgagatgtgatagagtagagaaagtgttttcctagtaaagggtgatgagctgtgttgggttttgtgtagatggtatgcc

SEQ ID NO: 113420 - DNA, 578 bp, Homo sapiens
tgagattaaagaagttaatagtaagcattctttaagaattagctgttaagagggaaattatggttactaatcagtgatttacctgaattcatgttgtttaaatgtattttaatgaattcaactaatgttctgcctaaaaataagtgaaataaaaaacaaaatcaaaaataaaastttttcagccaggcatggtggttcatgcctctaatcccagaactttgggaggctgaggcaggtggatcacttgaggccaagagtctgagaccagtccagcctggccaacctggtgaaactctgtttctactaaaaatagaaaaattagctgggcatggtggtgcgcacttttattcccagctactcaggaggctgaggcaggagaattgcttgaacctgggaggcagaggttacagtgaaccaaggttgcaccagagcactccagcctgggcgacagaacaagaatccatctcaacaaacaaataaataaaagttttatctatgggagtttcaaaagcatataatttttagagtaagttttaatctcaggcagactgaataacagtaggtccacagtcattgca

SEQ ID NO: 113421 - DNA, 437 bp, Homo sapiens
tcctccttctggatcgtggacaaacagcacgtgtatatcggcagtgccggtttggactggcaatccctgggacaggtaagctttctacgttatgtaaactcaatgttctgtcaccctcaaagcgaccaccttcataaagcacgctactgcagataaggatcctmaaacctacagcatttattattcttaactgtagttttaagaggctcatcttccttttatgtgaaaggataaacctttgcttgtcaggatcatcttacaaaaaaaagtaaaaactgttattgcttcaatgcttttgtaattcataggctgctcccagattcctgagagcaggttgctatgtaattgacatcacccagacctatattttcaggatgatattacatcatctatgagacagggggaaacacaaaaattcagtaaagagtaatatgtct

SEQ ID NO: 113422 - DNA, 437 bp, Homo sapiens
tcctccttctggatcgtggacaaacagcacgtgtatatcggcagtgccggtttggactggcaatccctgggacaggtaagctttctacgttatgtaaactcaatgttctgtcaccctcaaagcgaccaccttcataaagcacgctactgcagataaggatcctaaaacctacagcatttattattcttaactgtagttttaagaggctcatcttccttttatgtgaaaggataaacctttgcttgtcaggatcatcttacaaaaaaaagtaaaaactgttattgcttcaatgcttttgtaattcataggctgctcccagattcctgagagcaggttgctatgtaattkacatcacccagacctatattttcaggatgatattacatcatctatgagacagggggaaacacaaaaattcagtaaagagtaatatgtct

SEQ ID NO: 113423 - DNA, 277 bp, Homo sapiens
gaattccagggaaaagcttggaaataatgatcctatttacctgctcactctcctcctctttctttacccagacatgttgattgctccttctgggacgcatggctgtttcttatgctagaaaakgtctctaaaaaccagctttgaaatgacttatttctgtgacctatagttttatttcttttaaaaaccaacagctggctactctccagaggcctgatctaattagcatagaagcagaactcatttacatgccatcacagccctgagtatactcata

SEQ ID NO: 113424 - DNA, 574 bp, Homo sapiens
taatatattcgttattgccttctctctgtgcttggaagagaagaaaattgaagtttaccactaccatgggtttactttgcgtgctttgttatttggtgtataaagattcacaccttagatcttytgtaggtcatatggtgtttcgtttaaagggaatcttcttctgaagagtttagccttgaattctgctgagatttacattggcaatcctgtttgcattttgtttgccttggacagccatacttttatgcactcctttcctactaatgtgtttattttgcttttgatgttgatatatttgttcaaccaacatttttagatgcccgagtgcgctccaagcactgtctaggtgtcacagtggcgatcgggatacagtcctgccttcatggatcttctgggctggtcgaggagacagacaataaaccagtcaatgaatgaataagtaactgcaaaattttagttctgctctaatgtggtagccattcacttcatgggggttatttaaattagttaaattaatagtagcttactcattcagcatgtattgtcggacacaatggtactttttgcacat

SEQ ID NO: 113425 - DNA, 574 bp, Homo sapiens
taatatattcgttattgccttctctctgtgcttggaagagaagaaaattgaagtttaccactaccatgggtttactttgcgtgctttgttatttggtgtataaagattcacaccttagatcttttgtaggtcatatggtgtttcgtttaaagggaatcttcttctgaagagtttagccttgaattctgctgagatttacattggcaatcctgtttgcattttgtttgccttggacagccatacttttatgcactcctttcctactaatgtgtttattttgcttttgatgttgatatatttgttcaaccaacatttttagatgcccgagtgcgctccaagcactgtctaggtgtcacagtggcgatcgggatacagycctgccttcatggatcttctgggctggtcgaggagacagacaataaaccagtcaatgaatgaataagtaactgcaaaattttagttctgctctaatgtggtagccattcacttcatgggggttatttaaattagttaaattaatagtagcttactcattcagcatgtattgtcggacacaatggtactttttgcacat

SEQ ID NO: 113426 - DNA, 574 bp, Homo sapiens
taatatattcgttattgccttctctctgtgcttggaagagaagaaaattgaagtttaccactaccatgggtttactttgcgtgctttgttatttggtgtataaagattcacaccttagatcttttgtaggtcatatggtgtttcgtttaaagggaatcttcttctgaagagtttagccttgaattctgctgagatttacattggcaatcctgtttgcattttgtttgccttggacagccatacttttatgcactcctttcctactaatgtgtttattttgcttttgatgttgatatatttgttcaaccaacatttttagatgcccgagtgcgctccaagcactgtctaggtgtcacagtggcgatcgggatacagtcctgccttcatggatcttctgggctggtcgaggagacagacaataaaccagtcaaygaatgaataagtaactgcaaaattttagttctgctctaatgtggtagccattcacttcatgggggttatttaaattagttaaattaatagtagcttactcattcagcatgtattgtcggacacaatggtactttttgcacat

SEQ ID NO: 113427 - DNA, 531 bp, Homo sapiens
tgccttagtccaaagatgagcaatgatctctaagaccatttagtrtgctaaattgagaagccagtaggagacaattttgaaccattactaagttatttgagctttcgatgagaaaagcatgcaattcccttactcaggttatgttgggatttgaaatgtagactgaagtatttctagcttccccataatcaatttcaattttgccaagctttgaggcgatgggaattcaatgagggtcattaatcctgctgagaataaagcagacacagtccacagagtttcaggctgcttttctgattgtgtgtagactcagccattgtacataggccatggtccagccagctgcacaggagctccgtggaggcccaaaggcaaagtgagaaagtaggtatcaaaaaaattgggatcatgtctttgttccagccactgggtcctcagccccgtggggcacggttgtccttctcctctgaccaaagcacatgtgcactgccagcctctggttcagggaccttctgccctggtgagctctca

SEQ ID NO: 113428 - DNA, 531 bp, Homo sapiens
tgccttagtccaaagatgagcaatgatctctaagaccatttagtgtgctaaattgagaagccagtaggagacaattttgaaccattactaagttatttgagctttcgatgagaaaagcatgcaattcccttactcaggttatgttgggatttgaaatgtagactgaagtatttctagcttccccataatcaatttcaattttgccaagctttgaggcgatgggaattcaatgagggtcattaatcctgctgagaataaagcagacacagtccacagagtttcaggctgcttttctgattgtgtgtagactcagccattgtacataggccatggtccagccagctgcacaggagctccgtggaggcccamaggcaaagtgagaaagtaggtatcaaaaaaattgggatcatgtctttgttccagccactgggtcctcagccccgtggggcacggttgtccttctcctctgaccaaagcacatgtgcactgccagcctctggttcagggaccttctgccctggtgagctctca

SEQ ID NO: 113429 - DNA, 628 bp, Homo sapiens
cgcccgccttggcctcccaaagtgctgggattacgggcatttatatttttcagagtacctgtaggaaatacatggaacatgcaatttaaattatttgagaataataaaaggacttttacgcaagtatgggccagggtgggaaaatcacagggatggataatacagtatcctgagaggtgacgctggggttataattacaacctctgggtccaaaagggcaagggaaggagcaactgcagaaagccagcgccagaggtctggcagagagggaggcctgagaggaggcagttgggctgtccacgtggagagagagtgggaggaaccaatgttacggccccacactcttaccttcttccagggcaccacagaaagcccaaagatgaagkagcccacagatatggtcagcctcccaaagggcagatgtgaattgagaaaggtcaactgtaagtctggaggggcaaacagaaagtgctcagcacaggctcctcttgctcctctgtctccatactttttccaggtaaaaactctgtgtcctcaacacaggaaaggcagcttgaccatttgaggtaatgctgattctgtcatatgcccatgtaaaacatatacccagaccagcattctctagcat

SEQ ID NO: 113430 - DNA, 452 bp, Homo sapiens
  misc_feature (1)...(452): n = A,T,C or G
nnnnnntcttaggattcagaaagaaagaggataaagattgtgaattaaaaaggcatggatgatagtttcagatgtgttccactatccagtatagtagccaccagccactgtggctattgagtgcttgaagaacagctagtctgaattgagatgatcaacttatagaaaagaayactatgggcaccctgtaatttccaaaccccttgttctacttgatctttttcacagcatatatcaccacctggcattttatgtatttatttctctttccatactagactacaagctccattggaacagggattgtgaattgtcttgttcaacactccacccccgtgcctagacagtgtcttgtgtatatctagatactgacaaatattttgaaataagtgaatgaaagtgtatcagtatgcttgggactccctgtagcagtgcctggaagatggtatgtt

SEQ ID NO: 113431 - DNA, 574 bp, Homo sapiens
gtatctaaaatagaaagagtagtcctatctctctgtacctcagggaatctgaggtcattgaatttttcctggggacactcctcaaggataaagtttcaaaamttatgtctgtgcaaaagcagacctctgcttgccagtggaccaggttcaaggcatttgttgtcattggggactagaatgggcacatcagactaggtgtcaagtgctacaagaagatagacaaggtagctggtcagaaggagggacatatgtcaaaagttactcttttctcctgttcttgattctaatcacctgtgtcccctaacacattgcttcatcagatatgcagatatgcatctccccactcaatattttcattcagcctaaatatctcccttcttaactccctcaacacttcatcttcttgcaactaaaaaaacaagaccttttttttttctttcccttctcagttaagcattttgaaagcctacaggtgtatgtatagtttcacacctcaattgtccctctgcctactgcaatgtggcttctaatctcattccatcatgttcctttcaagggtacccatgaaagaaag

SEQ ID NO: 113432 - DNA, 553 bp, Homo sapiens
gaacatccaaaagaataaacaatctcctgcaatgaataagtgattatagcgaggtcacaggatacaaggtaatacacaaaagacaatttttcctactatattcccagtgaacaactagaatttgaaatagaaaaattatcttttgtaatggcagrcctccaaaataaaggaaatacatagctgtaaatataacacaatatgtgcaggatctatatgcaaataaactacataactctgatgaaagaaatcaaagatgattcaaataagtggatagacagtccatattcatggattggaagactccatattgttaagatgtcaattcttcccaaactgacatatagattcaacacaatttcaattgctatcccaaaaagttattttgtagatactaggaaactaattctaaagtttatatggaaagacaaaagacctagaatagccagcacaatattgaagaagaataacaaagatggagaacacacattacctactttcaagacttactaaatagctacagtatgacagcatggtattgatgaatgagcagaca

SEQ ID NO: 113433 - DNA, 597 bp, Homo sapiens
gggctgaccctaatcaagcttgacctcattttaacttgattatatttgcaaacatkctatctccaaacaaggtcacattcacagatactggggttaggacttgaatatctcttctgggggacaaaattcaacccatgacatgatattttaaggaaatgtaataatctgttaatatgactctcaggaaccccattctggaacaattgagcagcacaatcacaacctgtggcttacagcccggattttggaacatttctacaagagatgtttaagtctctaaacaaaccaacaactgaagcatccaacactccccatgctcccaaaaagttctcatacttacctatctgcattgtttgctggaaatcaaatacacagaggctgagaccatgaagcactaacagctaagttactcacctcaccccatcacctattgcatacaaatgcaggtaccaggaagataacaaaataattggaatccaaacagaaatcccataccatagcattccctagaatgtgcatgtgcacacacacacatacactttacacattcttttcattagcactactggttttgagatgttttctctgtctggaata

SEQ ID NO: 113434 - DNA, 597 bp, Homo sapiens
gggctgaccctaatcaagcttgacctcattttaacttgattatatttgcaaacatgctatctccaaacaaggtcacattcacagatactggggttaggacttgaatatctcttctgggggacaaaattcaacccatgacatgatattttaaggaaatgtaataatctgttaatatgwctctcaggaaccccattctggaacaattgagcagcacaatcacaacctgtggcttacagcccggattttggaacatttctacaagagatgtttaagtctctaaacaaaccaacaactgaagcatccaacactccccatgctcccaaaaagttctcatacttacctatctgcattgtttgctggaaatcaaatacacagaggctgagaccatgaagcactaacagctaagttactcacctcaccccatcacctattgcatacaaatgcaggtaccaggaagataacaaaataattggaatccaaacagaaatcccataccatagcattccctagaatgtgcatgtgcacacacacacatacactttacacattcttttcattagcactactggttttgagatgttttctctgtctggaata

SEQ ID NO: 113435 - DNA, 634 bp, Homo sapiens
ttatcattttgctgtttttttaaaattatttttttctctcaaatattttgatccaaagttggttgagtygaggggtgcagaactcacaggtatggagtgatgactatacttgaattaataggaaaaattccaaacaaaaccagaaaccaaatccttaggccttgctaattctaacaaacctttatccattgcctcaaatatatgaaagtagcacaaggacatttgctgaaggaagtatgtctctcatcattgccccgacttctcacatcagcctagcactctcatgaattttcaaaagatcggtcattacagtatgtttctaaaaccctttagcttctgctttctttacttgaaagggtcagaactgagtggaactgagaggactgtgaagggaggcttttcagtttgtcacatttgcttaattaaatgcattgtttctcaaactcatttgagcttaggccacagtaagtaatatatgtttatattagcactgtactctcatttttatgcaacatactctgtttgttaacaatttttattgctttattctattgttccccaatgctgaccactacccactaaattattttaagacttactaacatgttgttcactgaagtttcaaaaacacttt

SEQ ID NO: 113436 - DNA, 634 bp, Homo sapiens
ttatcattttgctgtttttttaaaattatttttttctctcaaatattttgatccaaagttggttgagtcgaggggtgcagaactcacaggtatggagtgatgactatacttgaattaataggaaaaattccaaacaaaaccagaaaccaaatccttaggccttgctaattctaacaaacctttatccattgcctcaaatatatgaaagtagcacaaggacatttgctgaaggaagtatgtctctcatcattgccccgacttctcacatcagcctagcactctcatgaattttcaaaagatcggtcattacagtatgtttctaaaaccctttagcttctgctttctttacttgaaagggtcagaactgagtggaactgagaggactgtgaagggaggcttttcagtttgtcacatttgcttaattaaatgcattgtttytcaaactcatttgagcttaggccacagtaagtaatatatgtttatattagcactgtactctcatttttatgcaacatactctgtttgttaacaatttttattgctttattctattgttccccaatgctgaccactacccactaaattattttaagacttactaacatgttgttcactgaagtttcaaaaacacttt

SEQ ID NO: 113437 - DNA, 416 bp, Homo sapiens
atcccttacaatgaataggattattttaccagtaaaccctcatattagctttactatccatttggaatccttagttctctcttccacaagttaatycccatgcatcattcagaatttagatggtcacttccttggagaaattgtcactggcctctgtgactagtttagtagcccctcttctagcaccatgtgcctctcatttaaaacaattattacatgtgtgatcatatatttgtgtggtcatctgattaagctctatccccctctacaccctcaagctacatgaggccagagacctattctgctttgctcaccagtatatcagcaatacctggtgcaattcctgttagagaaatgcatgggttttgaacaaaaaagaaacaacatttagaaattattataaatttgcaactgct

SEQ ID NO: 113438 - DNA, 555 bp, Homo sapiens
aaggctaaatatgaaggaatgacgttcgtggacacctgcctggcacaagcattactatgaaatacttgcccattacccagtgagtactgggagttttctcagcttcgggacatctaagcctttgtctcaggcaaacaaagttacattctgatgagcacagtatgctctgctgcagctttgggaagtgaaaatcttaaatcagagagcaatagcatgattttatctttggtgtagatttggctctacaccaaatctttaaaatgcttatgttgtagcttkaaatctcttatgatgagtaatttatttgtcttagaacatttgccattgtaggtgtcttgtaagatgtatacatgtacaaaattattaataaaagtgaccaatatcaatatttctgagtaattttaaatgatcaaaaacttattttagcatataaacaacatgtgtttaaaatagaattgactattatcgagcatgacatttagggtagacaatattaaacttcaaatcagggtattagaaataactctttgaaccattatgtcatagaacaaattc

SEQ ID NO: 113439 - DNA, 557 bp, Homo sapiens
agtgggaaacgtttcatctttcaaggcctatttgcaaaatgaaaggtgatttttccaacttctcagagccccagtactgatcctcttctcactagctcccacccagccttgagcacctccctctcccaaaatgaagtgttttttttttttttcttaaccacattttgaaaatcacttttcatatttgggasagatcccagaggatgctgactccaaaattgagattatattcacagctaggagccgtggaagagattcttttcatttttatttttcctttgacatatgtttctgatagagctcatagaagttctatgaaaagcgttcatgtttaggccaattgtcagtgttaagtgttgttctccaaagtgaataaataaatatgaagctttccctgtagctacaatctagatctaccaacatagaaaaagtcatcaaaaattctatcatttaacattaaagaacagcattttgatatcccaaagtaataagttttcagtttgtttttgtgttttttcctaattgccataatttctattagttcttgggtaggatgg

SEQ ID NO: 113440 - DNA, 557 bp, Homo sapiens
agtgggaaacgtttcatctttcaaggcctatttgcaaaatgaaaggtgatttttccaacttctcagagccccagtactgatcctcttctcactagctcccacccagccttgagcacctccctctcccaaaatgaagtgttttttttttttttcttaaccacattttgaaaatcacttttcatatttgggacagatcccagaggatgctgactccaaaattgagattatattcacagctaggagccrtggaagagattcttttcatttttatttttcctttgacatatgtttctgatagagctcatagaagttctatgaaaagcgttcatgtttaggccaattgtcagtgttaagtgttgttctccaaagtgaataaataaatatgaagctttccctgtagctacaatctagatctaccaacatagaaaaagtcatcaaaaattctatcatttaacattaaagaacagcattttgatatcccaaagtaataagttttcagtttgtttttgtgttttttcctaattgccataatttctattagttcttgggtaggatgg

SEQ ID NO: 113441 - DNA, 527 bp, Homo sapiens
ctagttatatggcagccccttggagcttgttccaggattctcatccagtaatacattctcattcacttttcattgtctagaattttattgaaatctttcctgttctgaagaagaaatgtctattcaaattttttgcccctatttccattgaattgtctttttrtgattgagttgaaagggtcctttatatattctggattctagtctcttagtaaacttatgattttcacattttatcccattttgggggtcatttttttaatctctcagtggtgtcctttgaatcacaaacatttttaattcagaggaagagaaattttaaaatattttctgtagttggttgtgttcttagtttcatatgtaaaaaacttttgcctaatctaaggtcatgaagttctacaacctattttttcttgtaagcattttatgcacttatacatttaggtctttgattcatttctagtaaatttttgtgtatgatatgaggtagaggtccacctgcattcttttgcattgggatattcatt

SEQ ID NO: 113442 - DNA, 623 bp, Homo sapiens
ttcataatataattgaaagtattaataggagaaaagaccaaattgaggaaagaatagcagagcacaaagactagttctttgaatcaactcagtcagacaaaaataatttaaaaagaatgaaaaagaatggatgaaacctctgagagatatgggattagatgaaaagaccaaatttacaactcattggtgtccctgaaagagagggagagcaagcaacttggaaaacatatttggagayactctccacaaaaatttctccaaccttgctagtgaggtcatattcaaattcaggaaattcagagaaccccagtggcatactatacaagatgaccatccccaagagacctactcaccagattctctaaagtcaatgtgaaggagagcatattaaaggcaactagagagaaggggcaggtcacctacaaaaggaaccccatcagactaacagtggacctttcagcagaaactctacaagccagaagagattgggcgtgtacattcaacattcttaaagaaaagaaattccaactgagaatttcatatctagccaaacaaagttcacaagcaaaggagaaataaaatccatttcagacaagcaaatgctaaaggaatttattaccacc

SEQ ID NO: 113443 - DNA, 623 bp, Homo sapiens
ttcataatataattgaaagtattaataggagaaaagaccaaattgaggaaagaatagcagagcacaaagactagttctttgaatcaactcagtcagacaaaaataatttaaaaagaatgaaaaagaatggatgaaacctctgagagatatgggattagatgaaaagaccaaatttacaactcattggtgtccctgaaagagagggagagcaagcaacttggaaaacatatttggagatactctccacaaaaatttctccaaccttgctagtgaggtcatattcaaatkcaggaaattcagagaaccccagtggcatactatacaagatgaccatccccaagagacctactcaccagattctctaaagtcaatgtgaaggagagcatattaaaggcaactagagagaaggggcaggtcacctacaaaaggaaccccatcagactaacagtggacctttcagcagaaactctacaagccagaagagattgggcgtgtacattcaacattcttaaagaaaagaaattccaactgagaatttcatatctagccaaacaaagttcacaagcaaaggagaaataaaatccatttcagacaagcaaatgctaaaggaatttattaccacc

SEQ ID NO: 113444 - DNA, 623 bp, Homo sapiens
ttcataatataattgaaagtattaataggagaaaagaccaaattgaggaaagaatagcagagcacaaagactagttctttgaatcaactcagtcagacaaaaataatttaaaaagaatgaaaaagaatggatgaaacctctgagagatatgggattagatgaaaagaccaaatttacaactcattggtgtccctgaaagagagggagagcaagcaacttggaaaacatatttggagatactctccacaaaaatttctccaaccttgctagtgaggtcatattcaaattcaggaaattcagagaaccccagtggcatactatacaagatgaccatccccaagaracctactcaccagattctctaaagtcaatgtgaaggagagcatattaaaggcaactagagagaaggggcaggtcacctacaaaaggaaccccatcagactaacagtggacctttcagcagaaactctacaagccagaagagattgggcgtgtacattcaacattcttaaagaaaagaaattccaactgagaatttcatatctagccaaacaaagttcacaagcaaaggagaaataaaatccatttcagacaagcaaatgctaaaggaatttattaccacc

SEQ ID NO: 113445 - DNA, 606 bp, Homo sapiens
ctaatttacctgtacactttctccaacaggtagatcccctggatgggggtttactttctaattggataatatcttgattatctttataatatcacctcattcaaaacacttgctggaatcattcctaataccctgtgacaaatctctaggaaatctcaggaaggtgagttccaaatcctaaacaacaaagggattgagtgatactatatggttatcaatgtattagagtgaaagagccccaaaacaaccaacaaaatccacaaaacccgggaatgctggggttggttaaatattttcttttatgtattakgtaggattggtgagtatgagcaatatcagcagactctggggtagagtaatggtctctgactatctagaacctggttctgcaatgataagtttgaatattgccacctagagtgtaaaagcccgatggaataggtggttcagggtatgagaactggattttctatatacatatgaaagtttactatatttaagaattggctaactctgggaggggaagtttctcctcagtcagtaagcccctgggtgccagagtttcaagaatatagaaaattagaaaatgtaattaacacatatgtt

SEQ ID NO: 113446 - DNA, 525 bp, Homo sapiens
cagggaaaaattaagtagccctgaaaaacatccatgtcatctcgcatgcaaattattcactgagaaaagctagagagcaaatggacacgaggaaggggtattgattaacttgcttattcatctgactttgaaaacggaggggcgaagaagagatactgacagattcctaaaacaccatgaggaaaggaccaaggtgacctcaatcagtggttctcrgcaggagatccatgaaagccagaatcatcaagtcctctaagcccacttgtgcctactaacattaatgtacaaaatataattcattcttagtgggcaacagagtcccagcccatagcctgaaaaaaaaaaaaaaaatctcaggatccagagagaaagtttggccttgtagactttgaactggttgacctggagtcatgggacataaagtattccaactttattctctccagctgaagtttattctagcctttgccactgatgtggtttattatttttaatggtgttccatgcaagaacacaacatattcc

SEQ ID NO: 113447 - DNA, 525 bp, Homo sapiens
cagggaaaaattaagtagccctgaaaaacatccatgtcatctcgcatgcaaattattcactgagaaaagctagagagcaaatggacacgaggaaggggtattgattaacttgcttattcatctgactttgaaaacggaggggcgaagaagagatactgacagattcctaaaacaccatgaggaaaggaccaaggtgacctcaatcagtggttctcggcaggagatccatgaaagccagaatcatcaagtcctctaagcccacttgtgcctactaacattaatgtacaaaatataattcattcttagtgggcaacagagtcccagcccatagcctgaaaaaaaaaaaaaaaatctcaggatccagagagaaagtttggccttgtagactttgawctggttgacctggagtcatgggacataaagtattccaactttattctctccagctgaagtttattctagcctttgccactgatgtggtttattatttttaatggtgttccatgcaagaacacaacatattcc

SEQ ID NO: 113448 - DNA, 622 bp, Homo sapiens
gatcaggaatagtacttccaagtgtccatttagaacagataacagtacacctttttgtcacaggcttatgatagtactactgctctgtcacaaatagtccaatgggaacaggactgtgtggaagtcccacagatagacgacctccccttagtgggaccagttgaataagaagtgtcaaaaacgtaggaagccttagaagacaaatacacttcagaagatgggaactaatccttacaaacatttggaagctgactatatcaggaaggtgtggggcaggtctggaatcctgggatgccatgataatttgtccaatgtaaaagataaatgtttgcattttgcacttcccaccactaaaaatgaagcacaaatacctattagrcctctttacatttcaggggtagcgtattctatctatgggaataccactatgatttatatacaaagtaacttaaaatgcttccaacttctagtaggacctagggggaacatgctctcagactgacaagcatgaagctctgtcactttcgccttatgacctagtagggaagtattagaggtatttgtgttgggaaaagaagttgtgtggagtgtaaggcaagccctaaaaaaagaatcacagcat

SEQ ID NO: 113449 - DNA, 494 bp, Homo sapiens
atcacatctctagatgcaaaggatctttaggttatacaagaatagcattaatcattgttacttttgttttttatatatttttttctttcttttttttgtagtggtaagaggttttattttcttctcatcycaggaataggtttgcatactgctaagttgcagtgagctgagatcatgccactgcactccatccagggtgacagagcaagactccatctcaaaaaaaaaaaaaaaaaatgcctactgctttttattgttatgtaaatccttattgcatttggtatattctgcatattggggtggattagagattggtcattttctgcaaaggagaaaatgaaacatcttggtcacaaaaagatgtagaaaaagtttcaattagaaattgaaagaggattttaattttctcatctttgttttcaaataattaagtatattgtgtcacagttgattaaccagagaatgcaaattaatataattgtgtgcagtatgtc

SEQ ID NO: 113450 - DNA, 615 bp, Homo sapiens
gttcaccatctccatctaagaacattgtcttttagagtcactgaaagatttatcacatcagcatgccttcaactcgtactgaggatttttctataagtagttcccacttctcagtgtcaccatgtttaccagtttgrgttctgtatttccttttagttgaagtattacctagtttaatgcaacctggacttctttcagagctatcagcaatcttcactttttggaagtccttgacttactgaagtgagggctagatcttattgtttgttaagcataaaatatgtttattctgtttttacttttctctatttgcttagatttaatttttgatgagtttcactgtcattcttccgtttaatatttatcctattcttactatggaccagacattgggaatataatttctcaaaattaatgcagaatttatcttcatgaaatttattatctagtggaaacggattcattgaatttacttgccaaagtactggaagtaagttgcagaatagcatgaaataaaactggaaaggcaggcaggggctaaaacaggaggtctttgttgaggatttggaatttaactggagagaaatattaagcttctgaagtgttataagcatc

SEQ ID NO: 113451 - DNA, 570 bp, Homo sapiens
gactgtacacacccaacctctttatcttcatctcttgcacttctgaacctgaatcttctgaaacaagcctgcaatggactcagagccttcatactgagggctccctgggccacctcaagagtgaaggcccrgggtgagatgtcctttgctgtaggaggcaacccatagggaggctccagagcctcatataactaatggagcttccgtgaggtgaggaaaagctctcttgtcttttttcaccaacccaaacacattatttcccaaagtggtcactaaaccagtatttgttctccaagaacaatgtactgttcttatttccacacttcgagattccacagggggaaagaacaaacctttcatttatatgacaaaaatatcaagtacatgaggctatcctcatgtcattttaattattgatgaacgtgttagagttttatactgctatcccacttttccttttgattcatatccaaactgttatttgggcattgatgacagtgaatatgaaaaaaaagaattctgaattttaaaagtaatcaaattctctttcaaaggtctacatgacatgaa

SEQ ID NO: 113452 - DNA, 617 bp, Homo sapiens
aatcttctgattctgataagtatgtatattatttgaaaatttgcaccacgacagctgatcatacaacctgcaattaccatatggctataacattggttgaattttaaaagaaagaatatcaaagttgggaggataagtgtataggtgaataaacactgaggaacaataaaaggtaatagaacagtggccataaagaaattaataaatagttgatgaggtaactgctaaaatggatttggacttttaaaacagaaagggagaagcaagagggagaatatgaacaacctaaaaagsaaacaacctaatggcaataaaggttctatgagtttaaaaatgtatgcaaatataaataaggaaaaaacaagacattaaacagataatttaatgctatttaccattccgggctgttctctccaactctgcaatatgcattcactgagaaataaatatttcgagtgcaatcctggatctgagtcgagacccctcacttactggtggcatgattttgagccaaatttaaaagtacgtgaagtctcacttctttggaaataatgagttaatgatagcatctcttgtaaaaatcaaaaaacaataattaaatgcaataagttgtttaa

SEQ ID NO: 113453 - DNA, 617 bp, Homo sapiens
aatcttctgattctgataagtatgtatattatttgaaaatttgcaccacgacagctgatcatacaacctgcaattaccatatggctataacattggttgaattttaaaagaaagaatatcaaagttgggaggataagtgtataggtgaataaacactgaggaacaataaaaggtaatagaacagtggccataaagaaattaataaatagttgatgaggtaactgctaaaatggatttggacttttaaaacagaaagggagaagcaagagggagaatatgaacaacctaaaaagcaaacaacctaatggcaataaaggttctatgagtttaaaaatgtatgcaaatataaataaggaaaaaacaagacattaaacagataatttaatgctatttaccattccgggctgttctctccractctgcaatatgcattcactgagaaataaatatttcgagtgcaatcctggatctgagtcgagacccctcacttactggtggcatgattttgagccaaatttaaaagtacgtgaagtctcacttctttggaaataatgagttaatgatagcatctcttgtaaaaatcaaaaaacaataattaaatgcaataagttgtttaa

SEQ ID NO: 113454 - DNA, 600 bp, Homo sapiens
ttcataaatttacctaataatcagttgaagggaccaatccaatagttaaacttctggctaggttgatcaaaaactataagaaacaaaaatttaagcaacaataataggcatggaattgtttttaataaaactggcaaaaaggtagtatattatytgttgaattattcaataaataaatttaataaatatataataaatgaaaattagcaaattaaatattcaataaagtaataaaattgataataattttaaagcagacttctatctcatgtcatataccaaaatatattcagattatttaaatgtttaaacatatattacacaactatgtgaaaatatatttatgaaaccctaaaaattttaagtgaatattcacacagcatactgataagcaagtatctgataaacattacatcagaggtagaaattctaatgtatattttatgaactcaaatatatatgctttttactatattccatgggtcggctcttcacgacaaagataaatgtctcaaatattgatccttaatgataaaacaaagcaaactgaatcaataatcatttcagattattcagcaaattacacttttttctatgggt

SEQ ID NO: 113455 - DNA, 440 bp, Homo sapiens
agccagtaagttggtgtttcgcctggcctggtgttcgccttccttacagatttctctgctgcttgttgcatctctattcacaaacacttgattgctgatttccagtaactgcgagttattcatacccacaaacccagcctgtttctgcaattttctcctgctatctcccgtgctttgactaactaatgccatgtgctgattttcagggctatctggatcaaaaggagtgtacatatggtaagcctcacacagtctttcatagaattgtgctggactctcctcttttcattgratgacctcagagatcttatttacatttgtagccttttaagcccctttctttagaccttatatcaatgcctcatggtaccttcttagcctctccatgtctggtccctcatttgggtcccattggggggtctgttcccggcagctgaatt

SEQ ID NO: 113456 - DNA, 522 bp, Homo sapiens
actcataactgttgatttcatggtcaaaggttattaatgtatttacccacaaaacccttttaaaaccatttcaatatttttctctcaagcagtgtttccccaattctctctacctatcttctatgctawgactgatatagtcattcatttcttcattcccaaacactttcaagaaaaaaaaaaaaaaaccttaaaactggaaatagtacaacaaaagtaacaatattacaaaaacaaataaataagatgaaaaaataagtggagaggaaaatgagaacaaaaagaaatataggataaagacataaagacaagaataatattagactcaaattgattctttaaaaaattacccacgtactatcatctgtagaatagtttctaacgttttaatcccaacttgaagcatataattagttgtaaaatgtatagtctccctaagataaaaacaaaactgtttgaaaactcaagtctcccaagtagaaatctgaaagcgggccaggcacgtggctcacgcctgtgatc

SEQ ID NO: 113457 - DNA, 522 bp, Homo sapiens
actcataactgttgatttcatggtcaaaggttattaatgtatttacccacaaaacccttttaaaaccatttcaatatttttctctcaagcagtgtttccccaattctctctacctatcttctatgctatgactgatatagtcattcatttyttcattcccaaacactttcaagaaaaaaaaaaaaaaaccttaaaactggaaatagtacaacaaaagtaacaatattacaaaaacaaataaataagatgaaaaaataagtggagaggaaaatgagaacaaaaagaaatataggataaagacataaagacaagaataatattagactcaaattgattctttaaaaaattacccacgtactatcatctgtagaatagtttctaacgttttaatcccaacttgaagcatataattagttgtaaaatgtatagtctccctaagataaaaacaaaactgtttgaaaactcaagtctcccaagtagaaatctgaaagcgggccaggcacgtggctcacgcctgtgatc

SEQ ID NO: 113458 - DNA, 522 bp, Homo sapiens
actcataactgttgatttcatggtcaaaggttattaatgtatttacccacaaaacccttttaaaaccatttcaatatttttctctcaagcagtgtttccccaattctctctacctatcttctatgctatgactgatatagtcattcatttcttcattccmaaacactttcaagaaaaaaaaaaaaaaaccttaaaactggaaatagtacaacaaaagtaacaatattacaaaaacaaataaataagatgaaaaaataagtggagaggaaaatgagaacaaaaagaaatataggataaagacataaagacaagaataatattagactcaaattgattctttaaaaaattacccacgtactatcatctgtagaatagtttctaacgttttaatcccaacttgaagcatataattagttgtaaaatgtatagtctccctaagataaaaacaaaactgtttgaaaactcaagtctcccaagtagaaatctgaaagcgggccaggcacgtggctcacgcctgtgatc

SEQ ID NO: 113459 - DNA, 490 bp, Homo sapiens
actgccaagtactccgtatcataaagaagatgctatatcatccwtgcggccagtgtcaaaccactgtgaaaataattctgcctgcgttacccagtatgcctgcctccagactgtatacgggagttgatgaacttggagtgtggggaatatttcagagacagttttcagtgttttgtgaatggaacatacacacgcacacatacatgcatacacacacaggtgtacacacatacacacaaaaagcgcggtagttttttttctatcaccacaggcaaagagaacacgctttagaagtacttcttagagagcttttaaatgttctctggaatttgggagacagaaagactagtatatatctgtattatatatggcatataggataacatatgtagcaaaaatagatatagatacatagatatacgagagagcaaataaattagaaagttatttatctagaaattgtagattgagtaaataataactattctac

SEQ ID NO: 113460 - DNA, 575 bp, Homo sapiens
ggtgaaaatataagctttagtaatttttttttaaattactatttttggagcagcttcaagcaagaaatacaaaattcttatatatcccctacactgccgctacaggtctgtgccacacatccttcaccagagtggtacattttttaacaatcagtgaacccacatccacataccaatatcacccaaagagttcactctcagtgttgtccgttcttatggattttgactcatatgtactgacatatatctaccattatagcatcatacaaaataatttcactgcccstcctttgtgctcagcctatttatcctccttccgtgaaactgctggcaaatatctttttactgtctccatagatttgttctttccataatgtcatatatttggaatcatacagtatgtagcttttttacattagccttttttttacattagtaatatgcattcatggttcctccatatcttttcatggattgagattttttttagaaagactttagaaactacaatgtatgtgcaaaacccatcttggactttggaatttaatatgatcgtattttactaagataggtaa

SEQ ID NO: 113461 - DNA, 575 bp, Homo sapiens
ggtgaaaatataagctttagtaatttttttttaaattactatttttggagcagcttcaagcaagaaatacaaaattcttatatatcccctacactgccgctacaggtctgtgccacacatccttcaccagagtggtacattttttaacaatcagtgaacccacatccacataccaatatcacccaaagagttcactctcagtgttgtccgttcttatggattttgactcatatgtactgacatatatctaccattatagcatcatacaaaataatttcactgcccctcctttgtgctcagcctatttatcctccttccgtgaaactgctggcaaatatctttttactgtctccatagatttgttctttccataatgtcatatatttggaatcatacagtatgtagcytttttacattagccttttttttacattagtaatatgcattcatggttcctccatatcttttcatggattgagattttttttagaaagactttagaaactacaatgtatgtgcaaaacccatcttggactttggaatttaatatgatcgtattttactaagataggtaa

SEQ ID NO: 113462 - DNA, 575 bp, Homo sapiens
ggtgaaaatataagctttagtaatttttttttaaattactatttttggagcagcttcaagcaagaaatacaaaattcttatatatcccctacactgccgctacaggtctgtgccacacatccttcaccagagtggtacattttttaacaatcagtgaacccacatccacataccaatatcacccaaagagttcactctcagtgttgtccgttcttatggattttgactcatatgtactgacatatatctaccattatagcatcatacaaaataatttcactgcccctcctttgtgctcagcctatttatcctccttccgtgaaactgctggcaaatatctttttactgtctccatagatttgttctttccataatgtcatatatttggaatcatacagtatgtagcttttttacattagccttttttttacattagtaatatgcattcatggttcctccatatcttttcatggattgagattttttttagaaagactttagaaaytacaatgtatgtgcaaaacccatcttggactttggaatttaatatgatcgtattttactaagataggtaa

SEQ ID NO: 113463 - DNA, 595 bp, Homo sapiens
aggatttgttcattgtgtacattagtaaagtktaaatgtcatagaaataaattattacttttacaaagatcatttgcaaactgaattatggatgagttataaatagaaggccacaaattcacacaaagaaagagagagcatgtatatatatggagactatttggcatcctaataaccaactagttcttcacctgaccatatcacacaaaagagccaccgttattgctgtaatgcttctgtatagtactacttttcaatcactatggctttcattaattcattgagtctaagcctctcccaatacagaaatttcctttacaataatccagaaacctaattctaccctctgactgaatacattcatgttactttatcagcaaattcattccgtttttgattgtatatagttgcttctttttttactgatacaaaatattttatatatttctggggtacatgggctaatttttgcatttttggtagagatggggttttgccatgttgcccaggcaggtctcgaactcctggcctcatgtgatccacctaccccggcctcccaaagtgttgggcgtgagccaccgcaccctgccgaatt

SEQ ID NO: 113464 - DNA, 595 bp, Homo sapiens
aggatttgttcattgtgtacattagtaaagtgtaaatgtcatagaaataaattattacttttacaaagatcatttgcaaactgaattatggatgagttataaatagaaggccacaaattcacacaaagaaagagagagcatgtatatatatggagactatttggcatcctaataaccaactagttcttcacctgaccatatcacacaaaagagccaccgttattgctgtaatgcttctgtatagtactacttttcaatcactatggctttcattaattcattgagtctaagcctctcccaatacagaaatttcctttacaataatccagaaacctaattctaccctctgactgaatacattcatgttactttatcagcaaattcattccgtttttgattgtatatagttgcttctttttttactgatacaaaatattttatatatttctggggtacatgggctaatttttgcatttttggtagagatggggttttgccatgttgcccaggcaggtctcgaactcctggcctcatgtgatccacctaccccrgcctcccaaagtgttgggcgtgagccaccgcaccctgccgaatt

SEQ ID NO: 113465 - DNA, 564 bp, Homo sapiens
gggttattagccactacaacaaaataatgaaaaatttacctatgcagagttcatagtcaaatgcaagaacacaataaaatagttagaatagaaacacaatattataatatacagtcatgtatcacttaacaacagggatacattctaggaaatgcatctttaggtgattttgctgttgtgtgaacatcgtagagtatacttacacaaatctagatggctacaaacctgtataacatttactgtacggaatactgcaggaaattgtaacacaatgataagtatttgtgaatctaaatatatccaaacatagaaagagtacagtaaaaatatagtattataatcttatgggaccaccattgtstatgcggtccaccattgaccaagatgttctgatgcagtgtataactgtagataaattttttggttttgttttacaatagcaatccatacaaaatgctgtggaaactccaaagaataagctgctggttaggtctgtcttagggcacggaaaaagtcatttggacaaaattaatacaatatttttcacaaatatgacgtagctac

SEQ ID NO: 113466 - DNA, 564 bp, Homo sapiens
gggttattagccactacaacaaaataatgaaaaatttacctatgcagagttcatagtcaaatgcaagaacacaataaaatagttagaatagaaacacaatattataatatacagtcatgtatcacttaacaacagggatacattctaggaaatgcatctttaggtgattttgctgttgtgtgaacatcgtagagtatacttacacaaatctagatggctacaaacctgtataacatttactgtacggaatactgcaggaaattgtaacacaatgataagtatttgtgaatctaaatatatccaaacatagaaagagtacagtaaaaatatagtattataatcttatgggaccaccattgtctatgcggtccaccattgaccaagatgttctgwtgcagtgtataactgtagataaattttttggttttgttttacaatagcaatccatacaaaatgctgtggaaactccaaagaataagctgctggttaggtctgtcttagggcacggaaaaagtcatttggacaaaattaatacaatatttttcacaaatatgacgtagctac

SEQ ID NO: 113467 - DNA, 564 bp, Homo sapiens
gggttattagccactacaacaaaataatgaaaaatttacctatgcagagttcatagtcaaatgcaagaacacaataaaatagttagaatagaaacacaatattataatatacagtcatgtatcacttaacaacagggatacattctaggaaatgcatctttaggtgattttgctgttgtgtgaacatcgtagagtatacttacacaaatctagatggctacaaacctgtataacatttactgtacggaatactgcaggaaattgtaacacaatgataagtatttgtgaatctaaatatatccaaacatagaaagagtacagtaaaaatatagtattataatcttatgggaccaccattgtctatgcggtccaccattgaccaagatgttctgatgcagtgtataactgtagataaattttttggttttgttttacaatagcaatccatacaaaatgctgtggaaactccaaagaataagctgctggttrggtctgtcttagggcacggaaaaagtcatttggacaaaattaatacaatatttttcacaaatatgacgtagctac

SEQ ID NO: 113468 - DNA, 607 bp, Homo sapiens
atgaaccccaacatcaacccttaaaatatacacagacattaytttgagatggactgtacacctaaaattaaaatctgtaattataaaaattctagaagaaaatagaataaagttgtgacgttggaataggcaaatatttctcaatgagaacaaaaatgtactaattattttaaaagtcatagtgttcttcatcaaaattaaaaagtctgctaatcagcagacatattaggtaaatgaaaaagcaagccttagattggaagaatacttgcattacacacatgtgacaaaagatttaaagctagaagacaaaagacaagtatccaataaaaatatatgccaaaatatggaacagacactttgcaaaaaaagttacatgaatggtcaaaaaatacattaaaagttgatcaaagtcataagttattagggaaatccaaaataaaaatcacaatggcctatcacttcagacccacaagaacaggtagaattaaaaagattgaaaacaccaaatgttggcaaagatgtgaaaaatgagaaccaatggtacaactacttcagaaaactgttcgtttctttcttatagatttagaggtttgctgaccccagaatt

SEQ ID NO: 113469 - DNA, 607 bp, Homo sapiens
atgaaccccaacatcaacccttaaaatatacacagacattactttgagatggactgtacacctaaaattaaaatctgtaattataaaamttctagaagaaaatagaataaagttgtgacgttggaataggcaaatatttctcaatgagaacaaaaatgtactaattattttaaaagtcatagtgttcttcatcaaaattaaaaagtctgctaatcagcagacatattaggtaaatgaaaaagcaagccttagattggaagaatacttgcattacacacatgtgacaaaagatttaaagctagaagacaaaagacaagtatccaataaaaatatatgccaaaatatggaacagacactttgcaaaaaaagttacatgaatggtcaaaaaatacattaaaagttgatcaaagtcataagttattagggaaatccaaaataaaaatcacaatggcctatcacttcagacccacaagaacaggtagaattaaaaagattgaaaacaccaaatgttggcaaagatgtgaaaaatgagaaccaatggtacaactacttcagaaaactgttcgtttctttcttatagatttagaggtttgctgaccccagaatt

SEQ ID NO: 113470 - DNA, 524 bp, Homo sapiens
tctgtggttttcacagaggcttctaataagagggttagtcaggtcattggctttctgagaaacatcttccaagaagcacactcagattgcctgttttctaagtgaatctgatggaatgcagttgcaaacgtaaatattggaggggatgtatgccccaaattcacctggttaataattaccataatgatgtattttcctgctctgacccaagttgcccagctctccaacagactaaaagggaattatgtgaagtcttgatacagaacttggtacaaggaagcctattctcttccttacttctctggctacccttaaatagtaaatgagccctctagaagatggacaraagggagcatggactggttcttatacaggcacacctcgtttcactgcacttcacgttattgtgcttctcaatcaccaagagcagttatctctctgtgggacaggacaatattactgagatggcctgatattcctgtttcacagtgtcttggttcacaattaaaataaaatttagggta

SEQ ID NO: 113471 - DNA, 537 bp, Homo sapiens
gtccagatagtcatgatgttaactctgatgattggttaaggtgtgtctgccagctttctctattataaagttacgattttaaatttctaaataatttgcggaagatatcttgagcctatgtaagtatgctattcctcatcaaactccagcctcttttttaaaaggaaaagaggacaattcattgggaatagtgagcaacaaaaggaaatggcatgaacatccagtcactcctaactccctgtccctggtaccgaggcaggttgctatgattgtccagggttttctctttaaaattaggacttgtctctgctgggtccatacaaagcttcttttaggggaaaactgaaggagttaatttgagtctcagtaaaaataacaaaccaaccccaacagcactttcttggtgtcaggactcagtccacttggaattctyctctctcctcctatcatcagaagcagggatcccttcctgcctattccaacttcactaaatgtacatcaaaaccaggcaggctttctactggtttatttacttct

SEQ ID NO: 113472 - DNA, 611 bp, Homo sapiens
tttattttgcttgtgtggttttgtggatcagaaatttgggaagtgtttggctggatagttcttgcctgggttctcttctgcagttccaggcaggtgcagggctatacttatctgaagacttgaatgggttgtatgtgcaaatggatcactcacagggctggccgttatcttggagctcaggtggggctatcaacctgagtacctccatatggcttctctctgtggcattggctgcattayaagagggaatgtcctgagagagaacgtttcaagagatctggatgcaagtggcaatgtttcttaagagtgagccttggaagtcccagatgtcattctgctgaattctcatagctcatattcaatgagtgagtctgtagtcttctcaatgagaggaagagcacacagtttgtggccatctttaatttttcacagtgactatcagagccctcccaactaccactctcccagggagatattggtggcatgaatgcttactgacagccagcagctgaaaatttgggagatgtttcaggagcctctgtggtttcacagtggggtgggggagacataagaaattttaatccagagaaatcttgaaaaaaaacttctgc

SEQ ID NO: 113473 - DNA, 547 bp, Homo sapiens
  misc_feature (1)...(547): n = A,T,C or G
ttaacctcaatgatattaacattttcgactagaaagttttttgttgcagagggggctgtcctgtgcatggcagggtgcttggcagcatcccctakcctccacctgctagattcttgtagcaccctcaangttgtgacaatcagaaacacctccagatactgccaaatatctctggggtgaaaggtgggtggggaggcataatcaccgcagttaaaaaatcactgatgtagagagtgtatatatatatatatatatgccctaagaaaagcggagaatagagaccgttttccagtcatcttatgttaagttactgccctcaaatattttcctgaaatagataagcaaaataagagctcgttcaagctataattattcaggcaattgactcaattctcctctttactttacatgtgagagcaccaacagtgatacttagctctcctgggcaaactgtgcagggtgtcaatgcttcaggaacacctgagaaccatcatttgtgggatccctcagtaacgattttataacacctagatgctagaagaaacat

SEQ ID NO: 113474 - DNA, 547 bp, Homo sapiens
  misc_feature (1)...(547): n = A,T,C or G
ttaacctcaatgatattaacattttcgactagaaagttttttgttgcagagggggctgtcctgtgcatggcagggtgcttggcagcatcccctagcctccacctgctagattcttgtagcaccctcaangttgtgacaatcagaaacacctccagatactgccaaatatctctggggtgaaaggtgggtggggaggcataatcaccgcagttaaaaaatcactgatgtagagagtgtatatatatatatatatatgccctaagaaaagcggagaatagagaccgttttccagtcatcttatgttaagttactgccctcaaatattttcctgaaatagataagcaaaataagagctcgttcaagctataattattcaggcaattgactcaattctcctctttactttacatgtgagagcaccaacagtgatacttakctctcctgggcaaactgtgcagggtgtcaatgcttcaggaacacctgagaaccatcatttgtgggatccctcagtaacgattttataacacctagatgctagaagaaacat

SEQ ID NO: 113475 - DNA, 619 bp, Homo sapiens
ttagctattaattaagttctggggaattttcttctttctccatttcattctttcagtggcagcaaattgtcttcttttgaagtcaatgccatgatttcctcatgtgaaacctctacaccaaaggaggcagtgttctggtcctgcttccctacctctctcctcacgcccacccccacatacatacacgctgtcaagtaacttatgtcaatttccaacaacagcaaaaaagtagacactagagcacttcacattctgtgctttaaataaaaaattttttctctgagatttgttgctacattcctaccccagaaagaccctagagatacaggcagagcccagaaagatcctgtgagtgggccagtgggaaggggaggagctgcagtacttatgtagaatgtttttaagccaaagaaaggattttatttcttcttaattgttaggctgtgtacaagttagtaattattttgtcgtcctccagtaccatgacaaacacacacacacatacacaacacacacacaggcacayttaatgcttcatgctggaatcactccaaccaataatgctgactggccactatttgtggggagaaaacattccaaagccccaagtcaagatatt

SEQ ID NO: 113476 - DNA, 619 bp, Homo sapiens
ttagctattaattaagttctggggaattttcttctttctccatttcattctttcagtggcagcaaattgtcttcttttgaagtcaatgccatgatttcctcatgtgaaacctctacaccaaaggaggcagtgttctggtcctgcttccctacctctctcctcacgcccacccccacatacatacacgctgtcaagtaacttatgtcaatttccaacaacagcaaaaaagtagacactagagcacttcacattctgtgctttaaataaaaaattttttctctgagatttgttgctacattcctaccccagaaagaccctagagatacaggcagagcccagaaagatcctgtgagtgggccagtgggaaggggaggagctgcagtacttatgtagaatgtttttaagccaaagaaaggattttatttcttcttaattgttaggctgtgtacaagttagtaattattttgtcgtcctccagtaccatgacaaacacacacacacatacacaacacacacacaggcacacttaatgcttcatgcyggaatcactccaaccaataatgctgactggccactatttgtggggagaaaacattccaaagccccaagtcaagatatt

SEQ ID NO: 113477 - DNA, 540 bp, Homo sapiens
acattaattttttggcaactgataaatagtttgagtaatggctgcatgttgttaatggctaaagtgaaatttatgagtcaatctttcaaaaatacaatatgacaaacaaattcatcccatgctgctttcctagtgttgccccatgtcatgttttgctgtggccacaacccaaaattaaatagcttccctccagcagtagtcttcatatttcactctccatctccaggtccaggcagatgcatcaatgggtaattcagtaccagaaatatcacctactgtccccactctaggcagaagaggcaagtgagaaatttatttgtattatgaagcaggcaacaaaacatgcatgagagatataacgtggatgtatatgagaaagagattgaatactcccttggaaaaatatttgcaaacaaaaaatgaatagacagtggttcaattacatggaaatctctctamataagggactctattcatcagtcaatcaagaaacattcctacacaacccattatgttttcagtggattgcgtcatatgttg

SEQ ID NO: 113478 - DNA, 643 bp, Homo sapiens
atttttgtcaatagctgtgggtataggatgcagaatgcattaaaattggattggattaaattgatggcagaactgggtcattccccaaatgttacttcttaaatatagcaatcttttacctatcattttttctttcactcaaaattaaattaaaaaagtacaaattatgctctggttaatttagatttataataaattagaattcaccatgcatacatgaattaaaagcttatagttatatttttatatttcatacacttttaaactaattcygtaacagtacaaagctaagtaaagtacttacattagctgcaccaagaagtattaatgtaggcccaagacctattgtatatattgatctgagcattattgatacaagaaacggccgaatacccacaggcttggagaagaaaaacagcatagatgtgcagatcgcaactgctatccaaagaagaaccgagaacaatggagaaagtgtacctgtaaaatgtggaagaaatttattgctactaagaataaaactaaaaaatgctaaaatatttgctgctctactttatatggtatcattaagtcaaagccataatccagtaaatttcaaaatgaccccatctacgttctttatatttcaaggaaatgtctttga

SEQ ID NO: 113479 - DNA, 564 bp, Homo sapiens
ttcccttctgtttccctgtacgttttatcagttgattgaataaacattgatagatataaagtcagattctcggaagatttatttttaaggttgctctttagacatttcttatgcccttttctaccctttgtataactgtctaatatatgtgaacttgactataatttttmcaaaaccttccaggaaggagtcagattctaaaagatactaacaaaagacaccactattgttttataatatatctggctcattgaaaatattttaaggtctctcataatgtatcaaaatacctatgtagaacagaaagaggtaagggcagatgacttatagctagacagatgagcattttagctgctgagcaactgaaagccaggatgatggacaagtggaaggaagcagaaagtggagatttaggatgtggaaaaggtgtcgttttagagagaaagagaagccatgtgacacaaagtgagtcaagctagcaaaggaatggctagagattgaatgtgagtagaaaggaaaaaatcccaggctgagaattaaaatcatattggctactagaatgaa

SEQ ID NO: 113480 - DNA, 540 bp, Homo sapiens
ttcttagttctgtggtcaaaatttgcttttgcttttatttgaatatttcctgctccctcccacaatgatcttcaagttgggtatgccaaagcagaccattttccttaagactttattttcattttttcctcttctgggatggtggagctcataagaagcaagagaacgcctttgtagcctggtgcagccagaagctcttgttgaatcttgtcatgacacgcatgactcctgagattacagagccttccacatgagagctgctctaaagtctcatggactagctataaaataggaagttataaaaaaggactggtattcgccattcatcggaagaagagcagtgtttattgagcgtcatggtcatcactagggctggttaccatgcatttttagtccttcttgtcccctattctgggcacagggctggaattcatttcctggacttatcgtagttgaggtggtgtattagttttgrctaatgagttatgggggaaaagtgatgtgtgtcaattataggctgcacattttattagcagtata

SEQ ID NO: 113481 - DNA, 627 bp, Homo sapiens
caccacactgctttccacaatggttgaactaatttacactcccaccaaccatatataagcattcctttttctccccaaataaagttttctcatgtgtagttttatcctcataaatagagtagccatgtgtyttggtttatccttgctcttccagcatactcgttgatcttatctggtttggccaacatctggcctggattttccatattttaatcaagtattaccttaatacttgcactaacataagctaagctggatttggtagatcagtattgtcttttgagcttcttccagaacctacaaaggaagtgtctgagtcacaggtgcagggaaacagagtgcttattgaaacgtggttaaacccacaagacaactaactggctgggacctctctctcttttccaagcactttacagacaccagttaattaacacctccctttcaaggactgcatgcagggcactcaaagataaaattaaggctctgtgacaggagcaggtagggacagcaaccccatggactcttggacagtggtgggaggagggcacaacgctctgcccccgcgggtcacttggtgtacctgattgctgtctgtgttgggaggagctcaaagcagctgggctgcca

SEQ ID NO: 113482 - DNA, 615 bp, Homo sapiens
caagaggagcaagtggctcagtatttcacatggaagcatccaagacgctaaatgtggaggataatgaagaagcaatagatgcagcaacgctgatccagcctccctatccatcttacacagtctgagttattttttaagtcattrtccactagacaccaggacaattcttaacacataaaactgggacacagagacctagcatctgaaggaaaatcactttgatcattgaccaaagtggtcaaaatcactttgtccagcacagcaggaaatgaagcagaggctgggctgattaatttaacccccagtgcagtcaatacagttaaagatacttgattagtggttttacttttaatgtacttttaatgtactattagatatttgtagacattttaatgttgcttaaagttcagtaagttcttcctatctatacacatagcttactgtttgtccctaccctactctggggtggcatcttctccccttttccagaagatgcattttcctggcatttaacaaatttagcttgagcagactggagcaataactggaaacaagcctgatgaacttcttttcattgtgctgatgaaatacgataatgctacaagttaagaaaga

SEQ ID NO: 113483 - DNA, 613 bp, Homo sapiens
ttactgttacacatttttgattcagcacatctattctttgatttttcttttcccctttgccctgcagagcgtcacagacattaaccgtttttctgttgctgaaatatttgcccccccatgggaatccctgcaaaatttttgagaaaatgcccattgggttacattcggtttttgtttttcctttttggttcttattttttttttttttttctgagacggagtctcactctgtcacccaggcwggagtgcaatggcacaatcttggctcactgcaacctccgcctcccaggttcaagtgattctcctgcctcagcctcctgagtagctgggattacaggtgtgcaccaccatgcccagctaatttttgtatttttagtagagacggggtttcaccatgttggtcaggctggtctcaaactcttgacctcgtgatctgcctgcctctgcctcccaaagtgcaggtattacagatgtgagccacagcactcagcctggtttactttctcacaaaatcagcaacctttttttttttttttttaaatccatcacccttttcttccctccaggtaagtcatttttatggaggctgtcactactgctggagcaagagggc

SEQ ID NO: 113484 - DNA, 426 bp, Homo sapiens
tttcttgaacactggctgatgccaggaaagtctgtaaagacagaatggacctccctcccttcttttttatttttatttttttaagatacaaggactctgttgcccaggctggagtgcagtggcatgatcatagctcacttcagcctcaaactcctgggctcaagtgatccttccgctttagtctcccaagtagacgkgattacaggtatgcaccaatatgcccagctaattttattttatatttttttttagagatggaggtcttgctatattgctcaggtaggtcttgaacttctggtctcaagcagtcctcctggctcagcctcctgcagctctggggttacaggtgtgagccaccacacccagccttcccttctttcttaacaccattctccatctcagtactgtcttaggaacacagaattc

SEQ ID NO: 113485 - DNA, 622 bp, Homo sapiens
cctgaccttgtataggcctaggctaatgtgtgtgtttgtatcctcattttttacaaaaaaagttttaaaaaagtttttaaatttaaaacatagaaaaatgcttatagaatatggatataaagaaagaaaatatttttatggagctataaaatgtgtttttgttttaggcttagtgttatcacaaaacagtcaaaagttaaaaaaaatctaaaaggttacaaagtaaaaacttaccataagataaatttattattgaagaaagaaacatttttaaataaatttaatgtggcgtaagtrtacagtgtttataaagtctaccaatgtgcaatagtattttaggccttcacattcactcaccactcaatgactcattcagagcaactttcattcctgcaagctccattcatggtaaatgccctatacagagagaccattttttatcttttatactcgatttttactgtaccctttctttgtttaggtattcaaataccattgtattacagttactacagtattcagtgcagtaacatgctgtacaggtttgtagcttaggagcaataggctgcaccatgtaacctaggtgtgtggtaggctataccaactatgtttgtgtaagtac

SEQ ID NO: 113486 - DNA, 612 bp, Homo sapiens
gcaccatttatgcaaagtcagggcaagactcgagccaggcagcgggagaggtcacttgtgaagaaggttccagaaaggggaagacctaactgtttgtagtgtctaaaagattgtggaggaaaggagaaatatggaaggtgatgcccagagaagaacttttgggggaaagtggggaggggggaaatgcttagataagtttttatgatgttttgccatatagtgataattccctttttccaattgctattttttccagtacacattaaaataaataccgtgttaaawttttttttttaaattccaatcaaagcaaaagctatcgttgtatatagacaaaatcgtacaagcagtccattcttcacagcatgtccacactgtactgtgcagcacaactgtacaacaggcagcatgatcctcctcaaattctggtagctaaacactgcagtacaggtgatactttaggatacacaacaggacactttccatcactttaatgtgcgctatttggaaaagcattaggctttttaagttctaacgaataaatcacgaaataacattgaaaagatctatacagaagaagccctaggcctgtagagaatacttatgaagctt

SEQ ID NO: 113487 - DNA, 623 bp, Homo sapiens
tagggacaacgcatgatgttaggagtgacggaagatacaaagatgaattgaggagagttcctgccttctgggagaactataagaccatagaaacagatggactttgataaggcttctaagttctgtggaagcacggggaagtaggggaataattctgactataagatctagaaagcttcttggaggaagcggaatttgagttacattttgaggaatgagaagggctagtagacatttattaggggaagggatattccaagmtgagagaggagcttgagcaatggcaaagaaaatggaagagtaaaagcctgcttgagaaatactaaaaagcctgtggatgcctgaagctgaataacatggataatgacagtgtaaaatgagataagcctggaaaagtagggagaggctaaattggagaggacttgaaaaggtgggctcacaaggctgcactttcttcgggatagccataacaattttaagaagaggaaggctgatgctaattatcctctctggaggagaaccttggtgtctgagagaaccactgaagacaattgtccaacatctaaaaccttccactgggctctccagaattctctgaatgtcgtcaatctcttctcagattg

SEQ ID NO: 113488 - DNA, 602 bp, Homo sapiens
tttaaatgaaaaattttaagtgacaaatagatgataataaaaatcatgaaactaccatttatgagcatcatgtgtatgtaaccacactgcatgcagtatctcttaatcctcaaacatcctctgaagtgggtgttatggttgtccccatttgaaagataagaattctaaggcttagagatgttacttttctaaattcaaacagttagtgcttggcagaaccaagattctaacccaggtttgttttttctttaaccaacaaagtagatattattgtattccttcaagatgttgtcattccaaccaataagatataacctagctatattatttgggggggaaaagagtgacccagaactcagagttttgtttttgtttcatttggagataaggtcttgctctgtcacacgggctggagcacagctgcgtgatcatagcttactgcagccttgaaatcctgggctcaagcagtcctcccatctcagcctcccaggtagctaggactacaagtgtgtgccagcacactcagcttgagtttctaaaaaaaaatattgygagctgcccacatgtttacaatatcttgggctcacaaaaggtaaattcta

SEQ ID NO: 113489 - DNA, 586 bp, Homo sapiens
caagtatgcctggagccacgaggagctggaagaggcaagaaggattgtgccctagagcctctgcagggagcatggtcctatccacaccttgattttagacttctggccaccagaactgtgaaagaataaatttctgtttttttaagccactcagtctatggtagtctgcaatggccaccctgagaatgagtgcatcctcttggtctaacacgtatgcatttcctctgccaataatcttgcgtttggtcctcatagaactctccacytatccacctcctgtttatcttctttgtgtctacatttttgtctgctccttcttccagagaaaatgtagaatcactcggttccatgaacaggaccattggtgtaagactaggtcaaaccctgacttcaccacttatgagctccttggtgtggggccactgccttcatcacgctgagtcctgattttctcatccataaagtgggcataaaaatagtccccagcatgggattgtttgaaaggttacatgtgacactgtgagccctgagtggatggactgcccagcattgagcaagtgcttgtgagcagtcctgcagatgatgg

SEQ ID NO: 113490 - DNA, 605 bp, Homo sapiens
ttttgattaatgtatttcaattcttgctgaacaaaaatatttaaataagatagaagagttgtattttaaattatttggatgatattaaaaatacctaatacataaatatgcttacaataaccagaaatattcataagacaattctaccattcatacaaaaaactttgaattatttcacgaaataaaattgagcaaatctgccactttattgctttcctgtcaaagctggctgtatgtaagagctggtrgagacagtgaatttgcacgttcaggaaagcgatttgaaggaattaatctttacaagcatttctaatctgtgaatttaaactatttctctatttttggaaagatgggtcacagattttgtagatatattcattttacttagacaaatgagtgcttgtcaatagggtagtgtttgtgtgtgtgtatatatacacataaaatataccacctatacattgtgttagaatttcaatttgaaacaccatgtatataatctttaagaatgtaactctcttaaacttcagtcccttttatagcagactaagtgctgctaatatacaggaagcaagaggcagcagggtcttcacctcaaaaagacc

SEQ ID NO: 113491 - DNA, 536 bp, Homo sapiens
tatatactgagaggtaggggtccgatactattcttttgcatctgattagccaattttcccagcaccatttattgaatatggtgtcctttctcgcattgttgatttttgtcaactttttcagagatgaatttgttgtagacaagcagctttatttcagggatctctgttctgttccattggtctatgtgtttattttgtaccagtaccatgctgttttgattaccatattcttagagtgtagtatgaagtcatgtagtgtgatgtctctttctttgttctttttgcatttactatttgggctctttgttgatwccatatgaattttggaatagttttttttatattctgtgaaaaacaatgttcgtagtttgataggagtagcatattcaatgcaatttagattgctttgggctgaatggacattttaatgatattattcttcccatccatgaggaccaaatgttttttcacttgtttgtatcatcttttatttcttacaacattgttatgttgttctcctcatggagatcttgcac

SEQ ID NO: 113492 - DNA, 608 bp, Homo sapiens
gtaactgctagtttcccattttgtgggcattggtagtaactaaaattttcagaataaccaataatttgactgagtttagttaattaaaaaaaactttagataggaagttaaaaacataagcagattggtgaaattgtgtgaactattgattcatttgaatcatacaatgcctgatttagaagcagcttcagagatcatgtctcaatcttattttacaaatgaagaaaatgggtcccaagggaccaaagggaatggcttgtccactgtcaaatactcatattattttaggcaaacatgtatctcttgccctataattaatctcaaacttaggaatatctctattctcacagagttcgagtctcagttacacagtaagaactggaaagtctactggtctgaatgattttgaatcacctaaatatcacctaatatttaccagagtgcctgacacataatcaatgcccagtgcttaaggtgtagttgagtgttgaatgaatgcattataataaaagctcttcaraagaactgctatgaatcattgtcacatgatgtatttgctgaaggcagagctccttaactggtggggaggatcatcaatttggaaactg

SEQ ID NO: 113493 - DNA, 571 bp, Homo sapiens
gtaggcaggcaatatatctgtagagtgattcctgggcttcctggcaagcagtgaagtgcttgtctacaggactgcttgcagagccaaggcagacaacagagctggccaagccagggtatgtatctttccagcctgtttccatggccaactcctcaaggtatctaattaaaggccacgcagacacaggagacaagagcctttggagaaagaggagcttgaagaggttaaacattttgaactgcttgctaccttyggctttggcctaaaggaaccctgagggatgctttgcaaagaacctggcctccggaatcaaaagtacagagacaatctactggaatgtgtggctgctttagtatttggagaataataataagaaaagccagatgtctttaaaaagcaggtaatttgcttttcaaaaaaatgtttgctcttctcatgttttaaattgttcagctcttgtcttctatatttaggttgttttgttctctaaatgtttagcacttagagaatgttatattcctttgactagattttcgcttagtttttatcttcctttaaaatgtttcagcta

SEQ ID NO: 113494 - DNA, 562 bp, Homo sapiens
aatatatagattttctatttcaacaataaatgaatcttctaatactttagtaaaacttctcaaatggagcttctgtttaagwttttaaagtaagcctagtggtccaggaaataacacgccaaacaccagtagtcataatactttctctctgactcatattatcagggcagaagttcgagcctagtttacttaggttctctgtttagagtcctagaagcctgcactctaggtgaaatccagctgcagcgatagactcatcagagactcatcagatctccactggtgaaagatcttcctagttccctcaggtagctgaaagaattaatctctttgcagttgtaggactgaattccccattttcttgctggctggctgctcctagaagctgcccacaattccacatgactatctccgtggaccctttcacaacctggtagctcacatcctcaacaccagcaagagagactctctctgagtttagcctgcaaaggtagttatacaatgtatggcaatcacagaagtgacatcattacctttgccatattctaccattagaagcaag

SEQ ID NO: 113495 - DNA, 596 bp, Homo sapiens
ttcaatatagggagattcaagagaccacatatattaaatcagaggatcatcccacaaagtacatatatccttaatattttgggtttctacacactgtaactaagcatgaatatttttagttaaaattgttagagtgcaacatattaaacrtggtattcttttagctcttaaaagttatgtgaacatagtcaataagataatgcttacaataaaatctctgaaagaaatggactttgaatccaaggtttggtagatttttttccactcccttttatttatttatttattattattattactattattatttttttttttttgagacagagtctcgctttgtcacccaggctggagcgcagtggtgcaatctcggctcactgcaagctccgcctcccgggttcaagtgattctcctgcctcagtttcccgagtagctgggactacaggcgcccgccaccatgcctggctaattttttgtatttttagtggagacagggtttcaccatgttagccaggatggtctcgatctcctgacctcatgatccgcccacctcggcctcccaaagtgctgggattacaggtgtgagccactgcgtc

SEQ ID NO: 113496 - DNA, 596 bp, Homo sapiens
ttcaatatagggagattcaagagaccacatatattaaatcagaggatcatcccacaaagtacatatatccttaatattttgggtttctacacactgtaactaagcatgaatatttttagttaaaattgttagagtgcaacatattaaacgtggtattcttttagctcttaaaagttatgtgaacatagtcaataagataatgcttacaataaaatctctgaaagaaatggactttgaatccaaggtttggtagatttttttccactcccttttatttatttatttattattattattactattattattwttttttttttgagacagagtctcgctttgtcacccaggctggagcgcagtggtgcaatctcggctcactgcaagctccgcctcccgggttcaagtgattctcctgcctcagtttcccgagtagctgggactacaggcgcccgccaccatgcctggctaattttttgtatttttagtggagacagggtttcaccatgttagccaggatggtctcgatctcctgacctcatgatccgcccacctcggcctcccaaagtgctgggattacaggtgtgagccactgcgtc

SEQ ID NO: 113497 - DNA, 549 bp, Homo sapiens
tatactcagtatgaatattcaatacattatacatatctatactcaatacatatttttgagtgaattaattgagtacttcttatgtgttgggttctgttaataagtacttcaaatgcattatctctttcaatccctcaagattccagttaagtgtagatactattattatcctaattttaaggatgaggaaatgtaggtttggcattggtaagtggttttctgaaagatattcaattcataaaaaagatagaatcaagccttaggtccaggcctgtctaacacaaaagcaaatgcccttagctactgtgatatacttctcctacagtaattaaytgagagaaaattttgtgtgaaaatatggaaataattgtgcctggtgggatcatggacactaacaggataagatcatcaaatagtcctgtggtcccctatgatgaggtgagcgtagccaagcccagagcaggcagcgaagcctggtgggggaaaagctgtggggcacgcaagagaaagaggtcacaagcctggggcagagaatgtagtgtccagttg

SEQ ID NO: 113498 - DNA, 432 bp, Homo sapiens
ctagagctcaggagttcgacactagcctgggcaacatagtgaaaccctgtctctagcaaaacctataagaattagccaggtgtggtggcatgtgcctctggtcccagctactcaggaggctgagatgggaggactgcttgagcccaaggaggtggaggctgcagtgagctgtgattgtgccactgcactccagcttgggtgacagagtgagactctgtctcagacaaaacaaaagaaaacaaawcaaaacaaacaaacaaaacacacaaaaacaagcaaaccaaaacacataacaatcaaaaacctctggtcgcatgaagctcaaatttatttgtaggtagacggaaaataaaaataacaagtaagaaaaatatacagtattttataagtctaaaatgcgtggggattaaatgggcagggtgaaatcagaca

SEQ ID NO: 113499 - DNA, 576 bp, Homo sapiens
caagcttattttccaaaaggataaaggtatttcccagtgagtaggaaatgtttgcattcttcatgtatttgtgcatggatttccaaattgatggattttgcttcaaaattagkcaagaaatcaatcctggaagttattgtgtgtgtagctcaattcagtaaagtggcaaaatattatttatttcatcctccttatgctatttagtttccatctcattcctcatggtaatggagaaatagtctatgatattgtaaacacatatggatctttaagatttattttatatttgttttagcgttcaggaggcacttggcttttgcatctctccctctttaggaaagaaaaccaggtcatgccttatattttatatatgttttacatgtatttcctttcaaaaatgtgtcatggtatacttagtccttccctttaaagaaaaccataatgcagatctcattaaggaacataaatagtgatacatatatatggaaaaggacacacattctttagtgcagtggtgggaactagtgatcttcctccaaatgccagaataaatagatgttcctagcaaaaagcagg

SEQ ID NO: 113500 - DNA, 576 bp, Homo sapiens
caagcttattttccaaaaggataaaggtatttcccagtgagtaggaaatgtttgcattcttcatgtatttgtgcatggatttccaaattgatggattttgcttcaaaattagtcaagaaatcaatcctggaagttattgtgtgtgtagctcaattcagtaaagtggcaaaatattatttatttcatcctccttwtgctatttagtttccatctcattcctcatggtaatggagaaatagtctatgatattgtaaacacatatggatctttaagatttattttatatttgttttagcgttcaggaggcacttggcttttgcatctctccctctttaggaaagaaaaccaggtcatgccttatattttatatatgttttacatgtatttcctttcaaaaatgtgtcatggtatacttagtccttccctttaaagaaaaccataatgcagatctcattaaggaacataaatagtgatacatatatatggaaaaggacacacattctttagtgcagtggtgggaactagtgatcttcctccaaatgccagaataaatagatgttcctagcaaaaagcagg

SEQ ID NO: 113501 - DNA, 576 bp, Homo sapiens
caagcttattttccaaaaggataaaggtatttcccagtgagtaggaaatgtttgcattcttcatgtatttgtgcatggatttccaaattgatggattttgcttcaaaattagtcaagaaatcaatcctggaagttattgtgtgtgtagctcaattcagtaaagtggcaaaatattatttatttcatcctccttatgctatttagtttccatctcattcctcatggtaatggagaaatagtctatgatattgtaaacacatatggatctttaagatttattttatatttgttttagcgttcaggaggcacttggcttttgcatctctccctctttaggaaagaaaaccaggtcatgccttatattttatatatgttttacatgtatttcctttcaaaaatgtgtcatggtatacttagtccttccctttaaagaaawccataatgcagatctcattaaggaacataaatagtgatacatatatatggaaaaggacacacattctttagtgcagtggtgggaactagtgatcttcctccaaatgccagaataaatagatgttcctagcaaaaagcagg

SEQ ID NO: 113502 - DNA, 397 bp, Homo sapiens
aaaatgtacctgaagcaaggactcttctgcagactctttcaacagggcatgtgtttgccagttgggtgtggggtgtgtcttagtttgagttttcccagaagcacatgtgtacttcaaaaacagggcaaacactgggatcatttaaaatgcaactgctgrgtcctgaacgtttactttattaggcaaaacgtgaagtacattctttctctgacaaaatacggccatctcttgaggtaagcagtgctatgccattttactgatcagaaacgttaatcacagaagcagactctaaaacaagtattacagtgtaactagtttaagaagtgcaggccagaaagaaaatgaggaaatgacaaggggattgaaggcgtccagtaaagaacatttggccaggcgc

SEQ ID NO: 113503 - DNA, 397 bp, Homo sapiens
aaaatgtacctgaagcaaggactcttctgcagactctttcaacagggcatgtgtttgccagttgggtgtggggtgtgtcttagtttgagttttcccagaagcacatgtgtacttcaaaaacagggcaaacactgggatcatttaaaatgcaactgctgggtcctgaacgtttactttattaggcaaaacgtgaagtacattctttctctgacaaaatacggccatstcttgaggtaagcagtgctatgccattttactgatcagaaacgttaatcacagaagcagactctaaaacaagtattacagtgtaactagtttaagaagtgcaggccagaaagaaaatgaggaaatgacaaggggattgaaggcgtccagtaaagaacatttggccaggcgc

SEQ ID NO: 113504 - DNA, 533 bp, Homo sapiens
cagaattttgactgcccttatccttttggcaaaaacaattgacaatcatttgagagaaaacattattcaggcatctaaagacagtccaaatcagtttttcatataccacattttgtacatccactcaaagaaatgaggttcgatgaagagaagacactgtgagaagaaatcaacagacacaaaagaataaaagaaaaaatctatgttaaagcaactattactatgtccaaggaggtgaagtcaagagtggaaacttcaacaagatagtacatactgtaaaagtggcagattaggataaataaaaccacacaaattctaagactaaaaatgtgaagaaaaaaatgattcaataaatgaactgaatagcaaatgagacacagctatgtaaaaaagaagtgattcagaattgatatcataggaaactaaccagaaaaaagtatgcatatatttrtgtatatatatatatgtatatatatatatacacacacacacacacacacataaaagcatcaatacacacatatatatatgta

SEQ ID NO: 113505 - DNA, 590 bp, Homo sapiens
acttaggaaacagatatttaatacattgttatttgaacaagcttattgtgggtctagaatccctggactttatgtgaataatcagaacgatctgttaatataaaaatgtagattttatttcaaagatgctatgactgtatggacataagcgggtcactggtataaattagatgacaaactgtgttctattaatttctttcattatatacttttctttctcctttaaaaatattcaaacagatacataagtatgagcgcacaaaaaagtgaacagataaaaatctctacaaatgtattgttcacaggtggcctcccaatctgcatctttgaacatgagtggctgatactgagaagcatgtgggtagatgtactaatgactgtgttacttatttcttcacctttattttatttwatttattttattttattttattttattttattttattttattttattttattttctagcttagaaaattcaaaacctaaacgttttgttgtgtcatatattctacaacattgtcaggaaaagtttagctttcctatcagtcagtaagtccttggggatgtttcccagaaggaaactga

SEQ ID NO: 113506 - DNA, 504 bp, Homo sapiens
agcagtggctcacacctgtaatcccagcactttgggaggccaaggcgggtggatgacatgaggttgggagttcgagaccatcctggccaacatggtgaaacccatctctaccaaaaatataaaaattagctgggcatggtggtgggtgcctataatcccagctactcatgaggctgaggcaggagaatcgcttgaacccgggaggcggaggttgcagtgagcaccacccccccaacaaaaaaaaaagaagaagaaaatcatgacatatgtgacaacatggggggactctggaggacattatgctaagtgaaataagcagactagaaaaacaagtactgcataatcctacttatgttaggtatctaaaatagccaaattcatagaagcagagagtagaatggtggttaccacagaatggggaaagagaagcaaacwgctgctgttcaatgggtataaagtctcagttatgcaagatgagtaagttctagggatctgctgtagagc

SEQ ID NO: 113507 - DNA, 564 bp, Homo sapiens
ggaggcttgaaatcttctgatgcatagaggactgtgggacaagtttgtctgcttctaagagaaagaattaggtttgaaatgcaaaccgtgacaggacaccaagcctgtgcctgggaatcagatctggcaggatgggggagacagctgccaacgtccagagagaggctgcacaagcctccagtgatatgggaagcraaaggtcttttcaatatttggccacatgttgatggtggccctccagatcagaaatgcattgcctgatggatcaggaaaccatgccagggcattctgttaaagataaaacatgagagttttcagttgaacggtgacccatgcctagatgttcatgtctctgttgcacattgggctgactgtgcttgcagactgtgaagtgggaaatatctgaacgaacacttctgtatttacagaaaatgacaacgatgacgatgaagatgttcaagttgaggtggctgagaaagtgcagaaatcgtctgcccccaggtaacactgaatactcaggaacaattaatggatggtaacatatgaggaatatctaggaggcac

SEQ ID NO: 113508 - DNA, 564 bp, Homo sapiens
ggaggcttgaaatcttctgatgcatagaggactgtgggacaagtttgtctgcttctaagagaaagaattaggtttgaaatgcaaaccgtgacaggacaccaagcctgtgcctgggaatcagatctggcaggatgggggagacagctgccaacgtccagagagaggctgcacaagcctccagtgatatgggaagcgaaaggtcttttcaatatttggccacatsttgatggtggccctccagatcagaaatgcattgcctgatggatcaggaaaccatgccagggcattctgttaaagataaaacatgagagttttcagttgaacggtgacccatgcctagatgttcatgtctctgttgcacattgggctgactgtgcttgcagactgtgaagtgggaaatatctgaacgaacacttctgtatttacagaaaatgacaacgatgacgatgaagatgttcaagttgaggtggctgagaaagtgcagaaatcgtctgcccccaggtaacactgaatactcaggaacaattaatggatggtaacatatgaggaatatctaggaggcac

SEQ ID NO: 113509 - DNA, 556 bp, Homo sapiens
tatagtatattaaaagatatttaatacataaataacagtaaacaaagtatcctctactatggtttgaaaattatttagaatcttgcaattgtcctgggtctctctaaatgctaatgatcaccaatgagtttgacaaatagagatgttacaagtgattggtttaaatctttgctgcaccttaaatgtattttaaaatgtgcccctaactctttattttacctgactgtatttcagtgcatcagtttaagagaagacatgagatcatgggtttaagtgaggcttcatcatactaagacaacrtgatcaggtaagtacttgcccctctacatgtcagcattctcacctgtaacatagtacaaacaggactttgtctgagtcccttgcaacattttgtggagcatgaaatacaataaagaccgtggatatgctttgtaaaccttgagtttctacacatatgcaaatataagtactggtaagatatagaatgaacaagggaaatagaatcctatttttatgtttcaattttatggattgctggaaaattgaagtgtatagg

SEQ ID NO: 113510 - DNA, 501 bp, Homo sapiens
aggtccctgtgtgaggattagacagtggattgttatgtgtgtaggggaatcagcttaatgtgtctgtccatgtctgaatttattgcagaaattgaaaagaaggggaaggggaagaaaagaaggagaagaagatcaaagaaggaaagaagaaggggaagaaaagaaggggaagaagatcaaaacccaccatgccccaggtgactttcagcaattgtggatgcttaattctgtgttaacacctggaggcaacagattcagggaaaccagagtgtgtttgatgtcatgttttcaacgaaggctgaattactcctactgtcattgctgttggttttcattgcagtagatgtttaggtttccatttcttcctccccttatcatttmctaacgtaccataggttgaccatacttcaaaagctgtactctcatggccactgcatcgaattttgagcatattttatggaaaactattgagctcactcttttcatgatcacagtttgctg

SEQ ID NO: 113511 - DNA, 444 bp, Homo sapiens
gaaccactaacatccactggttttgtagaaacagcatacccttagtgcacttaaagttggaaaaatggctctgcctttagggccatgcaatgaaacagaatgtgtggtagttgacacaggaagagcagagcagagtttataacaatggccacaaaacagttaagaaaatgctttggggcttttaagcagcagataaggtgactcagaggaatgttagacaatcgcagaaaagcaacttcagcaaagtttttgattcagtgggcactgcatacttagtccatgctctgcatctgttctttcacagtctgtcccttcatcgacttgggcctacaatgacttttctgggaggggasagggatcaacacaacagcatgcacacacctgaaataaagaatgaatttctgattttcagattttagtctctgacataaccaaagaagtgac

SEQ ID NO: 113512 - DNA, 400 bp, Homo sapiens
cctccagctccatccatgttgctgcaaaggacaagattttgttcttttttatggctgcatagtattccatggtgtaaatgtacattttctttattcaatgcaccattgatgggtacctaagctgatgccatatctttcctattgtgaactgtattgcaatgaacatacaggwgtgtgcatctttgatagaatgaattattttcctttaagtatataccagtatacccaaagtagtaggatgactgagtctaatggtagctgtattttaagttcttcgagaaatctctaaacagctttctagagtggctgaactagttcgcgttcccactgacagtgtataagccttcccttttctctacagtcccaaccacatttgttgttttttgactttttaatagcc

SEQ ID NO: 113513 - DNA, 400 bp, Homo sapiens
cctccagctccatccatgttgctgcaaaggacaagattttgttcttttttatggctgcatagtattccatggtgtaaatgtacattttctttattcaatgcaccattgatgggtacctaagctgatgccatatctttcctattgtgaactgtattgcaatgaacatacaggagtgtgcatctttgatagaatgaattattttcctttaagtatataccagtatacccaaagtagtaggatgactgagtctaatggtagctgtattttaagttcttcgagaaatctctaaacagctttctagagtggctgaactagttygcgttcccactgacagtgtataagccttcccttttctctacagtcccaaccacatttgttgttttttgactttttaatagcc

SEQ ID NO: 113514 - DNA, 506 bp, Homo sapiens
ttagtgaaaatagcaattatttattggatatttattagaagaggtcagtactttatgcacattatgtctaattttcacaaaacattgtaatatgtcatagtcaattttaccgtgaagatttcctcagtgtcaaatagctggtgtcattgcgtgttcagcaatgttacatgtaagaaatagaaagcacattaggtgttttaagaagaaagaagtagaatagaatggataatgatgctcacaaaattgctgaaaaagtagaagaaatgcaagtctggacaagaacaaccaaggacccttggtttacagatcacaactgtagttataatctagaggtgaggaagctatgattggtgcttctgctactattgctgacgtgactgcctcacatgcaatcacgcacttgtgctatcatggcatagtttttacctgtggcagccacagtaagattgtctccatctcatttttactttcccaatattgmttgagtaaatctcattggcaaaacc

SEQ ID NO: 113515 - DNA, 596 bp, Homo sapiens
atgacaaatataaaagtaaatgaaccttcttatgtaacataatgcaactccctcatgtaacttacattattcccaataggaaatattatatctctgtgtctatcttggagtgatgttcactattttttacacagtaattttaatttatttttcaaaattttattttattgtggtaagaacacttaaaatgagacctacctttttaaatttttcagtgtacattattgttgactataggcacaacggtgaacagcagctctctggagcttattcatcttgcttaactgaaactttgtctgttgattagtaactgtatcatgctgctgataaagacatacctgagactgtgaagaaaaagaggtttaattggacttacggttccacatgactggggaggtctcagaatcatggtgggaggcgaaaggcacttcttacatggctgtggcaagagaaaatgaggaagatgtaaaagtggaaamccttgataaaaccatcagatcttgtgagacttattcactaccacaagaacagtatgggggaaaccacccccatgattcaaattatctcccatcaggtccctcccacaatgtgtggga

SEQ ID NO: 113516 - DNA, 615 bp, Homo sapiens
gtattctgcagctgatcgcatctgccatcgtcgccttactagagatgagttttcactttcgggtttttatagcacctcatattttagggtattaaccccttactgccatgttttcagagaacatgaagatcccatccgtaagcatcactctggcctccttgcatagggaacaaaacacaaaaaagaaaggaaagaaagaaagaaggaaagaaaggaaaggaaggaaagatggaaggaaggaaggaaaaaaggaaggacagaaagaaggaaggaagggaggaaggaaggaatgaaggaargaagagagagagagaaagaagaaaaggaaagaaagagagaaagaaagagagaaagaaagaaagaaagaaagaagaaagaaaagaaaagaaagaaaagaaaagaaaagaaaaggaaagaaaagaaaagaaaagaaaagaaaacagctcgctccctgcatctggccggccaataggaagacaagaacagtaactaggaagccgagtggcctctggaagtctcaggagtccagtggttccacaagatgcctcagattgtcagttttgccctaaaattaacaagaaagggtgacgaggatgcacccacataagtgggtcc

SEQ ID NO: 113517 - DNA, 630 bp, Homo sapiens
caaagcagggtgtggtatcacctcacctgggaagtgcaaggggtcggggaactccctcccctagccaagggaagccatgagggactgtgccatgacagatggtgcattctggcgcagatactatgcttttcccgtggtctttgcaacacacagaccaggagattccttgggtaccttcaccaccagggccctgggcttcaagcacaaaactgggcgtccatttgggcagacaccaagctagctataggagttttttttgtaccccagtggcacctggaatgctactgacacagaaccattcactcccctggaaagggggctaaagccagggagccaattgttctagctcagctgatcccaccccatggagcccagcaagctaagatccactggcttgaaaktctctcttccaacacagcaggctgaagtcaatctgggatgcccaagcttagtcagggggtggggtatccaccattacgaaggcttgagtaggtgggtttcccctcacagtgtaaaggggaagttcaaactgggtggagcccaccgcagctctgcaaagctcctgtagccagaatgcctctctagattcctcctctctgggcagggcatctctgaaagaaaggcaagagc

SEQ ID NO: 113518 - DNA, 582 bp, Homo sapiens
cacacagcagtcacagagccgggagagccagaggaactgagccacagccctgaggtcacagtggccacggggtcaagcccacctaaggcccgccttacgtctgtgatatggtttggctctgtgtccccacctaaatctcatgttgaattgtaatccccacatgtggagggagggaggtgactgggtcatgggggcagttccccgatactgttctcgtgatagtgagtgagttctcacatgatctgaggggttcacaagcatccagtgtttctcgtgcttgtgctttcctttctttcctgccacgtgaaaggtccaaatttgcttcccctttgccttctgccatgattgtaagtttcctgaggcctccccagccatgtagaactgtgagtcaattaaagctctttcttttataaattacccagtctcrggtatttctttatagcagtgtgggaaggaactaatacactctggaattcttccttttactgctaagggcttcttgagtcgtgtttcctcacttaccaccccagaactccaagttggggtactgcccgttgggtttccagggtaaattcagggagt

SEQ ID NO: 113519 - DNA, 490 bp, Homo sapiens
attgtgccttacctacctccagctatcatgaactgcttacagtacagttctgcaaacgctccaggtcatttcatgccttcatgttttattctcatgctgttgttcccattgaaatgtccttccttattccgactgcttcacaagaatctgtcgcattttcagacttagattaagcacactaatgtcctctgaatatacagacagtagcaaataaattttaaaaattacctttcatttcttaatttatcatagttcaacatacacatagtgtcaatgtacaaaaataaggcatgtggtcactgctgtagaagagctttctgtatggatagttcaagtaaaaaagttactgtgatatcaaacaatgaatgctaagaaccrtaatagtgtagatgaaagtgctgaaaaggctaaagtaggaagaaacggaatctaactgggcgtggagattagaaaagacttcatggttgagaaggtaatttaagatggatct

SEQ ID NO: 113520 - DNA, 413 bp, Homo sapiens
taactcctcaattctcactcagaagatgttaaccccaaaattctgtaattttcagatattaacttaaaccttttatcacccagttattaacaaaagctatcatagaagtatatatgtaggtctcatcattttggcccctaatagaattactttcactgaattatgctttcacattgtaacatccatctatactgaatagtggaaatgacacaatacaatgaattgctaccctccttttgaataattaatatgttctaacccaaaagaaaggagaatcatataactgatcrtgtgtcatccttttggcagtgggaagatcgtattcaaatctgaaatccccctacaacaaaatgtacagagctttgtgactatatttcaggcaaaagcctcttacatttcaaactaaccaaaaa

SEQ ID NO: 113521 - DNA, 594 bp, Homo sapiens
tggggagcatggtgggccatcctaggcacaggcctgagggtggagccctcaccagttacccagcccttccctaccctgcacttccgtatcaataggagactgctagttttagtgggacctacctaartcataagaagtcatatttccttgagggaaagacccagatactggtggtaccattcagccatgcaggaagaactgtagtataactctacaactatgcctagctagggcctttgtagtttcagtgcctttatcttaaagaatgtcatcgacccctcctgtttttaggctactcgtatctataaaacagcaataaagctgttgtataccttctatgtaatagggggtagtaatttttctcaggcaatggaaatttatatgaaatgtatatccatgatacatttcatcatcaggaggatgtttacctgaatatgataaaaaaatagctaccatttattgagaactgataatatgccagatactttgcatatattatattatttaatcctcatagacaccctggaaaataatgattattattcctattttatacaaaaggaaacttatgtttcagagaagtcaagaaacttg

SEQ ID NO: 113522 - DNA, 594 bp, Homo sapiens
tggggagcatggtgggccatcctaggcacaggcctgagggtggagccctcaccagttacccagcccttccctaccctgcacttccgtatcaataggagactgctagttttagtgggacctacctaagtcataagaagtcatatttccttgagggaaagacccagatactggtggtaccattcagccatgcaggaagaactgtagtataactctacaactatgcctagctagggcctttgyagtttcagtgcctttatcttaaagaatgtcatcgacccctcctgtttttaggctactcgtatctataaaacagcaataaagctgttgtataccttctatgtaatagggggtagtaatttttctcaggcaatggaaatttatatgaaatgtatatccatgatacatttcatcatcaggaggatgtttacctgaatatgataaaaaaatagctaccatttattgagaactgataatatgccagatactttgcatatattatattatttaatcctcatagacaccctggaaaataatgattattattcctattttatacaaaaggaaacttatgtttcagagaagtcaagaaacttg

SEQ ID NO: 113523 - DNA, 558 bp, Homo sapiens
taattttttgacttatactactggtctaattattcatatctggttaaaaaaatacatttaatcaaggttgataaccaacaatgacagtaaaacctctcatttccctaagtttcaaaaacacatctaacacatataaattgcacaataaaatattttcttaagaatgatgatatttagtgatactcactctaagcccaggaaaccccggaggaccagtgccacctacaagtccctattgtaaaagaaatttgcaatacttattaaatttgattcccaactactaagggtatttctgaagataaacacaaaactttctagctaagaatacatcaaaatgtaccttctactatagctaacttctgaaactcccctaatctatgcatcctcctgagaaggacaaaccwatggtggccatttatgttcttcacaagtgcccttggctaaatgcttttggatgccaggactaccacctagcttaagcagagtcctctctgcctcctatgtatttaaccaaggaagtaaatcctatcaataatcaacactgtacacttaattatg

SEQ ID NO: 113524 - DNA, 558 bp, Homo sapiens
taattttttgacttatactactggtctaattattcatatctggttaaaaaaatacatttaatcaaggttgataaccaacaatgacagtaaaacctctcatttccctaagtttcaaaaacacatctaacacatataaattgcacaataaaatattttcttaagaatgatgatatttagtgatactcactctaagcccaggaaaccccggaggaccagtgccacctacaagtccctattgtaaaagaaatttgcaatacttattaaatttgattcccaactactaagggtatttctgaagataaacacaaaactttctagctaagaatacatcaaaatgtaccttctactatagctaacttctgaaactcccctaatctatgcatcctcctgagaaggacaaaccaatggtggccatttatgttcttcacaagtgcccttggctaaatgcttttggatgccaggactaccacctagcttaagcagagtccyctctgcctcctatgtatttaaccaaggaagtaaatcctatcaataatcaacactgtacacttaattatg

SEQ ID NO: 113525 - DNA, 546 bp, Homo sapiens
ggccattattcttagtaaactaatgcatgaacagaagaccaaatacagcatgttctcacttataagtgggagctaaattatgagaacacacggacatatagagggaaacaacacacactggggcctatcagagggcagaaggtggtaggagggagagaagtaggaaaaataactattggatactaggcttaatacctgggtgatgaaataatctatacaaccaacccccattcaacgcatttacttatgtaacaaacctgcacatcctgcatatgtacccctgaaactagaagttaaaaataaataaataaaataatgggccagcctcagtggctcacacatgtaatcccaggactttggggggccaaagcaggcagatcacttgagaccaggagttggacaccagcctggccaacatggtaaaaccccatctctagtaaaaatacraaaattagccaggcattgtggtgtgtgcctgtaatcccagctactaggaaggaggctgaaggagcagaattgcttgaacctacgaggtggaggttgcag

SEQ ID NO: 113526 - DNA, 546 bp, Homo sapiens
ggccattattcttagtaaactaatgcatgaacagaagaccaaatacagcatgttctcacttataagtgggagctaaattatgagaacacacggacatatagagggaaacaacacacactggggcctatcagagggcagaaggtggtaggagggagagaagtaggaaaaataactattggatactaggcttaatacctgggtgatgaaataatctatacaaccaacccccattcaacgcatttacttatgtaacaaacctgcacatcctgcatatgtacccctgaaactagaagttaaaaataaataaataaaataatgggccagcctcagtggctcacacatgtaatcccaggactttggggggccaaagcaggcagatcacttgagaccaggagttggacaccagcctggccaacatggtaaaaccccatctctagtaaaaatacaaaaawtagccaggcattgtggtgtgtgcctgtaatcccagctactaggaaggaggctgaaggagcagaattgcttgaacctacgaggtggaggttgcag

SEQ ID NO: 113527 - DNA, 643 bp, Homo sapiens
attccagcaccatttcctctctttgctgttgccttggtgcatggataccttagtgtgtgaatatcaatgccatctatggctgctggacatcccagatgctggtacttctaccatcctttcaccctcagcccccaagaaacaacccaactgcatagagatatagatcaaccctcaggatgcccaaaactggattcctggggctcttgtttcatcaaaatcacttcctctgttctcttgacccatgtcattatattccttgctgtttggggaaaaracactctttaaagctggctttgtatttatagccacctccctagaactgagacatgagtctgtggagacagagcctggggacaaacctgagtaattgtcaccagactttacttagctgtgcctcacccctccagcatccagttcttttttcctggacccatcttgccagcatactttcacctcaccttaggttgagtccatcagaagatactcaggcccttgtacagacagatttccactagtcctgcccaccagtctagacaagggatgaacatgactgaggccccagcccagatcaccacttctggaattacatctatgtaattttgatttaagaaattctctccttcatttaggtcctatttatggc

SEQ ID NO: 113528 - DNA, 643 bp, Homo sapiens
attccagcaccatttcctctctttgctgttgccttggtgcatggataccttagtgtgtgaatatcaatgccatctatggctgctggacatcccagatgctggtacttctaccatcctttcaccctcagcccccaagaaacaacccaactgcatagagatatagatcaaccctcaggatgcccaaaactggattcctggggctcttgtttcatcaaaatcacttcctctgttctcttgacccatgtcattatattccttgctgtttggggaaaagacactctttaaagctggctttgtatttatagccacctccctagaactgagacatgagtctgtggagacagagcctggggacaaacctgagtaattgtcaccagactttacttagctgtgcctcacccctccagcatccagttcttttttcctggacccatcttgccagcatrctttcacctcaccttaggttgagtccatcagaagatactcaggcccttgtacagacagatttccactagtcctgcccaccagtctagacaagggatgaacatgactgaggccccagcccagatcaccacttctggaattacatctatgtaattttgatttaagaaattctctccttcatttaggtcctatttatggc

SEQ ID NO: 113529 - DNA, 450 bp, Homo sapiens
atcctgttcaagatgctgatttcacttcttttgtatttccaccccagtgtgggattgctgaatcatatggtaattctattttaaattttttgaagaacctccatattgttttccatagctgctccaccattttatattcccaacaacaatgtacgaaggttccartttctccacatcctcaccaatacttgttatcttttgtgtgtgtacattttaaaaaataatagccaccttagcaggtgtaaggtggtatctcactggagtttgatttgcatttttctgataattaatgatgccaagcaccttcgtatacacctgttggccatttgtatgccttctataagaaatgcctatccaagtcttatgtcaatttttttaattgagttttttgtttgttttgctattaagttaagttgtaggagtttcttgtttatttagacaattaaacct

SEQ ID NO: 113530 - DNA, 592 bp, Homo sapiens
gtattactagtttcaatcaagaaaggaaccagtgttttgggtaattatctggagaaattgaagaggacatagaaaacatctggtgaacagaaaaaagttgctttataaagtttacactacaaaaaggccartgtacacagctttcagtttatgctcttggtaaagattttgagtgccaaagttttttctcccattcattaaatgaagttaaatggacttattatccattggtttccttcctgacataagtgaatgttaggattatgtcaggcacagtggtccctgaaagagtgggcagaccacaagctattgatcaatgggtattaggtttagtgtcgggatgagccaggttgctgaacactgggtgttatgatgatgctgagggtgctacccaaactcaatgtaatgcccacagtaagattccacaggttagcattttgttgcatactatctaatatcctcatggtataaaattgatgacccagggaagtcaaatttacacattacagcagggaagtcattctccttctgcttctcacatgcaaagcttgcccttactttgcagaattactgcaagcagaagccacgtgag

SEQ ID NO: 113531 - DNA, 513 bp, Homo sapiens
ccatcttcctggaatacagctcctaaaacctttggaatctccagaatgatgagtgtcttttgtatggtagtgagaaggctggtagctggggacccctagaccttcaggatgggggctgracatgattaagattaagaaagactgacgtgattagaaggttggaactttcagccccatccctgacctctggggaggagagagaagctgaagattgaggtaatcaccattggccagtgatgtaatctctcatgtctgtgcagtgcaatcaccataaaacccccaaaacaatagtgtttggagaactgctgggttgatgaacatactgaggagctgggagggtgttgttctgtgcacccacactctgcttccataccttgcccaaagcatctcttccatttggccatcctgagttatattctttatgataaactggtaaacctaagtcaagtgttttcctgagttctgtgagccatttaagcaaagtatggaactgaagagggggtcacgggaacc

SEQ ID NO: 113532 - DNA, 454 bp, Homo sapiens
tgcaaagtattttaactatcaatatttactagcagaaaaggccaattatcatactaaaattaagattcttataaaaccttacaaataatcagaaaaagaatgacatgcctaaagttatattttaactttgtctgcaattaaagatgattgctctgaaatttgtattgcacattttgatttttttcctttttktgatatttaatccctctaggccagtaaagaataatcttttcatttatagcagaaaaccaggtaggagggaaaaatctaatgtagaatgttatttcctaagaattacttcaaggattaaaacacatacatttatatccaagttctttaatgatgccattttcattctattgtacatccaaaatgttatttattattaacactattgccttagcttaataattacctgggtaataattctgacaaagtgtttctaactggcata

SEQ ID NO: 113533 - DNA, 468 bp, Homo sapiens
gtgtgagactgccacctgttaggtttctgtacagccaataataatctcctaatggctttctggtgtttgataggtgttccctctgaacttaggaattccctttctctccatattgctgtgtgggcatggaggactgggtaagcatatttagagtctgtataaatatttaccctttttccttctcctaattctagtgtataatggcccctgcttttgctagaatgtctctccctaacaagggagtggggctttcaggcataattrgaaaagcatgtgtaaagagtcaagttccccagtcacaacttagtggcttggagaagtatctagtgactggctgtcctaggacccctcagatagtgacagttctggaggaccgttgtccaggacagcagagtaagactgagaaggccatgccagtgtccaggagacagttaacctcctggccctcaatggtcaagcatacctggg

SEQ ID NO: 113534 - DNA, 468 bp, Homo sapiens
gtgtgagactgccacctgttaggtttctgtacagccaataataatctcctaatggctttctggtgtttgataggtgttccctctgaacttaggaattccctttctctccatattgctgtgtgggcatggaggactgggtaagcatatttagagtctgtataaatatttaccctttttccttctcctaattctagtgtataatggcccctgcttttgctagaatgtctctccctaacaagggagtggggctttcaggcataattagaaaagcatgtgtaaagagtcaagttccccagtcacaayttagtggcttggagaagtatctagtgactggctgtcctaggacccctcagatagtgacagttctggaggaccgttgtccaggacagcagagtaagactgagaaggccatgccagtgtccaggagacagttaacctcctggccctcaatggtcaagcatacctggg

SEQ ID NO: 113535 - DNA, 468 bp, Homo sapiens
gtgtgagactgccacctgttaggtttctgtacagccaataataatctcctaatggctttctggtgtttgataggtgttccctctgaacttaggaattccctttctctccatattgctgtgtgggcatggaggactgggtaagcatatttagagtctgtataaatatttaccctttttccttctcctaattctagtgtataatggcccctgcttttgctagaatgtctctccctaacaagggagtggggctttcaggcataattagaaaagcatgtgtaaagagtcaagttccccagtcacaacttagtggcttggagaagtatctagtgactggctgtcctaggacccctcagatagtgacagttctggaggaccgttgtccaggacagcagagtaagactgagaaggccatgccagtgtccaggagacagttaacctcctggcyctcaatggtcaagcatacctggg

SEQ ID NO: 113536 - DNA, 587 bp, Homo sapiens
cagcgcagtacagagatgccttctgatttaaaaagaaaggaaagagagtaggagattttgcctggtaactagtatcccaacaaattccccattatcttccccaagttaaccaaggctatgtatctaggagtctacaaatgtcacaatgttcctgggcttcgggctcctcccagtgctaaaatggcttcagtgaccacaggcctagataagggcactcaatcccctctgaattcttggagagcccactcaagaaggatgagtacaaagaagcccagacagagaagattgaaataagtacctaaatcttcaatgccagacatccatgaatgtccacaaacatcagaaacattcaggaaaacatgactgcaacaaacaaactgagtaagatatcagtgatcaatcttgaggtgacagaaatatgtaacctttcaaacagggaatttaaaatagctgttttgaggaagctcaacaaacttcaaggtaacacagagaaggaagtcagaattctgcgaagaaaatttaagagaytgaaataatttaaaacatcaagcaaaaattctggagctgaaaaatcaatatcatctcac

SEQ ID NO: 113537 - DNA, 592 bp, Homo sapiens
aattttaaaataatgatctaatggagatagtgagtggaattgtatttaccagagcctggaaagggtaagaaaaaaaagagatgaaaagaggttggtcaatgggtataaaaatacacttaggtagaagaaataagttccaattttcaatagcacaataaggtgatcattacacattgtatgcatgtatcaaaataccgtatgtacccccataaatatgtacaactgttatgtatcaataaaacaaatcaaaaaagaacatmattgagacagctgataaaatttcgatatgtattagataggagtttgggtctgacatgtaaagagcctggatatcattactcccatcctcacaacaagaaaaaagctgaaaaaataaaaaatttacaactcttcttagacccatcaaagaattaaggccttagggcaagccatcatactgaaaattgagacagatgaatacacaatatcacagcttgtgttccatcacctccccagtggccctgaccttgttagtaagtcctcttatttctccaaacctcctgccttggttgaggtttaggctttcatcgggtgttctttgttgccaactgtc

SEQ ID NO: 113538 - DNA, 590 bp, Homo sapiens
tggggatctgcaagctaattcctgatgtggcttctgattatgagggcttagacacagaggtggcagccattgttgttgcaccttcctccattgttgcaagtccccctcygtttggctgaagttacttccaggaaacttaaaagaccagtgccttttttcattgccctttatttttctcctttcccctctttgggagccagatattaaagactggtataatcaaaagcagctgcatatatgagggaagttagaaagtaacctcaaatgcccagcaaaagcacaggctcagaaaagacttcaaaaggcattacatttataccttaagcttattcacaatgcatgcaacaatgaaacaaacaaacaacaacaaaaaaaaacaaaacagcatcaaaccctgtggaagacgagattctgattttcagttaccacattattagattcaaatgctcagtttttaacaaaaaaaattacaaggcatttatagaaacaggaaattatattccattcaaataaaaaaaagacctattggaaactatttgtgagaaggacccgatggcaaatataccaggaaattactttaaaataactgt

SEQ ID NO: 113539 - DNA, 562 bp, Homo sapiens
ttcaaaaaaaaaaaaagctcttacactcttctgcatattctgcaaagtatactctgggaaggctggtttagaggatctctaacttttctaatatttcataatgcatggctgatgtttaacatgaactcagactcccatcagattttacagatctgggtctgcttttagttctaatgcttcagccagggcactttaatctgaggtcacagcattcccaattgtcagcagtattttgaaatctaagttcctctggtggacaacaggcaacatcatatagccayggaggatctgaacaacttctaagtctgagggattttatctggtggttttggattcttttccatttatacttaaacaaggtgacacaaatgtcactcacagaaaagccactcttttttcccctgtttttaagaagtctaaaaatgcacaactatttcctgaatgagcagtgtgtccaggtgtagaatagggaatgtcgtgtccactgggaacagacggtgtacctggcacaattttatgagaattatcccatgattcctgtcccaccctgcagcccaccatg

SEQ ID NO: 113540 - DNA, 562 bp, Homo sapiens
ttcaaaaaaaaaaaaagctcttacactcttctgcatattctgcaaagtatactctgggaaggctggtttagaggatctctaacttttctaatatttcataatgcatggctgatgtttaacatgaactcagactcccatcagattttacagatctgggtctgcttttagttctaatgcttcagccagggcactttaatctgaggtcacagcattcccaattgtcagcagtattttgaaatctaagttcctctggtggacaacaggcaacatcatatagccacggaggatctgaacaacttctaagtctgagsgattttatctggtggttttggattcttttccatttatacttaaacaaggtgacacaaatgtcactcacagaaaagccactcttttttcccctgtttttaagaagtctaaaaatgcacaactatttcctgaatgagcagtgtgtccaggtgtagaatagggaatgtcgtgtccactgggaacagacggtgtacctggcacaattttatgagaattatcccatgattcctgtcccaccctgcagcccaccatg

SEQ ID NO: 113541 - DNA, 562 bp, Homo sapiens
ttcaaaaaaaaaaaaagctcttacactcttctgcatattctgcaaagtatactctgggaaggctggtttagaggatctctaacttttctaatatttcataatgcatggctgatgtttaacatgaactcagactcccatcagattttacagatctgggtctgcttttagttctaatgcttcagccagggcactttaatctgaggtcacagcattcccaattgtcagcagtattttgaaatctaagttcctctggtggacaacaggcaacatcatatagccacggaggatctgaacaacttctaagtctgagggattttatctggtggttttggattcttttccatttatacttaaacaaggtgacacaaatgtcactcacagaaaagccactcttttttcccctgtttttaagaagtctaaaaatgcacaactatttcctgaatgagcagtgtgtccaggtgtagaatagggaatgtcgtgtcyactgggaacagacggtgtacctggcacaattttatgagaattatcccatgattcctgtcccaccctgcagcccaccatg

SEQ ID NO: 113542 - DNA, 562 bp, Homo sapiens
ttcaaaaaaaaaaaaagctcttacactcttctgcatattctgcaaagtatactctgggaaggctggtttagaggatctctaacttttctaatatttcataatgcatggctgatgtttaacatgaactcagactcccatcagattttacagatctgggtctgcttttagttctaatgcttcagccagggcactttaatctgaggtcacagcattcccaattgtcagcagtattttgaaatctaagttcctctggtggacaacaggcaacatcatatagccacggaggatctgaacaacttctaagtctgagggattttatctggtggttttggattcttttccatttatacttaaacaaggtgacacaaatgtcactcacagaaaagccactcttttttcccctgtttttaagaagtctaaaaatgcacaactatttcctgaatgagcagtgtgtccaggtgtagaatagggaatgtcgtgtccrctgggaacagacggtgtacctggcacaattttatgagaattatcccatgattcctgtcccaccctgcagcccaccatg

SEQ ID NO: 113543 - DNA, 466 bp, Homo sapiens
cttccacctcccaaaactaagttcacttcatgtctctcactgcagggaagaaacttagtgttccttggagacctgaaggaatgcagtgagcttaagaactttcaagagcttaccaatcaggcagcccttgttcatccccaaatggatgtgtgatggtattgtgatggacctttactggacwctctgccaaataactggagtggcacttgtgctttagtacaattggctatccctttcaccaaggaatttcatcaaccagaggaaggaaaaataagacatcgtaaagcaagagaagccccttatgggtcttgactctcacgtctatttagacacacttagagtcccacagggaataccagatcaatttaaagcctgaaatcaaatagctgcaggatttgaaccaatattttggtaggtgacaattaataaaaatgtagattggataaactacatttaccacaaccaa

SEQ ID NO: 113544 - DNA, 466 bp, Homo sapiens
cttccacctcccaaaactaagttcacttcatgtctctcactgcagggaagaaacttagtgttccttggagacctgaaggaatgcagtgagcttaagaactttcaagagcttaccaatcaggcagcccttgttcatccccaaatggatgtgtgatggtattgtgatggacctttactggacactctgccaaataactggagtggcacttgtgctttagtacaattggctatccctttcaccaaggaatttcatcaaccagaggaaggaaaaataagacatcrtaaagcaagagaagccccttatgggtcttgactctcacgtctatttagacacacttagagtcccacagggaataccagatcaatttaaagcctgaaatcaaatagctgcaggatttgaaccaatattttggtaggtgacaattaataaaaatgtagattggataaactacatttaccacaaccaa

SEQ ID NO: 113545 - DNA, 604 bp, Homo sapiens
tatggctacttgtatcttgtacaagagctttcaaaactattgttcagttatgttaatgagtgcttctccacaatttggtgacatcgtcagtcataaaccatgtcagcttaggggcagagttttcattccttgtttcaatagaactgttattttcattcttcccacatactctttgtcttacractttcacctccaagtaactgtgcaagagagaggggttgcaattaatatttaaagacatcaaattctaggaatgcagtgattatagcataatgcattcagtagaaaagaagattgggcaatatgttattccatatttatcttaatcttatattaaagtagcatatacagaaaataaataataactcacatttttctgcaaaccctggacaaggcttgcatatgtgttcatcatcaattaagtacagtaacaatttttgagaaaatcaattggaagccaagaattgggaagaaggtggcacaatggatggtgaaacattataaataataatatgaggatgtaaccagtattaaataattggtattagggatttgcagaggcaagaagatccaaattatttcaatactaacatgttctgaagag

SEQ ID NO: 113546 - DNA, 595 bp, Homo sapiens
aggctgaagatctgagaacccaggtgggggctggtgtaagtcccagaatcygaagcccattgactctagagatttgaagtccaagggcagtagaaggaggtcccaaatccaagaaatagaaagaggaagaattattttttcctctgcctttttgttctacccaggcccccagcagattggactgtactcgcccacattgactgcagatcttctgcgctcagtccactgactcacactcatctcctctggaaacactatcacagacacacacagaaatattgcttttcccactttctaggaattccttagtcaggtcaaatagacacctaaaattaaccatcacaatatccaattagatctatttctcttttctgggctttatttttagataatagtataatgcaattccttaagaatgtagtacctggggtttgattatctggctttgaacactgtttcataacttacctactatgcagttttcaaaaggttactcacatatttagaaccacagttttttcacctctaagtttagagtttgtcttcttatgtggttattgtaaggattaaatgaatttacgtatgtaaatcgctc

SEQ ID NO: 113547 - DNA, 595 bp, Homo sapiens
aggctgaagatctgagaacccaggtgggggctggtgtaagtcccagaatccgaagcccattgactctagagatttgaagtccaagggcagtagaaggaggtcccaaatccaagaaatagaaagaggaagaattattttttcctctgcctttttgttctacccaggcccccagcagattggactgtactcgcccacattgactgcagatcttctgcgctcagtccactgactcacactcatctcctctggaaacactatcacagacacacacagaaatattgcttttcccactttctaggaattccttagtcaggtcaaatagacacctaaaattaaccatcacaatatccaattagatctatttctcttttctgggytttatttttagataatagtataatgcaattccttaagaatgtagtacctggggtttgattatctggctttgaacactgtttcataacttacctactatgcagttttcaaaaggttactcacatatttagaaccacagttttttcacctctaagtttagagtttgtcttcttatgtggttattgtaaggattaaatgaatttacgtatgtaaatcgctc

SEQ ID NO: 113548 - DNA, 618 bp, Homo sapiens
tacagtagatcttgaatatttgagctgctcaatatgcgcttttgataaatatatgaacaattctatatattgtttggtataagtacaatgtatacaccttctttttctttcttttttcttccttctttcttttcattatattatcacattaaatgctttaagctgactctttttccctaccaaatgactacaaatgctctctattatattaccctgcattattttctttraggcactactcactcccttcagttgtgtttattcacctactcatttaataactgtttctcccactaaaggaatgaatactttactatatcaaagatcttgttttattcatctctatattcttaatacacagatcagtatcagttatatagcaaatgttttctttataaatgacttgataatatacggacaacctattataaatcctagcctttagagattattgttttacactggataaaaagactagcaattaggcacacaaaaattactatgaggactcacatcattttttagtggtgtaatgtgaaaaactttctgtcgtagttgacatatgaatgagtctgggaagacggattgaatttgtcttggtggaactaacagtaaaag

SEQ ID NO: 113549 - DNA, 618 bp, Homo sapiens
tacagtagatcttgaatatttgagctgctcaatatgcgcttttgataaatatatgaacaattctatatattgtttggtataagtacaatgtatacaccttctttttctttcttttttcttccttctttcttttcattatattatcacattaaatgctttaagctgactctttttccctaccaaatgactacaaatgctctctattatattaccctgcattattttctttgaggcactactcactcccttcagttgtgtttattcacctactcatttaataactgtttctcccactaaaggaatgaatactttactatatcaaagatcttgttttattcatctctatattcttaatacacagatcagtatcagttatatagcaaatgtttkctttataaatgacttgataatatacggacaacctattataaatcctagcctttagagattattgttttacactggataaaaagactagcaattaggcacacaaaaattactatgaggactcacatcattttttagtggtgtaatgtgaaaaactttctgtcgtagttgacatatgaatgagtctgggaagacggattgaatttgtcttggtggaactaacagtaaaag

SEQ ID NO: 113550 - DNA, 605 bp, Homo sapiens
tttgtcatcttttgtcttttgttaacagccatcctaacaatgacaatgaggttttatctcattgttgtctttatttgcattcccctgatgatcagtgattttgtgtatcttttcatatacctattagtcatttttatgtcttctttggataactatttatttcagtccttttctcattttaaaatcatgttatttttgtttttgaactgtaggagtcacatatattttgaatattaaccccttatcagatacatagtttgtgaatgttttctgttatggtgtagtttgccttttcattcttgattatttcatttgataagcagaggatttttagtttgatgtagtctcatttktctaatcattgcttttgtattgtacctttgggtcatatctaagaaattattgcccaaaccaatcttgtagaacttttcctctgttttcttctaggagttttactattttaggttttaagtttttaacccaacttgaattgatttttgtgtatggtgcaatataagggtccaatttcatcattttacatgtatatatcaagttttcccaacttcattttttgaagggatgatccatccaccattgtgtattct

SEQ ID NO: 113551 - DNA, 529 bp, Homo sapiens
cacctagattgattcgatttttttattgtaaatagtcctatgatgaacatatgcatgcatgtgtggtttttgtaaaacaattaagtttccttttgtttatacacccagtagtaggattactgggtctaatggtagttctgtttttagttctttgagaaatctttctatcacggctgaactaatttaaatttccaccaacaatayaaaagcatttccatttttctgcagttgctcagcagctgttattttttgaattattaataactattctgactggcgtgtaatcctcttttactgtggtttttttatttgcattcctctaatgattactgatgttgagcatttatgcttgttgttgaccacttgtatatcttcttttgagaggtgtctgttcatgtcctttgcttatgtttaatggggttatatgttttacttattgatttgtttaagttccttataaactctgcatattagactgctgtcagatatgtagtttgagagtattttctcccattttgtaggctgtctg

SEQ ID NO: 113552 - DNA, 585 bp, Homo sapiens
acaggttgaaagttttcatttatctatttgtatgtgtttgttttcttggtcttttctcacaagccttctgactcctcaaataaatttggtatatcatgccactttattcaccaaacatattcagggatgcatgcaaaaatccctgaaataaataggagtacttctttatcgttaattttaattctctactagggattgataactcgatgaaggctgaaatcagggttataaatatacatggmcatttataagttaaaagagataaatcaaaaagaataaagtagaaagaaagaaagaaagaagaaagaaagaaaagagagaaagaaagaaagagagaaaaataaagcaaccaaccaaacaaagtacaatttccaactggtagcattgtaaaagcaattataagtttgtattcttcttgtagcctacacaataaaaactattgcacagtgctaggcacatcacttaggactcaatacattttcaatgactaactgggggaagttaataaatgtatgcatttgttcactgattggaatggttaatttaacatgtcaacttgactggattcaggaataactaaataac

SEQ ID NO: 113553 - DNA, 564 bp, Homo sapiens
tcaggcaggaggaatttaaataccaatgtcagcatctagagaatattagatttttgttctgaaatggctgaaagtctcaggcaaataataaacagcaaactcagagaaatgctgagggattgaaagtcatagctttataatacctcttttattttatgctattctattgaaaagtgacttaaatatagaatttcagaagaaaataaaaatgatgctccttgatacaaaggtatgtttctgtatatctcttaactcgatggagagcccttgaagtatatcataacatctctgtattaacagaagcttcacataacctgcaagttcctgcctctggcattcaccagagacacaaagacattaygagaggaaagctacccttccctttatctaataacagttcccttgagagaatcccaaaggcactaaggcatgctttctagtatcacaggaagaaccagaaattgcctttccttttcttttttaactccattctctgcaacaataactaagtatagtttttctcttgtcaccctaaagtaacctttggcccttcagtcttctctg

SEQ ID NO: 113554 - DNA, 467 bp, Homo sapiens
aaattcataatgaatagcttcaaagaaataagggaagatatcacatccattaatagaacaaatcactacagaaaaacattcagggaataagaaagtgttctttagaaattacatatattaaagctaaaatgttaaaatatcaaagatttgaagacaacattaggaaactctccctgaaagaaaaacaaaagctgaagagatggaaaatagctgataaaagataaagaaattagtgaatcaatccaggactaacagaagttgtagacagagcaagcagagaaaatggcagaaaggaaagtatttgagaaataagttacataaaagatattctaagaactgaasaacataaatcaccagattgaaaaggcccagcaaatgcgttgtgcaattagtagaaaagacctccattaaggcacatccaatgaagtttcagaacacaagggaagaaggggagttatttataaaag

SEQ ID NO: 113555 - DNA, 619 bp, Homo sapiens
tcctgactcccctccagttgtcctcccacagtccttgcatactgtaaatgaaatcaaaaactacatgcaggtcactcttgccaatctgccgttttgtttgagatggattctgtgtggttttattactgagttctgagctgcccactgggccctccctcactcacttgcttctaraaaagaagtaaccatgtagcagaaacacatgctaacacggtggtgtaaagaccccatggaacaagaaaaggtgagcagaaagagatttggggcagttgaaaaaaaggtgggagccaaagagcaaagaagcaaatgaacccctattttgaacatctactcatctcagacactgtgttagaaaaggtgtgctcatgttcttgtttaatcccctatgaggagattattaagacttccatcttaaagatgagcagattgaggctcagggagattaaagtaacttgtccaaggtaacttgccaatggggtggaaagattcacagtctgtttaaccccaagtccagtactcagtctgttacatctggctctctctcatgtacagattatgtgcccttgggtaggtcttttccctcaagtggccccatctggaaaatgaaacaagtatagct

SEQ ID NO: 113556 - DNA, 596 bp, Homo sapiens
aagtttgaaattgggaagtatgagtcttccaacttcttttccaagattgttttgactacacrgtgtcccttgaatttccatataaattttagaatcagcctgtcaatttctacaaagtagttagctggaaactgatgtgaatagcattaaatttgtagatcaacttgagaagtattaccatcttaacaatattaagtctttcatccaggaacatgggatgtctttctatttattagggtcttctttaatttctttcaacaatactttgtagttctcagagtataaattttgcatttctattgctaaatatattcctaagtattttactgtttttgatattgctgtaaattgaattgtttccttaatttcatatttggattgttctttacaaatgtatagaaatatgattgatttatgaatattgacctagtatcctgcaaccttaccaaactaatttgttagttctaattgttttcagtgggttccttaggatattccttttacaagattatgtcttttgaaaacaggtagtttcacttattcatttaaaatctggatgccttttatttcattttcttgcctaattttcctggcta

SEQ ID NO: 113557 - DNA, 596 bp, Homo sapiens
aagtttgaaattgggaagtatgagtcttccaacttcttttccaagattgttttgactacacagtgtcccttgaatttccatataaattttagaatcagcctgtcaatttctacaaagtagttagctggaaactgatgtgaatagcattaaatttgtagatcaacttgagaagtattaccatcttaacaatattaagtctttcatccakgaacatgggatgtctttctatttattagggtcttctttaatttctttcaacaatactttgtagttctcagagtataaattttgcatttctattgctaaatatattcctaagtattttactgtttttgatattgctgtaaattgaattgtttccttaatttcatatttggattgttctttacaaatgtatagaaatatgattgatttatgaatattgacctagtatcctgcaaccttaccaaactaatttgttagttctaattgttttcagtgggttccttaggatattccttttacaagattatgtcttttgaaaacaggtagtttcacttattcatttaaaatctggatgccttttatttcattttcttgcctaattttcctggcta

SEQ ID NO: 113558 - DNA, 585 bp, Homo sapiens
catggtctctgcccttgaggaatgcacggttctggagtggaagaacagacttggaagttattgcagtacagtgagagatgggcaaagaaggggagcagaaaatcctttatgggagccaaaaaggagggggtgttgagctaggttttagaggatgggttagagtctgtcatgtaggaaagggcagtctagaaagtaggaagagtgtatgaagcataggccataaaggggcattgaggygcaggagaagtggctgtgtgttggggtagattgtgggagatcagaccaaaagaaactggtttttacaggctgagcagggatgttctcctaaggtcaggtttgggttttataaagatgactctggcaaaaagagtgacaagctgggggctgaagcagaaggattaggtctgagaagctaagacagagttgacagggccagggaactaactgactgactatgtgaggagagacattcatttgtatcttgctttttaaaattgccatgcttagctaagtgaacctcttctgcaatgcaaatgtgaggattcaataagctaaggtaagtgaaagcccactgtacaaaccccc

SEQ ID NO: 113559 - DNA, 631 bp, Homo sapiens
tggatgaatggatggatagatagatgatagataggtagatggataatatagatattatccaatgatagatagatgatggatggatggatagatagatgatagataaatagatgaatggatggatggacggatggatggatggatggatgatgggtagatggatagatatggactgatgaaaggtatcttttgttctacagaattaagttgtaaagtttgctgtctgtaattctcactcccaatggagatgtcaggaattctcgttctttcttcgttcaagggtggggaggaggagtctacaggagcagctgtaacaggcacattttggaatttaccccattggaatgtaaaggtsaaggaggcagccctgtaccacacgtctgggacgcttgtgtttgttatatttagtgcgaattgtgggttggctttgcttggagtgctgcttccgggaaaggcgctgtggtcgcctacatgctgagcattttaatttccatagacagtacactgggctgcacactgcatgggacttctcggcattgctggctgccctcctgactgttgtctttctcctggcaacaggggcttgggtgcccaagaatcaagtggtttaaaagtcattaccaaagttcac

SEQ ID NO: 113560 - DNA, 648 bp, Homo sapiens
aatggttacaagattcagtacccacaaggcattcattcattcattcattcattcattcaatcaaatgtccaataaatatgcactgggcaactgctatgtgcaagatactatactatgactgagatacagcagcaaacagaaaaagcatggtctctatccttattgatctttctgctatcagtctaggagaaaaaaatgttaccaaagaacaaactatttaactagaaactgataaaagagaaaaaaagaaagtgttattaaagtttatattaggaactggactgagtacagaaggggagtgggtactggatagggaagacatctctgaagaagtgacgcttgaactcatagctgaaggataagtgagggtcaaacccaacaagaatggaataggacattcaaagcagagggaaggccatgtgtgaagacctgaggcaaaatggagtctggtgctccagagcaactgaaakaccaaaacataaaagcaaatactgtacagtgatcagagagaactttctcttgtgggccttagaaaaagagatgccggccgggtgcagtggctcatgcctgtaatcccagcactttgggaggctgaggtgggtggatcacgaggtcaagagatcgagaccatcctggtcaacatggtga

SEQ ID NO: 113561 - DNA, 407 bp, Homo sapiens
aataaaatcgaatggaatacagtgagaataattcttagttctgagctagaaattgagcttagggatgctctcctgtcctctagtggcagtgacatgattggcagccaatgcttaggaggaagttctcatcctgggataaaccaatgcctaaaaattactgtctgtaaraacaatttgcttgaagcctgtcctgtgaaattggagtcatcattagggaatttacagaattacttatttagaaaaaccttgtttctactgtttacatccttttttgcatttgtacttcaaaggaccattcctgcagcctttgagaatttctaaagcatccattttggagtgtatgtgtccacctgaatagctcattcaaatgtgttttatgttttacacaacaggatccttcaaatgct

SEQ ID NO: 113562 - DNA, 606 bp, Homo sapiens
ggctattcagtttttgtaaaggagtagacataaacaagatatgtaagattgcatcagcatcaaactcaactttatcaaaccccagaaaacaagtgcctgggctcatctacccacaggagaaactgcttcaaagtgccaccacggggatcaactgcctccctcagcctttgttttgcctaaacgctgaacaaggaagctttcagcaacaaaaataccaagttcctttttacagtgtggcacccaaaactgatctgagtctcttcaggatggtgatgtaacccatccaaaatctgactcattcctactctccctcgtttgtccaatcagcaggtattccttgggcatcataaacaggcacaggcctctgcttcataccatgggaagcaaaagacatagatgctgagttaccaccttccaagagtttctggtggaagtgtctgggtaacaaatgaattggaaagatatttagttgttgataaaccttgacaatcacaaggacaattttctaagatggaagctcatactctacatacagttctatattctgcttttattrctttgttatactcttattcatatcattaaacattctccataaacatcatt

SEQ ID NO: 113563 - DNA, 665 bp, Homo sapiens
ctcagccacacagcatccctacttaatggggaacaaaagtactacggttacgtaaatgcaaagagacctaggggtaccaacaagaagttccaatatctggctcagaatctcctttatgattcaggcaagctcattcttatagagagtttracattcctgggttcttagaaaagggggaagtgaatcttatgagagagggagagagagagaaagagagaggagaaactgatgatgttattaaaacaaaaattttaaggtatgaactcaggaagatctgagttcaactcctgattctacctctttggtcataggatcattttctgtaaaacagggataataataaatctaccccataggtatttttttaaggattaaataagatcgtgcacattgagcacttactatcatgcctagtgtttagttaaaattagctgtttttgttagttacttttcgtcaagcatagaacttttcttgatttgcccaataatgtctcttgggtgttagatatttgagttaatatccaaagatagagagtggatgcctaatggcaaactctttactccagtgctgagttttcatcacactttatgagctggttgtgaaggaaataatgattttcccacccaaaatatatcatccctggaaatattccagttgatggtca

SEQ ID NO: 113564 - DNA, 602 bp, Homo sapiens
cactattatctttgtaatttccaattgctgctggaagcattttgctgcggagaccattgccggctattaagtagaggagacttgttttggttgccagaattagctgaaattaagatcctttgacatcttcttacagaaaaaagtcagtttcagtacaaacaatccagaatttaatacattgtgacaggttataaaattctacgcatttgaaagaaaagctttgctggtggaataatgtgtttctaatttacacataataggcccatgaagctatgactagaaggatattaaagtaatgaggaaattcyagttatggacaccttctgtagagatcttaaagattatgattagggcagtcattttcccaagtaccttatacagctaaagccaaaatgaaggtgtccaaacaaaaaaggagacgaggaacacaataggcttcagtttagagggccaggaaagcatttttgagatagctgctcaacccagatgtggaggattttatgaaacttaatgaacgctgtgttttttgaagaccccccaagggtcagcaccgggtgcttttccatgaaggaagaaggatcgatcaccaatgccatgaacaa

SEQ ID NO: 113565 - DNA, 635 bp, Homo sapiens
acgcaatttctggcacatttctactgttatatcactcttttatttattttttttattttttgagatgaagtcttgttctgtcacccgggctggagtgcagtggtgcaatctcgactcactgcaacttccgcctcctggattcaagcaattctcccacctcagcctcctgagtagctgggattacaggcatgcaccaccacacccagctaatttttttgtatttttagtagagctggggtttcgccatattgtccaggctgttctcgaactcctggccttaagtgagctgcccgcctcggcctcccaaagtgctgggattacaggcttgagccatcacgcctggtctatattactcttttaaatgtatccacagaacctaagtatcataacaatttgatgcctatctcactattttaaaaaaaatatagaaacaagctcttgaaattttrcatttctttatctctataaatgcattctttatattctactttctccatatggttttatcttaatgaaatgtattgtcatacttaaaagacttttcttgaacattttacttctctgcaacgaaaatatgtatcaaatttgaaattaatagttttattcattgtgcccttaatcttttgtattaaaaa

SEQ ID NO: 113566 - DNA, 604 bp, Homo sapiens
agatgattactattcttagctccacttccatactgatattgaaatgacttcttatttccgacctcatgggaaagactattttctggggcatcactagactgctgctctggcttttccagcaacctgtttacattgaggacagacattcaggagagccagctgagggttctaatttaaagtgctcaacattagctttccaatgctgattgcaattattcaccctacttgacctcactgcctgayaggaaattactctttggagtaataagagtaatatttcatgcttatttcatgataagaaatcaccctttggagtaatatgcatcctgtttaataatgcaagcactctgaaaaaagcattgagttaaagtctcatagctctccatgcctttcctcctattagaaggtgagtacaggtaccagaggggcggagaggtggagggtttagagagggacaatttggggtatgggccacttccagagaggcagtgtcaggattgggcccattgtgggttttgtcagagcatgagagcccttgctggagtaattttatgagctaatgaagtaaaatcaataaaccgagaatgtggtaaaatgtcaaaaa

SEQ ID NO: 113567 - DNA, 597 bp, Homo sapiens
actggggacatctgggaaaggtttcctctaagggcagaaacaccagaaaatacagctttttagattttktatgctgcccaccatcttgcaacaataaggggccctgactgaggctgaagctaagctgagacaggcacagcacagacatgggagaaacatggaaccctgatgagatcaccaggacagaggttgaatcaagcctgggattcacactactcttcttttgaactttcgcttctgttaagtcatttgaatctttctgttttttcacttgcagacgaaagcatcctaatggttagagttcccatcatcggttaaagggaacccagccacttgcttgtcctttattttctacaaaaaccaaaaccaaagtgcacacagaagcttattccctggaggcaggccccaacttctgggagccccgtgcttaagacacgtcttggcgccttttggttgactacggcagtaagcagctgcctcgagcctcagagcaggatgactgcaggatgggagtaaagggcgagaagttttgagaagtgctaggaccatgattgaagtgtggtcagagatccaaggaagcaaaaatgttccagcagt

SEQ ID NO: 113568 - DNA, 597 bp, Homo sapiens
actggggacatctgggaaaggtttcctctaagggcagaaacaccagaaaatacagctttttagattttttatgctgcccaccatcttgcaacaataaggggccctgactgaggctgaagctaagctgagacaggcacagcacagacatgggagaaacatggaaccctgatgagatcaccaggacagaggttgaatcaagcctgggattcacactactcttcttttgaactttcgcttctgttaagtcatttgaatctttctgttttttcacttgcagacgaaagcatcctaatggttagagttcccatcatcggttaaagggaacccagccacttgcttgtcctttattttctacaaaaaccaaaaccaaagtgcacacagaagcttattccctggaggcaggccccaacttctgggagccccgtgcttaagacacgtcttggcgccttttggttgactacggcagtaagcagctgcctcgagcctcagagcaggatgactgcaggatgggagtaaagggcgagaagttttgagaagtgctaggaccatgattgamgtgtggtcagagatccaaggaagcaaaaatgttccagcagt

SEQ ID NO: 113569 - DNA, 560 bp, Homo sapiens
caagccaaattctcagctggaacatttcaatagcctccctcttgacctcattgttttgaaccttcattcaggtacatgtcaaatagtgaatggaagtctcatcaaaaaagctaatattttggcggagatttgaatgatgcgagggaatgtgcagctgtctaagggaagagtgttcatggcagagggagtacctattgcaaaatccttggcctattcaggccctatccatgcatgagtccagtcyaactgctctggagaaagcaagggaagtagcagaaatgaagttagaagagaaaccagaatctggggcagctttagatcatgaatgcctttgtaaagtccttcattttcactctaagtacaatggcaagtattgcagtgttgctggcaaatgagttactttatttggtttatatttttaaattgttgtgtgactgttgttttgaaaggaaactgtacagacacaagggcacatgcaaagagacctgttaataagctattatagtaattacagtatagtaaactgggtaggacagtgacttagattagaattggagaga

SEQ ID NO: 113570 - DNA, 451 bp, Homo sapiens
ggaattggaatgtacctaacacaaagaaatgataaatgttttagacaacagatactccctttactctgttgtgactattgcaaattgtatrcctatgtcaaaacattacgtgtaccctgtaaatatatacatctaatatatacccataaaaatttaaataaagttttaaataacttttaagttaaaaatgcgaagatattaacatggatatcattttccagttagtgacagaaaaaaaattgttggaatttaaaagtggggggaaaaatccactgacaatagacaaagcaagggaagaagagttgaattagaggagaaagcagcactttccattcaaagtaatttgatccaaaatttccacaatttccctgtgatataggtaatcttctgagaaaatctgcattgtatattgtgggatacaggattcctgtgaagttttgattattgacgt

SEQ ID NO: 113571 - DNA, 539 bp, Homo sapiens
tccctttactctgttgtgactattgcaaattgtatgcctatgtcaaaacattacgtgtaccctgtaaatatatacatctaatatatacccataaaaatttaaataaagttttaaataacttttargttaaaaatgcgaagatattaacatggatatcattttccagttagtgacagaaaaaaaattgttggaatttaaaagtggggggaaaaatccactgacaatagacaaagcaagggaagaagagttgaattagaggagaaagcagcactttccattcaaagtaatttgatccaaaatttccacaatttccctgtgatataggtaatcttctgagaaaatctgcattgtatattgtgggatacaggattcctgtgaagttttgattattgacgtatttaacatttgtatattctatcgtgcatggtagtttaatctcaaaagagaaaaactgtttccctttaaaagttgatgtagtatatgtcacaagctgtggggaagggggagagctatgtaatccaaccaacaaataatttcaa

SEQ ID NO: 113572 - DNA, 622 bp, Homo sapiens
attgaacaatgagaacacttggacacaggaaggggaacatcacacaccgggcctgttgaggggtggggggagggatagcattaggagatatacctaatgtaaatgacgagttaatgggtgcagcacaccaacatggcacatgtatacatatgtaacaaacctgcacgttgtgcatgtgtaccctaaaacttaaagtataataaaaaatttttttttattatttttagtagaggcagggtttcaccatgttagccaggctcgtctcaaactcctgacctcaggtgatccaccagccttggcctcccraagtgctgggattataggtatgagcccccatgcccagccaattatattaagttttgctccaattttaattatttattttcttctcctagctttggagttcactttttcttgtgtctctagttcctctaggtatgattccttgtagctactctgagatctttttaacttctttaggcgtttagtgctatatactttcctcttaacactgcttttgctgcatcccagagattttggtgtgttgcgtctttgtataattggtttcaaataatttttgattgttgccttaatttcattgtttatgcaaaagtccttcaaa

SEQ ID NO: 113573 - DNA, 620 bp, Homo sapiens
ctggggtaacatcaattggtcatgctcagctgacattcattttaacttgaactctagccgtcatggcgattattaaatttataatgatatatgtaagatccattttaatgagtctccaygcttgggtgagctctcacttgtgctggcaaaataaggcttaacagagtattacatttcatcttctactgaattttctgggctgtggttgaaactttgtgtagaaagaattagattgtttttcctgataggcattgtgatcgagttccacattgcccagagtacagtttctgggcttctagaaataccgccactgcagtagcttctgttggcggcagcagcttctgttggtgtgtgcatgtgtgtgtttgtgggtaaacatacaccccatttgcgtcaagtgtgaagctaaacaagcctctcagcgtgcagcctggaatgtcttgtccacgaagctgaaaggcgactctacagtgttttggctcatatacctcgggtgaactgaaaactcctcttcaggggggattggctgaaaatccaacaaaggcacaatcgaggcatctgctggagagctgggaagtctccaccagcatgcttaagttaccaagcattcattggcacca

SEQ ID NO: 113574 - DNA, 620 bp, Homo sapiens
ctggggtaacatcaattggtcatgctcagctgacattcattttaacttgaactctagccgtcatggcgattattaaatttataatgatatatgtaagatccattttaatgagtctccatgcttgggtgagctctcacttgygctggcaaaataaggcttaacagagtattacatttcatcttctactgaattttctgggctgtggttgaaactttgtgtagaaagaattagattgtttttcctgataggcattgtgatcgagttccacattgcccagagtacagtttctgggcttctagaaataccgccactgcagtagcttctgttggcggcagcagcttctgttggtgtgtgcatgtgtgtgtttgtgggtaaacatacaccccatttgcgtcaagtgtgaagctaaacaagcctctcagcgtgcagcctggaatgtcttgtccacgaagctgaaaggcgactctacagtgttttggctcatatacctcgggtgaactgaaaactcctcttcaggggggattggctgaaaatccaacaaaggcacaatcgaggcatctgctggagagctgggaagtctccaccagcatgcttaagttaccaagcattcattggcacca

SEQ ID NO: 113575 - DNA, 320 bp, Homo sapiens
gaattctctttgtctctttgtcatgggattcttctttctcaagggtcctatttatcatttaaattagatcttcctgyccacaccacccatcctctactcccagaaccagccaccttctgaatcccggaggctctcgaggccggcctcacgctctctgagatggaacagtcctgcgatcagccctccccaggcgaggctcccatcctgtggcccagcagctgcccacgcacacacgggtgcagggaaggtgccacctggcatcacctgaaccccaagagaacagcttccgaccgcagggagagcgcatcccctcgtctgcc

SEQ ID NO: 113576 - DNA, 432 bp, Homo sapiens
ctttagctctcaggatcctgtatctccctcctcctggttggcattgttccccscaaagcactaggacagtttcaaaaagtgttactgaaagggaaatgtctgtttatgtgattatatattttttcattgaggataatttcctatcttaccctttttttaatacactttacttttagtgcagttttaggttcacagcaaaattgagaggaaggtgtaaagagtccctgttcacccccaaccccacacatgcatagactcctccattgtctcagcctcccccaccagagtggtccagttgttacaactgatgaacctacattgagacatcattattgcccagagtccatgatttacatctgggttcactcttgctgttgtacactccacgggtttagacaaatgtataatgacatgcatctaccattatggtat

SEQ ID NO: 113577 - DNA, 458 bp, Homo sapiens
aaaaatggaaaacaactgaaatgcccctggacagatgagtggagaaattctggagtacctgcagaatggaatastactcagcaacaaaaaggaaccggctactgacacatgacttgatgagtctcaaaatgatctccctgcatgaaaaggagccagtttcagaagattaggctctgtaggacatttatctgacattcttgcaaagagacaaaactagtgatagaaaacagagcactgactgccagtggttggggtaggggagggtctgattataaaagacatcaggacagagaatctggaggggatgaagtgcttctgtgtcctgaatgtggtagtaataacacaaatccatacatgtgttaaagttcatagaactagacacaaaaaactcaatttttctgtatcttaatgtgaaaaatataagtaaaaaaaataaagaaaagagatgacaactcttg

SEQ ID NO: 113578 - DNA, 607 bp, Homo sapiens
atgttgtcacttctcatattgataacttcaatgtacaattggagtttgcagatacaaatacaagtaagttgtcccaaaccataaaacaaacctcaaacatttaactcttcaaatatttatcctggtttcagtgtttaatgacactcctgcaatgtgtcagctactgcaaatcaacactctatcacacagtgtatacggttttaagacaaatagctaaaaatcatgcatggataaatagcaaaactggcataaatagctcattgttacagcaaacctttaatgaaagagaaaagtagaatgatggttaccaaagtctgggaagggcagtagtgaggggaggggagaaggggttgtttaatgggtcgaaaaatacagttagatagaagtaataagatctggtgttcagtaacagaatagagtgactattcttaacaataatttgctgcatatttcaaagtaactaaaagagtggaattggaatgttcctaatagaaagaaatgataaawgcttgaggtgatgaatgtctccattatcctgctttgatcactacacattgtatgcttgaatcaaaatatcacatgtaccccataaatatgtacacctgtt

SEQ ID NO: 113579 - DNA, 579 bp, Homo sapiens
ggaaccagctggaagtcatccaagagtggtctgctaagccactccctttaggagttcccaggtcggcttggctcaaggagcccaaggtaaccaagccaagctgcatgggtgcacccagctttttctgccaagcaccagtgagtgcaaagctaaatgcatagatacattttttgagatgtagtctcactctgttgcctaggctggagtgcagtggtgcgacctcagctcactgcaacctccacctcccaggttcaagcaattctcctgcctcagcttccagagtagctgggattacaggtacctgccaccacgcccagataatttttgtatttttggtagagatgggtttcaccacattggccataggggtctcgaactcctgacctcaaatgatgtgcccacaccggcttcccaaagtgctgggatttcaggtgtgagccactgtgcctgcccaatgcatatttttaagtattattttgttyacatattttgttacagaatttgctggatatttagctgaaaaaacagaatttatagcaagatattaatttttttaattactcaggacttaatgaagca

SEQ ID NO: 113580 - DNA, 599 bp, Homo sapiens
aatgctaaaagctccagagagctgaacatggatcacaggcacgattctaggagttagagaggcatttattttctagatagccactcccaaagtctgtaaaatatttgcattgttcagaaagaagatagtgactgattctaggtgcagatacacacacagacrtacataaacacaggattaaattcagcaggccaagaggtacacccagatacaaatgacaacgcagttaaaaacaaagtgttgaggaaggaaattaaaattacaacataaagtaaagagctatagaaataatacagagatgtaattcaagacaaagcatgttaaatgttaaaaaccactaagataatatagcagcaaggtgaaccttcacgtgctgctcaacacagcttcagcatactatgggaacagtggcatctacaacaaaatgggatattttagagtactttttaaaacactagtaagtcttcttgaaaaataatttgtaaaagcacagtatttgaattctgcaatgactaacagatataatagctctaaacaggacattatgttcctcaaattaattaatattttttcaaacaccattaatgagaaaatggtca

SEQ ID NO: 113581 - DNA, 599 bp, Homo sapiens
aatgctaaaagctccagagagctgaacatggatcacaggcacgattctaggagttagagaggcatttattttctagatagccactcccaaagtctgtaaaatatttgcattgttcagaaagaagatagtgactgattctaggtgcagatacacacacagacatacataaacacaggattaaattcagcaggccaagaggtacacccagatacaaatgacaacgcagttaaaaacaaartgttgaggaaggaaattaaaattacaacataaagtaaagagctatagaaataatacagagatgtaattcaagacaaagcatgttaaatgttaaaaaccactaagataatatagcagcaaggtgaaccttcacgtgctgctcaacacagcttcagcatactatgggaacagtggcatctacaacaaaatgggatattttagagtactttttaaaacactagtaagtcttcttgaaaaataatttgtaaaagcacagtatttgaattctgcaatgactaacagatataatagctctaaacaggacattatgttcctcaaattaattaatattttttcaaacaccattaatgagaaaatggtca

SEQ ID NO: 113582 - DNA, 599 bp, Homo sapiens
aatgctaaaagctccagagagctgaacatggatcacaggcacgattctaggagttagagaggcatttattttctagatagccactcccaaagtctgtaaaatatttgcattgttcagaaagaagatagtgactgattctaggtgcagatacacacacagacatacataaacacaggattaaattcagcaggccaagaggtacacccagatacaaatgacaacgcagttaaaaacaaagtgttgaggaaggaaattaaaattacaacataaagtaaagagctatagaaataatacagagatgtarttcaagacaaagcatgttaaatgttaaaaaccactaagataatatagcagcaaggtgaaccttcacgtgctgctcaacacagcttcagcatactatgggaacagtggcatctacaacaaaatgggatattttagagtactttttaaaacactagtaagtcttcttgaaaaataatttgtaaaagcacagtatttgaattctgcaatgactaacagatataatagctctaaacaggacattatgttcctcaaattaattaatattttttcaaacaccattaatgagaaaatggtca

SEQ ID NO: 113583 - DNA, 564 bp, Homo sapiens
aacctaaccctctacttatttcctaactcctcagtctccacgatttttcttatgatgtgtaccactggaatccacccattccacttggggtctccagccacacatccacgtgtgtcaaggctgaagaccattgtcctcacgaaccccggcccacacactccytagagatgacatctgtgctgttgacttaaggcaccttctcagtggcactgtcttggggtttacctggatttaccttgactccctcagagtcctcttttctatgcaacaaagaaatggattgttgcgtctgatgagtatttttatgctttacaatatttaacaatggcttttaaaatatattatgcactcaaaacatacaatactttgtattaaagatattttatattaaaagtccttatataaattatttcatatgtcattttcttgtgatatgttccaccctgatttataacaggattttgtaatgatcttgaatgcattggaagatagtgaagtgccttctcaatcaataaattgcaattgtaattaagttcaatctttaatatatgtaaatgttgacat

SEQ ID NO: 113584 - DNA, 569 bp, Homo sapiens
taatacatgaaagcccttgaggatgtatatgcatgtcaacagtaagtgacttccgtagagggtgaagggtacataagaatatatgtgggatgacatgaattttggaccttttgtaaggtttaaacactaagaatgaaacatcattcttagtaatgaggttgaggaaaattttatttacattcttgagaagaatactgttaaaagataaactgaggcacaataaaattgtatagagtttattcgggcaaacagtgactcatgaatcaggcagcaagtggttcagggttccactgaagaagcccaagagggaggcttttatagtgaacacagaagcaaggcaaggaagatatctgattggtttgggttatgtagttgcctcgttttgtctgtcctactggaaagcttctagttacataactctgtgttagatggcagcttttgattggttcagttaaagttccatgtttcttaatgttggcatttataagaaatagctcaagttaagttccacttgtggttgygattcaaacaagtttaaggtcactttcaaggcctatctctgtcttctc

SEQ ID NO: 113585 - DNA, 625 bp, Homo sapiens
tggtgtgggagaactgagacaggataagacgtagttccgtaattttaagacatttttatgctgttgaggatatcacatttcctctccccatttctctgttcagaagttgcttacctctttcttgcccactttcatgtagagttttgcttttgtttttgttttcacttgtagtttgtggggtcccactaggtgttggcttgtctgtttttttttgagagtcctgttgcccttgagaatgggttatgtttttttctcaaatatagaagaaaattgaggcagacagaaactcctataccttttcactgcccaaataaactatctgtatctctatcctgtctctttcagtactgtttctatgaagatgatatctctgtgcctatcagaaatcaatcctaatgctttggtctggatcccggtccttttcaccttctcaaggtctttgcttctgcaattatatcttcctttattcctgaatcatcacattatccctttcaactagtccatttccattattatacaaatacgctcttggwtctcctattaaaaaattgatctcttatttccttccaactaccactctcttcactccgttcacataaaatcttgagcttattatctacaatca

SEQ ID NO: 113586 - DNA, 377 bp, Homo sapiens
tggaagggtaaacagggaaccttttagatgccaagaccttttagaataacgacccttcagaggaaactgaagtgcaaaggattgaagtaaccttccagaaggtacacagctggtgagacaaagcctgkactgggtcccaagcctgcctgactccggactcccacaccccacagtgataccagaatcaccctgaaaatgggaaacatgctgcagctgctgtcctgattccagcctctgaccaggagagctggattgaccaggaagccaatgaagctaagtttcagggccccctgtctgcctaaggcctctcccaaggccctgcaccaaagtttctatttgtgactttgttttcttagaaaaaactcctcaattatgtg

SEQ ID NO: 113587 - DNA, 659 bp, Homo sapiens
cagtgcttcgggaggccaaggcaggaggatcacatgagcccaggaatttgaggctgcagtgagctatgatcatgccactgactccagcctgggcaacagagctcgagaccctgtctctaaaaaaaaaattttaattaaattaaattaaatttaaaaagtaagaatttgaatttaaggcttcagctaatatcctagctttgctcaggggatcgataatatgtactttgtaggatttgaagtaatctaggtaagtaaagcttaacaatcgacatgcagaagctactcaaacaatgaaagctgggttcaattatcactaaataactaggcctgtagtcttcttccatttcaggggtcagcaaagtctttctgtaaaagaccagatagtaaaatttttcagcttttcaggccatatgatctccctgttacaactcctcaactctgctggtatagtgcagaagctgccgtagacaatacatatgcacaactgaatgtggctgtgttccaataaaactttatttatagatctggagactkgaatttcatgtaagtttcacatttccccccaccaaccatttaaaaatgtaaaacccattatttagatcatgggacatataaaaacaagcagtggaatagatttggcttgaaggctgttgtttgcc

SEQ ID NO: 113588 - DNA, 479 bp, Homo sapiens
tattctaacctaattcaaaaccagccttccacattggggtgtccagctccttctgttgcagggccctggtgatcctggaagtagttggttaactagggatggtaggtccctgatggaatagcatcaaggagaggaagggcatggagcatagagaaaatggaattgggccataatctttgcatttcccactgaagcttatatatctgcagtcttcactttaatcaaaatagcttaatttaggaaagaaagagcccactgtttttgctttataaaatcctgattttattgcttcctgaaawtttttttaaaggagaaatacaaaccatacgttgcaagggccttcgtttgacagtttaactggggtcatgctaggactgtatagatattgctgattatgataggaaagccagtgggatgggtctgacaaggatctgttggcagcaagaatcaagggaccccctttggaatgatcccatcac

SEQ ID NO: 113589 - DNA, 479 bp, Homo sapiens
tattctaacctaattcaaaaccagccttccacattggggtgtccagctccttctgttgcagggccctggtgatcctggaagtagttggttaactagggatggtaggtccctgatggaatagcatcaaggagaggaagggcatggagcatagagaaaatggaattgggccataatctttgcatttcccactgaagcttatatatctgcagtcttcactttaatcaaaatagcttaatttaggaaagaaagagcccactgtttttgctttataaaatcctgattttattgcttcctgaaattttttttaaaggagaaatacaaaccataygttgcaagggccttcgtttgacagtttaactggggtcatgctaggactgtatagatattgctgattatgataggaaagccagtgggatgggtctgacaaggatctgttggcagcaagaatcaagggaccccctttggaatgatcccatcac

SEQ ID NO: 113590 - DNA, 413 bp, Homo sapiens
cgccaccgtacccggctaattttttgtatttttagtagaggcagggtttcactgtgtcagtcaggatggtctcgatctcctgacctcgtgatccgccctcctcggactcccaaagtgctgggattacaggcgtgagccaccacgcctggtcccattataccattctttattcaaatcaaacaaataaaaattgtttaagatacagattttcaatatctagtgaattttaagaagaatcaatgaaattactagtaaacacatggaatatcaaatctgaaggaatcttggaagttatctaatccatacatcgcatttagtgactaaagtactgaaagagttatctgaaagatcaaaggatataaagaagggggtaatrtcattttactatcaatctggtatctcaatagtaactg

SEQ ID NO: 113591 - DNA, 619 bp, Homo sapiens
tcttgataatcatagttcagcaactacgctatgtaaaaatgtggtaataatgttgttgaaatactttaatattgtggattcataaagcaggaagatatgttgtaaatagtatttattaaattattaaatattttattggtataatatgcccaaaggtataaacatacattaattgatactctgaagctattaaatgtaaagccacatgtacagtgttcacaaagaagaaatctataaccatttattaataggtaatgaaaaactattttctattgatatgcagaacatagggcagtgggatctctctctttttttaagccagtrctttaaaatttatatgtgatatcaactaagtgtctcgtttgcatttggatcatatctcttatgcttttttattgcttaaaaacaaagtttaatgctttttctttctagaattaaaggataaattatacattttacacctcatgcaggtgttttggataatcattagttaataattcttaactaccatgatagatttatttaaaagcagagtactgagcatgttgggacgttgtgaataaagcacacaagtttgcagaataactgggaaagtaagcattgccgtaggaatattgac

SEQ ID NO: 113592 - DNA, 413 bp, Homo sapiens
cgccaccgtacccggctaattttttgtatttttagtagaggcagggtttcacygtgtcagtcaggatggtctcgatctcctgacctcgtgatccgccctcctcggactcccaaagtgctgggattacaggcgtgagccaccacgcctggtcccattataccattctttattcaaatcaaacaaataaaaattgtttaagatacagattttcaatatctagtgaattttaagaagaatcaatgaaattactagtaaacacatggaatatcaaatctgaaggaatcttggaagttatctaatccatacatcgcatttagtgactaaagtactgaaagagttatctgaaagatcaaaggatataaagaagggggtaatatcattttactatcaatctggtatctcaatagtaactg

SEQ ID NO: 113593 - DNA, 585 bp, Homo sapiens
gtttatatcgctgctgctttttaaggaatgatttgttaaaagggaaaatatggtakccctgacaaattacgagagagagagagagtgagtgtgtgagtgtgagagagagtgtgtgtgtgtgtgtgtgtgtgtgtgaaacagacatgggcttatgtttacgaagatctctttgtacatgtgtttgaaaggtgactgcaagaatgagtaaaataggttacatttacatttcttggtctcctccacactccctgatgctaaacaagatgctgcaagaatgaaaaatacaacttttgtgtaaactttgtaatctagttcatagagaaattggccaacagctacacgcacctaaaggaagaggggacatacatttggagaaacatattcatgtgtgctagttcaagaaggaagcagctagctctttgcctttgaagatttcaatattcactttgttgaaggtgaccaggtgatccctcttagatacttcgataattcagatacatccaatacaagatggatcttcataaaattcaatttgttatttcaatctggaaatgcattatctcttccttgaggaaaataaattgt

SEQ ID NO: 113594 - DNA, 585 bp, Homo sapiens
gtttatatcgctgctgctttttaaggaatgatttgttaaaagggaaaatatggtatccctgacaaattacgagagagagagagagtgagtgtgtgagtgtgagagagagtgtgtgtgtgtgtgtgtgtgtgtgtgaaacagacatgggcttatgtttacgaagatctctttgtacatgtgtttgaaaggtgactgcaagaatgagtaaaataggttacatttacatttcttggtctcctccacactccctgatgctaaacaagatgctgcaagaatgaaaaatacaacttttgtgtaaactttgtaatctagttcatagagaaattggccaacagctacacgcacctaaaggaagaggggacatacatttggagaaacatattcatgtgtgctagttcaagaagraagcagctagctctttgcctttgaagatttcaatattcactttgttgaaggtgaccaggtgatccctcttagatacttcgataattcagatacatccaatacaagatggatcttcataaaattcaatttgttatttcaatctggaaatgcattatctcttccttgaggaaaataaattgt

SEQ ID NO: 113595 - DNA, 571 bp, Homo sapiens
agcaattactttttctggtcaaactgggtgaagaaatttatggctgtcactattcagacttcatattcctcaagaagggatttttctccttctccaaattctgtggggctttgtccacagaaagacaaatgctgtaccaaaaggtctgatgaggaaactcagattattagcatgagttacctggcataggaaaagaagaaggaggctgaagcagaagttttacttttcattttatatactttgtcgtttaaattttatgaaaagactacattctatagtttaagttttttaatttaaaaaatgcaaacgtatttaataaaactcaacttgatcaatttgctcaataattctatcatatagtatttcctctgtgcttaaaaatgatgtgtaattaattaacttcmatctgcatggccccaccaggatgagcctggctacacatttacatgtaacaggaagcctgatcccaaaaggcttgaagaccagtgtgatcccgaatactagataggagcaaggagctggggtctcagtgagaagggtgcacaagattcacagaacaatattacatgaa

SEQ ID NO: 113596 - DNA, 419 bp, Homo sapiens
cacacacacacacacacacacacacacacacacgtgaaatgacctaccagtgtgtgtgtctggtgaaggttgcagcactactcacactcatctgaatttcttcatactcwttgtcccttccttattctttgacaccagagttttgaagccctggtgtcttattggtctaagctggtgccgaagggagggagatcccagattccagaggagctaacattagtaccagatattctaaaacagtggttctcaaacattttattcacaagacccatttacactcttattgaggacttcaaagagcttttgtttatgaatgttgtctttactgatatttaccatgtttaaaaattaaaatattcatttaagaataatatcagtaaactcactacttattaacacaaataacacagtcttaatga

SEQ ID NO: 113597 - DNA, 571 bp, Homo sapiens
ccatgtaagttttgtctcttattgaaacaaaataacattggaattatagttggtcttatgaatatttcttataattatagttatacatttctgaaatcattttccacagaccaatcattgggaaatcaaatatttgcccattttgaaagtctgaaaagtactttataacttatgtttattattattatatagtgatgcttattgcatatattgtagagaacagataaaactataaagaggaaacttttttttgcattctaatgaggctgagctaatctctatacatcttgtgctcttaaaaaatgtgtatatatgtgtctatatgttaacrtaactagttttatactctataatgttttctatcatgatttttctcactttccattttattgaaatatctatgaaagtttgtttttaatgactgcataatattttattttgtgtctgtgctataacattcaacctatatgtagacatttggggttattgcccacatctttggtgcataaaaatttgtctgcaaccttaatggttttctttagatgttcaatttctttagaaaaggtataac

SEQ ID NO: 113598 - DNA, 407 bp, Homo sapiens
ttctttttgcataaggtgattaaggaatgttggcatgtgttaaagataaaaggtggtatatagggtaacacaaactttaggaraaaagtgttgctttcttttgaatatatttattattttttataattctatactcccaattagtttctaagttatatattatattgctttgttttttaatgattgccttagagattatgacatctatctcaacttaacaaagtctgatattattttaacctcctccaggacaatacaaaggccttagaatactttactacattgggctggatgtggtggctcacgtctgtaatcctagcactttgggaggctgaggcgggcaaatcacttgaggtcaggagatggagaccagcctggccaacatatgaaaccccatctctactaaa

SEQ ID NO: 113599 - DNA, 591 bp, Homo sapiens
ttcgaggcatactttggcaaaagaagacataatgcatttataagttctttgaaaactatayatcattgtaaaaatgagggctattataattagaagactcatgattctggcagctaagagattgctttatattagttcagaagcttattttctttaggattttggtaacagcattctcacacgttaatatgaaaatggtgttattgtatattcaggtctggctcttttgactgacccccatagaggaagcaagaggaaattgaacacacatacacccacacctaaccacacacagcacccccccaccctgtatgtataatttaatgaaaaatattcaatatcagagcaattgctaaaaaggaaattttccagaaaactgtaactatgtattaacacattatacctaaaagcataacgcatattattatttttcagtaatcttagcaaagataaagtgtataagaaacaaaataaatgacttacaaaggaagggcctttactttaaggacctttaaaaacgagcacaaaaggattaattttcaattacatatattgaattgaatcttagacactagaaatgagagcattttt

SEQ ID NO: 113600 - DNA, 378 bp, Homo sapiens
tcaagaatgcgaatgagattgagtaaggatgggatgaataaaaagactagttcattgattaaagacgttaggaatggtgatatgatctgtgagtattgatactaagtctggtaaaaagctattaagatgtatcgatagaacagtttggmccaagaaacattcagatatttatcttcttctcttgcccagataatgactgggaccgggaactaataagtcttccattggagcaaaagtttgatgaggtacttgtattatcacagcaaagccatgtttcaatggataaatcatttgtgggaagttttgagactataaagaattgtgtgttccacaatgtcagtaatctctttgaggcttctttggttcctgtgctacctg

SEQ ID NO: 113601 - DNA, 458 bp, Homo sapiens
tgctcccttttcaccacatccgtactaatatctattgttttttgactttttaattatggccattcatgcaggagtaaggtagtatcatgtggttttaatttgcatttccctgatgattagtaaagttgagcattttttcatgtttgttggctgtttgtacatctttttttttcttgctgatttgtttgagttccttgtagattctggatactagttgtttgttggatgcatagtttgtgaatattttctcccactctgtaggttttctgtttattctgctaattacttctttggctgtgcaaaagcattttagtttaaccaggtcccattgatttatttttgtttttattgcatttgttttgggggccttagtaatgaattgtttgcctaagccaatgtccagaagagtttttccaatgttaycttctagaatttttatgatttcaggtcttagattt

SEQ ID NO: 113602 - DNA, 425 bp, Homo sapiens
atctaacaattttaatttttttccctttatgctgttattccttacctagagaaacaatttccctccaaagttcctttgaggggtctgtttaggccaggccaacacaagtgacctatgtggattttagcatcctttttttgaaatttgaggttttatgaagcttgagtttttctggatatttttagtaatttgctggtgtgtacttagctcaratacttgattgcaactgtgttgggtcaactatttctaatgggacttttccatttgcatgtacagtcactggaaactgctgggcagagaaactctaaaaggtagttggggcacactttttccacctgtcagattggtgaagaattggtgaggctgtggggaaaatggcattctcccacttttgatggatatgtatccaaataaaagtcattccc

SEQ ID NO: 113603 - DNA, 567 bp, Homo sapiens
cataattcaggggtcaccacgtactcccctctgaataagaaggctgaatctcagtggtcagcaatgagggagattcattttggtatttttttcttttttmttttataggcaatctttcttctcttccttctagattaacaggattctttcagtcagctttcaaaactcattcagtgtagatctggtttgttttcttccttgaaaaaaattattaatataataccacagtctctgcaccgaacatcatgatgcatgcctataatcgcagctactcaggaggctgaggtgggagaatcacttgacaccaagagtttgagcattttttagagatgggaccccatttcttaaaataaataaataaataaataaataaaaaggtgtctgtgtgtgtgaaaccacaatctccacgttctgaatgtaattatgccaaatatattttcttcttacattctttgcatttcttttaaacatgttttaaaatttaattttcttttaaaataggttttgttttcccattttcttcacaatttccttaagttctgaatttacatcagtcatctgccactc

SEQ ID NO: 113604 - DNA, 522 bp, Homo sapiens
gctatgtattttaacgtatcttacaccggagtaatttgggttgaactcagcagccctaagcactgtgccgcaggaacttgtgcagacaaagcgcggggacggaccctgaytccggtccgcgtctccgctgctccctccctcccttgctctgaggattagacacaggagatgctgcctcatactctcgcgagacggacggagctcttcgatcgtccgattctcccagccgcaccacgggtgctcccacctgcggagaaccggagtctggcgatgccaaggcgcttctgggaattgtagttccgggcgggatgagggcagcacgcctggctccgctccttcttacgcatgcgcgactccgagctggccaaagaagttcgtcccctttgtgaggcccgggatgggaggtgagttgcttgtggtgatgtcgctcgtctcggctcggcctcggcggtggttccccgggtcgttctgtgccgagtcggggctagagtgcgcgtttgttaaaggggcctcgagggcaga

SEQ ID NO: 113605 - DNA, 575 bp, Homo sapiens
ttcatctcattgggactggttggagagtgagtgcagcccacagagggcaagctgaagcagggtagggcattgtctcacccaggaagcgcaaggggttgggggatttcccttgcctagccaagggaagccatgacagactgtacctggagaaacagtacacccctgaccaaatactgtgctattcccacagtcttagcaackggcagaccaagagatatcctcctgtgcctggcttagcaggtatcatgcccatggagccttgctcactgctagcacagcagtctgagatcaacctgcaacgctgcagcttgacgtgagggaggggcacctgccattgctagacttgagtagcttacagtgtaaacaaagcagctaggaagcatgaactgggtggagtccaccacagctcagcaagacctactacctccatagatttcacatctgggggcagggtatagaagaacaaaaggcagcagactgcttctgcagacttaaatgtccctgtctgacagctctgaagagagcagtggttctctcagaacagcattcaagctctgagaacagacagactgcct

SEQ ID NO: 113606 - DNA, 585 bp, Homo sapiens
accaaaagttaacttttcttcttagtttcacatcttactgaatcttccatgtgtgctgctctgatggccatgtactttcccaatatcatgctcatgtcgttccttccatccaaaatccccgtcttttcttttctctaagaaaattcaactcatctttaaaggcacaggcttctgcagtcctcttcataaagcctttgccaattctccgagcctaaattaactgcatcctaatttatgctcctctacagtttaggtatacttttagtggagtgtttattttattcagccttgttgcttacttattactttcttgggggcaataagttacttgagggtaggtgtggayctaagtcattgttgtatcccatccaattaactaatataactcaataaaacttattattcactgttatttctccaaagcatcaggtacagttattttcaaatactaaacatgcaaataaatatatttaatgaatatttcatcttttttcttttgaattcctgaaaattgtaataattttctaaatgaagcaatgcctcagaaatctctcagggtattaggttggtgcagaagtaattgcg

SEQ ID NO: 113607 - DNA, 569 bp, Homo sapiens
ttctttacaatgatattcagtgtctaccaaaagttaacttttcttcttagtttcacatcttactgaatcttccatgtgtgctgctctgatggccatgtactttcccaatatcatgctcatgtcgttccttccatccaaaatccccgtcttttcttttctctaagaaaattcaactcatctttaaaggcacaggcttctgcagtcctcttcataaagcctttgccaattctccgagcctaaattaactgcatcctaatttatgctcctctacagtttaggtatacttttagtggagtgtttattttattcagccttgttgcttacttattactttcttgggggcaataagttacttgagggtaggtgtggatctaagtcattgytgtatcccatccaattaactaatataactcaataaaacttattattcactgttatttctccaaagcatcaggtacagttattttcaaatactaaacatgcaaataaatatatttaatgaatatttcatcttttttcttttgaattcctgaaaattgtaataattttctaaatgaagcaatgcctca

SEQ ID NO: 113608 - DNA, 492 bp, Homo sapiens
ttagttatatacaaccaaaaagtatacatgacatcataatctttcaattttctgataattctagtttaaacatatgtaataattcaggtatgtttcttattcattcgggtattttctctgcccccaagtaattgttttacttgattatgttgtaattataacaccaaatttccttaaacattaaggttgctgattagaaaatamatagttcaggcaatatttctattttatgcttatctaatccctatatgcttgccaaaagcattactgatggtgaacttgcatgtgagttatttcattctttttcttctagatatcttcatgttgtttaaatttcttttttactgaatcatcttaccagttcagacaaaaagaaagaaaatgactaagaaattccagaatataactctacccaataagagattaaacacttggactggactttgacagctaatttaatagtcaggtttctacgttgttttgcttttttcc

SEQ ID NO: 113609 - DNA, 606 bp, Homo sapiens
tacacaatagttgataataaatgactgtgttgctggttatatatttactatactatactttcatcattcttttagagtgtattccttctacttataaaaaagaaaagttcactgtcaattaacagcttcgggcaggtccttcaggaagtattccagaagaaggcattcttatcacaggaaatatcagatccatgtatgttactgcccctgaagaccttccaatgggacaagatgtggaggtggaagacagcgatattgataatcttgcccctgaataggcctaggctaaagtgtatgtttgtgtcttagtttttaacagaaaattttaacacagccaccttcccctgcctaagcatttcatctctgacytgttgtccttctgggagcccagcctccagaggcctgtgatctgccttggggcttccaccactgtcaatgccaacatccagccaaggagggagtggggagagtgggcatctttgtggattctgtcactgtttctgtgggaagggaggcctgagcaggcctgtcatgcctgacagctgctggcctccactgctctcattgatggggactatcctccctgtcgacaggcactctgtacaa

SEQ ID NO: 113610 - DNA, 606 bp, Homo sapiens
tacacaatagttgataataaatgactgtgttgctggttatatatttactatactatactttcatcattcttttagagtgtattccttctacttataaaaaagaaaagttcactgtcaattaacagcttcgggcaggtccttcaggaagtattccagaagaaggcattcttatcacaggaaatatcagatccatgtatgttactgcccctgaagaccttccaatgggacaagatgtggaggtggaagacagcgatattgataatcttgcccctgaataggcctaggctaaagtgtatgtttgtgtcttagtttttaacagaaaattttaacacagccaccttcccctgcctaagcatttcatctctgacttgttgtccttctgggagcccagcctccagaggcctgtkatctgccttggggcttccaccactgtcaatgccaacatccagccaaggagggagtggggagagtgggcatctttgtggattctgtcactgtttctgtgggaagggaggcctgagcaggcctgtcatgcctgacagctgctggcctccactgctctcattgatggggactatcctccctgtcgacaggcactctgtacaa

SEQ ID NO: 113611 - DNA, 643 bp, Homo sapiens
atcactagaccgtacctataagaattgcttgaaggagttctaacatgcaaataaaaggacaatactcaccattgtaaaacacatgtgagtacaaagctcacacatcctataaagtaattacacaattgagactacaaagcagctaggtaataacattatgccaagagcaaaacctaacatatatatattaactttgaacataaatagcttaaattctycacttaaaggatatagattggaaaactgtattaaaaacaagatccaattatttgctgcctacagaagacccatttaatgggtaaagacacccatatactcgaagtaaaggggtgaaaaaagatatatcacgcaaatgaaaaacaaaaacaatcaggagtggctatagttatataaaacagactttaaatcaacaacagttttaaaaaaaagacaaagaaggtcattatataattctaaagggttcaattcaacaataaggtacaactatcctaaatatatgctccccgtaccagagcaccaaggttcataaaataaatactactagatctaggaaaagagctagacagcaatacaaaaatagtggggagtttacaccccactgacagcattagacagatcacagacataggaaaacaataacaaa

SEQ ID NO: 113612 - DNA, 643 bp, Homo sapiens
atcactagaccgtacctataagaattgcttgaaggagttctaacatgcaaataaaaggacaatactcaccattgtaaaacacatgtgagtacaaagctcacacatcctataaagtaattacacaattgagactacaaagcagctaggtaataacattatgccaagagcaaaacctaacatatatatattaactttgaacataaatagcttaaattcttcacttaaaggatatagattggaaaactgtattaaaaacaagatccaattatttgctgcctacagaagacccatttaatgggtaaagacacccatatactcgaagtaaaggggtgaaaaaasatatatcacgcaaatgaaaaacaaaaacaatcaggagtggctatagttatataaaacagactttaaatcaacaacagttttaaaaaaaagacaaagaaggtcattatataattctaaagggttcaattcaacaataaggtacaactatcctaaatatatgctccccgtaccagagcaccaaggttcataaaataaatactactagatctaggaaaagagctagacagcaatacaaaaatagtggggagtttacaccccactgacagcattagacagatcacagacataggaaaacaataacaaa

SEQ ID NO: 113613 - DNA, 643 bp, Homo sapiens
atcactagaccgtacctataagaattgcttgaaggagttctaacatgcaaataaaaggacaatactcaccattgtaaaacacatgtgagtacaaagctcacacatcctataaagtaattacacaattgagactacaaagcagctaggtaataacattatgccaagagcaaaacctaacatatatatattaactttgaacataaatagcttaaattcttcacttaaaggatatagattggaaaactgtattaaaaacaagatccaattatttgctgcctacagaagacccatttaatgggtaaagacacccatatactcgaagtaaaggggtgaaaaaagatatatcacgcaaatgaaaaacaaaaacaatcaggagtggctatagttatataaaacagactttaaatcaacaacagttttaaaaaaaagacaaagaaggtcattatataattctaaagggttcaattcaacaataaggtacaactatcctaaatatatgctccccgtaccagagcaccaaggttcataaaataaatactactagatctaggaaaagagctagacagcaatacaaaaayagtggggagtttacaccccactgacagcattagacagatcacagacataggaaaacaataacaaa

SEQ ID NO: 113614 - DNA, 564 bp, Homo sapiens
tttacatccactaataaaatataagacccggggaagctgggggaaaatccaaaagctttactgaaagctctaaggtcaacgtaaaataattttaaaaagagttgtggacttatcayagattctaactggacaagttcaatttgttttgtggaattttcttgctttctctgttcatcaagacttcaaaccatgcttccttttagaaaaggaaccaaagcaggtctccacattatgtcctgcagatgaagttctaccatgttcaagacacctttgctacatagctcaataaggaaatagagtcagaaggaaccttagagaacataaactttttttttaataatttcaacttttattttagattcagggggtacacgtgtaggtttgttatctaggtatatagcgtgatgctgaggtttgggatatgaatgattctgtcactcagagagtgagcattcaacagtttttcaacacttgacttcctacttctctcttccttctattagtcctcagtgtctactgttgccatctttatgtctatgagtacccaatatttagctctgactt

SEQ ID NO: 113615 - DNA, 422 bp, Homo sapiens
aattctttctttgactcctatgacatatttacctggtttgcctcctacttctttggaaactccatctaagtagtttagtggttgaatttttctctttctgaatttccagagaagtctttttaccgtaatttgaagctctttttctcaagctgtaatctctaaaaatggcttcaggtacttaccttgatgctcccaaattaatctaacagatgcaggcttttgataagaacttttttttttcttttttctttttgagagggagtcttgctctgccgctcaggctggagtgtagtggcgggatcttggctcactgcaacctctgcttcccgggtccaagcgattctcatgtctcagcctccsgagtagctggtaatacaggcctgtgccaccatgcctggctaattcttgaatttttagtagag

SEQ ID NO: 113616 - DNA, 635 bp, Homo sapiens
gataaaacaaataataaataggaacttggattactaagaattccactgttatcactggctgacccaatacgcataactaacttcctctattttacttatcttgaatgtaaagtctgagaatgtgcttgtagctaaaggctgttacatgaaatgattctggctaaaaaagaaaatctcgtaatttgagaagggaaagtaggtacaattgctaaatgtagaataaaataaggcaaatggtcaaaatttattttgaaaacatagagagccaaaaggatgataaaataacaatagagaaagatgatattttaaaaaaatctgtaaacacaaaaatgaaatacaaagaacaaaagcataatcaatgaaatagatgagatgtttcaaaatgccgtgttcctatagataatatatatcataaaaggcaaatgtaagcaatttggaaaacttaattgctaatgtgaaattacaaaaccccttgggtccttaactaaaatataatcaaaatttgaaaaaactaaatatttttaaaatacaagcaaaacaaaatagtagtaggatattttttgtaatataaaagtgtgattaaaattaattataaatgtagctractttaaacctgtaataaaatgaaaatgata

SEQ ID NO: 113617 - DNA, 188 bp, Homo sapiens
agaaaatcaactatattccctaggccatwtaaaattacaataaaatgagagggtgttataaaaaggaaagaaaaagctcagacaggcccccaaatctttagttgtggtattaacacattaggttcttcattgcacaaataccttttaatataaaacaattagggtcctgctcaaaaattaaaaaaaaa

SEQ ID NO: 113618 - DNA, 557 bp, Homo sapiens
agttaagggccagtcctatgtcctgccccggattcctctccaagccagctccacagtttacaggccccctctgccaggggcccctcttctctcaggacattttgggatcccggcacttaccacactgaattatcattgtttttgtgtggccacctgcccactggagtgtgggtttccttacggcagagatgatcgttgcccaccaytccacctccaatgcttactgcagtgccagccatgcaatagccttcaatgaatgtagataggatgaataatattggatatgtatcttcccagccttcttagcacagtatttggtaggttggtgttcagtaaatatcgaggaagaaagttccccaaggactaacaccacgccttcttcatctctgaatcccagagcctagcacttgtgtttgtctcaaagaccagatggaggcgaaagccctttgtaatgtgctatacacttcctggaaccattctctttactttcaaggtggaatcaatcattagtacaaaagaaacccatggtcacaaacaaaactcaccccagtgtttct

SEQ ID NO: 113619 - DNA, 599 bp, Homo sapiens
aataatattggatatgtatcttcccagccttcttagcacagtatttggtaggttggtgttcagtaaatatcgaggaagaaagttccccaaggactaacaccacgccttcttcatctctgaatcccagagcctagcacttgtgtttgtctcaaagaccagatggaggcgaaagccctttgtaatgtgctatacacttcctggaaccattctctytactttcaaggtggaatcaatcattagtacaaaagaaacccatggtcacaaacaaaactcaccccagtgtttctgtggctttgctgttctcaccagttgcctgttctgtctaaccccggagaggtaaataacaccctgagaatggccctaggctcacacaggtttcccagttagccaatcaagaagaattacaaatggccacactatcagccagagctgctgcctcactggagttccaaaacggagaggatctgctcccctgcaccctcaggcttggaaatgctgagaaatgctaagccactggggtttcaattatacctaatttaaaacgagcaaagtagacttgccccccaaggtgttccacaaaaaacttaaagcctggcagc

SEQ ID NO: 113620 - DNA, 599 bp, Homo sapiens
ctctaactcatgctcagtgaacctgagaactctttctggatagggcattacctaccttccttgggtaatattcagccttagaacagggaatggaatgggaggctccttctccctaggctgaggaaaattttcttcctcggtggcaagtgctcatcattcagaggggtgtccagggctgacgggactgaaggagtgtgacttgcaacacaggaggcccctcttcagaacaagaatcttccactcagcttctgcatctgcattgaaagcaccccagcagattaaaccacttcatcttagctaaggcatcaggtgaaatcaaagaaattttagagctgaataaatttktagaccatcaattcaatatccttagttttcagatgatgcaataaagggccagagaatttaattgacctttcaaagttacacagctcattatttattaatcaagttgctgaggtacaaataagtgctctttccatgaccctgggattcctttctagtgatcttgattttatgatttttgttgccaatgaacaagtaaatcttgtttccacacaacaaaattccccggggtcctgtgatctttcataaaatgaaca

SEQ ID NO: 113621 - DNA, 599 bp, Homo sapiens
ctctaactcatgctcagtgaacctgagaactctttctggatagggcattacctaccttccttgggtaatattcagccttagaacagggaatggaatgggaggctccttctccctaggctgaggaaaattttcttcctcggtggcaagtgctcatcattcagaggggtgtccagggctgacgggactgaaggagtgtgacttgcaacacaggaggcccctcttcagaacaagaatcttccactcagcttctgcatctgcattgaaagcaccccagcagattaaaccacttcatcttagctaaggcatcaggtgaaatcaaagaaattttagagctgaataaatttgwagaccatcaattcaatatccttagttttcagatgatgcaataaagggccagagaatttaattgacctttcaaagttacacagctcattatttattaatcaagttgctgaggtacaaataagtgctctttccatgaccctgggattcctttctagtgatcttgattttatgatttttgttgccaatgaacaagtaaatcttgtttccacacaacaaaattccccggggtcctgtgatctttcataaaatgaaca

SEQ ID NO: 113622 - DNA, 586 bp, Homo sapiens
accctttccaccctattttgcccttgcatctcttctgccatgtgaggtcacagtgttcatcctctccagatgatgcagcaatgcacaatctcggaagcagagagcagccttcaccagacaaccaaacctgcatgcaccttgatgttgaactttctggcctccggaagtatgagaaatacatttctgttctttataagttacccagtctcaggtattttgttatagcatcccaaatggaccaaggaaagaaggaatggtgtgggtctgtctatacaggacagcarcaaggaggcataataggtattataatctgatagcaataaattcaaaggtgggggctattagggagaaaggagggacaatgacgtaagaaggtacaattgtttggaagctgcaatgacacagaagaaagaataagggcactaaggagattatagagatgataagagatgattagaaatgtttggcctacctcatcaatagcaataatgtctcatcttttaaagttttaatttctttgattacatttacttgattttttttcatgtgtaggtgacagcataattaattatggttttcatttgtt

SEQ ID NO: 113623 - DNA, 560 bp, Homo sapiens
cttagccattattttatttggttcgaaatcctttattgtctttgattcatagtacctttcatgttcatattaaaatgatatttttaaacaaaatgcttgagcaaatctgccttttatagctttcaacataattcaataacagaaggaaaatgtacttatgtttactgagcacttaattgtatagtaggccttgtgctagatactttaacagctatctcaattgatcttcacaagtgggtgttatgatgtttattttgcagaaaataaaaataaaatcaagatctggcaattatttgtataatttgatcaattttaacaactaattyaaatagtttagatggaaaatttcatggtgtaagattattaccattcctacctattataggaaataatagtgtgaagaaatagtcctaataggattaggaaacattcatgttgagaagagattgcagagggtttgagttaatatcagaacagccagggtaaagcactgtatgtcaagcaaagttgccaacttacaatgtgaagagatgaaatggcaaaaacctgtgtttcaggtc

SEQ ID NO: 113624 - DNA, 583 bp, Homo sapiens
aaatgatccctaaactgccattccctgcaaaagtgtcctctatagcagctattcctcctattaattaaaattctattccttcattgttaccaactgattarggtacaagttttaggaaaataataattgaacaaattcaccctcaggagtaatgataccagctctacagactgatcaatattcagttgctatgcaccagcattgcttacattagttgttaaagtattgaaatattaccataacagttcataaatatctgcagcttcaaaccctccagtatttctccccaccaccaccctaacacctttccagagacctaagattttgtgatcatagttccttgattccacaactaaaagaacagtgtttggtgtaaacatccttttccttcttagcatgaaatttataggctaaccttgcctttatctcttctgatttgttggtgctgtcacactagtggttaaatattttgaataccactcccggatagcttggctaaaccgttaaacaatatttgtcatttaaaatcatctactaagcctagatgaatctcttagtgcaatgtacagtaagtaagacataa

SEQ ID NO: 113625 - DNA, 417 bp, Homo sapiens
tgaggatgaagcccagtttcactgtaaaaatgactgcattccaaagaaggtttaactcccaaccaaggtaggttggctaggccaaagttgggaaagaatcttgccacataggatggagacatctaggttgatgcaccccaaaatcttgaatccccaggttcctctaaaacttctgagaccagaggagtggcccactttaccttattaaggaccaatacttctctctggtttgaagatagtgcacagggccctcccacccawaacaatacccctctccgggacattccctacaccatctcctcagtttgtcacaatgtaatcaagctaaagacatgctgggactgaggagaaagtaaagggattaagccctagtggagctgcaggatctagccaggatgtaccaacagctgggacagt

SEQ ID NO: 113626 - DNA, 599 bp, Homo sapiens
gctacaaacctgtacagcacgttactgtactgaatactgtagaaaattgtaacacaatggcaagtatttgtatgtctaaacatataaaagatgtaataaaaatatggtataaaaataaaaaatgatacacctgtctagggcacgcaccatgaatggagcttgcaggactagaagttgttctgggtgagtcagtgagtgagtggtgagtgaatgtgaaggcctakgacattgctatccattactatagattttataaacactgcgcacttaggctacacttaatttacaccaaaattttccttcttcaataataaattaggctgggcatggtggctcatgccatggctcatggaattttaatcccagcactttgggaggctgaggcgggtggatcacctgaggtcagaagttcaagaccagcctgggcaacatggtgaaaccccatgtctactaaaaatacaaaaattagctgggcacagtggcgcgtgcctgtaattccagctactcaggaggctgaggcaggagaaccacttgagcccagaaggaagaggttgcagtgagccgagaatgcaccattgcactccagcctgggtgacaga

SEQ ID NO: 113627 - DNA, 580 bp, Homo sapiens
ttctcagatacttctcaagaagcaggagttgcaggtgggagaacagactgttcctcggtaaaacatttccaacggggcttccacaggacattaacccaggcacccttctctaaaggtagtggggggctgaatcctggggaggggtgtctttctctaatatgtacaaaagtattttatgggctagggtggccctgcttttcagggtctaagcatctgaggtttcattgcttttcctttgtcttcttagattctccctcatttctgtctttagatttccatttccacatatgagtggtattgytccattctggacctctcttctttctttttattggtaaagtatgccaaaaaatgcatttaaatttctatgaaacactttgtttattgtactaataaatcctcctttggttttccaaacacttggaataaatgtgatgagtttatatggaaattaaggtagcagtacatctttttaattagacagatatagatgtagaaagtgagtatctgctgatatgaaagaaggtttgggctcggaggagaattttttcctcagtcatctcacaggttaatttgaaga

SEQ ID NO: 113628 - DNA, 624 bp, Homo sapiens
gcaaatgctggaggccaaggggarttcacatttttatataaatttgaaaatgctcattgagcattagaatactaaaatctatgataggtaatggagaacaagtaagcattgtttaacccaatgttgtccaaacaactaccacaataaaaatacatctattgtttcatgtaacacctactaatgtcccacagaatatagtttgttaaagactggcaagtcacttttcttatctccattaccctagaagatgaacatgaatctggttcttaacttattttctaaggagagatctggttataccactgatagctcagctcaacggaacagtgctactcaccaaagtactattttttttttcttttatctttccctgaaactaaccatgatatgaatcaggccagagagggtgagccatctaaaacctatccaactaagaggaataaagaatttaactatgtagaatccaggttgaaactaaagacacagcaccttggattctaacacagcaaaactactattacttgatgagatttagagagattacaaaaagtgacagcctattcagactgtgattatttcaatgaaagctttcatttcagtgattttaaacaggacacttacaca

SEQ ID NO: 113629 - DNA, 664 bp, Homo sapiens
ttcaagggattttctgtgcagaactattttactctgctcttactctagatgacttacataattggtttatgttaccgctacttttactacttttaagctctgctctctacttttgcaaatgaagagaaagatcagaatgtaagccaacattgtatatagcaaataataaaagggagctatttcagttgattactcacarcgcaaaacaagtatatttggtatgttaactacaggcatcatgaaaaaagtacccagtttttctggaggcttaggaactgtctgtcaattatatgagatgaggaggtggtcttgttgctgcttgaaagactaggactttgtaaatgagcttaataattacattactaaataataattccctttgaaataatttccagaaaacttgtataatcaaaattattttacagcttttaaaagcttatgaatgtatacaatcctggggatacaattctcagagaggtgatgtagctattaatatttaaggtcatacagctcttctgtggtagaaaagctgaggccttctgacctgaagtatattttattttctaatctaccagtaccatattgtgtctctggacaacaggcgtactatttaaggtgcataaaatagacattcaaactccaaaacaatgatctttaggagtgc

SEQ ID NO: 113630 - DNA, 484 bp, Homo sapiens
tgcataaattgattaaaattgaaagacattgtttaatcttctatcccaagagaattcatcaagctgcctgcaacaaagaccacttttagattgggtgcagtggttcatgcctttaatcccaaccctttgggaggctgaggcggagaatcacttgagcccaggagtttgaggctgtagtgcrctatgattgcaccactgcacaacctggacaacagggtgaaaccctttcaaggggtaagctgcttgctcgctgtggtcattaaaaaccctagaagctggtaggataataggtgtgcctgcacttctccaagcatgaattttcagtcctttacttaaaacttgctccatgcattgtagtcaagctgactctttatacctttaaaatgtgcccaaaaggtgcacccaaccaagtcattcacagataaaaaacgtgtaaccagtagtaaaatgatacagctggtccagacaagaactccaccatttc

SEQ ID NO: 113631 - DNA, 484 bp, Homo sapiens
tgcataaattgattaaaattgaaagacattgtttaatcttctatcccaagagaattcatcaagctgcctgcaacaaagaccacttttagattgggtgcagtggttcatgcctttaatcccaaccctttgggaggctgaggcggagaatcacttgagcccaggagtttgaggctgtagtgcactatgattgcaccactgcacaacctggacaacagggtgaaaccctttcaaggggtaagctgcttgctygctgtggtcattaaaaaccctagaagctggtaggataataggtgtgcctgcacttctccaagcatgaattttcagtcctttacttaaaacttgctccatgcattgtagtcaagctgactctttatacctttaaaatgtgcccaaaaggtgcacccaaccaagtcattcacagataaaaaacgtgtaaccagtagtaaaatgatacagctggtccagacaagaactccaccatttc

SEQ ID NO: 113632 - DNA, 484 bp, Homo sapiens
tgcataaattgattaaaattgaaagacattgtttaatcttctatcccaagagaattcatcaagctgcctgcaacaaagaccacttttagattgggtgcagtggttcatgcctttaatcccaaccctttgggaggctgaggcggagaatcacttgagcccaggagtttgaggctgtagtgcactatgattgcaccactgcacaacctggacaacagggtgaaaccctttcaaggggtaagctgcttgctcgctgtggtcattaaaaaccctagaagctggtaggataataggtgtgcctgcacttctccaagyatgaattttcagtcctttacttaaaacttgctccatgcattgtagtcaagctgactctttatacctttaaaatgtgcccaaaaggtgcacccaaccaagtcattcacagataaaaaacgtgtaaccagtagtaaaatgatacagctggtccagacaagaactccaccatttc

SEQ ID NO: 113633 - DNA, 484 bp, Homo sapiens
tgcataaattgattaaaattgaaagacattgtttaatcttctatcccaagagaattcatcaagctgcctgcaacaaagaccacttttagattgggtgcagtggttcatgcctttaatcccaaccctttgggaggctgaggcggagaatcacttgagcccaggagtttgaggctgtagtgcactatgattgcaccactgcacaacctggacaacagggtgaaaccctttcaaggggtaagctgcttgctcgctgtggtcattaaaaaccctagaagctggtaggataataggtgtgcctgcacttctccaagcatgaattttcagtcytttacttaaaacttgctccatgcattgtagtcaagctgactctttatacctttaaaatgtgcccaaaaggtgcacccaaccaagtcattcacagataaaaaacgtgtaaccagtagtaaaatgatacagctggtccagacaagaactccaccatttc

SEQ ID NO: 113634 - DNA, 538 bp, Homo sapiens
tgcacccactgtctgacaagcctcagtgagaagaacccagtacctcagttggaaatgcaggaatcacccgtcttctgtgtcactcacgctaggagctgcagactggagctgttcctatttggccatcttggaacctcccctgatattgttcttttttatggctacatagtattccatgatgtatgtgtaccatattatatttatccaatctgctattggtgggcatttagtttgattccacatctttgttatattgaataatgctgcagtgaacatacacaagtatgtgtctttatgatacaacaatttatatgactttgggtatatacccagtaatgggattgttgggtcaaatgrtagctctatttttagctctttgaggaattgccacactgctttccacaatagttggactaatttatgctcccaccaacagtatataagtgttccctcttttctgcaacctcgacagcatctgttattttttgactttttattaatagccattctgactggtgtgaatggtattgcagtgtgg

SEQ ID NO: 113635 - DNA, 516 bp, Homo sapiens
aaagggagccaagttaaggaaatgggagatctgaaccatgccttattcagagaaaaatcaatccaaagagagaataggaaagaaataaaagaaataacaaagactagagcataaataaacataatcaaaaatataaaaacaatggagaaaccaacaaagctaaaaattggttcactgacaaggtcaacaaaactgacaaactaagctagactgacaaagcaaaaaggaaagaagattcaaattataaaattcaggaataaagaggggacatgacatcactactgatcttatggaaataaaaagtatcataagaaaatactatatacagcagtgcrtcaagaaactaaataacttacatgaaatggacaaatttatagaaagatgtaaattactaaatctgactcaggaagaattagaacatctgtagtgatcgataacaagtaaagagatgaatcagtaatttaagaacttcccataaagtaaaattcaggcctggatggcttcataaatgaattc

SEQ ID NO: 113636 - DNA, 587 bp, Homo sapiens
ccagtcattatcctgcccttggtttcatgatatatttctgttattcttcaacaaatttccttttctgcttaagaaagttaaagtgttgtgtttttcctctctcacttaaaaagcctttcttatactttaacawattcacgattaagttaggaattgcctttttgtaagttaagaaaaggctcttcctccagcttgactcagtgtcatgggttcagggattgttaaagggaatgggaatagattccagcccctattcatcctcagcaatgagctcttaaacagtaaatatgcagaggcatatgtggcaaccctccagaggccatgggtcctcagccttcactgtgaacccattttgatttagaattccccctctatttccccaactctttgctatggctttatatcatacaaaacatcttagaatgtttaccctttcctatcaccctatttcatgagttggttatcatccagataaccaacctcaggaaattgttctggtcacttctgttcatagtagcttctgtaataatccacatacatgaaaactcttgcgaggcacagaggtcaatgaataggaatggaaattg

SEQ ID NO: 113637 - DNA, 510 bp, Homo sapiens
tttgaggttattatcttccttaaaatttatctgtgatattctttaaaacctgaatatgaaataactctattgaagaaatgtttctgcttggtaattaaaaggacttaaattttgcagtgggttattgtttaggatgcagagaaattaaaattagagctacaaatttccattaggcatagcttatgatttataattatcagaatgaaatttttgcaaattttcccctcacattgaactgacagagagaggcaaatatcatgatctctctcaactaggtcaattcctagttcactcactggtattgttgcctattgcgttagcaaatcacyttttttttttttttttttttttttaatgcttaacgtttatttcaacttcccatgtttccatggaccctggcctgttccctttcctctcagctctggatcttttaaaacctgtgtgcttaactaccaggtagtggttgatgcctctagcaaaaaacaccagcatagtgtctagatttatgat

SEQ ID NO: 113638 - DNA, 550 bp, Homo sapiens
tctaagccaattaaccagagctcttttatacaaacatctcacacacacacacacacaacacatatgaatacagacagacagaagattcagcacttgtaaaatttttcatttgccagtttcttaattgggtgactggctttagggtggagcccttggaggagcagggccgggaaagcatgcatttctagagccaaataagcagcaaataagcagctgaaggcaaagacagatccccaaaattaagggtgccattttatactggatcctgkatccccaacaggagggaaatactgtgggagaagaccgtgcaatgcttctaccctgcattccattcaaggcaacccaaagccaatcagcccattttgtaatcggcccatctctcacaggagtctcatctcccagtgcggggtggggacgcctccttatcttccaggtggccgagagcatgcgtctctgatccaagtgtgcagagtcaagtatccctccacaactactattagccactccctaaagtatatttcctacctagttattacacaccaaagctctc

SEQ ID NO: 113639 - DNA, 550 bp, Homo sapiens
tctaagccaattaaccagagctcttttatacaaacatctcacacacacacacacacaacacatatgaatacagacagacagaagattcagcacttgtaaaatttttcatttgccagtttcttaattgggtgactggctttagggtggagcccttggaggagcagggccgggaaagcatgcatttctagagccaaataagcagcaaataagcagctgaaggcaaagacagatccccaaaattaagggtgccattttatactggatcctggatccccaacaggagggaaatactgtgggagaagaccgtgcaatgcttctaccctgcattccattcaaggcaacccaaagccaatcagcccattttgtaatcggcccatctctcacaggagtctcatctcccagtgcggggtggggaygcctccttatcttccaggtggccgagagcatgcgtctctgatccaagtgtgcagagtcaagtatccctccacaactactattagccactccctaaagtatatttcctacctagttattacacaccaaagctctc

SEQ ID NO: 113640 - DNA, 541 bp, Homo sapiens
aggtcatcataactattgctacaatcacagaatgggagaaactctgacttttaaaagatgaactactacaacaattctatctcacagatagaaaaaaacgacattttggtagaaaacattatgactgaaatagttttctttaaaagaaattgacatgacaaaactcatcatctcccccttttaggccattgaatgtggtaaaattgacttagattgttctctgggaaaaagtcaatacttccacattcacttaaatattcatgtacctaactattttggcaaaaatagtccttagctcaaaaagagtaaggattgaaccttaaacagataaccttactctatagaatagtggggaaaaaagtgttttcaccaatcattgcttagtctgtattcctatgtagagaattgataaattaggaatcagggataagaattcagaattggcaataggaatagaaaaagtgtattctgaaatcctttggacracaagcagtttgtttactattacaagaatggcagtcctttaggtatatcatatgat

SEQ ID NO: 113641 - DNA, 425 bp, Homo sapiens
tcagggataagaattcagaattggcaataggaatagaaaaagtgtattctgaaatcctttggacaacaagcagtttgtttactattacaagaatggcagtcctttaggtatatcatatgatggctactaatgtaatakttcttcaaaaatagtcaaaacaacctctgaaatttagatatttacttcttgcttagaaatgctatgttgtaaaagaaaaagacatgtaaacacaaaactcttgttcagggaacaaaatttggagaccaaagacaggtaaaacgctcatagaaagttttctctgatgtttacaacttagagaagggatgaaaagccgcactgtatgtgcacttatttttcttaacaactctgtgagggtggttcgccccttgtaaagataactgaagttcagtgccgtgaagacactt

SEQ ID NO: 113642 - DNA, 579 bp, Homo sapiens
gtggagactgaggcacaaaaattgcttaaacccataagctggagcttgcagtgagcactccagccagggtgaaaaagtgagactctgtgtccaaaaaaaaaaaaagaagagaaagaaaaaaaaaaacaatgagcaagatgacagactagaggtacctaatactcatcaccctcacataaaacgaccaaaacaaygagtaggctaccacatttcaacaagagtattggaaggagagcactggagtacagtagattcacggtaaagaccatgtagggcatggagactcaggcaggacacatagaaaaaaaagcaaaatgccccacggcatttccccatccttgacgtttcaccaccacttactgtgctcacacatgctagaacattatttcctagttgaacagctgtagttctctaccccctgggaataaacaactcaaaataatctgtttcaccatcccagtggctatagtgccctagtcctggctatacaaaagcctaaacccagcagaatgaccataatcccactgtctaagcccatgaggcaccctgccctctgggaacaagctcccagtagtgagg

SEQ ID NO: 113643 - DNA, 467 bp, Homo sapiens
ttaagcaatatattatagacatttacttggattttataatacaatatacatagtacatgttataagtaagaataaattttaaaagaaaaaaacacaaaaatttatgatcatgattcattcgagaatggaatgggaaagaatcagaaagtgacacaagagggacttcaaagttaaccataacgttcttctgtccccacaaaatggagggtggctactcaagtgatcattgtgttctttatgtcttactatttatgyctttatgtcttactatgtctattgtgctttgtcttactgtattttatgttattttattcataatctaataaaaacaaacaatgataagacatatcctggatatttttaaatctaagtggtccctaatatgaaagcaattatgtaagtaaatgcagccattacacttaaaatctctactatttattataactggaatacagaactgtacagaa

SEQ ID NO: 113644 - DNA, 605 bp, Homo sapiens
gcacccgcaattgggtggagagtgtttatgttagataataaattttggaaatagggacttgggtcgtaagttaacgtcagagaaactggaatgaaatctgagagcagaatatgaaagcaggaaacaaatctttaaaaggatccaataaattagaaactgttttacagaagatgttcaaaagcaagacgatgaatgtggcatcagtaaatcgggtcagcattttggaaatgtcagcacaaagtgagaacagtaagatggttaaagctttattcccgtgttctccctccagctctgaatctcttccccaagtggaatctttcattcrttaatctaggcactcaatacacaataatgggaacgtttcaaagcttgggcattaagaacaaagacattaagatggaaaaaaaaaccctctacccttgagaggcttcaatccttgtggaaggagatcattggatattgataatagcagatagcatatttgggctgttacctccaggacatgccaggacacattcacacacatgcacacacacacacacacacacaggcacacaaaggcacacagttgcatatatttatatcatgttacaatccagtgcagc

SEQ ID NO: 113645 - DNA, 605 bp, Homo sapiens
gcacccgcaattgggtggagagtgtttatgttagataataaattttggaaatagggacttgggtcgtaagttaacgtcagagaaactggaatgaaatctgagagcagaatatgaaagcaggaaacaaatctttaaaaggatccaataaattagaaactgttttacagaagatgttcaaaagcaagacgatgaatgtggcatcagtaaatcgggtcagcattttggaaatgtcagcacaaagtgagaacagtaagatggttaaagctttattcccgtgttctccctccagctctgaatctcttccccaagtggaatctttcattcgttaatctaggcactcaatacacaataatgggaacgtttcaaagcttgggcattaagaacaaagacattaagatggaaaaaaaaaccctctacccttgagaggcttcaatccttgtggaaggagatcattggatattrataatagcagatagcatatttgggctgttacctccaggacatgccaggacacattcacacacatgcacacacacacacacacacacaggcacacaaaggcacacagttgcatatatttatatcatgttacaatccagtgcagc

SEQ ID NO: 113646 - DNA, 646 bp, Homo sapiens
agaacagtaagatggttaaagctttattcccgtgttctccctccagctctgaatctcttccccaagtggaatctttcattcgttaatctaggcactcaatacacaataatgggaacgtttcaaagcttgggcattaagaacaaagacattaagatggaaaaaaaaaccctctacccttgagaggcttcaatccttgtggaaggagatcattggatattgataatagcagatagcatatttgggctgttacctccaggacatgccaggacacattcacacacaygcacacacacacacacacacacaggcacacaaaggcacacagttgcatatatttatatcatgttacaatccagtgcagcctccctttccccatcttgaaagtgaggaaaatgtagggctagaaaaggtatgaataataacagagacaggtagtgacaaagtgctctgagacttctaaggagtgggttaacacatatactttatgttttgcctgggctcatacagaagctgagctttgaagtctgaataggattttgataggtacagatggtggagaacattttttcaggaggaggaattaacacaggaaaggggttggcagattcattgatcagcaaatgttctacgtgggctcacttcaagt

SEQ ID NO: 113647 - DNA, 650 bp, Homo sapiens
tttaatgtatgagagacttcatcatcatcaagatgtatagaacacatttttaagcaataaaaattgtatgttgggagcgaggaactctccgtggtgctgaaaatagacattttacttgtgttcctcgatttaaagttggaatcgcagatatgaaggcacaaataagtcatagacagtcagctaagccccagacattgaatgaataaatttcagcctttatgcactcatgatctatttgtaaattgtcaagtgccccaattcttcctctcccattccaacatccactgaaattcaaaaccctcctggttcacctctctgcctcaaygcatcaccatctctcatttgggctaattgatgcgcctttggataactaagggtacaggtagaagacagaaaccaccatgagtctttgaaacagagggcactttgtacaagaaattagtgacacagatgcctttcttctgtattgtggagcaaatgggatgatggaacagccctgagattagcagcagccaggtccctgcagtggaaactagaccttcagaagacctgcttggtgaaagcctgacagccaccacggaggcaggggctgtttgataaaagctggaaaaacagcaatggaagagatgcatttcttccagaggcatacc

SEQ ID NO: 113648 - DNA, 571 bp, Homo sapiens
cagcagtgaaattagagtctgggctggagaggaaactttcatgtttgcaaaccttcaaccccaccagttgcatgaaagtacaaagagtttctattgaaagtggaagcaggtggcattctcaacattttaacacccattttcccrtggagcattgaaaagttaacttgggagcttgtctttgctgttgatgttactcatttttcaaaagggactgatgagtgagtcactggggagaggaagttacaaacgcgagcgtgcatgtgtttgcatgtcacaaaggtatgctgttaacaatcaggccgagggcgtgggattttaaagggcagcgtgagaaaggacttgatttagagattgtgactcagcactccacactcctcagtgtttacagatgtgcctgaagagttgatgggcaactcacagttgcgcagactctggatacttcctcctgccgtgtatttatttctgtaggatgcatgcctacctggaacctacttacaaaagaaactaggccaacctgtcaatggaaagagagcaggagaggtggtgagccaagggcccttgatcccccacc

SEQ ID NO: 113649 - DNA, 587 bp, Homo sapiens
ggactgccctaatagaggttctccatgagggctccgccaggtgttgccatacatcctctgacatctaggcagaggctcccaaagctcaactcttgtgttttgtgcactcgctgtctcaacaccacgtggaagccaccgaggctggggacttgcaccctctgaagcaacagcccaagctgtaccttygccccttttagtcacagctggaactggagtgcccagaatacagggtgccatgtcccaaggctgcacaaagcagcaaggccctgggcctcactcacaaaaccacattttccttctaggcctccaggcttgtgatggaaggggctgctgtgaaggtctctgaagtgtcctggaggcattttcctcattatcttggctaggaacatttggctcttctttacttatgcacatttctgagccttgatttcctctccagaaaataggtttttcttttctaccacatggtcaggctgcaaattttccaaacttttatgctctgcttcccttttaaatataagttctagtttctggtcttttttttgttcaacatttctctcaagttcaaagttccacaaatctctagg

SEQ ID NO: 113650 - DNA, 587 bp, Homo sapiens
ggactgccctaatagaggttctccatgagggctccgccaggtgttgccatacatcctctgacatctaggcagaggctcccaaagctcaactcttgtgttttgtgcactcgctgtctcaacaccacgtggaagccaccgaggctggggacttgcaccctctgaagcaacagcccaagctgtacctttgccccttttagtcacagctggaactggagtgcccagaatacagggtgccatgtcccaaggctgcacaaagcagcaaggccctgggcctcactcacaaaaccacattttccttctaggcctccaggcttgtgatggaaggggctgctgtgaaggtctctgaagtgtcctggaggcattttcctcattatcttggctaggaacatttggctcttcttyacttatgcacatttctgagccttgatttcctctccagaaaataggtttttcttttctaccacatggtcaggctgcaaattttccaaacttttatgctctgcttcccttttaaatataagttctagtttctggtcttttttttgttcaacatttctctcaagttcaaagttccacaaatctctagg

SEQ ID NO: 113651 - DNA, 495 bp, Homo sapiens
aggtctgaagccgagagcactagaaggaagttaaacctgcaagaaatttttaaaattaggtatctgtggctattagggggtgggagaggagctgttactggcaccagcctgaaaaggcctgaaacaaaatagagcagaaaggaggttccaagaaatccagccagagaaccgacccaggcctgcaagtttatagactcagatcgaagacaagcaaaggaggacagctctatgtttggttgggttaagaaaatgggacagagaaggtccacccaggataaacatgccagaggtgccaaaggagagagggctggagagagacatggcaagaatgcacaaccaacttctctgcttctgtctttggggctgagccagcatggatttaactttgctcccatcggctgatggaacagacactcagtgaactctacctggcagcrttctgtgttgttggaatccccagacccttcagtagagctctgttcctggcagaactgc

SEQ ID NO: 113652 - DNA, 570 bp, Homo sapiens
ggcagaggggtagcgggtgggtatggaagtgaacagagttggggataggaaactcccctctagatccaggaagcccattccttggcctctagggtgaatggctggaggcccctgctcagaaacacatgggcttctaaatgattagaaattgcacagctgtgaaatgtttgggaaaatattatgtccccctcttggagattaccaatctacatttccagagcaaggaaactgtattgccttcaatcagtaaagaaagaaaggtctaaagcttcccaagaattcacattctagttcttcacattccagaaggacatcctttttggagcagtgattttcaaattgtggctaagacctactggtgagcagatctaaatcaatgttgtgggtcatgcccagcatttaaaaaattggacagaatagaacaaaaaagaaaatatcagtatactttgcatgtagtagtataattatcaatttgcagtaattctactttggttgtatgtttatgtatatastggggtgtaagcatatataacatcaaatatattagtatggttcatggtcaaagaagtt

SEQ ID NO: 113653 - DNA, 562 bp, Homo sapiens
aagacagcaaggagaggctactgaattgaatactccagtgatttctgaaaacatcatttcagggaggggcaaaggtgaaggctataatggggttgtagggaaatgaccagccagtgggaaaactcaaccttgtaaactctaactctagaaagtttgaaaaggaatcatctttcttcttaatatgagccactgtagtgttttggggtttgcattgtaatagtatattttaaaaattttttggataatgctattgattgtgaacaatacaacgcttataaaattcatgatccttactctctagaacagattctccacaaattcagggtgtctggcgagttatggccaaagccattctcaataaattagttttcaaactagcatctccaactaatattttccacaatgtgcaacccccattcttctttgcagtaaggcgttggaatgaaacyatactctgtttgttctctagctcacattatgacctgctataaaaagaattaatattcataaatcttttttactgcactaatctcagtgttttaaagtggtgattaccacctga

SEQ ID NO: 113654 - DNA, 616 bp, Homo sapiens
caaataaattataaatcacatggatgaaataaatgaccaaaatgtggtaagaaaatatgatatgatgaataaggatttagcaggacttagaaaaaactgaggagaaaagaaatgcttttgtaggacataaaactgcatcaaagcaagaagcacaactattgccacaaaaaaagcacatttgaaaaatacaggaaacatarctgtattagtccgatttcatgctgctgataaagacatacccaagactggataatttataaagaaaaaggtttaatgggctcacacttccacgtggctggggaggcctgaaaatcatggcagaaggcaaagattcttacatggcatcacatcttacatggcagcaggcaagagagcatgtacagggggggactaccttttataaaaccatcagatctcctgaaacttattccctatcacaagaacagcacgggaaagacccacccccatgattcaattacctctcaccaggtctctcccacaacatgtaggaattatggaagctacagtttgagatttgggtggggacacgaccaaaccatatcaatagcatatgaatagaaataaatttacaaattgtaaataagaatggtagata

SEQ ID NO: 113655 - DNA, 592 bp, Homo sapiens
ttaaaagttctaagaaacactctctctgagtacacattgtacgcatgtattggctttcagagacctaagtttcatccttcgttctacaactgactgttgaacaaaattttattataaaattacaagcagttcaattctttgttttcttagctgtgagatagctagagtgatgataaagccataaggctgtatggatcacataaaatcatggatttgaaagtaatttgaagattgtagaagtatcgtttgaaactaattaatctggaagagcaattaactctgctgaagagagggataaattattattgaacagacamaataatgtgattcctttgcagttcatcttctgcaggactatcacttcccaggattcttcacagaatacctgatcagtgcttgaaataggtactgaagtgtccaattatttaataaactgttaactgttggctaacagtaaagtcaatgtttagtttttttaaaatacaaaaataatcagggcaaggaaaaagtcaagaattctctaagtataggtttagcaacttactcatatactattgaaaaaaatatgtcataagagaaaactcttatcagt

SEQ ID NO: 113656 - DNA, 558 bp, Homo sapiens
gccagtttttcatggctgttccatgattcagtcttttttgagtcaaacgtggaagagaaaaaaaaagaagtcttttttttttttttctgttttctttattttttatgtgcctccttccactttagaccgtaatcctttccagctcaccccaggrgaaacaaaaattgtaaatccattctagcaattcaatttgtttagcaaaattgtacaaaaacactagagccaaaatattgccccaagtagaggcagagtctctgcatagagaatttgtctaaggatgttaagacactttccaaatagtttccttatttcaatggcacacctgcttttctatcataatatagctcatgtgtcttttgcttgtctttgtttaggtaattaccagagtttacaaatactctgtaaaatataattactgtagattttccaaggaagtttcacaagctttatgcaacactttttgaattgtgttgtatacacagaactatgttggttttaaatcattattacttactcccactggagctgtgtaacaaaagtggagaattgttggaaatt

SEQ ID NO: 113657 - DNA, 601 bp, Homo sapiens
ttctcatgttactcaactagaggcataattttaatagtttattttaataccttgattaataggagcaatctgtttaaaaatartattagtgttggcatttcgtaatgaattgcagaagctgagcagacatgctcttttgtgcctttttcaatttcctttgaaaatgtgttgaactcctcagtatttgttcaaacctaccaagttttaacatgaactaagcattaaatggatttggaatctgagaagggtgttcgcctacaatgtagcgatatggggagaaaaggtttgggttgagaccggcgactttcagaattataagtgctggcaagtaagaaccacagcccggcaattttggaggcccccagcatagccactgctgctaaccaaccaattttaaaagaccaaagactaggttttctcccaaagtgacagtagttgcaaatttgccatctaactcacagtggcactagcccaatcgaggcaatttcctgagaacttatgataatatgtccctgttacacaagacctaaaagatttttaatggcctgttcctacaaaactaaaataaaaatggctggcctgtacaataaaatatttcact

SEQ ID NO: 113658 - DNA, 442 bp, Homo sapiens
tctcagctacttgggaggctgaggcaggagaatggcgtgaacctgggaggcagagcttgcagtgagctgagatsgcgccactgcactccagcctgggcgacagagtgagactccatctcaaaaaaaaaaaaaagaagtttgggttttgtgctggtcagtagtttagagacaccatgtcattcacagcatggcacagagcaattccgtaggaagcaccaccccgttgacaagggacccggtacagtttacaggtcttgagattatgctctgtgaacatactgaaggtttactttttaaattttaaacaaaatcatgtctggaaaacatcaaatcttactatattatagggaggacaccaaccaaaagacatagaaaaaaagataatacccttgaagttcaaattgaggtttcagtcacatagaaaaacatgactgtgtattaa

SEQ ID NO: 113659 - DNA, 613 bp, Homo sapiens
gggacccacctgaggaagcagtctgtcccttagcagagctcaagygctgtgctgggagatctgcttctctcttcagagctggcaggcaggaacgtttaagtctcctcaagctgtgccagccgccccttcctccaggtgctctgtcccagagagatgggagttttatctataagccccttactggggctgcagcctttctttcagagatgccctgcccagagaggaggaatctagagaggcagtctggctacagcagctttgcagagctgtggtgggctccacccagttcgaacttcctggcagctttgtttacactgtgaagggaaaaccacctactcaagcctcagtgatggtggacgcccctcccccgaccaagctccagtgtcccaggttgacttcagactgctgtgctggcagtgagaatttcaagccagtggatcttagcttgctgggctccatgggggtgggatccactgagctagaccacttggctccctggcttcagccctctttctggggagcgaatgtttctgtctcactggtgttccaggcaccactgggaacatttctgtctcactggcattccaggtgccactgggtacgaaaaaaaaaa

SEQ ID NO: 113660 - DNA, 613 bp, Homo sapiens
gggacccacctgaggaagcagtctgtcccttagcagagctcaagcgctgtgctgggagatctgcttctctcttcagagctggcaggcaggaacgtttaagtctcctcaagctgtgccagccgccccttcctccaggtgctctgtcccagagagatgggagttttatctataagccccttactggggctgcagcctttctttcagagatgccctgcccagagaggaggaatctagagagrcagtctggctacagcagctttgcagagctgtggtgggctccacccagttcgaacttcctggcagctttgtttacactgtgaagggaaaaccacctactcaagcctcagtgatggtggacgcccctcccccgaccaagctccagtgtcccaggttgacttcagactgctgtgctggcagtgagaatttcaagccagtggatcttagcttgctgggctccatgggggtgggatccactgagctagaccacttggctccctggcttcagccctctttctggggagcgaatgtttctgtctcactggtgttccaggcaccactgggaacatttctgtctcactggcattccaggtgccactgggtacgaaaaaaaaaa

SEQ ID NO: 113661 - DNA, 613 bp, Homo sapiens
gggacccacctgaggaagcagtctgtcccttagcagagctcaagcgctgtgctgggagatctgcttctctcttcagagctggcaggcaggaacgtttaagtctcctcaagctgtgccagccgccccttcctccaggtgctctgtcccagagagatgggagttttatctataagccccttactggggctgcagcctttctttcagagatgccctgcccagagaggaggaatctagagaggcagtctggctacagcagctttgcagagctgtggtgggctccacccagttygaacttcctggcagctttgtttacactgtgaagggaaaaccacctactcaagcctcagtgatggtggacgcccctcccccgaccaagctccagtgtcccaggttgacttcagactgctgtgctggcagtgagaatttcaagccagtggatcttagcttgctgggctccatgggggtgggatccactgagctagaccacttggctccctggcttcagccctctttctggggagcgaatgtttctgtctcactggtgttccaggcaccactgggaacatttctgtctcactggcattccaggtgccactgggtacgaaaaaaaaaa

SEQ ID NO: 113662 - DNA, 600 bp, Homo sapiens
cctgccatatacaaaaatcataccaaaatgaatcaaagacttaaatcaaagacctcaaactatggaactcttacaaaaaatagagaaactctccagtcctttggactaagaaagattttttgagtaacactccagaagcatgagcaaccaaagcaaaaatggacaaatgggattacatcaagttaaaaaccttctgcacagcaaaggaaacaatcaacaaagtaaagaaaaaactcacagaatgggcaaaaaattgcaaacaatccatctggcaagggattaaaaaccagaatatataaggagctcaaacaattctgaaggagaaaattttaataatctgatttaaaaatgggcagaagatctaaatagacatttctcaaaagagtacatacaaacgccaaacaggtatatgaaaaaatgcacaacattattattagtgaaatgcaaatcaaacttatttgtggaagctaaaatttcaaatatttgaactcaatgaaacagagagttgaagaattatttccagaggctgggaagcatagtgtggygtgggggaatttggggaatgttaatgggtacagaaacaaaagaataatcacattg

SEQ ID NO: 113663 - DNA, 518 bp, Homo sapiens
atatagcactaacatcttcttcactgtggtgctgagtgaacaatgcccattgtacataaagcactcaccacaatgcctggcacacagtaggctctccttaaatatagtcccctttgttcttcatttgtgtgttcaaaaccctgtcattctttaaatccctgagcacttttaaatccatgtttttctaaagtccatttatagcactcttagcttgtcttgccctttagaggattttcgacttctcttttgttgtcatatattttcccctgtgyttatgcttttgtccttcagtctacacttagcgttttgaaagcagacctccctctcccgtcaatattacctttcttgtcttctcagaagacttggcgcaatgctcacaagaaagatggcttgtgatactagagagagctggcctagggatgagaaaaactggactctcattctgattcatctcatctcttggcaagtatgcaggctcattattcatgaggtgaagaagctattacttgcctttgcta

SEQ ID NO: 113664 - DNA, 518 bp, Homo sapiens
atatagcactaacatcttcttcactgtggtgctgagtgaacaatgcccattgtacataaagcactcaccacaatgcctggcacacagtaggctctccttaaatatagtcccctttgttcttcatttgtgtgttcaaaaccctgtcattctttaaatccctgagcacttttaaatccatgtttttctaaagtccatttatagcactcttagcttgtcttgccctttagaggattttcgacttctcttttgttgtcatatattttcccctgtgtttatgcttttgtccttcagtctacacttagcgttttgaaagcagacctccctctcccgtcaatwttacctttcttgtcttctcagaagacttggcgcaatgctcacaagaaagatggcttgtgatactagagagagctggcctagggatgagaaaaactggactctcattctgattcatctcatctcttggcaagtatgcaggctcattattcatgaggtgaagaagctattacttgcctttgcta

SEQ ID NO: 113665 - DNA, 518 bp, Homo sapiens
atatagcactaacatcttcttcactgtggtgctgagtgaacaatgcccattgtacataaagcactcaccacaatgcctggcacacagtaggctctccttaaatatagtcccctttgttcttcatttgtgtgttcaaaaccctgtcattctttaaatccctgagcacttttaaatccatgtttttctaaagtccatttatagcactcttagcttgtcttgccctttagaggattttcgacttctcttttgttgtcatatattttcccctgtgtttatgcttttgtccttcagtctacacttagcgttttgaaagcagacctccctctcccgtcaatattacctttcttgtcttctcagaagacttggcgcaatgctcacaagaaagatggcttgtgatactagagagagctggcctagggatgagaaaaactggactctcattctgattcatctcatytcttggcaagtatgcaggctcattattcatgaggtgaagaagctattacttgcctttgcta

SEQ ID NO: 113666 - DNA, 563 bp, Homo sapiens
catgcatgtgttcattgcagcactagtcacaatagcaaagacatgaaatcaacccaaatgtccatcartgataggctggatagagaaaatgtggcacatatacaccatggaatactatgcagccatacaaaagaatgagatcatgtcctttgcagggtcaaggatgaagctggaagccattatcctcagcagactaatgcaggaacagaaaaacaaacaatacatgttctcacttataagtgggagctgaacaatgagaacacatggacacagggaagggagcaacaaacaacggggtcagagaagaggatgggagctgggggagaccattagggaaaagagctaatgaatgcctggcttaataaataggtgatggttgatctgtgcagcagcaaaccaccatggcacacgtttacctatgtaacaaacctgcacatcctgcacttgtattccagaacttaaaaaataataattcataaaatggcagtatgatgatcatcattgaaggatttcaagaggtcagaaattcacattcacttttattgagtttaggattagaaaag

SEQ ID NO: 113667 - DNA, 563 bp, Homo sapiens
catgcatgtgttcattgcagcactagtcacaatagcaaagacatgaaatcaacccaaatgtccatcaatgataggctggatagagaaaatgtggcacatatacaccatggaatactatgcagccatacaaaagaatgagatcatgtcctttgcagggtcaaggatgaagctggaagccattatcctcagcagactaatgcaggaacagaaaaacaaacaatacatgttctcacttataagtgggagctgaacaatgagaacacatggacacagggaagggarcaacaaacaacggggtcagagaagaggatgggagctgggggagaccattagggaaaagagctaatgaatgcctggcttaataaataggtgatggttgatctgtgcagcagcaaaccaccatggcacacgtttacctatgtaacaaacctgcacatcctgcacttgtattccagaacttaaaaaataataattcataaaatggcagtatgatgatcatcattgaaggatttcaagaggtcagaaattcacattcacttttattgagtttaggattagaaaag

SEQ ID NO: 113668 - DNA, 563 bp, Homo sapiens
catgcatgtgttcattgcagcactagtcacaatagcaaagacatgaaatcaacccaaatgtccatcaatgataggctggatagagaaaatgtggcacatatacaccatggaatactatgcagccatacaaaagaatgagatcatgtcctttgcagggtcaaggatgaagctggaagccattatcctcagcagactaatgcaggaacagaaaaacaaacaatacatgttctcacttataagtgggagctgaacaatgagaacacatggacacagggaagggagcaacamacaacggggtcagagaagaggatgggagctgggggagaccattagggaaaagagctaatgaatgcctggcttaataaataggtgatggttgatctgtgcagcagcaaaccaccatggcacacgtttacctatgtaacaaacctgcacatcctgcacttgtattccagaacttaaaaaataataattcataaaatggcagtatgatgatcatcattgaaggatttcaagaggtcagaaattcacattcacttttattgagtttaggattagaaaag

SEQ ID NO: 113669 - DNA, 563 bp, Homo sapiens
catgcatgtgttcattgcagcactagtcacaatagcaaagacatgaaatcaacccaaatgtccatcaatgataggctggatagagaaaatgtggcacatatacaccatggaatactatgcagccatacaaaagaatgagatcatgtcctttgcagggtcaaggatgaagctggaagccattatcctcagcagactaatgcaggaacagaaaaacaaacaatacatgttctcacttataagtgggagctgaacaatgagaacacatggacacagggaagggagcaacaaacamcggggtcagagaagaggatgggagctgggggagaccattagggaaaagagctaatgaatgcctggcttaataaataggtgatggttgatctgtgcagcagcaaaccaccatggcacacgtttacctatgtaacaaacctgcacatcctgcacttgtattccagaacttaaaaaataataattcataaaatggcagtatgatgatcatcattgaaggatttcaagaggtcagaaattcacattcacttttattgagtttaggattagaaaag

SEQ ID NO: 113670 - DNA, 357 bp, Homo sapiens
tctacaagcatcttagataaaaacagagaggaagcttttcaaggccatgcatgataaaacactcaggaaacagtcaatgagtgatataaaatagttaaaatatgatttgttttcaaaggattcaaaccctaggataaaatttaatgggagcaggtcttaattaacactaattaatttttaaaatatgtgtttatccttttatttatttacctaatagacatggtagtaaacactgggaatatttttttaatgatcccttttcctgtccttcagcatctcctcctacaatgtatacatatgggaggacaagaatattgaatacrtaaactagaataaatataaaatagaatgatgaat

SEQ ID NO: 113671 - DNA, 570 bp, Homo sapiens
aaaaccatacatgttggcatggatgcagcgaaaagggaagacttctacactgctggtaggaatgcgaactagtgcaaccactatggaaaacagtgtggagattccttgaagaactaaaagtagatctaccatttgatttatcaattctactactgggtatcgatctagaggaaaagaagtcattattaaaaaaaagatacttgtgcatgtatttttatagcagcccaatttgcaattgaaaaaatgtggaatcagtccaaatgcccatcaatcaaggagtggataaactatgatatatatatatatgatattatatatgatcatatatgatatatcacatatatgatatatatatgtgattatatatgattatatatatgattatatagatatatatgatgkaatatactattcagccataaaacagaatgaatgaatgatatttgcagcaacgtggataggattggagactattattctaagtgaaatagctcagaaatggaaaaccaaacacaggatgttctcactcataagtagaagctaagctatgaggacgcaaaggcataagaa

SEQ ID NO: 113672 - DNA, 570 bp, Homo sapiens
aaaaccatacatgttggcatggatgcagcgaaaagggaagacttctacactgctggtaggaatgcgaactagtgcaaccactatggaaaacagtgtggagattccttgaagaactaaaagtagatctaccatttgatttatcaattctactactgggtatcgatctagaggaaaagaagtcattattaaaaaaaagatacttgtgcatgtatttttatagcagcccaatttgcaattgaaaaaatgtggaatcagtccaaatgcccatcaatcaaggagtggataaactatgatatatatatatatgatattatatatgatcatatatgatatatcacatatatgatatatatatgtgattatatatgattatatatatgattatatagatatatatgatggaatatactattcagccataaaacagaatgaatkaatgatatttgcagcaacgtggataggattggagactattattctaagtgaaatagctcagaaatggaaaaccaaacacaggatgttctcactcataagtagaagctaagctatgaggacgcaaaggcataagaa

SEQ ID NO: 113673 - DNA, 570 bp, Homo sapiens
aaaaccatacatgttggcatggatgcagcgaaaagggaagacttctacactgctggtaggaatgcgaactagtgcaaccactatggaaaacagtgtggagattccttgaagaactaaaagtagatctaccatttgatttatcaattctactactgggtatcgatctagaggaaaagaagtcattattaaaaaaaagatacttgtgcatgtatttttatagcagcccaatttgcaattgaaaaaatgtggaatcagtccaaatgcccatcaatcaaggagtggataaactatgatatatatatatatgatattatatatgatcatatatgatatatcacatatatgatatatatatgtgattatatatgattatatatatgattatatagatatatatgatggaatatactattcagccataaaacagaatgaatgaatgatatttgcagcaacstggataggattggagactattattctaagtgaaatagctcagaaatggaaaaccaaacacaggatgttctcactcataagtagaagctaagctatgaggacgcaaaggcataagaa

SEQ ID NO: 113674 - DNA, 607 bp, Homo sapiens
aatttgttagcttaagtacttgaaagagtgactcatctaaattcctatgcatgaaatgtcattgcctatgagttgcattgctcagtgtttgaatgtggtacaataagagtactgtcaatttaagtgtaggctaaaycctcgtgtacctcatgctaataacagatcgatccaagttaaagtagatgcatataagtcactcaaataactggtttcaccatagttaatactattttctaaatgacagtcatctgtaatgatgaataacctgctcatgtgctttcttgggttagtacatgtaaattaatagcttcttgaaagttgctataccaacagtatttaaatccttacctcttgcattatagaaactatactttgatttgcttacctttttttatctctaattcactttattgtgatataatttacatgcgcttatgtaaacccattttttgtgtaaagttcaaagtgctttgctaaacgtgcacattgccaaagtctacttatagaatatttacgttatcttaataagtccaatttcagtcagttatagaaaacctaaggtcaaggaaaccactgatgtgattactaactatcaccagggattagc

SEQ ID NO: 113675 - DNA, 607 bp, Homo sapiens
aatttgttagcttaagtacttgaaagagtgactcatctaaattcctatgcatgaaatgtcattgcctatgagttgcattgctcagtgtttgaatgtggtacaataagagtactgtcaatttaagtgtaggctaaaccctcgtgtacctcatgctaataacagatcgatccaagttaaagtagatgcatataagtcactcaaataactggtttcaccatagttaatactattttctaaatgacagtcatctgtaatgatgaataacctgctcatgtgctttcttgggttagtacatgtaaattaatagcttcttgaaagttgctataccaacagtatttaaatccttacctcttgcattatagaaactatactttgatttgcttacctttytttatctctaattcactttattgtgatataatttacatgcgcttatgtaaacccattttttgtgtaaagttcaaagtgctttgctaaacgtgcacattgccaaagtctacttatagaatatttacgttatcttaataagtccaatttcagtcagttatagaaaacctaaggtcaaggaaaccactgatgtgattactaactatcaccagggattagc

SEQ ID NO: 113676 - DNA, 612 bp, Homo sapiens
ataactctaatctgtagacaaacctatgccaggtcagttccataagaattatctgcagatcttcaaaaggcaataaatgcctgcaggatatttaagactgagctattcagcagtgaggaagggggtagtgatcacactttttaaatatgattacagattactgtgatatgttataaggtttagaatccactgatctagtccaatttctcccttttcctatgagkagaatgaagccaaagaagtgttatgacctgctggaatactggctgcctaagtaactcatgactatcccttaggctttttcagcgtcgttatgtaagacaggagacccgaaagttgtgtgcagaatggatcggagagttaagtcctggagagagggagaccacttaaaaacaacaacagcaacaaccacacaaatgtgatagttacctatgaaatattgcattaaagtagtcagtaccgcgaccagagaaaggggtaaaaatggaatcactttaaacagaccaaggatataattcacaataagagatggcaaagaggttaacaattcagaggctctcaggtctgattcggggaggaatgtttatgatctgggcaattaatttggaatca

SEQ ID NO: 113677 - DNA, 612 bp, Homo sapiens
ataactctaatctgtagacaaacctatgccaggtcagttccataagaattatctgcagatcttcaaaaggcaataaatgcctgcaggatatttaagactgagctattcagcagtgaggaagggggtagtgatcacactttttaaatatgattacagattactgtgatatgttataaggtttagaatccactgatctagtccaatttctcccttttcctatgaggagaatgaagccaaagaagtgttatgacctgctggaatactggctgcctaagtaactcatgactatcccttaggctttttcagcgtcgttatrtaagacaggagacccgaaagttgtgtgcagaatggatcggagagttaagtcctggagagagggagaccacttaaaaacaacaacagcaacaaccacacaaatgtgatagttacctatgaaatattgcattaaagtagtcagtaccgcgaccagagaaaggggtaaaaatggaatcactttaaacagaccaaggatataattcacaataagagatggcaaagaggttaacaattcagaggctctcaggtctgattcggggaggaatgtttatgatctgggcaattaatttggaatca

SEQ ID NO: 113678 - DNA, 612 bp, Homo sapiens
ataactctaatctgtagacaaacctatgccaggtcagttccataagaattatctgcagatcttcaaaaggcaataaatgcctgcaggatatttaagactgagctattcagcagtgaggaagggggtagtgatcacactttttaaatatgattacagattactgtgatatgttataaggtttagaatccactgatctagtccaatttctcccttttcctatgaggagaatgaagccaaagaagtgttatgacctgctggaatactggctgcctaagtaactcatgactatcccttaggctttttcagcgtcgttatgtaagacaggagacccgaaagttgtgtgcagaatggatyggagagttaagtcctggagagagggagaccacttaaaaacaacaacagcaacaaccacacaaatgtgatagttacctatgaaatattgcattaaagtagtcagtaccgcgaccagagaaaggggtaaaaatggaatcactttaaacagaccaaggatataattcacaataagagatggcaaagaggttaacaattcagaggctctcaggtctgattcggggaggaatgtttatgatctgggcaattaatttggaatca

SEQ ID NO: 113679 - DNA, 389 bp, Homo sapiens
tacttacttcaaaataagcactcaaaaaatattagcatctgtaattactctattttaggaagaacagaaagtgctatagtttggatgtttgtctcttccaattcttgtgttgaaatctgatccccattgttggaggtgggacctaatgggaggtgtttgggtcatgggggaatatccttcacgaatagattaatgctcttcctggtggggaagacagtgaattcttactcttagtcctcatgagagctggttgttataaagagcctggcatctccccagctctcttttgctgcctctctggccatgtaatctctkcacaccccagctccctttcaccttctaccatgagtggaagcagcctgatgtcctcatcagatgcccagtcttaa

SEQ ID NO: 113680 - DNA, 244 bp, Homo sapiens
taaaatgtgtgatggaattctactcttaactaattaagagtatatgagttaatgtacttaaraaattttccatgccctgacaaaggggttatcttttatcttatgagtcttaagaagtatgtaaaataatgtaattaatcagcaagtatttaattcttagatcactaatgaagatgaaaaaaatcacttgaattgagtcatcaacttaaaatttaactaatatatcattttctgcctaatatta

SEQ ID NO: 113681 - DNA, 527 bp, Homo sapiens
aaaggcatccaaataggaagaaaggaagtcaaactatccctgtttgccaatgacatgattctatatctagaaaaccccatagtctaagcacaaaagctccttaagataacaaaaaaaaaaactttagcaaaatttcatgatacaaaattaatgtgcagaaatcactagtattgttataaaccaacgacagccaagacgaaagtcaaatcaggaaggcagtctcattcacaattgctaaaaaaaggataaaatacccaggaatacagctaaccrtggaggtgaaagatttctacaagtagaactacaaagcactgctcaaagaaatcagagatgatacaaacaaatggaaaaacattccatgctcatggatagaaagaaccaatgtcattaaactggccatactgatcaaagcaatttacagattcaatgctattcctgtcaaaccacctatgacatttttcacagaactagaagaataaactattaaaagtttgtataaagtttaaaaaaaaaaaaaagtttgaata

SEQ ID NO: 113682 - DNA, 527 bp, Homo sapiens
aaaggcatccaaataggaagaaaggaagtcaaactatccctgtttgccaatgacatgattctatatctagaaaaccccatagtctaagcacaaaagctccttaagataacaaaaaaaaaaactttagcaaaatttcatgatacaaaattaatgtgcagaaatcactagtattgttataaaccaacgacagccaagacgaaagtcaaatcaggaaggcagtctcattcacaattgctaaaaaaaggataaaatacccaggaatacagctaaccatggaggtgaaagatttctacaagtagaactacaaagcactgctcaaagaaatcagagatgatacaaacaaatggaaaaacattccatgctcatggatagaaagaaccaatgtcattaaactggccatactgatcaaagcaatttacagattcaatgctattcctgtcaaaccacctatgacattyttcacagaactagaagaataaactattaaaagtttgtataaagtttaaaaaaaaaaaaaagtttgaata

SEQ ID NO: 113683 - DNA, 527 bp, Homo sapiens
aaaggcatccaaataggaagaaaggaagtcaaactatccctgtttgccaatgacatgattctatatctagaaaaccccatagtctaagcacaaaagctccttaagataacaaaaaaaaaaactttagcaaaatttcatgatacaaaattaatgtgcagaaatcactagtattgttataaaccaacgacagccaagacgaaagtcaaatcaggaaggcagtctcattcacaattgctaaaaaaaggataaaatacccaggaatacagctaaccatggaggtgaaagatttctacaagtagaactacaaagcactgctcaaagaaatcagagatgatacaaacaaatggaaaaacattccatgctcatggatagaaagaaccaatgtcattaaactggccatactgatcaaagcaatttacagattcaatgctattcctgtcaaaccacctatgacatttttcacagaactagaagaataaactattaaaagttygtataaagtttaaaaaaaaaaaaaagtttgaata

SEQ ID NO: 113684 - DNA, 574 bp, Homo sapiens
ccataatcagatgtttggtaagaatttttttctcttaattggaaaatattttaatttactacaacataaaaatatttgtcaagttgtagttctgaaaaacctgagacagttttatctgcttgtctccattccacctgatactcattgtgctcttcaagcagaaaaataaaataataataaataataaaataatttcttggtttcacagaacagtcctaggtagagccatatcataaagaaatacaacaagaaatgaaaacactaataagtctggggaaataacaggataacataagctgtaactctgaaagcaytggcagaatcagtggcagctggtacacgtcatttttgctaataatgcccaaggactgtgttttgagatcttcagaaggtaaacatttaatgtggggctctacagattagattatataaaaacaggttatatgccttttatttcattcttagaggtatggatacaggttgtgccattttctgtaatacaagatttgtctgaatgcacatatttacatgggcatacatttaggaaaaaagtggttagttgtatattctgaaa

SEQ ID NO: 113685 - DNA, 574 bp, Homo sapiens
ccataatcagatgtttggtaagaatttttttctcttaattggaaaatattttaatttactacaacataaaaatatttgtcaagttgtagttctgaaaaacctgagacagttttatctgcttgtctccattccacctgatactcattgtgctcttcaagcagaaaaataaaataataataaataataaaataatttcttggtttcacagaacagtcctaggtagagccatatcataaagaaatacaacaagaaatgaaaacactaataagtctggggaaataacaggataacataagctgtaactctgaaagcactggcagaatcagtggcagctggtacacgtcatttttgctaataatgcccaaggactgtgttttgagatcttcagaaggtwaacatttaatgtggggctctacagattagattatataaaaacaggttatatgccttttatttcattcttagaggtatggatacaggttgtgccattttctgtaatacaagatttgtctgaatgcacatatttacatgggcatacatttaggaaaaaagtggttagttgtatattctgaaa

SEQ ID NO: 113686 - DNA, 574 bp, Homo sapiens
ccataatcagatgtttggtaagaatttttttctcttaattggaaaatattttaatttactacaacataaaaatatttgtcaagttgtagttctgaaaaacctgagacagttttatctgcttgtctccattccacctgatactcattgtgctcttcaagcagaaaaataaaataataataaataataaaataatttcttggtttcacagaacagtcctaggtagagccatatcataaagaaatacaacaagaaatgaaaacactaataagtctggggaaataacaggataacataagctgtaactctgaaagcactggcagaatcagtggcagctggtacacgtcatttttgctaataatgcccaaggactgtgttttgagatcttcagaaggtamacatttaatgtggggctctacagattagattatataaaaacaggttatatgccttttatttcattcttagaggtatggatacaggttgtgccattttctgtaatacaagatttgtctgaatgcacatatttacatgggcatacatttaggaaaaaagtggttagttgtatattctgaaa

SEQ ID NO: 113687 - DNA, 574 bp, Homo sapiens
ccataatcagatgtttggtaagaatttttttctcttaattggaaaatattttaatttactacaacataaaaatatttgtcaagttgtagttctgaaaaacctgagacagttttatctgcttgtctccattccacctgatactcattgtgctcttcaagcagaaaaataaaataataataaataataaaataatttcttggtttcacagaacagtcctaggtagagccatatcataaagaaatacaacaagaaatgaaaacactaataagtctggggaaataacaggataacataagctgtaactctgaaagcactggcagaatcagtggcagctggtacacgtcatttttgctaataatgcccaaggactgtgttttgagatcttcagaaggtaaacatttaatgtggggctctacagattagattatataaaaacaggttatatgccttttatttcattcttagaggtatggatacaggttgtgccattttctgtaatacaagatttgtctgaatgcacatatttacatgggcatacatttaggaaaaaagtgkttagttgtatattctgaaa

SEQ ID NO: 113688 - DNA, 568 bp, Homo sapiens
atcttttgtatttatgttatgcctctaattcctcaaggcaattatattttcaaggatatcctcattcctttaaaactgtgtctttttcccagtcttccgtgggaagaaaaaaaactgttaattttcagwgaggatctaatttatgagatggaaatggatttgcacactgacaagagatatttagtacaatcatttccctctgacttttcaaaaattcaatactgtgatgaacaagaagaaagcaataggagtcattttgactcctttcccttttgcttcccataacatatacccttaccagtcttattcatcgcttgtttaaatcttttaccttttacctgaaattttgcagtagtcctcacaagttgcttctgtagcttctcttttttttaaccctctaatccactctactaactattcactgaattaatttttcaaaagcgaagctcttggcatgctcctggactatttggttgtgatggtcccctatgatctaccgaatgccttagcttagccttatggatcacgatgatatgatcacactaaattttctagcctatacatacct

SEQ ID NO: 113689 - DNA, 568 bp, Homo sapiens
atcttttgtatttatgttatgcctctaattcctcaaggcaattatattttcaaggatatcctcattcctttaaaactgtgtctttttcccagtcttccgtgggaagaaaaaaaactgttaattttcagagaggatctaatttatgagatggaaatggatttgcacactgacaagagatatttagtacaatcatttccctctgacttttcaaaaattcaatactgtgatgaacaagaagaaagcaataggagtcattttgactcctttcccttttgcttcccataacatatacccttaccagtcttattcatcrcttgtttaaatcttttaccttttacctgaaattttgcagtagtcctcacaagttgcttctgtagcttctcttttttttaaccctctaatccactctactaactattcactgaattaatttttcaaaagcgaagctcttggcatgctcctggactatttggttgtgatggtcccctatgatctaccgaatgccttagcttagccttatggatcacgatgatatgatcacactaaattttctagcctatacatacct

SEQ ID NO: 113690 - DNA, 557 bp, Homo sapiens
ggtttagaggaaagacttaaatctcatttactatgtctgtgaacttcagaagttacttaactctctgagtctctatgtacccatctataaaattagggacaacacatcttccttgaaaagttgttgtgaagagattaatttgatatatgtgcaaatacctggtatttggtagttatgaaacaaatgctaactttctttaaagaaaacttgacagaaaaatggtttgactcaaacaaaaacaaataaaaatccttaaagaaaaagattctgaatttttacacatcacaataaataaaaattccacggaatataagttttccagtcccaatatactcgtgacccagtgctgagtgaactaatgacragaaccatgccaagaaaataaaaagcacagggtaaaaatatattgttactgtttctcaaaaggggtatggacaggagggaatcactttttacacagggaagaccaaagcctacagcatctgctgctgataactgtattcctaaggacaatagagtcctgagctgtaggtgcctattcaaaccacctattatta

SEQ ID NO: 113691 - DNA, 580 bp, Homo sapiens
tgtctattctctcccattctttccccaccacagaaacttggaagtgttggagcactgttaggtactattgtgggagaggtgcaggctgttccctctagatatttcaaattrcttcacagctggccattctaacagtcttatatataatcataacttcaaccaatccacaaccttctttcaggcatatttgagttttatcttttgtgtagtatccttgagataatttataaactttacctttttggttcagttggatatttatcccttttatccctaagttaaattacactcaacaaatgaccaacatcaacaattgagatgaactcattctgtgtggaagaaatgccagagaaacacaactagggacatccctgatggttataactttatggttatacaggatatctcactgtaagagatctttctaaaaaatttaaaattctccttttaagatcaagattatttctctatcctgttcttagagagcaaatattcagtaagccttaaaatttcacaaatcccaattcaagtttagtaaactgctggcccaataaagactataatttctttctaattatcc

SEQ ID NO: 113692 - DNA, 592 bp, Homo sapiens
gtttaagcaaactgaccttcttcaagtctcctgagtttgagggatgggttaaatagcacataacaaaaaccccaaaatttgaaaaagaagaataaaataattaaattggaagctgttatttataggactgatatattaataaccaaaatataactataagtggcaagtggatgatccattggttgataattgaaagctgattgcatttttataggtcatattccaaatctagctgacctaataaggtcttttaatagaccacatgttctagagttcatctgcctaccaaaaccttcttgcacaacgtcttacatatcatatactcacaattgtatttgttactaaatgctatatttcatatttctattgataaagtcagtgttcactctgtytttaaaaatctctggaagggcttcgtcatttttttcttcaaaagggagaagagaatggaaaaataacgaatggatgtgttttgttatgagaaaactatttgctattgttaacattttcagggtagaaaaggacaagaatattacctctctttataatttcaggtgaaattaatactgcgaacctaaagtttttggttagt

SEQ ID NO: 113693 - DNA, 612 bp, Homo sapiens
tgaaattccttaagtaagtgtttctatttcaaaatatctgattgatttctttttaaaatgtttatctcttccttcattgtcctggattgctttaraagtttgtttgtgttaattttcaaccttgaatttcattgagtttccttgcaatccacgtattgaattccttatctttcatttctgagtttatattttggttagggaccattgctggaaagctagtgtgattctttggtggtggcactacattcagatttttcatggtgcagaatttttgctctggttgcttctcaactggaaatgttggcacttctaatttttgtaattatttttatgcaggtaggattttttttctttttctttcttgtcctatagtatcatcatttgctccttccctttccctttcccatcgccttagggtgtatgtgtatatagaatgttggataggatcttttggctttgcttgtacagccataagcacgcatgtcagctggtttcatattgagttgtgcagtttaaactacaagccagtagatggcgcttataggtaaacgctgtctgctgccagcatgactgggtgggtgtatacttggtccttgtttactggaagaagct

SEQ ID NO: 113694 - DNA, 589 bp, Homo sapiens
acacttacaattttgttatccacrtagaattttagaatgtgatggaaacattaagattgtgtgattaaatgtgcatattttaacaatgaagaaactgagagcaagggaggttacctaggtaatttttagcaagattcagtggcagatctcagatcagaagctattaaacctctgggacattttttaatcacactaaattattttctatcattttatagaaatcacactttttcttttcaaattaaccacataaaaatgtttatcagagtctagtctgaagactgtataaataagaattaccccagtcagcttatcaaaaaggcagaaattgcattttcttaggctttaacctgtgatgtaccgaatcggaaattcaggatgtgttatcataataagtatttttataatcttttaggagataaagtttgagaaatattgctttttgaaatctagattatttacttatttactcattgcagtacattacagttttagactcttgcttataccataacaataagcgattaaaatcttcatattcccttatggcttgtagctttaattggctattcctacttctggtagccca

SEQ ID NO: 113695 - DNA, 577 bp, Homo sapiens
actatattaaaactttaacatgctcttgcatctggctttcttggttcaacattctgttggggcaattcggctatattgttaatatcgtagttagttcattgctgtgtaatattccattttgtgactattctgcaatgtatgtatccattctaatrttgttgaagacttgggtaatttccagtttttggctgttttgaagagggcttctatgaacattccagtacatatactttggtgaatatatacacatatttctgtttcgtatacaccttgaagtaggaattctgagtagtagacatacatgtattcagtgttagaaattaccagtttcccaaggtgttagtaccaaatttgttcctttctagcagcatatgagagttctttttcctttaaggctctgaatctccattttcaagaatttctctctctgtttgtaaatttccacttgcactctaatctttcctgatcttacgtgttactctaaatagaccttgccaaatgcagccaaaagacattacaccattctgattttcaaccttttcgtcagaaagcccatagttcatttccttatttcaaa

SEQ ID NO: 113696 - DNA, 611 bp, Homo sapiens
atttccagtttttggctgttttgaagagggcttctatgaacattccagtacatatactttggtgaatatatacacatatttctgtttcgtatacaccttgaagtaggaattctgagtagtagacatacatgtattcagtgttagaaattaccagtttcccaaggtgttagtaccaaatttgttcctttctagcagcatatgagagttctttttcctttaaggctctgaatctccattttcaagaatttctctctctgtttgtaaatttccacttgcactctaatctttcctgatcttaygtgttactctaaatagaccttgccaaatgcagccaaaagacattacaccattctgattttcaaccttttcgtcagaaagcccatagttcatttccttatttcaaaatggcaaagggttttccaaatttttgtccatagtttaacatatatgacaatttttccagcagccaatgaacagttacctcactgcccaggacctgaccagtaagtcaatgctacataatttagcttcgtttttcttttttttttctttctaactttatttttacgttcaggggatgcatatgcaggtttgtcacatgggtaagttac

SEQ ID NO: 113697 - DNA, 582 bp, Homo sapiens
aacaaacatacagctcctgtttcccagtctctataggaatataggtgccaatgagcaaacacagtagtcttaattacattgaccaacctcccaacaatgtcttccaaaactcttccacttaccctagtgtttaaaaattctcctgcctgttttccagctgagttgtgttcagtatctctccctattgcaatagcctcaactgatatattcttgcctgtttaactccatctggtgatatttttctttgacattagctacatttgaccaactgctacaggaactaatttggcttaraaaagtgttggctgaagatggagaagggagactccagaaattttaggacttaaaaggtgagggatggaatagctaaaaaataaattaaggttcagccacagagcaaagaccaaatccagtaggtaactatcagtaacctttgtttaataaaacaagcgtagcacccttaatttaccctagaaattcttttcaatggacaaaatgtctcaggataaagagactgatggtatggtgttctcccctaacaactggccaactcaaatggcctgtatctcagtttagagggag

SEQ ID NO: 113698 - DNA, 488 bp, Homo sapiens
accaatttttgtatttttagtagagatgggatttcaccatgttggccaggatggacttgatctcttgacctcatgatccgcccgccttggtctcccaaagtgctgatattgcaggtgtgagccactgcgctaggcctcttgccttattttctaagctctctggatctggcattttgagccaaggtgatcaatgttatcctaaagttacgtgtttgttttacaagcctaatgtctgtttccatttctctagaatgttttggacgtttaaagaatggttctggttggaaagattctggcttcctccaacaataaagtggtcagatcttgaggatcacgatggactcgtctttgtaaaaccttctcatttatacgtgacaattccatatgcttttctcttgctgattatcagrcgtgtatttgaaaagtaagtagtacttgtgtctttccttcccattccccctctttgctctaacactagaataatacag

SEQ ID NO: 113699 - DNA, 652 bp, Homo sapiens
tatatgtacatattcttttttccttgttttattgaaatgggagtttgttatacattctgttctcgcggtgctttgcttgctaacagcatacctcggggactgttccctatttatgcatattgagccatctctgttctttttacagctgcatagtgttcatatttacagctgcatataaatgaccctctgttgagttaatttttccctgttgatggacattgaggttgtttccaaactttttgatcgaataaacaatgctgcagtgaataatcttatacctatatcatgaaaactcttgtttaagatccttagaagccaggcgcctgggtcctgcccatagtyacatctactcaggaggctgaggcgggaggttcccttgagcccagcagttcgaggctgcagtgagctatgattgtgctactgcactccagcctgggtgatggagtgagatcctgcctctaaaataacaataataaaataaaataaagatccttagggattgtgaggtctgcaaggaatggcactcccttttgcccacaccaaccccttcctgggagctgaggcttgaatgaggagggcagtcccagagtgggggaagagcattccaggcagagggagctatagtgcaaaggcctggggtagaaatgagctc

SEQ ID NO: 113700 - DNA, 546 bp, Homo sapiens
gatcgagaccatcttggctaacatggcgaaaccccgtctctactaaaaatacaaaaaaattagccaggtgtggtggcgggcgcctgtagtcccagctgcttgggaggctgaagcaggagaatggcgagaacctgggaggcggagcttgcagtgagccaagactgcaccactgcactccagcytgggagacagcaagactccgtttcaaaaaaaaaaaaaaaaaaaaaaaaataacaccgatcacctcccttcatgtcagggcatccctaaaagcagagcctgagacagggattcttaggcacgtgattcattcttgctccacgtctcctttaggagatgggggagagagagaagcaggacaggatagggaaggagctaagccaggatgtagcctcagctgaggtctagcttcggcctgaattgcaccaggtgttgatcccaccttgcagaaagagggctgagcttttgtacccctgactcaatgagtccacagtctgcctggtgggaggacgggagagctgccacaggttaaaatcccctggcagg

SEQ ID NO: 113701 - DNA, 546 bp, Homo sapiens
gatcgagaccatcttggctaacatggcgaaaccccgtctctactaaaaatacaaaaaaattagccaggtgtggtggcgggcgcctgtagtcccagctgcttgggaggctgaagcaggagaatggcgagaacctgggaggcggagcttgcagtgagccaagactgcaccactgcactccagcttgggagacagcaagactccgtytcaaaaaaaaaaaaaaaaaaaaaaaaataacaccgatcacctcccttcatgtcagggcatccctaaaagcagagcctgagacagggattcttaggcacgtgattcattcttgctccacgtctcctttaggagatgggggagagagagaagcaggacaggatagggaaggagctaagccaggatgtagcctcagctgaggtctagcttcggcctgaattgcaccaggtgttgatcccaccttgcagaaagagggctgagcttttgtacccctgactcaatgagtccacagtctgcctggtgggaggacgggagagctgccacaggttaaaatcccctggcagg

SEQ ID NO: 113702 - DNA, 528 bp, Homo sapiens
tctcatgaagccatcttgtgtcacatgcccatccctcagtcaatcacaaaggctgggagggttggtctatgctgattggaccaggcagagccacatggccactcctggagctggaggtggcctcagagtagagacatcagaagagggtgagagagaggtgcagggcagaggatcagtgggtggccttcagaggtaggaccagataaagacgccatgggtcccaggacctggtgcttggtaatgctcaacaattaatgtttttaattgtaaaacattaatgtgctgtaaagatagggaacaacccataggttgtgaggtagagcagccctgggttcaaatcccagctctgctacttgttagctgtgtggccttgggcaaagcacttgacctctctgtggcttggtttcttcatctgtaaaattggatgaaaatgatcgattgttttgagtattaaatgagttattgcattcaaagcacttagaaragggcctgacacattgtcggtactcagtaaatgttagttattat

SEQ ID NO: 113703 - DNA, 636 bp, Homo sapiens
ctcccaaattaattattaatttttgtctgtcaagccagggtctgcctttttaataggctaaatatcaacctattacctaaaacaaactaaaaacactttgccttttagaaatctccagtacgactgkgaggcctagtggctgctgtgctattactattcacaaatacacaatttcctcaacctataggcatcaggtttggccgtttgcctcattttgatcaacagactgtgagcagaagtgacattgtcacttttttttaagagagggagacttactctcttacctaggctagtgtcagcataaccatctctccaaacactctcatcaaaatgaaactggttggttatagaaaaaaaaatgtgagcatccacatagagataatcaaatgaaactacaacatttatcctctgtcttccacactcttagtgctcctaagaaaaagttctgttgagtgatatcgtatccatggtaattagagttcagggaaatatttgaggcaatactccaattacaaaggtaagttattggaaatagttcagatgaccatggtctagctcaagctttttgtttgtcatgtccaatcagaggtttgaaagaatgcattatgccccaagtttcacttaaatcaaataaaa

SEQ ID NO: 113704 - DNA, 549 bp, Homo sapiens
aatataggtataggagaatttctttttctgaggaaataatagaaaatattcatcagtttgtcaaaaggatcagtccaaacaatggtgacagccattgttaatggatgatggcattaaacaaaagaaactttaggtatcaaaccaaaacacatcataaccacatcgtaaaagtagtgacaaaaccaacacatatgtttgcaaataccttgggaagattgtgttttatagcaatagtttttttgctaaacaaacaactaacttttaaagttaacatttgctggagatgatattttcccagggaagtatttaaatgcttggaacacacctatccaaagacaaatatttgttttcccccagccactggaaagagacccsaactggaaacattgtctagaaatgaatatttggaaactctgaggccctctataaatgccattgcagtagctcactgtccttctaagctgaggccaaaatgccctcaaaggggccttggtgtagaaaagctgttttcaggcaaaaaaaaaaaaaaacaaaaaacacaacagccca

SEQ ID NO: 113705 - DNA, 591 bp, Homo sapiens
gtgaggttgaaagttccaaacctctaatcatgatttggtctatccagtgaccagcccccatcctgaagctacccaagactggcagccagcagtcaactcattggcatacaaaatacatagtttggaggctccactgattttcagtgtggtaccccaggaaagtggatgaagaccaaacatgtatttcatgaagccttctatttcagtagtaagaaaaatactaaattataatacgaatttttttataccagcaaagcagttgcatttgcatctttaaaatgcaagtgcaacttctttttagagatctattgcattttaaagatgcatttcatcacttattacagccaaatgacttgcccaggcattagattttctgttgcagtgatagyagggatttaaataatgattatcttctctttgacctggtgaatttcttattaccctgcatatagacatggttggattgtactgactttgcaaataccacacaactgaagttggatttctgttgtccttcaatcaaccatctacctaagcctcaaaccgttttgttttgcttaaaaacagaatgagtttggcaaacctagaaaa

SEQ ID NO: 113706 - DNA, 525 bp, Homo sapiens
  misc_feature (1)...(525): n = A,T,C or G
gaattcaaatagggaccagatggttgatgcttaaatactctactcatagggtagagatgtaaggacctgggatgcagacattaagggaaggtgaggggtggagctgcatagggaaaatgttgttatatgatacagataaagttccctagggaatctcttggagcttccctcagaagaatagatgaaaagtctgtctgagcatggcaacaactccccagtttctcctcttctctgatggtttatctttcctggctttttgataagatccccaggaagagagtgtaagacagttgcatttcttttggaaggaagctttcttggtcaaataaggaaattccagagagcatccctccttacatctggagggggstgggaacaagacaaggttacggggaccttggttctgagacaccttcaaaggcctctacatgtttaaagagccagcctttggggaatcactttntaagacccaacaacagaacctctggcaacatagtgaagcacaaggngagcatgactggcacc

SEQ ID NO: 113707 - DNA, 514 bp, Homo sapiens
aaaaaaaattataatctaattgcatattaaattagctcaggagtttgtgaccagcctggccaacatgacaaaaccctgtctctattaaaaagaaatacaaaaattagccaggcctggtggcttgcacctgcagtcccagctactcgtgaggctgaggcaggagaatcgcttgaacctgggaggtggaggttgcagtgagccaagattgtgccactgcactccagcctgggtgacaragtgagactgtctacaaaaaaaaaaaaaaaagttagctcagtatatattttcttctcctaacaacttaatcataagcttacttaggtagcagttttttcatagaatatttaaaatgtgattcaatttgagaaaaattgatctacacatgtattttcagggccacacacctacaagaaatgtactcatagtttataatacaacaataatttttagtattatgtcttcacattccttttaactgataaaaatcagaagggactctgaaatacacagtcac

SEQ ID NO: 113708 - DNA, 622 bp, Homo sapiens
ctaattaatcattctggtatccagaggtttattgtcgccattggcacctattcataggcagaaaataaccctaaaggtagattcattttcaagttttgtaacgctaaayaataaacctagtcattacccaacatatcacctatctttactaaggaactacttaacagatttgagatgatgggtgaataatatataaaatatttagaaattatggcaagttattgaatcatgagtttatgaatatatgaaaggaaagtattttaatattaaaagattgtctaaaattatagattctacaatttcttgggcacttgatctttttaatcaaattcaatgaatcaaaacttaatagagccacttcaaatggaaaattattgccctaaagagactggggtttaaatgttcttagggttaaaggtatatttagaaataaattgatgtttcatgaagccaaagtagattacaaattcagagaaaatctctctttgtcaaaatactttgtaatttagaaatgaaaataagcatgtggaaaatttttataaccaaaaagttacaatacagtttctctctattttctgaagcactagattagctcccccagtttttttagcagtcacattat

SEQ ID NO: 113709 - DNA, 622 bp, Homo sapiens
ctaattaatcattctggtatccagaggtttattgtcgccattggcacctattcataggcagaaaataaccctaaaggtagattcattttcaagttttgtaacgctaaataataaacctagtcattacccaacatatcacctatctttactaaggaactacttaacagatttgagatgatgggtgaataatatrtaaaatatttagaaattatggcaagttattgaatcatgagtttatgaatatatgaaaggaaagtattttaatattaaaagattgtctaaaattatagattctacaatttcttgggcacttgatctttttaatcaaattcaatgaatcaaaacttaatagagccacttcaaatggaaaattattgccctaaagagactggggtttaaatgttcttagggttaaaggtatatttagaaataaattgatgtttcatgaagccaaagtagattacaaattcagagaaaatctctctttgtcaaaatactttgtaatttagaaatgaaaataagcatgtggaaaatttttataaccaaaaagttacaatacagtttctctctattttctgaagcactagattagctcccccagtttttttagcagtcacattat

SEQ ID NO: 113710 - DNA, 585 bp, Homo sapiens
gatcaccttcttactctccagagataaatgggaagtgtgtccatcacttacatagaagacctgctggcctctagttgggatatgtttggttttgttttctaagttggatttagtttgtaggctatagtttttcagttttaaccacaatctatcaaaaaaagtggtatgaacaaaatcttaagaaaagaaatttaaaataacctctgctttaaaggctaaaaaaacttataaaaactaaggttgaaatgtattttatatccctctaattcaaggytatatattttttagtttgtctctcctaagtaaaacttctataaatattaatatttttataagtcatgcattttttagtctttgttcagttcctcaaaatgtttttgaagtaagagatagataataaatgtattaatggttctctgtaaaagcagtatttttaaaaggtaaagtatggttcatactcaatagaccagtcagtccatagctatttgctgccattcataaagtgtgtgcagcaccttcttgagccaggcttctctcagcacacattttgtaaacgctcgtctatcccctgtgtcatgtgtatag

SEQ ID NO: 113711 - DNA, 603 bp, Homo sapiens
actgaacagaaagagatgccgcttctgcttcctccaaactcttctgagttgtyctgagctatggattagcagggttcattaagaaccttccaatgatgtggttttctcattgtaggtgtctatcacaaaaaaaaaagtgctttcctgcacacatcaaatactaaagaacaaaaagtcagtggtcaaaaaacaaatgatagcattttatgccaaatttcaagggtgatacaatgctaaaaattctggtcgatctatcactgctggcagaagccacatgaaaagcatgaaaaggaatatagccagcccctaggagcaaactccagccctacgtgacagcttgcaaggaaaggggacttcagtatacaacctcaagtaactgaatttaccccaaactttgaatgagctcattagcaaattcttttcccaaccctccagtaaggagtgcagccctgacaacaccttgatcagccttatgggaccctaagcagaggacccagtcaagcctacgtaatctccttattgtgtaacataataaattctcattggtttcagccactaagattatggtaatttgttataaatgcataaaaactttatactgtg

SEQ ID NO: 113712 - DNA, 603 bp, Homo sapiens
actgaacagaaagagatgccgcttctgcttcctccaaactcttctgagttgtcctgagctatggattagcagggttcattaagaaccttccaatgatgtggttttctcattgtaggtgtctatcacaaaaaaaaaagtgctttcctgcacacatcaaatactaaagaacaaaaagtcagtggtcaaaaaacaaatgatagcattttatgccaaatttcaagggtgatacaatgctaaaaattctggtcgatctatcactgctggcagaagccacatgaaaagcatgaaaaggaatatagccagcccctaggagcaaactccagccctacgtgacagcttgcaaggaaaggggacttcagtatacaacctcaagtaactgaatttaccccaaactttgaatgagctcatyagcaaattcttttcccaaccctccagtaaggagtgcagccctgacaacaccttgatcagccttatgggaccctaagcagaggacccagtcaagcctacgtaatctccttattgtgtaacataataaattctcattggtttcagccactaagattatggtaatttgttataaatgcataaaaactttatactgtg

SEQ ID NO: 113713 - DNA, 603 bp, Homo sapiens
actgaacagaaagagatgccgcttctgcttcctccaaactcttctgagttgtcctgagctatggattagcagggttcattaagaaccttccaatgatgtggttttctcattgtaggtgtctatcacaaaaaaaaaagtgctttcctgcacacatcaaatactaaagaacaaaaagtcagtggtcaaaaaacaaatgatagcattttatgccaaatttcaagggtgatacaatgctaaaaattctggtcgatctatcactgctggcagaagccacatgaaaagcatgaaaaggaatatagccagcccctaggagcaaactccagccctacgtgacagcttgcaaggaaaggggacttcagtatacaacctcaagtaactgaatttaccccaaactttgaatgagctcattagcaaattcttttcccaaccctccagtaaggagtgcagccctgacaacaccttgatcagccttatgggaccctaagcagaggacccagtcaagcctacgtaatctccttatygtgtaacataataaattctcattggtttcagccactaagattatggtaatttgttataaatgcataaaaactttatactgtg

SEQ ID NO: 113714 - DNA, 424 bp, Homo sapiens
tctgtgtgtgttgctaacctgaaattttacgcctgactacaactgtgaacctggtcctatggcagcaatgagagtggaaaaataagaagataaacaagattattgaagtcacttaaactaccaggtaataatagtcagataatcttggaaaaagactgttgatatttggtcctaaattatcttggatttctgttacacttttgcctttttcctgggcattatattagctcagtaatcccaccctactactgccatctgcttcatcaataattagcagttattagtagcttgttgtgttacctctaragaacccatttgaaagacatccctgttcaaaaggtttactgtaagaccccgtatttccaacaaaataaaatggaaatgctattgggctatatggcttgctgctcttcagttgagatct

SEQ ID NO: 113715 - DNA, 583 bp, Homo sapiens
cttggatttctgttacacttttgcctttttcctgggcattatattagctcagtaatcccaccctactactgccatctgcttcatcaataattagcagttattagtagcttgttgtgttacctctaaagaacccatttgaaagacatccctgttcaaaaggtttactgtaagaccccgtatttccaacaaaataaaatggaaatgctattgggctatatggcttgctgctcttcagttgagatcttggtttgtgtgcctgagcttattttcatgtcaggattagtaagactctacaatccaatttccatcactgtctatactgcacaataatggttttaaattaattcatcatttcatcatcattaaattttataatatgtctataaaacttcctttgggacatgctrattttgtctttcaaaacgtttttgtggcaacattcttttaaaatttgtcttggaaatttaggtttaaaagaaataagaaattttttaatttttaaagtctccaagtaggaaccttgactataaattagaggaataaaacaaaactggaaacagcaatgctggtcatcaatctgcca

SEQ ID NO: 113716 - DNA, 666 bp, Homo sapiens
atatttcccagactaccgactttctggcttcatagttctctatgataacatcttgataacataaaaaaccttggacactttgtgaaaagttcctgaacttacactggttctttaaacaagtcagtttatgttaatatcaccactgtagatgaattaattggtgatctctcatctttaggaaacttaatttcttaaaattcatactaggtctaaccaggaatgtttaacagggattttataacttatctttattcttcattttaaatgatctattattttagaaaacgtaaaggcaatattaatcttcataascctctggatcttaatagaagtagcaacatcgtgacttttctaagttttactttttttttagttttttaagtttttttttattattttagtgcagaggtacatgtgcaggttttgtatataggtaaacttgtgtcacagtgtttggtttacagactattttatcacacatgtggtaagcattgtgctcaataggcatgttttctgatcctcttgctcctccaactttccaccctcgagtaggcccaagggtctgttgttccccactttgtgtccatgtgttcttgttatttagttcttacttataaatgagaacaagtagcatttggttttctgtacctgcattagtttggtaag

SEQ ID NO: 113717 - DNA, 644 bp, Homo sapiens
gcctacatgaaatgatcacacacttttgacactcctctgttattgtgtgtaaaaatttctctgtatttgacagcatttttttaatttacataaattgcctttaagactagttttatttttaaccattaatttcactgccaggtatcctaagttatgtgacaagttaatttaaaacctaggactgtcaatctttctaaattaagtttaggatcaaagagtgtggtaagggtcaatccagcggatttgctttgaggtagaggaactgcctgtggggaactaattaaagaaaagaagatttccagcctcttccctctacccrctccccagcccatgttaggcttggagcagtcttaatcaggacttcgagacatattctcatctactatctgtgtgaccttaaataaaatactgaggttttttaactatagttatcacactttaaaaggaaataactttttcttagcattaccatgagaaatgaatgaaataatgaagataacctacacagcataaaatgataagaaatagaaatgtagtttcttaattttgtttgctcccattttaaaataaaagttgtgaaatatgccagaaacagaacgttaaatactccatgttcttgcttatatgtgggagctaaagaaaaa

SEQ ID NO: 113718 - DNA, 432 bp, Homo sapiens
atactgagttaagccatgatttttwaaaaaaaaaatgatgccaagaattctattcattaaaaaaaaactgataaattgacttcatcaagttataaaagtatgcacttaaaaattactcctaagggagaggattcttggaatgtggaagtgtaggaagcctcaggaatgtgtctcctcacctagacaactattgcactggcacaagctgtccaatataattattttagaactctgtagtctattaaaggcttgcaattttgaaaggaaggcttggaccaaaaattgcagttaatttttcagtttcagctctttgtagagtggtgactatccatccttctccaggcacatgggaggcagaagtacatctgctcctggagaaacctgcacatgccatggacagaaaggaccctattttccacatactagggattt

SEQ ID NO: 113719 - DNA, 582 bp, Homo sapiens
gaatttgctaaaatttacactagttgcaaatgggagaatagggataccagtctaatgctattgtcttttcactattttatattgcctccttggaaacagatggggggactagattatgcctgtgaatattttagcaattgggataatttatatctcgatttttaagtaatgtgtrtttatagtgcatatgctacagtccctcaacttgtcaaagtctctgctagttatttttccatgctagggaaccaaatcatttaaaaaagaaagtaaaagaaaaacaaaccttggaatggtgatttagatttactaattatactcagataaaattagcttcaaagcataattttaatttccatagacttcataaatttggtgattagtttcaagaaaactgtatgcagaaataacctaaaatgtaatatttctattgattttcaaagctacgttttgtattgctgctctatttttcagaaacatagaagatgcatagaaaacagcatatagggtctttaatttagagaaatatttctggtattttgtcaggctattaaataaaaatgagggacaagctataaataataa

SEQ ID NO: 113720 - DNA, 598 bp, Homo sapiens
tattcaagatactgaaaaggtcagtgtggttgggacatctcacatgtacccaggatgagaggtagaaaggggttagttcaaagagatctacttatgcagagaaaatgtataacttgagacacaatatcaatcaatcaatcaatcaatcatcagagtgtggaatgcaggaagtcaacgtttaataaaagaggcaggggaagtaaagcctacaaaagaaacctagattttgaccatttccagcacagtatggtatctactaatgagcccctttctcccaattaatataaatatatgagtcattatatatggctaatttgtccaccagaaatgttctcttctggggagtaggaagaggaatccacaaaacactttgatgaaactaaagaactcatggaatgaataaacaaaatgtgaaatagccatataagagaatactgttyaggtatgcaaaagaatgaaatactgatatgtactgcaagaatgacccttgaaagcaccacgttcagttaaagcagctagattcaaaaggccacatattgtatgattccaataatatgaaatgttcatagtaggcaaatcgttagagacaaagtagatt

SEQ ID NO: 113721 - DNA, 598 bp, Homo sapiens
tattcaagatactgaaaaggtcagtgtggttgggacatctcacatgtacccaggatgagaggtagaaaggggttagttcaaagagatctacttatgcagagaaaatgtataacttgagacacaatatcaatcaatcaatcaatcaatcatcagagtgtggaatgcaggaagtcaacgtttaataaaagaggcaggggaagtaaagcctacaaaagaaacctagattttgaccatttccagcacagtatggtatctactaatgagcccctttctcccaattaatataaatatatgagtcattatatatggctaatttgtccaccagaaatgttctcttctggggagtaggaagaggaatccacaaaacactttgatgaaactaaagaactcatggaatgaataaacaaaatgtgaaatagccatataagagaatactgtttaggyatgcaaaagaatgaaatactgatatgtactgcaagaatgacccttgaaagcaccacgttcagttaaagcagctagattcaaaaggccacatattgtatgattccaataatatgaaatgttcatagtaggcaaatcgttagagacaaagtagatt

SEQ ID NO: 113722 - DNA, 558 bp, Homo sapiens
  misc_feature (1)...(558): n = A,T,C or G
tcctacttatcaatttttgtttctgttgcaattgcttttgaggatgtatccataaattacttcccaaggctgatgtccaggattgtgttttctaggttttcttctaggattattttacttatttatttatttatttagagacagggtctcactctgttgctcgtgctggagggcagtggcacaatctctgctcactgcaacctccacctcctgggctcaagccatcctcctgcctcagcctcataattagatgggactacaggcataggccatctcaataagctattttttttwaaattttttgttgagccgaggttttgccatgttgcccaggctggtctcagattcctgagctcaagtgattcgcccaccttgacctcccaaagtactgggattaaaggcatgagacaccgtacccagcccttctaggattcttantagtttgcggtcttatatttaaatatttaatccatcttaagttaatttttgtatatgctaaaaggtaatggttcagtctcattcttctgcatatagctagcctgctattccagcaccatt

SEQ ID NO: 113723 - DNA, 573 bp, Homo sapiens
gaacgagactgcctcaaaacaaacaaaacaaaacaaaaactactagtatctccagacctatttatgtttcagtcttcaccatctctcagttgatggcaattccatttcagttattcaggacaaaaccttggaatttttcttgatttattttttctctcatccaagattcaaaatctttggaaattaatgagtttatattcaaaatatatccagaatatgaagcctcttctcacgacaccctctgttgccattcatatccaagcagccattattatcattacgtcttgtctacatttttacaatagcatcttcctaatcagtgtccacattctactgttgtyctcccacaattcattgcaatggattctcaagaaagttgccagtgtcttcattctattatgtaagttatatcaggatgtgactcctgtaatttgaaaatcaaaagctttttttttttttttttttttgaggaagagttagaatttagacagtagcctacaaggctccacatggtatgattccccaactttctttttatagaatacagcagcagtgtacctagtgtgcatttga

SEQ ID NO: 113724 - DNA, 548 bp, Homo sapiens
ttttggaaaaaaataatgccacttttctggttttgtattccacagtgaatgccttatcttttataccagacataaggtataccttatctagtcttgaagccctgaacagtttcaatttttttaaaaaagsgttaacatgaagaaagcatagtctgttttgaagtgacattagctgaacaatcaaaggagaccgatgaactcagccagagatttacttacacaataggcctctacttcagaactgttccccaatcaatgttcccaaattctgtgcagcgcctggctcatttttattcccctttgcatggcaaagaattttatattatactatgtatagttaccccaattcattccatataaaataacttgcttcagattatgtgaatcttttacgcattgatatagtctttctgcagtgtgaagagtattctctacttctaatttctagtacatagcaaaacctgctatacacaattgttagcttttattcattcataaaataaagatttcctgagtacctcctcccacatgccttgcactgtgttggg

SEQ ID NO: 113725 - DNA, 560 bp, Homo sapiens
gcaagtagtctatgaagcctatgaagttatgtatagcagtgtgcatgtatgtgctattttctgggaagagttgacctgatactcttcaaacaaacacagcttcttcaaacagctcctcaaacaaacacagagcttctagaaatctaagtatttttctacctgatgctagtcaccacttcccccatcttacatctctaraatatgactctgactctgctctagctagctttccatccatgctctctgccctacctgaaagataatctatctcttccttgctgatgcccacgtggcacacaccccacatcacagtatattcattttgtttttagaagtgtccagactgacttgataccaaagatgcattacttctgacattggaattctggaagtacatgaagtccatttattatatgtaatcttcagcatgactttataccttaatgataaaatctgcccacctttcatgtttgagattgaattagcctacatctggatttggtataaataaacaaataaaaataatagtacccaattttgcaaaatggtaggcaacattt

SEQ ID NO: 113726 - DNA, 633 bp, Homo sapiens
aaataatacctatatttgatcccaggttcttcagattytcaattccaggtcacattatccctttaaagtccttttgacatgattcttaaaatgaaactccaaaccactaaacaataaattgtttcacaagattttcatgaattttacgtgtatcatcttcttaacttttatgctttgagcattttgggagtaggaagactctgtctcaaaaggcagcaaaaaaagagaatgaactgtggtgttaggtagacattgatctgaatccctgatcaaccaatcattagcagtatgatcatgaacaaacgatttaacctctctaaagcatcagttttatcacccttaaaatttgaatttggatagagaatacaaaaggaagagcagtttggtgagaaagattagatggattggcccaggctccattttcctttctggttgagatatgtttcatatacttataaccaggtaatttattaagcaaatgaatttgaaattatcataattccaccatccaaatagaacctagtatttgatatatgtctttttactttttttttccctgtgcccttcatcactgcagttcagtcctatgatctcagtagccaattaaaatctacctcctccaaccctgcactt

SEQ ID NO: 113727 - DNA, 606 bp, Homo sapiens
ttgttggatttttgttagctagtgttttgttaaaaatttttgtgtctgtatttctcagagatgttggtctgtagtgttctttttttgttgtgtgcttgtctggttttgtatcagagtactgctggcctcgtagaataagttaggaagaattctctcttctttaattttttggaatagtttgagatgaattgatgctagttcttctttataaggttgatagaattgagcagtaaagccatgcagccctgggcttttctttaatgtttgatgggaatctttttattacatattcaatctgttccccattattggtctgttcagattttctgtttctatctggttcagtctttgtaggttgtatgtgtccaagaatttatctatttcctctaggttttccagttagttagcatatagttgttcatgatagtctccagtgatctcctgtatttctgtggtgtcagttgtaaaatatttttcttttctgattttgttaacttggatcttctctctttttttcttggttagtctagctagcagtttatcaattttggttatttttttwaaaaaaaaacctttcatttttatgatcctttgtatgttttttct

SEQ ID NO: 113728 - DNA, 533 bp, Homo sapiens
gaattcctgcctagggaaaaaaaatatcaaaggcatatccttggagcaagaaagaatgttggaggtcatcccctgggtgtgactgagtagattatttctagagtaagtctatttccttgagtgcaaagtttaaaagagacataaaaatgtgcacagagtccagtaaagaaattcaaatataggtaaagggctgggttctagatggtggcatctgatcttacrgagggtacaaccactctgcccctaaaaaagctgtgagaccctgggaaagccacttattctcagttccttcacctgtataatgaagtggttgattaagattcattcagtaattcattccacaaagttattgaacatctactacctaccaggtacagttctagatttcgggagcacaactttaaacaaaactccctgcctggtggattctacaggggaagttagacaataaataaaataaataagaaagatatacagtatgttacatggtgacaatgctatggagaacagtaaaacagggaaaggggtagtgg

SEQ ID NO: 113729 - DNA, 615 bp, Homo sapiens
cctaatgtaaatgacgagttaatgggtgtaacacaccaacatgtcacatgtatacatatgtaacaaacctacacgttgtgcacatgtaccctagaacttaaaatacaataaaaaataatgataataataattttaaaaaattaggttaattaataagcctacaatgacctctaagtgttgaagtcaaagaaagagttgcatgtctcttaatttaaatcaaaaggtagaagagacaaagttttatgagtaataaatatcaaaacccaaaacacgtcaaaagctaggactctggcaccaagcagccatgctgtgaatgcaaaggaatggttcctgaaggaaatttaaaatgctactccagtgaacacatgaatgaaaagaaggtaaaacagctttattgctgatatggacaaagttttagtgatctggatagaaaatcaaatcagttcttacactctttcaagctaaaacctaatcctgaacaatgccctgwctcacttaaattctatgaaggctgagataggtgatgaagctgaagaagaaaactttgaatctagcagagattggttcataaggttgaaggaaagaagccatctccacaacatagaaggatatgtg

SEQ ID NO: 113730 - DNA, 433 bp, Homo sapiens
tgccaaatggctgactccattcgatggtcacaagttcataacatcaccatcacaagactgtgcagagctaaaaaaaagttttaactgaggagcttttctaagcaattaaaatatgcaaaagtggatgattaaaattaaatgtttgagagatctgtttgaccttacacatttccatatttggaaaataaatgctttatggaaagagaaaatttaggtttgtttaatgcatgtgagctcycccctaccaaaaaaagaaaaagaaaaaggaaaagaaaaagtaaacttgtatcatatctaacaattaatatgctgagacaaaacaaagcagaacgcatttttcaagttttaatatgatcagaagttatgctatcataaaaaccaaataacgatagaaaactgaaagcctaatccaaaatctactgtgtgaaataat

SEQ ID NO: 113731 - DNA, 454 bp, Homo sapiens
ggcactttaactttttcatagttgacaacattccatcaaagaacaggtcatgtgttttctttcttttctttttttgcaaatgtctaaaaaatgttctctaagattagaaataaacgatcattatttttgtcgtaagttggggtttgtgtgttcacacactgtgcttctcttggttaagtgcctttataatggtttgatctctgccctagagcacaaaggagcagctttatcttcatatcttgtttttcaagatactcagcatgtatamagtatatctgcaatccattttctgtgggttacactgtctaatcttcaaaagttcagttctccccagcagacaggacttgtaggactttgtatgttaatgagaataatcttgaattcaatgaagcttttgttgcttccacaactcctttgcaatcttgtcattgatgttcagatatcctactgcact

SEQ ID NO: 113732 - DNA, 544 bp, Homo sapiens
aaatacatgcaatctaaccatgatcatgtgggcggttacaaaatgcattagttttrtttcttggaaatgtctatttttttctttaatgaatttgtctttcagcatatggttttaatgatataaaacagctcctaaaaatgataaaaaaaatttctctcatttgagctgtcagtagcaaagcttgtaagtaatgtgactatctcagcaaaaagttggtacgaattagatcatatcagtaacaatgcccagagtctgctctctggaaattctcagggggtttctcacaaggaatcctgtggatgacttaaccaatgtgactatagactctcacctgcaatttttggtccttggacacacccatggacttccccttatcactgtaatccaggcatgaacataaactctctagtgttagaccaaactgtggctttaacaagacttttcttagggctggggatcacagagggacgttcatataaagaataacaactggctactagatagggctgttcttggagtcctcagttcccagtccattcagctg

SEQ ID NO: 113733 - DNA, 544 bp, Homo sapiens
aaatacatgcaatctaaccatgatcatgtgggcggttacaaaatgcattagttttatttcttggaaatgtctatttttttctttaatgaatttgtctttcagcatatggttttaatgatataaaacagctcctaaaaatgataaaaaaaatttctctcatttgagctgtcagtagcaaagcttgtaagtaatgtgactatctcagcaaaaagttggtacgaattagatcatatcagtaacaatgcccagagtctgctctctggaaattctcagggggtttctcacaaggaatcctgtggatgacttaaccaatgtgactatagactctcacctgcaatttttggtccttggacacacccatggacttccccttatcactgtaatccaggcatgaacataaactctctagtgttagaccaaactgtggctttaacaagacttttcttagggctggggatcacagagggacgttcatataaagaataacaactggckactagatagggctgttcttggagtcctcagttcccagtccattcagctg

SEQ ID NO: 113734 - DNA, 471 bp, Homo sapiens
gagatatagtacctcacaagatattcaaaagccacaaatacaggcaatgaattgatttttctgtgaactgaccatttgtaattgtctttttatttcattagattttctgattattagactgaatctattccatctatcaagagtttaataccatgagagacaatatgaaacaggtgaaagactacagatgctgaaattagtcagatcttgacataaattctaactctgacacaaactgcaaaaccttgggcaagttaaccactctctatttttccaatgtttaaaaaatagggacaataatatcttttttgaaagtatgcagaacttcaatgtgacaacataagtgaaagcacttagccatgcaattaaacrtatcagttatttttattgttagtgctaaagttatttgtataaaaaataaatgcagtgagagtgaattttgtggcaagtgtccctagtcagaatatggtg

SEQ ID NO: 113735 - DNA, 633 bp, Homo sapiens
ataccaaaacttagggtctttaaaagaaaaatatttactatttctcataattctatgggttggttggatggatctcctggtctggcacagctgggctggacctggctgatctaggatggcctctctcacgggtctggtgctcttggtatataaatacaatatataaatataataataatataaaatgttgagaaactcagtcaaattgaacaggcagataatgtcatacgatacccagcaacatgagacaggaagctctctcattattataaacacagtggctgaggccaatgaactttttgaaagtccaagaaaatatctgagttgtgattttaaaaaaatctaattgctgctgtaaaatatttaatcaaaactcctaagtcaaaattwacaaaggttcaatcagatgtctataagtatgctatgtcaatttcattcactgtcaaatttaacactcaaaaactgacacattatatacactaaaacatactttttttatatttataagttaaatataaattttgcatcatttgtttattgtctgcatttcccacatgattagaagttcactgacggcaggctctatgtcctatactttataaaatgataagcaactagtaggtattcaataat

SEQ ID NO: 113736 - DNA, 590 bp, Homo sapiens
ctttaaaatgcagtttttaaagatcccaaattataagcgccagaaagttttttgtcttatgttttgatggtactagctacagttaaaatttaatctacattttaatactcattagttctacaaacaaaaaacaatatatgtcatttttgaatttatttgttaacaattcatgcttttattacataattaaagtcaatgaaacagtatgcatcacttgttaaatgggaaaagtaaaaatttgtctttatattgtatgaataatattaatgkttctattagcatctttataatatgatatttaataatgtatgaatccaaaaccacttttttcttatatcacttattatacccacagaaaatgataaaatgatacaaaataataagagggggctctcaaggttctatgcgacaggaatggctgtttttaaagacaagcaagattgcagtatatttcaggatatgtgatacggcttggctgcatccccatccaaatctcatcttgaattcccacgtgctgtgggagggatctggtgggaggtaattgaatcatggggcaggtctttcccatgctgttcttgtgatagtgaata

SEQ ID NO: 113737 - DNA, 590 bp, Homo sapiens
ctttaaaatgcagtttttaaagatcccaaattataagcgccagaaagttttttgtcttatgttttgatggtactagctacagttaaaatttaatctacattttaatactcattagttctacaaacaaaaaacaatatatgtcatttttgaatttatttgttaacaattcatgcttttattacataattaaagtcaatgaaacagtatgcatcacttgttaaatgggaaaagtaaaaatttgtctttatattgtatgaataatattaatggttctattagcatctttataatatgatatttaataatgtatgaatccaaaaccacttttttcttatatcacttattatacccacagaaaatgataaaatgatacaaaataataagagggggctctcaaggttctatgcgacaggaatggctgtttttaaagacaagcaagattgcagtatatttcaggatatgtgatacggyttggctgcatccccatccaaatctcatcttgaattcccacgtgctgtgggagggatctggtgggaggtaattgaatcatggggcaggtctttcccatgctgttcttgtgatagtgaata

SEQ ID NO: 113738 - DNA, 583 bp, Homo sapiens
tagtgtgtaagccctgctattsttttacacatagctaatactgaatagcaaccagtataatgggtggcatttctgaagtgagacatctcatgtcattctgcaagcttgtatgtgaccagaaggtcacattgtgatggtaatagacgttcacatcagttccttttctctgggactccaagagtataatataatcagcacatcaaatatatttcaaatatgtcattttcatgaagcatagttatcaatgaaatacatgtcactaaagaagattattttctggctttctttaaattgtttgttcatttgttttagaagctagcagagataattcctataggcattgaaatgaagatgtgtattattggtgaagagccctttaattatttgaatgagtttctgtttaatgaactcaggagtaaaacactaatgggcactaaaatatggttacacctgcagatcacctaactgaaaattttaaatggtctgtcacccaaagaaggtcagcaagtgcaattacaaaatacaggttaatcgaagaatcttactactactgatagtgtagagtttttgataagaaatcaac

SEQ ID NO: 113739 - DNA, 583 bp, Homo sapiens
tagtgtgtaagccctgctattcttttacacatagctaatactgaatagcaaccagtataatgggtggcatttctgaagtgagacatctcatgtcattctgcaagcttgtatgtgaccagaaggtcacattgtgatggtaatagacgttcacatcagttccttttctctgggactccaagagtataatataatcagcacatcaaatatatttcaaatatgtcattttcatgaagcatagttatcaatgaaatacatgtcactaaagaagattattttctggctttctttaaattgtttgttcatttgttttagaagctagcagagataattcctataggcattgaaatgaagatgtgtattattggtgaagagccctttaattatttgaatgagtttctgtttaatgaactcaggagtaaaacactaatgggcactaaaatatggttacacctgcagatcacctaactgaaaattttaaatggyctgtcacccaaagaaggtcagcaagtgcaattacaaaatacaggttaatcgaagaatcttactactactgatagtgtagagtttttgataagaaatcaac

SEQ ID NO: 113740 - DNA, 546 bp, Homo sapiens
tgcacataaaatggcaattacagcaaaagaaaactatgacattaagtgccttaattgtgytggtaattatcaaaaggcaatgataatcagccacaatgtccaactggcattctgtcagccagcactctcctgcagaaacagaggggtatggtaggttctcacttgatgccaattcaacctaggctagaaatgacaccaagaaatgggcggggaaatagttgcagaagtgatgagactagctctgcttcttgatgccttgccaccctttccagaattcaaaagcacgttaaccatcatatggaagaacaccttaatttagttcaaaccatgagggaaaagagtgaggcattagtgaaaaatatcatctcatgtaaatgtagatatcttgcttacttacttaaagaggttgtgcttcctatactcacagttcctcaaagcataattgtaacgagactggtggtttaaaatttgccagtttctttgtaattgcatggactttgctgagtctctaggtatgatgagcacagtaatttgaaactgtaacct

SEQ ID NO: 113741 - DNA, 559 bp, Homo sapiens
gtgccactgcactctagcctgggtgtcagagcaaaactctgtcccaaaagttgaagcttcagtgaataatatgggtgcaataagtaacttcaaaaatctcctgtttcttacatgttattacaaaataaattttgctgtttgtttatactatttagtgtgcaattaatattggatttataagtttgtaaaggacatcgacaatattttatgtaacgttaattrttatatttccttggtagatatcgccattttccaaaaattgtagacatttgccttgctttcttgtgaactcattttatagcatttgatgtttaattccaatttactgtcatacctcatccccttgccaattttccctttttgttaaacaaataatgtctttcaaaactttataaatctattttgctttggaatcagccaatagattttatgccaagttcacaaggaaaaaatattatatatatatatatgtgtatatacaatatgtatgtatacatacatatgtatgtggaaatagcaaagcaattcctataatgatccacattaccattaaaaaatc

SEQ ID NO: 113742 - DNA, 505 bp, Homo sapiens
acatgttaagtggaataaaccaggcgcagaaaaacaaataccacatgatctcacctacatgtgaaatctgaaaaggttgtactcatagaagtagaaagtagaatgatggtttaccaggggctgagggttgcgggttggtcaaaggatacaaaatttcaattaggaataataagttcaaaagttttattgcacaagatggtgactatagttaataacaatgtattcttgaaaattgctaagagaataattttaagtgttctcaccacagaaataagtatgtggggtaattcatatgttaattagcttaatttagctattccataaagtatacrtatttcaaaacaacacatacacaatatgtacaatttttttgtcaattaaaaaaaagagttatggtcacctgttaaaaaactccaacatgggtcaggagttcaaaagtcaaagctggtaatttaggcctaggaattgttttatccacagttccacaagatggtgaatggcaaaa

SEQ ID NO: 113743 - DNA, 581 bp, Homo sapiens
gatcagcattgtataacatttgaagttatgccacatcctggccaacacagaatatagctataatatttaattttagccatactagtaaatgtctggtggcattgcactgttgctttactttgtatttccctaatgacttattagatgaagcccctttacatggcttattgaccatccagatgtcttttttgagatacctatttaaatcttttgcctcttttcctgtaggaggtaccttctctttattattaagcgagaagttctcyatatattctggatgtgagaagttctctatatattctggatgcaaattctttgatgagaagattatatttcttatatcttaacttactgttttatttttgtattttcacttttctttttgtgatcgatacatatggtttttcctttatggttagggctttttatttgtttttaaaaatgcctaccccaaatcatgagatattctcccttctgtttacgtctagaggctttattgttttagttattacctttagagccaaatatctgtacttacaaggaatgacagtctttttaaaaatttctaacaaaatagtaat

SEQ ID NO: 113744 - DNA, 581 bp, Homo sapiens
gatcagcattgtataacatttgaagttatgccacatcctggccaacacagaatatagctataatatttaattttagccatactagtaaatgtctggtggcattgcactgttgctttactttgtatttccctaatgacttattagatgaagcccctttacatggcttattgaccatccagatgtcttttttgagatacctatttaaatcttttgcctcttttcctgtaggaggtaccttctctttattattaagcgagaagttctctatatattctggatgtgagaagttctctatatattctggatgcaaattctttgatgagaagattatatttcttatatcttaacttactgttttatttttgtattttcacttttctttttgtgatcgatacatatggtttttcctttatggttagggcttttwatttgtttttaaaaatgcctaccccaaatcatgagatattctcccttctgtttacgtctagaggctttattgttttagttattacctttagagccaaatatctgtacttacaaggaatgacagtctttttaaaaatttctaacaaaatagtaat

SEQ ID NO: 113745 - DNA, 659 bp, Homo sapiens
gtctgagcccctagggttctacctagtgctttattttactgtgacatccaagacaaagtcctatacttacttgcttctctttcacccaagtacactgtatctctctccattttgtgttgcctggagggggaaaaggaatgacacggataatgcaaaacttttatttctactctcgtcaatgtatcttttattattattgtgctataattaggtaatgtgatctctcacctgactttattagctcttgtggaggtacttttgtgtgtaaagagttgttcaaattgatatttctgcaagggcatgatcaccaaatagtcctatgctaccatcttgctccaccctcctctgaagccaatgctttcttctttaattggtctctcttgacttgcggttaggagaaaccaggctgaacatcgaatattttgtttagaaatctcctcagctaaatatctaagtttattacttacaagttacacttcccacaaaacactagaacacaatttggccaacttattttccactttataacaattaatgactttcctccaatttccaatartatgctcctcatttgtctgaaacctcatcagagtatctttaacttttaaagtattttgttcaacatatttctactaatattctgctcatgatgacagttg

SEQ ID NO: 113746 - DNA, 512 bp, Homo sapiens
ctgttcttatgaaatctccattttagtctaagtttaggagtgaggttggggaagggacatggggacatacagtaagcaaacaaataagtaaataaactatgaagtcaaaatgtgtttcatagaacattaagagaaaaatgtaataggctgaatgacttcttagcatatgcagtgaattactgtgaacatttaaaacaaagcattgttttcaaygagtgagtcagatgcaattttgtgtgggtttgcctttctattcagagatggcaagattatgtaagattatcaggtattctagagtttagactgtatataagtaatactgtggaacataaaagaatgcataagaagtttatgtatcatctatcttaagaccttaatttgaaatcaagttctaccacatatttgttgtatgactttagagagttaagctaatatctaaagattacacatttttactgtctatacatatatggagagacatatgacacatataggatataatgaaaatatag

SEQ ID NO: 113747 - DNA, 637 bp, Homo sapiens
tttcaagcacatttgaaaatcattttctatgtgtccactggcattttctaaaaaatgctgagacacggcatttcccaattgctaccaaaatgattacaaagcattactgagagaatatatatgtgaatttacatgacacccaaatgctaygtttgacagtgtggactttatggctgggcatggtggctcatgcctataatcccagtgctttgggaggccgagactggaggatcacttgaggccatgagtttgagagcagcctggacgacatggcaagaacctgctctataaaaatacataaataaaaatttaaaatttaaaaaataggcttccccatgtaatcaaattcccactgagaaatttcaatccacctatgtcacagtatctaacttatctttatttttgcaatagctggattattacaacctatgtatcatttgcagtgttattccaatctttatagccttgctgtgcttttctattgaatgatgatcattgacacacgttgaaaatattaagtactcgagaataatgccttaagcaggagtacttgacacacgtgaaaaatttaacttggtagcaaacaacaaaagaacaatggtaacagtaatgaagccagaaacctccttgcctccca

SEQ ID NO: 113748 - DNA, 473 bp, Homo sapiens
ccaaggccatatggggaatccacaaacacttagagcgacttcataagcatagaatcatagtcaaatgccagtcactgtggaatacccctctcttgtcagtgaggaagctgtctagtgaatataggctaatgcaggatttgcatgcggtaaaccaagctatagtgaccatccacccagtggtgccaaacctgtatactttaatgggacatattccagcaagtgccacttggtttttacagtcctagatttaaaggatgcatttttctgcctccagctggcaccgattagtcagactatttttgctttccagtggggtcaatcacagtacacttggacaagactcccacagggatttaagaactctcccacaatctttgcagagacactggcctcagatcttaaagactgcacctcaccgagcagtgactgtgtcttgctccagtacrttgatgatctccttctagcagccccaa

SEQ ID NO: 113749 - DNA, 643 bp, Homo sapiens
tatctaacccctacctacatttttttttttttttgagacagggagggtctcgctctgtcatgcaggctacagtgcagtggcacaatcatagctcactgcagcctcaaactcctgggcttatttcatctttccacctcagcttcccaagtagctgagactataggcacatgctaccatgcttggttcaaccctgacctacttgttattttacaaaatagaaaactttttgctaattgttttataacagttagatattgtckatatttcaatctccaatttacaatttcagataaaaccatatcatcatgataaaagcatgatgacaggaacacagtattattacagaaacaaagacaaaataaattaatacagatacacaaacacatgtatgcaaaattatacttttaacaaagatatatgttttacttttgaaatatgtttcatttagactgcaaaacaagcaagaagatttattatgaatcagagttgtttgtgctctcaggaaggaagataatgatctaaccaatctctttcactgggaactgttttctgaatattataaggccccagggattccagatggaatacagtataattaactcttcaccaccaaatacctatgttagaagaccttgagaataaa

SEQ ID NO: 113750 - DNA, 462 bp, Homo sapiens
aattcatacagtgtgctacatcctctttcttgagtaactggggtatgtggaggaatgagggtctctcaagtgccttgggartatggaagtgactcttagtctttttccaaattattgtataaccttgagcaagttgcttttcttcttagcatctcagtatgccttataaaactgatctagccttagctgcttggaaaaacttttattttcatgaagaactataagctttcagaagaaaggtggcatttaaagtgcccaacattattcttagataataaattatcctattgccagttatatcctgtagcaattgagtactttcctgcttcttccaaagatgtccccaagtgtctgtgtcattttcagcaggtcctcacagatgtgttctatggatgaagacaaaaaatgccggagagtggttatggctaagtgattcagctctgatttcttgtatgggttagt

SEQ ID NO: 113751 - DNA, 537 bp, Homo sapiens
ttttaccttgacagccatgcttgagaattatttgaatctatgcttggtagtaagaacatagtgagaggagccaagacaccatttgattgcctcatagcttcagtgtcccactgtggatgattcttgatctacaagaccttcaaatataacccgtgagtagatcatctttataaaaagggcacagaaaggcagcaagggcttaggttttggagacaggcaaagtttsacctgaatactagcttcacctcttcctagatatgtgaccttagacatgtcatttgacttctctgagccttagaatttaaatctgtaaaatgaggattacaacatatgcctcatagtatggatttttgttttattggttttcattgttgctactttttgttgaatgtctagaaaactgtgctaggcactgaaaatagtgcctgccctcaaggagcttatattttaatagaaaaattcagatagtagacaaaccaaaattttacaaataataataaaataatgccacagaatggcaagtgctaccacagaaat

SEQ ID NO: 113752 - DNA, 640 bp, Homo sapiens
gtgctgagtgctttgcagaaggtttagtgagggacatttcctatctatgtgtgtcctcactgatgtctgttagtaagatcataaaccatatgctcaaggaccttatggtcctctgaagaaagccagtctatagaatcaagatatgattatggtcaatcactgtctcatcaggcaacataaattggagactgttttcccatgtgcagctcatgacaagtcttatgattgggggcctatgttttattgcctataaatccttaatattatactagctggcagcataaagctaccatttggaaaccccagtaagttaaaaaaacaatagccccacagactctgccaattctaatttctttaatgtttagggtcattaagtggcagaaagatatcactatgragtcattatacttacaacatttggacccagatggcagttgttcttagccattatggatcaactcttcaaaaaggctgaggacagatccacattggagagcatagtttaatgaattatcctagtaacagggtgaaaaatggacccatgaatatgctacctccatgtcgtctttctttcttattaattcagaaatgcttatttctttaacaagtatttgttgcctgcctactttaaactgagttg

SEQ ID NO: 113753 - DNA, 534 bp, Homo sapiens
tgagatgccactaaatcagtacttagagcctttattttagtattaatgacttataatagaaaagaaaaatctcaaatcaatgatrtcagattcaaccttatgaaacttgtgaagaaagagcaaatgaaatgcagaataaaggaagggagggaccattaaagatcagagtgaaatcaatgctataaaaaaggaaaaataataaagacaaccaataaaaccagaagccggttctttgaggagataataaaattgataaacctctagccagaccatcaagaaaaaaaagagaaaagacacaaagaacaaatatcagaaatgagaggagtgacattagcacaaattctacggatattaaaatgataatatgagaatattatgtacaacattatgccaatatggttgacaagttagaagaaatggactaattcattgaaaaatataaactactgaagctcactcaggaataaatatataacttgaatagttgtaaatctgctaaaaacccaagtaaatttggcaaatctaaatctaaag

SEQ ID NO: 113754 - DNA, 577 bp, Homo sapiens
gccagtctgttgtgtctcctggttacaggcttgaatcctgactctgctgttttctagctgtgtgataaaagcaagttactcccctctctgggcctcagttttctcagctgtaaaatgggttcatatgaggactttctcacaaatacatggtttggaggactgagtgaggtaggtcttttaaaggggctccagactcctcacaccccagccctctcaacacacctggtgtcaggatctccctggccatgtagggtcctgacctgaacacatttatacttttcttaagcatccactgtgtgcacagaatccatcctaaagtcaactgtgctgagggaagagtcctctcccttattcttgatgtgccccaaagtcttggggtcttcccagcccagggaggtcaaaccasgtcttgctgttgtttgaatacaccaagtacattcctgcctcagggcctttgcacattctgttctctgtctggaaggctttttggaatgatttactccttcttcactcactcaggtccttgctcaaatttcccctcctcagacaggccttccctgacccctggttcaatgta

SEQ ID NO: 113755 - DNA, 603 bp, Homo sapiens
agacttaatatcatgctcaatttgatctctatgttttccaagcttagcacagcagattttcctcattaatctgcatttatccttaaagacagtgcaccaaagtgcaaccccttttgacttagttggatgaacaygaaaaggtcaaaagactttttcataattagaaagcttctccctttcactccgtcttccccctcctgcctgctctgggtttttctcctctgctaccttgccccaaaactcccaaggctgtgttcacagactgagtcagaaagggaacagagctggtggtggtaaaatggaaggtgacagaacagtcaagtgattaaggccccaggcttgagttggacagacccagatttgaacccagacttttctacttccttcaggtgacacctggatcaagagacatcatatcgccaagccctgatttaaacatttgtaaaatggccataagaattgcacctacctcacaggctgagatattacctatgaagttcttagcacttagtgcctggaatgagggaactgattaataagctcttgcataaactataatttggggtgagaaaagactcttccctcagagtcaggaagcagggg

SEQ ID NO: 113756 - DNA, 633 bp, Homo sapiens
acatatttctaacttgcataktcagatctcacaatcataaagaatgcataatcaaattacaaacaatagcttttttttattagggataccaatatactgcaggaattttgttagagtgataaacaaacattacctgaattcatgctgagaccagcttgcccacgttgggcgccacttgccaagaccagctcagtcgaggagaccctaacccagcaacactggaggaattaaagacacacacacagaaatatagaggtgtggagtgggaaatcaggggtctcacagccttcaaagctgagagtcttgaacagagatttacccacatatttattgacagcaagccagtgataagcattgtttctatagattatagattaactaaaagtattccttatgggagacaaagggatgggctgaaataaaaggatgggctctggctagttatctccagtaggagcatgtccttaaggcacagatcactcatgctattgtttgtggtttaagaatgcctttaagtggttttcccctctgggtgggagaggtgttccttgccctcattctggtaaacccacaaccttccagtgtgggcatcatggccatcatgaacctgtcacagagattttgtttatggcc

SEQ ID NO: 113757 - DNA, 375 bp, Homo sapiens
caagggactaatttttatgtcttcaactctcctctaatgcctgccacaaagccatgctcatggtaatatatgttcaattgaaagaaaaatttcaattccaacattatttgtctgccttagaaatctagcaaattttaaaactcatttcttggttggrgggaatctttgattaacatttggtcccatttacaaactttgttaatagctttaaaagctttaaatggcacttattcattaaatatacttgatttttaaaaatattttacatacttaacaaattcttactaagctgtaaataactcctgtaagttaaataaattatacttataagtatagattaagccatttctttactgtttaccaacttaataatat

SEQ ID NO: 113758 - DNA, 629 bp, Homo sapiens
agagaagagaaaattatctcaggcaaaggaaaaacatggccaaaggccattaatttgggaaaagcatacccatttattgttgggaactataaaagggccagtgtagctggtatttgctgcaaaacattaatgatattgtttaggttcacgaagctgaaaaagatgctaaaaccttgtggacatttttatacatttacctcaataatcagcttccttatgtatatttcccaaagataatgtgatttgattagtgccaaaattgatatgaaattattttaatttagaggaagaaaaggactatatagaaatagcattcccaagagtaccctcttgcccacgacttcaactccagtctctgcaaagatttctttcaccagcaatttcttttttgtttctcattgctatttacatctaaaattatttatatttttatgtmataagtaactaaccaaggccccataaactagtttatagtattcatcttcttcatgcataggtatttgtccatttttttattccttactccctcacagagttagattcccttcattaaggaaaatctcgattacctaggccaccagctttaggttccagtagttctttccaccatgtatctgactttgtctgtt

SEQ ID NO: 113759 - DNA, 621 bp, Homo sapiens
agtacacctgtaagtgcaacaaaaaattttaatgcctacaagtaaacacaattacaagacgaaactgtaatttacattgaagatacttacatgaataaagaggcatattcccttatgcaatggcaatattagatcctcaatattggtagagttaactattctttctaaataaatttataaattcagtgcatacaatcctaatcaatattctaactctttaataaattcagttggaatatatatatatacagcttcacraaggctaaggcaatttccttaaaaatatagcacttcccaaagtactaattcataaagctctttctgatccccaattagaggattaagattattttgtatattaattgctaagtaccttctaacttctaaattccaatgaaaatgtatacttaatatttttatgtgaagaggaaaagaagtaagattgctttcactagtgggtcattttgttgttgttaatatattattcactttgatgaggcctatacattaaaatatgtattatgatgtttaatattttatattttatgtgtaaaaatgtgctttacataattgattgaataaatatactcaaataaactgtgtctgtacaaatgtatgaca

SEQ ID NO: 113760 - DNA, 349 bp, Homo sapiens
attacattactttcacaatttttaaacataaatatgtggcgaacaatttgcaaaatttgaattctgtagaagcagtagttctgcttttttaaaaaatgaaactctccatcacaagtttagaaagaagaaagcacaatatattctgtgaagtataaatgtaagtattgaaaaattcacatgaacacagaccagaaagcatgcatagataggttaactacattgaaacactgacaaaatgattttgaaagttcatatattttattcctagatttcaatgaaaaattaatgatgaaragagctatcaacttttatcctggagaggggtacttacatcttactttaattataa

SEQ ID NO: 113761 - DNA, 662 bp, Homo sapiens
aaaccaccccaaaacctaaacgcttaagacaacagcagttattattttggtaaagaaatctgcaaattgggcagagttcaggacagacagttcttctttgcctccgtggagtgttagctggggtggcttaggttggaggacccactttcagattggctcattcacatggccagtaagttggtgacggctttcagctgggacctgagcctgggatgtgggccagggttcttggtttttcttcatttggacctctccacagctgcatgggtttcctcacagtttagtgkctgggttccaagaataagcatcatctattagaatagtgcttgctttataattgcttattgaatgaatgaaagaatctcaggttgttttcttgctcatgttggcccatttggcaaatagccactgtaaagtgcaggtttcttcccagagcacggtaatccctggctctgagaactgctatttagagggttcttttatcttgacttgaaggtctatttcttcatttaaccacatttatgtttctaataaattacccccagttactactaggctgcaaaaatcatctctgaaccattcaataaacagagaaaagaaaacctttttaaaatttggaaactaccttgaaaactccccattttttcctccttttagtctca

SEQ ID NO: 113762 - DNA, 617 bp, Homo sapiens
tttacttgggcatttggaggagctttaaaccgtgaagatgaacacagagaaaatataccattttgtcccagtcttgaacctgattctcttgcaaaagtaacatacgattttgacaaacttgttcatgaattatttggaaacagttcacaagtaggtaagttctgtgggaaaaatcataactatacttattttaaaatattaatttaaagcaatgcttggcttataatgattaggttcatcttttaaaatgttaagattgaaggaaaaagaaggtttataatatacccaataccctcattatagtgaaagaagctgaagaaaattacattcctgtttggttttaggtgctacgaaaacctataatgccagtaaggcagaagataaagccataaaactatcaattcagttactctgagctcatctgctgtgtttctggatctgtattatccatatcrccatgtagcaagaagttctgtaggatcataatattatagtcttatatttcttttttttaaaaaatccaaattattttataaagccttagatttccttagtacttgtgctttttgaatcggttctaacaaatggaatccatcctattactttgaaacagtaaa

SEQ ID NO: 113763 - DNA, 601 bp, Homo sapiens
gttaaattaaatactagcaacttacacactttaaatgattatcagacattactgggtgatattaattggctttaccccaccttgggcataactactgataagttacgaatcctgtttcctatcctaaagggcaatacagccctagactctcccacatatttaactcctgcagcaaaaagggaaattgaggaaatagagcaagctatttctcagaggcaactagattgcatagacccgcaatattcagttcaattgtttgttttccctactaagcattccccaccaggattagtaggacagatagcccccaggctgcactttctaaaatgggtttttttactcacataccaggactaaaacattatctccctatatccagctagttagtaaagtcatctatacaggccacagatgatgcagtcagttgctaggttatgaccctgatgtcatcagaattcctttgagtaaaagacaattcaaagcatattgcccctatctctagattttcagatagcactctctgattatgcaggccatataraacatgcccttcctgctgagaaactaattcagttcttatctcatactcctgtagttgtgc

SEQ ID NO: 113764 - DNA, 540 bp, Homo sapiens
ttataactgtaaatacctacattaaaaaagaagaaagtgtacttaaattttacctcaagaaactagaaaaacaacatattaaacccaaagctagcaaaaggattgaaataataaagactaaagcagtgataaacaaaatagagaatagaaaaaaaataaacaaaactaaaggttggtgttttgaaaagatcaataaaatttgcaaaccttgagctcagttaactaagaaaaaagagagaagatgcaaaaartaaaaatcaggaaagaaagggacgacattaaagtagatgcagagaaataaaaagatttctaaaagactaccatgaacaattgtatgccaatgaattggataacctagaagtaatggataaattccttgtagtctaccgagactgaatcatgaacaaatagaaaatctgaacacaccaataacaaggagattgaactggtaatcaaacactgccaaaaaaaaaagaaaattttaggaccagatggcttcattgaattctaccaaatatttaaaaattaacataaattttc

SEQ ID NO: 113765 - DNA, 576 bp, Homo sapiens
ccttaacagtacatctttgtcaagtatctactttgtaatgaataactaaaaggtaaaggtttatctcttctaatgtgatcatctttctttttttatcaggcacatttgaaataggtgaaagtcaacatcttcagtggctgtcagattccaggtggaggcagtgccaatatgtcagcactcacctggaaccattttcacttctgtgcaaatcccttttatcaaacgtatcacaatgggatacttttaagaacagtaaagcagtttattctctgatcagcacacctttctcttcagaaaatgcttcattggaggaaaatacaaaaccaccagaggaaagtaagaaagcattcagtgttttaacctaacttaagtatgtgtgtatgtgtatggattttcaatttgtaaatgtcgtacawtatcttacattatgaaaaaattgaagggaggactataactacattttcagcatgcacatgttattcattataatcctcataacaatccctgaaaggattataatgaacttcacgagaaaatctgattagaaatcagaatttcagagagattaaatacacc

SEQ ID NO: 113766 - DNA, 635 bp, Homo sapiens
tgggaaaataccatagaaataagaggtaagtagaaatgataagtgtatctgggagagctggaaatgaagactagaaggcttcccaccttgcaaaaaattgtaatccagtaggactctattgtggtggtaagaggggtcagtattaaatatatgtaggtagatataatatttaatttttcaaaaatttgataatctggttgcattttcatttgattctcatttcccatatcgttatagctggattatgaatagaaacctccaacctctacacttactagtttacattcatcagaaaaacaccacatatacaggaacaggttatgatgtgttggctggctatgcctttggcttctcattttatttcttcatctgtccatcatcttgttatattactattcattcaccacttcagttggtccaagttgaaacttaaatctatcttaacrtctccctcttttgaggtgtgaagcatagctagtgatgcctcaaagcttatagaaataaagctcactttaaaagtcagccatgtttagaaaaaaaaaaaagtcacaattttatgacagaaattttcattgtgatatgttttaatgataaaaagtatttgactgttaatgccagtttctttctctaaatta

SEQ ID NO: 113767 - DNA, 503 bp, Homo sapiens
ccacatttcctctatctgttcttctgttgatggacatttggcttattagctcttgtgaatagtgctgcaataagtggcaacatggaagagcctggaaggcctcatgttaagcaaaataagttaggcaaggaaagagaactactgcatgttctcactcatgtgaaaactgagaaacaaaattcgaactcacagaagtagagagtagaattatgggtattagaggccaggaaggggagaggaggggagaaagggagagtttagttaattaatacaaaattatagctacataggaggaatgagttctggtgttttgcagcactgtaggctgaatatggtttactataatttattgaatgttttcaaaatgctagaggagaggattttcaatgttcacaacacaaaggacaatgtttgaggkgattaatgtatttactccaatttgattattatacattctatgttcatatggaattatcactctgtatcccataaatatgtacaat

SEQ ID NO: 113768 - DNA, 403 bp, Homo sapiens
aatgtgacatctgtgtaccatatctggaagtctccctgtacgtcaagagccccttaggggagtctcccattgccgccgtgggaacctgtgtttacattacgaggagagagaatagctgtactctgaactcaaacgctcaaaacatgcagtgagcgaatgctagcataattttcttgcctctaccagaaggaaggctgggtatttaggaaacagaacgcgttgggcacaacattctgagaaaatrgacacagaaaattaggttatcctaatagaaaagcagttgcatctcccaaagtcaagagattctgtaggacttccgatgtatctcctgctgtgtaaaatattcaggttcctgaagtgggggacatttttagggcaactgtaatttcttcattttttccat

SEQ ID NO: 113769 - DNA, 554 bp, Homo sapiens
gctgagccagtgttgtgagtgccctggatggtggagagggacagggcagagatggacaggaagaagttgttgattcagctgtcaatgtttcctctgggatgggctctgagctaaacagaaaccaagccctccttttcctcctcctccagtctcagattttctgggcctcttctcatctctccttgaacaggcaccccttccccaaggctcctgggggcatccccttccactgctccccactcctctacctggtttagaggaaagcatgcccattttgagagctgctgagactgtcctggtatttctcagggccttcaggataggtctcttcagggcctgccacccagcctctctgtgtctgcctttgcagtttagtgtggtctgtggtccaggagaacttttctatttctccggctggaragcagggtctgtcctgtggccttagctcctgttggcagctgtggcctctgcaggccctgtggacccctcagcctggctggtgagctttcctttgcctggtctttaacttctgcttttacaatgcagagcttaaa

SEQ ID NO: 113770 - DNA, 595 bp, Homo sapiens
cctggtagactcgacctattcttacagccctatccttgcctttcatcctgctgctttcaacacctgctgctgatggactcatgttcttgggtttcccagtttgaattccccagggagagaatctgattgattggttttatctaattatgggttactagtgtgcctaaagtctggctgccttcaggacaggtgcctgtccttgatccaatcagctgtggcatagggaggtgtcagggatatgaggtaaaaaatagccccctagggctgtctgtgtagcagtctgacagcagaaaaatccccttaagtggggctaggagctataggaggacaaatggcrggcagaaggttttggatctggtagcagacagcttttggtgcccaacatcacattcccttggcctacctctggctttagttgctacagtggtggaaggttctatgcaagcccaagccaactgctcaatgagaagttttaccacaagcaggctccaccttctgccccaggagtctctgaggccacagcgcttcccttgaagagggtcgatggctgtcatactccaggacaacctcatgcagtggaggggctggagtggtg

SEQ ID NO: 113771 - DNA, 646 bp, Homo sapiens
agatggatgtaatatttatcatcagtttgtaaatccacccttcttgtattaacttgctaattttctttcttcagcaccacgaaagaccaaaagaccaggtcgtcgcccccgcccccgtccccgccctaaaaccacacctagtccagaagtgcccaagtccaaacccggtaaatgtgayattcaggttccaattaacatagaaagtggaatatggcagcttctggtttgatatcagctacttgagcaactgggctttaggaaccagtggaattgacttttataactgagcatctgtactcagtttctatattcattttatatatgtaatattttatataatatgtttatactctcagtcatagttattaggtacacacagcagaaagctggcccattaagtgaattattaaagtaaagcaccttgaaatcttatgatgtacattcatggcagatgaggtgtgggaaagcaacaaggagaaaggaaaatgggaactgtaaaagggaaaatcacattcagaaaaaatgcatcatttaggtagtgtcccagcttgaggcataatgtctccctcctcacgatgccacttcttgaaatatttcatgtttttggtatttgcttctgtagctctggaacctgccacgatacaac

SEQ ID NO: 113772 - DNA, 553 bp, Homo sapiens
agtcaagcaaacatatccagtaaagaaaagctctcttacattcattccattgtcatctcctctgaaataaagatttctaaaaagttgtcatcttactctgaygctttgtaatttgaaattttgcagtttctcggatttcactattatataattatctggaattctaactaacctatttctagagcttaaggttaggtcttctttctaactccttcttctgtcttctctctaatgctttgttttatcagtgttcaggctacaccttgacatgtcttatgttttaagcatgactggaagatgctgaaaccaaatgacttacaatatgagttctctctttcagttcctaaggtgccccagcgtgttactgcaaaaccaaaaacgtcaccaagtccagaagtgtcatacaccacacctggtaaatgctttatttcatgtttaagccaaatgcattctactgtcccactctgcttcagtgaaacatgagacttggtggaagtgaggtcaatatttcacttatgtttaaatcccatgttgtatcatatgtggtatgata

SEQ ID NO: 113773 - DNA, 611 bp, Homo sapiens
aggagcaaaccaggaagtaaatctagatttcagcaagctatccaaatcctcatgaatgttctacgtgtctcttccctttggaaaattcttatgtgtagtcacactcttcaggatttctgtagttagttttatgttttcagttaaactggttttaaggggagttttttgtgaactaattaaaaataagtgtttaattctaaatatttcttaaaaattgagccttattgtttaaaatgatacagttcataaagcaatcatttgcttggattacatactttaaaatattgccagatttttattagggagaaacctgattggacattcacctaataaatgtattttttctgatatagtcttagaagacaatacgtttagaattgagcaagccaagataacaatagttaacaattatttccatttatactttttgtcaaaataggagttgggatgagcagggtaragaactgcctccttaagatcatactgttatcattacaattctacaatgtttcattatcatcttctccacattttgccattttttcctaaagcttcttatttttccccttaaggatgtactatgtaattttattctttgttaaaatagtttc

SEQ ID NO: 113774 - DNA, 550 bp, Homo sapiens
agtagatctagaagttccaaacatagtaaatttctgttagagcaattgtttgtatttaaggagataacatgtacaatgacacagcactcccagatctatgttaatgttacaattttctttgtacaaataacaatcaatattcatgtcgttcttttagtttactgttatgccataagtaagaaaaatagggtttttaattcaagttctccaactcttttttgagactatttgtaaaaaatgggatagtaatctcttcctcatttattttagagtttgttgaggataaaagcagagtaatagctctgtgttttgaaaataaagggagtttatagagatgaggctcaacaatgataaygatgagtcatccatcactctaacctgatagaacaatcaactataattaggaaagacatttttctctctcaaacgccatcacaattgaatgccaagaagaaattgcttgtaagtcattcaagcttttagaagatctttcttttgccaggctttttgggtgggtttaccaagtgctgattcctctgagaaggatttg

SEQ ID NO: 113775 - DNA, 550 bp, Homo sapiens
agtagatctagaagttccaaacatagtaaatttctgttagagcaattgtttgtatttaaggagataacatgtacaatgacacagcactcccagatctatgttaatgttacaattttctttgtacaaataacaatcaatattcatgtcgttcttttagtttactgttatgccataagtaagaaaaatagggtttttaattcaagttctccaactcttttttgagactatttgtaaaaaatgggatagtaatctcttcctcatttattttagagtttgttgaggataaaagcagagtaatagctctgtgttttgaaaataaagggagtttatagagatgaggctcaacaatgataacgatgagtcatccatcactctaacctgatagaacaatcaactataattaggaaagacatttttctctctcaaacgccatcacaattgaatgccaagaagaaattgcttgtaagtcattcaagcttttagaagatctttcttttgccaggctttktgggtgggtttaccaagtgctgattcctctgagaaggatttg

SEQ ID NO: 113776 - DNA, 592 bp, Homo sapiens
catcaaactaaaaaaatgactacgcttagttgtatgtctttgtactgtatacaagtatatctctaggcttttaggaaacaactgacacattgattctagaatttatatggaaatttgaaggacctagaacagtcaaaacaattttgaagaacaacaatggattattcacattatctgatttcaagacttyctataaagttacaataatcaagagtgtagtgtaagaatgaatagatgaatgtaacataatatagagttcagaaataaacctgtacatttagtgttaattagttttcaaccaagatacccaaatatcaatggggaaaggaaagtttaaaatagattgagctgaaacaaccagaaaaaaactatgaaaacatgagcctcaatctctacctcacatcatacacaaaaattaattagcaatatgcgataaacctaaatgtgtaagtcaaaactgtaactcttccataagaaaatttagaacatctttacaactttaggcaaaagttttaagtagatgtgtgaatggtcaataagcacatgtaaaggtgctcagcagagaaatgctttgaaactgctattagatact

SEQ ID NO: 113777 - DNA, 592 bp, Homo sapiens
catcaaactaaaaaaatgactacgcttagttgtatgtctttgtactgtatacaagtatatctctaggcttttaggaaacaactgacacattgattctagaatttatatggaaatttgaaggacctagaacagtcaaaacaattttgaagaacaacaatggattattcacattatctgatttcaagactttctataaagttacaataatcaagagtgtagtgtaagaatgaatagatgaatgtaacataatatagagttcagaaataaacctgtacatttagtgttaattagttttcaaccaagatacccaaatatcaatggggaaaggaaagtttaaaatagattgagctgaaacaaccagaaaaaaactatgaaaacatgagcctcaatctctacctcacatcatacacaaaaattaattagcaatatgcgataaacctaaatgtgtaagtyaaaactgtaactcttccataagaaaatttagaacatctttacaactttaggcaaaagttttaagtagatgtgtgaatggtcaataagcacatgtaaaggtgctcagcagagaaatgctttgaaactgctattagatact

SEQ ID NO: 113778 - DNA, 592 bp, Homo sapiens
catcaaactaaaaaaatgactacgcttagttgtatgtctttgtactgtatacaagtatatctctaggcttttaggaaacaactgacacattgattctagaatttatatggaaatttgaaggacctagaacagtcaaaacaattttgaagaacaacaatggattattcacattatctgatttcaagactttctataaagttacaataatcaagagtgtagtgtaagaatgaatagatgaatgtaacataatatagagttcagaaataaacctgtacatttagtgttaattagttttcaaccaagatacccaaatatcaatggggaaaggaaagtttaaaatagattgagctgaaacaaccagaaaaaaactatgaaaacatgagcctcaatctctacctcacatcatacacaaaaattaattagcaatatgcgataaacctaaatgtgtaagtcaaaactgtaactcttccataagaaaatttagaacatctttacaactttaggcaaaagttttaagtagatgtgtgaatggtcaataagcayatgtaaaggtgctcagcagagaaatgctttgaaactgctattagatact

SEQ ID NO: 113779 - DNA, 568 bp, Homo sapiens
tgctcaatgggttcaccttgcccgctgcctagacagaaccaatttatgaagacaagggaattccaatagagaaagaataattcacgcagaggcggctgtgcaggagaccagagtttcattattactcaaatcagtctctgagtattcggggagcagagtttttaaggacaatttggtgggtgggagagagccagtgatccaggagtgctgattggtcagagattaaatcatagggagttgaagctgtcttcttgtgctgagtcagttcctgggtggggrccacaagattagatgagccagttaatcaatctgggtggtgccaactgatccattaagtgcagagtctgcaaaatatttcagtcactgatcttaggagcagtttagggagggtcagaatcttgtagcctccagctgcctgactcttaaaccataatttctaaccttgtggctagtattagtcctgcaaaggcaatctagtccctagacaagaaggaggtctgctttgggaaagggctgttattgtctttgttttaaattataaactaagtttctcccaaagtaagtttag

SEQ ID NO: 113780 - DNA, 617 bp, Homo sapiens
ctggtattatctcgaaagctcacaaaggtgtttaccttgatcacacactatcatctcttcatggactaatatacttctctttgtcaaaacaaatatgggatccaattatcatgaaccaggtaagtgcattacaatttttaagtggcttctaaccctcatagatgattctgatccagggaaccttaaaattaataaactgtgaaaggtgtatctttggtccttgttggatgaaaatgaacattaataccctgctgatgagtcattaacacatctcaacagtaagaaataaaacaayactgttgctttcactaggagagacacagttaattaagttggtagtgagggtcagaatgctggaacctgggcttatgaggaaccacaaacctgagaagtctattaaacaataatatttccatcagctataataaaacttttaaaaaatgataaccaaaatagcaaagtgggagtttacagggtaaacaggggaaatagcagctcagaatgtcagcccagacatgtctgccttcccagtacacactgtgaaaacataattcccaactcattagggagcaaagggatgagtggagagaaatgctaattatacattagctcagtta

SEQ ID NO: 113781 - DNA, 617 bp, Homo sapiens
ctggtattatctcgaaagctcacaaaggtgtttaccttgatcacacactatcatctcttcatggactaatatacttctctttgtcaaaacaaatatgggatccaattatcatgaaccaggtaagtgcattacaatttttaagtggcttctaaccctcatagatgattctgatccagggaaccttaaaattaataaactgtgaaaggtgtatctttggtccttgttggatgaaaatgaacattaataccctgctgatgagtcattaacacatctcaacagtaagaaataaaacaatactgttgctttcactaggagagacacagttaattaagttggtagtgagggtcagaatgctggaacctgggcttatgaggaaccacaaacctgagaagtctattaaacaataatatttccatcagctataataaaacttttaaaaaatgataaccaaaatagcaaagtgggagtttacagggtaaacaggggaaatagcagctcagaatgtcagcccagacatgtctgccttcccagtacacactgtgaaaacataattcccaaytcattagggagcaaagggatgagtggagagaaatgctaattatacattagctcagtta

SEQ ID NO: 113782 - DNA, 600 bp, Homo sapiens
attcatagtcactttggaccaggcataaataacacattggttttatacaaagtaaaatttagtccctccccagagttactcacaagttaagtggggaaaaaaatatraatgaaagcaaataatcatctatttcaagcacgaacgcctagtagtttagagaaaaatccatggaaaaagaacaaaaacaattccatatgtggtgtgtcatggaaaagagagagaaactaccatggaaagcgagacaaaaataatatagaagctggccatggtggcttaagcctgtaatcccagctactcaagagactgaagcaaaaggattgcttgagcccaggagttcaagaccactctggccaacatggcaagaccctgtctcaaaacaaaaaaatatatatacacggagttcagctgaggaaggtgttcagagccagaagtcaccatagagtaaagacctgtggaagagaactgaacttcccagtgaatataaaaataggacttcagtcacctggatctaaatttcaaagggcagagggaactcccctgatgtaaggatctaaaaatatacagaaagaggaatagcacaagcaaagcacaaaacgaggg

SEQ ID NO: 113783 - DNA, 600 bp, Homo sapiens
attcatagtcactttggaccaggcataaataacacattggttttatacaaagtaaaatttagtccctccccagagttactcacaagttaagtggggaaaaaaatatgaatgaaagcaaataatcatctatttcaagcacgaacgcctagtagtttagagaaaaatccatggaaaaagaacaaaaacaattccatatgtggtgtgtcatggaaaagagagagaaactaccatggaaagygagacaaaaataatatagaagctggccatggtggcttaagcctgtaatcccagctactcaagagactgaagcaaaaggattgcttgagcccaggagttcaagaccactctggccaacatggcaagaccctgtctcaaaacaaaaaaatatatatacacggagttcagctgaggaaggtgttcagagccagaagtcaccatagagtaaagacctgtggaagagaactgaacttcccagtgaatataaaaataggacttcagtcacctggatctaaatttcaaagggcagagggaactcccctgatgtaaggatctaaaaatatacagaaagaggaatagcacaagcaaagcacaaaacgaggg

SEQ ID NO: 113784 - DNA, 589 bp, Homo sapiens
acacaggtcttctgaaataattcagccagacaaaaataaagaaaaatgaactatgcctttgtgatatatgaaataccacagagcacccaaatgttcaatttggggtcccagaaggccaagacagaatgaaagcattttaaaacctacttaataaaakaatagatggaaacttcccaagtctagcaagagatacagacatttagatacaagaggctaagatccaaaaaggtcttcttcatggcacgttatagtcaaactgttttaacgtcaaagacagagagaattctgaaaacagcaaaagtgtctagtcatatataaagaaaccttcatcagactaccagtaaatttctcagcagaaaccttataggaccagagagaatggaaggacatattcacactgctaaaagaaaacaacaacaacaacaaaaaaccctgctagtcaacagcactatattcagcaaaactatctttaataaatggagaaataacatttttcccaaacaagcaaaagctaaggaaatccatcaccaccagatctgttctacacaaaaaaatgctcaagagagtcctaaaactggatgtgaatgaa

SEQ ID NO: 113785 - DNA, 564 bp, Homo sapiens
gaaaataacaatatggtgaacaggcaagctcatggggatgaagtctctagtcatacatacttttgctcataaatagcaacttctaatttactgtactcaattatcctgctattacctctaggaattaaaagtctcacagtttctcatcttcaaaatgcaaacagatgtcattaatttacttgagcattttattctggtctagaaagtgttctcaagtattgtgggggcgcagggayaacctgaaaaaggttcttccaccaaacagtgactggagacatccattcccaggcttcgataaccacctccaactgccagctcctcacattagttccatggcacaaatgaaaagaatacttaaaagtatcctgaagttattttaggagtttctaatggaacatcttactaatcctacatcaacaaagtttgggaagctatgttggatgcaacagaatgacagttatttagcctctgctttggaaagctgaccattctataagcttttatggtctagggagcttgagactaaagcttgcagtgtattttctgttatctgaacatgtactt

SEQ ID NO: 113786 - DNA, 564 bp, Homo sapiens
gaaaataacaatatggtgaacaggcaagctcatggggatgaagtctctagtcatacatacttttgctcataaatagcaacttctaatttactgtactcaattatcctgctattacctctaggaattaaaagtctcacagtttctcatcttcaaaatgcaaacagatgtcattaatttacttgagcattttattctggtctagaaagtgttctcaagtattgtgggggcgcagggataacctgaaaaaggttcttccaccaaacagtgactggagacatccattcccaggcttcgataaccacctccaactgccagctcctcacattagttccatggcacaaatgaaaagaatacttaaaagyatcctgaagttattttaggagtttctaatggaacatcttactaatcctacatcaacaaagtttgggaagctatgttggatgcaacagaatgacagttatttagcctctgctttggaaagctgaccattctataagcttttatggtctagggagcttgagactaaagcttgcagtgtattttctgttatctgaacatgtactt

SEQ ID NO: 113787 - DNA, 656 bp, Homo sapiens
ggtactgaataactgtaggcaaagaaattaattgaacagagacaaaccaacacatgtatggacaattcaatttcaacgaagtgaaaagtcaatttagtggagaaaagataacctttctatgtagtcattataaattccattgaatggatgaagaaactgaaatttgtccatattgtcatagttggtaagtgatgttgtcagacctgtttaacatttatttctttataccattccaggggagaagaggagagtaaaagtgaagaagaaagaggcaaaacaagtgactagaccacacgctgaacaagttgtagctctcatttacttttcagagaatgtaaaatgttacaactgctttggataacagtttggcaatttctttaaaagttaagcatatatrtatatatatataatcatataatctagccatttcacacatcagaatttaccctcatccccaaataaaagcacaaagatgtgaatgcccatagcagctgcatgtgtaataactcaaaactataaaaaactcaaacactcatcaacagtgaataattaaacaaattgtttacattgcaaaaacattatcagttgaaaggaatgagctactggtagcagcaacaaggtacacaaatctagaaataattatgctgaggaagaga

SEQ ID NO: 113788 - DNA, 516 bp, Homo sapiens
gaattcactcactatatcgaggacagcaccaaagggatggtgataaattattcataggaaatctgcccccatgattcaatcacttcccaccaggccccaactctgacactagggattgcatttcaacatgagatttgggtgaagacactcatccaaaccatatcattgaggtaatgataatagtctaaattatagatacaaaaaatataatrgttgttcccaagacatggggagtgggagacattgggaattatttttttaatgactatagagtttcagctttacaagatcaaaagagttgtggagatatatggtaattggatattacaaatgtatttaatacaactgggctgtacgcttaataataatgacagtggtaaatttatattacaacaacaaagtaaaaagaaaaaatatacctgatgattttttaaagtttacatatatacatactatatgtgatatttttagccctatacctagtaccttttccgtaactagtaaaattatataatt

SEQ ID NO: 113789 - DNA, 516 bp, Homo sapiens
gaattcactcactatatcgaggacagcaccaaagggatggtgataaattattcataggaaatctgcccccatgattcaatcacttcccaccaggccccaactctgacactagggattgcatttcaacatgagatttgggtgaagacactcatccaaaccatatcattgaggtaatgataatagtctaaattatagatacaaaaaatataatggttgttcccaagacatggggagtgggagacattgggaattatttttttaatgactatagagtttcagctttacaagatcaaaagagttgtggagatatatggtaattggatattacaaatgtatttaatacaactgggctgtacgcttaataataatgacagtggtaaatttatattacaacaacaaagtaaaaagaaaaaatatacctgatgattttttaaagtttacatatatacatactatatgtgatatttttagccctatacctagtaccttttcmgtaactagtaaaattatataatt

SEQ ID NO: 113790 - DNA, 452 bp, Homo sapiens
agcttgcacagcagcctggacctgatggagagtcttctgttgagaacccaactcaaagctggcagcctttcggggtcactcaataaatgggccagaggaacacaccgaaatgaggaatgtgttgcatccaaaatccaaatagacccactaggcgctgtgcctctttcttggttgtaggaggggccaaatgcagcaacttatcctttaccttagaagcaatatctcaacaggtgccacaccactggacccctagaaattttactaaggtaaggtccctgaattttaattggatttytttcccatcccctagcctgcaaatggcttaccagtaagtccagtgtgtttgctacttcttgctcattgggtccaatcaacataatgtcatcaatgtaataggccagggtgatatcttgtggaagtgaagagtgatcagggtctctccaaataagatg

SEQ ID NO: 113791 - DNA, 583 bp, Homo sapiens
gctacagtcattttttctttgcactttggatgctgaaatttttcccatggaacatagccacatctagatagatgtgagctttttcttctgttaaaattattcttaatgtctgtaaaaacgattttcttctgtagaatgtttgacttcgtattgacccttatctgtaaaacacctatttgggataatatttggaaaaaaagtaaatagctttttcaaaatgaacatgaggctggttttcttgtcttgcaaggtaattttcaatgccttttaraaaatcatttctggggctgggcttggtggcttatgcctctaatcccagcactttgggaggccaagataggtggatcacctgaggtcaagagtttgagatatggccaaactctgtctctacaaaaaatacaaaattaactgggcgtggtggtgcacacctgtggtcccagctacttgggaagctaatgtgggaaaattgagcctgggaggcagaggttgcagtgagctgagatcgtgccactgcactccagcctgggtgacagagtgtgagaccctgtcacaaaaaaaaaaaaagaaaaaattacttccttca

SEQ ID NO: 113792 - DNA, 602 bp, Homo sapiens
ttctcacatttttgcaaaactctgctttagggaacagatttgaagcttacacactgaaataaaactgaataacaaggcttgattaggcccaaagactgaaggggaagaaaatttcctrttttatgattttaaattcaaagtcttgaatgcagggcattagagtgggaaggaagattcaagagaatgctaatgtgaaagagaaatggactcagaaaaagaaaagaaagagagtgtaatgtgctctttggttgctattctatttgagcccagttctccagacttcttcttaattttgtgagctaccccaaagttcctttcctgtgtaagatatcccaaatctctttttttcacttctagtaacccttactgtttcataaataaagagcaatggcagttaagaatgagaagcaaaataaataagatacaagaaaagtagagaagttgaagaaagtaactggatcctatgactgtctcaaatttggaagggttgcagtcctgatacatgcatatccttcaaaataagcccccccacctccaacactttttattaaaatggtatctattccttgcaacggagggagcaactctttttgtttgtttgt

SEQ ID NO: 113793 - DNA, 602 bp, Homo sapiens
ttctcacatttttgcaaaactctgctttagggaacagatttgaagcttacacactgaaataaaactgaataacaaggcttgattaggcccaaagactgaaggggaagaaaatttcctgttttatgattttaaattcaaagtcttgaatgcagggcattagagtgggaaggaagattcaagagaatgctaatgtgaaagagaaatggactcagaaaaagaaaagaaagagagtgtaatgtgctctttggttgctattctatttgagcccagttctccagmcttcttcttaattttgtgagctaccccaaagttcctttcctgtgtaagatatcccaaatctctttttttcacttctagtaacccttactgtttcataaataaagagcaatggcagttaagaatgagaagcaaaataaataagatacaagaaaagtagagaagttgaagaaagtaactggatcctatgactgtctcaaatttggaagggttgcagtcctgatacatgcatatccttcaaaataagcccccccacctccaacactttttattaaaatggtatctattccttgcaacggagggagcaactctttttgtttgtttgt

SEQ ID NO: 113794 - DNA, 589 bp, Homo sapiens
catgcccaagtcattcgtgcctttcttccattgcccccacctaattgtcatccccgccaccaccaccaccattgtgcggaaacaaaatctgattaagtgctcatggatggaaaagaaaatggattgtgattcagggaatttgaatttagttactcgaaactagctgtgggacctcgggcaggtcacctcgattactctgaccctcaatgatttttactttttcaatgtaatagccccaatttttctataaacatgaattcagttcccactgtgtactaggcattgcactgaacaacacagataccattgtgaaaacagacacagtccttgactttatgaagcatatagcataatgggataaacagatgtttatcaaataatctccataatggcatataattacagactgagataagyggtctgaaggacaagagcccaattctatgagaagttactacaaaggagtctggtgtagaccatgagagaggagcatgaaggaaagtccccgtcaagtgaaggacagttgagatgaaattaactgggaggaccaaggcagatgacattgaacccagagttattgggagaaaat

SEQ ID NO: 113795 - DNA, 592 bp, Homo sapiens
tcttaggaaaagcctgcaggggagtagaaagtaggactgggaagggaaggaatgaagtcaggatgtggcatcaagcagagtagattctgcttatgcagcagaacctaatcctaacaaaacaatgatgcatggtcacagctctgtgaactccactgtatctgtattagttaggtttcatgctgctgatagacacatatctgagactgggtaatttataaagaaaaagaggtttaatggactcacagctccacgtggctggggaggcctcacaatcatggcagaaggtgaarggcatgtcttatgtggcagcaggcaagagagaatgagagccaagaaaaaggggttttcccttataaaaccatcagctttcatgagacttattcactaccatgagaactgtatggggaaaactgcccccacgattcaattatctcccactgggtccctcccacaacaggtgggaattatgggagctacaattcaatatgagatttgggtggggacacagccaaaccatatcaatatttcaacttcactatgtcttaatattactctagttaacctttattgagcaaatgtcatgtgccaggct

SEQ ID NO: 113796 - DNA, 619 bp, Homo sapiens
atccactccaaacactttgcaaatacagtcctgcaaaagctacctgcttagccactcatggatttatgcatagacactctaatatgcacacatacatacacacacacgcatcatgcatgcacacaccatatgcatgcacatacatacacataccacacatgcacatgcatgcacacaccacacacatggacatgcatgcacatacacatgcttgcaaatgccagccacacacacagacacacacagtataactcttgccaaccactcctactcctgaaaaataaatcaacatacatcgtggatccaaagaaatacttcctaaaattctttaaagaggttattccattctttatcaattccttagtcagcaacttcgactctctcctttcctcctctgcagacagcactgcttcctgggaggggagaacagccaaggagccttgggcaactgctgtctcgctatggattctgttgcagagtaggragcgctcagcccagatggagttttctgtcagcttaacagtgtcacttcacgtcttccaagaattccccagagcttcttgtctactggtagtacctttctcttcttttccagattttctacagttttaaaatttgt

SEQ ID NO: 113797 - DNA, 560 bp, Homo sapiens
ttctgattaaaactctctcatggtttctcatggcacttagaagagagtcagaattcctgcaatgactagaggctctacagattccagccctttcatgtctcattgacctcatctcctatcctcttgtcctcaggacttgccactcagccatacgggcttcctttcagttattcattcacccagtgcgatcccacttgctactctctctgcccgaaatgttattcccttcccatcttcttgtcatcctgatctctgcttaaagtcacctcatcagggagactttccctgatcagcctacgtaaartacagcccctcatccttctgtatccccctactgttctttcttttctttatgtcatcaatttatttgcctatttatttatcctatgtcctctactctaaaaggttatgcccaggagacactttggctatcttgttttctgtgatatccctctagcctagaacagtgcttgtcataatcaattgaataaatgaaaaagtatcaattaaataaattttaaaatgaatgaccatttggcacttccccaggttccagcaga

SEQ ID NO: 113798 - DNA, 591 bp, Homo sapiens
aatcatgttactcttctgattaaaactctctcatggtttctcatggcacttagaagagagtcagaattcctgcaatgactagaggctctacagattccagccctttcatgtctcattgacctcatctcctatcctcttgtcctcaggacttgccactcagccatacgggcttcctttcagttattcattcacccagtgcgatcccacttgctactctctctgcccgaaatgttattcccttcccatcttcttgtcatcctgatctctgcttaaagtcacctcatcagggagactttccctgatcagcctacgtaaaatacagcccctcatccttctgtatccccctactgttctttcttttctttatgtcatcaatttatttgcctatttatttatcctatgtcctctactctaaaaggttatgcccaggagacactttggctatcttgttttctgtgatatccctctagcctagaacagtgcttgtcataatcaattgaataaatgaaaaagtatcaattaaataaattttaaaatgaatgascatttggcacttccccaggttccagcagagatctggacatgcagtag

SEQ ID NO: 113799 - DNA, 698 bp, Homo sapiens
tttcaaatagctagaagagtggattttgaatggtcccagaacaaagaaatgataaatatttgaggtggtggagacgctaataccctgatttgatcattatacattacatacatatataaaaatattatactgtaccccataaacaagtacaattattatgtatcaaataaaaataataataaaagcaaaaaatctactctctcagcaattttaaagtatacattattattaactatagtcatcatgctgtacaacagatctccagaatttataagattctatttaattccattcaaagtactacatacayagagttaagaacaaaatggtatctggagcaagaaatcctcggtaaaacaaaaaaagaagaaaaaaagaacaaaatggtaataaaaggcttatatcaaaaagcatttcctctgccctttcctttcttgcattgagtcctaaatcccagaggccatcactttaaactcattttgctatttcctctggtatttatcatcatatttctaaataatgtttatgttgctatttcttgatttgttttcttcagtatctgtctacctcctggcatagctcagtatagggcttacctcccttatgaggtcttaacaatttccttgcttccaatctaccagtctgattggatcatagtcttatgaaatccaaagcatttccattattgtaggtatcta

SEQ ID NO: 113800 - DNA, 532 bp, Homo sapiens
tatttttagtgcatcaatatggtcagagaatatggcctgtgacctttcagctgcattatcagtaatcgtttagacttcactattggtgttactgctgtctttgcttcttattgctgctccttgtattatgtgtcctgctccctgcccctcaagtatatccctgaataatatctggttgttttttttttttttaacctaraaagggtttaaagggatgtgcatggagagtgtcccttgaatacttgctgtctgttatttgttcaacaaatatctgactctgtataaagtattccacattggtgtggagaatctggaggtgaacgtacacagataatgcttcctgtcttgatggagctagatatagaattctaagttcataattgagtctattcccagttctttacgcttttatcttctgatatttgttacaaatgaaaagtctgatgcctatctcattcttaattctttctgtgtattttattttttctttctggtagttggtatgattttctctgtaactgtaaagtgtggg

SEQ ID NO: 113801 - DNA, 590 bp, Homo sapiens
ttcttctgcttgagaaaagcagagggaaaggtaaaagggactttgttttgcagcttacgtacctgcctggccacaatggggtagagcaccaaatgggctcttgtggtcactgattttaggccttggctattagacagcatttstgggcccgtcctaggccagaggggagcccactgccctgaagggtgagtcccaggcctggaagcattcaccacaagtgccttcagagcccttgggccctaagagaacatcgacagtagcctggcagcactccgtgtgcgcctgtggtggtggccacagggtgaggctcctctgcctgtggaaggggaaagacagagtgggaaggactttgtctcatggtttcggtgtctgctcagccgccttagaataaagcaccaggtaaatttctaaggtttttggctgcagtccctggctcccagacagcatctctggacatgctagggcctaagggaacttgttgccctgaagggaaagacacaagcctggctggctttgacacctgctgacagtagagccccagggcctcgagtgaacataggcaatagccaggtagtgttgacagtgggccc

SEQ ID NO: 113802 - DNA, 593 bp, Homo sapiens
taatggaaaaatcagtagttatttatgaacaaacagcatcagagagaagtaacaatatttttaaaaattttccctaatgtgatagaaactatggaaggataatattttcactgtggagaaatgagtaatttttttttcctggctgcctcagtgggaaaaaaactccatcattttttcatttcatgcattacaccatcaagtcacaaaaacagatccacaatttctattgttaatgatacctgctggtaaaaataatttagaagacttttcccccgttggactattgaaaatatctgattctgtgcttagtattaagagttcttgaaaccaaataatacttctggtaaaaccagacatactattttatatatgttgagagtatttagttagaaatctaaaagtaacattggtttgaggttgccagataaaggccaggtaagatcagagccagctacataatctgtgggacccagsgcaaatacaaatttggggccatttgttcaaaaagcaaggaaaagctttttcttgacccatcatggtgttttttattcactacttaatgtctggctccttcatgtgtaagatgagtgcag

SEQ ID NO: 113803 - DNA, 605 bp, Homo sapiens
agctttaggaaatcagcccaaattggcctcagattccctgcccccagcccttgatgtttttccttggtacagctttaggaagtcagcacgaattggccttaagtgccctgcctccagatcctattttcctacctcmccttgagcccaaaagttggaggctgcagtgagctatgatagcattactgtactccagcctgtatgacccagtgaggcctgtttcaaaaaaaaaaaaaaaaaaaaaaaaaaaaaacaaaaaaaacaactcaatgcactttcacctaaaattaatgctatttctagaaactcagtgtgtgtcccaagttgcataaaggccatcaggtgggaaagggttttggcagcaggctgcaaagaccacaggctaagaatggctctgtccacaaagccctagttaagatggatgattgtgtaaggggcgtggaaggtagcatggaatgtctggaattgcaggcccaggcagagggaaaaggaaaagggagatgaagaggagagaacacatggctggaagtctggttaattccaaggcttaagggcaaagggaattagaaaaatataatactttgttaaaagattaacccagctattca

SEQ ID NO: 113804 - DNA, 605 bp, Homo sapiens
agctttaggaaatcagcccaaattggcctcagattccctgcccccagcccttgatgtttttccttggtacagctttaggaagtcagcacgaattggccttaagtgccctgcctccagatcctattttcctacctccccttgagcccaaaagttggaggctgcagtgagctatgatagcattactgtactccagcctgtatgacccagtgaggcctgtytcaaaaaaaaaaaaaaaaaaaaaaaaaaaaaacaaaaaaaacaactcaatgcactttcacctaaaattaatgctatttctagaaactcagtgtgtgtcccaagttgcataaaggccatcaggtgggaaagggttttggcagcaggctgcaaagaccacaggctaagaatggctctgtccacaaagccctagttaagatggatgattgtgtaaggggcgtggaaggtagcatggaatgtctggaattgcaggcccaggcagagggaaaaggaaaagggagatgaagaggagagaacacatggctggaagtctggttaattccaaggcttaagggcaaagggaattagaaaaatataatactttgttaaaagattaacccagctattca

SEQ ID NO: 113805 - DNA, 605 bp, Homo sapiens
agctttaggaaatcagcccaaattggcctcagattccctgcccccagcccttgatgtttttccttggtacagctttaggaagtcagcacgaattggccttaagtgccctgcctccagatcctattttcctacctccccttgagcccaaaagttggaggctgcagtgagctatgatagcattactgtactccagcctgtatgacccagtgaggcctgtttcaaaaaaaaaaaaaaaaaaaaaaaaamaaaacaaaaaaaacaactcaatgcactttcacctaaaattaatgctatttctagaaactcagtgtgtgtcccaagttgcataaaggccatcaggtgggaaagggttttggcagcaggctgcaaagaccacaggctaagaatggctctgtccacaaagccctagttaagatggatgattgtgtaaggggcgtggaaggtagcatggaatgtctggaattgcaggcccaggcagagggaaaaggaaaagggagatgaagaggagagaacacatggctggaagtctggttaattccaaggcttaagggcaaagggaattagaaaaatataatactttgttaaaagattaacccagctattca

SEQ ID NO: 113806 - DNA, 594 bp, Homo sapiens
ctgtgctataatttaggaacactgcccctgattggcagcagcagatgtccatcargttgttctaataggatgacagaggccttccttgcatttccaaaacatgtcccatgctcttcagtctctctctcatcattctgtttcacttataattggatttcatatggctgttgtaataaactacagtcgattgtgttaatcaaatagttacattaaaatattaagaatccccaaattcaaaaatgatagtttggagaagacttgaaacagaagataagtaccgtggtaagcttctatgtctgatacttttccttaattagtttattctaaacccaatccaaaggtggatatattaaaatgctcatataaattgtgataattactgttgaatcttagtgctaaaacaagccaactatttgtctaccactatagacatactgtgacaggataatcaaatatattttgccattctaaaatttgtttctaagattattttcctgagcattttaacatcacgttaatcatctctctcaatctcccactgcctctatggagaaaaagaaaaaagacagaccagttatattcctcaccatttag

SEQ ID NO: 113807 - DNA, 551 bp, Homo sapiens
atatgaaaacactgctggtttggtggtatttggatttctaatcctttcccctaatctatctgccggcattaactcttcatcatccttgtcatacatgtattccacctgggtttatagttgcagttagtggagacagggtggaggatgwtcatttcatctttcctggtactagaaccagtaaaaaagacaaaaattctaatttcgctcaaggacctaagtttcaaatatatggtagcaaggagatggaggacacagaaaatttggagaacagggctaatcatagagtcagaagtttgctttattctccagaagagtaatagctagatgaacttgtcatgagaatgacatagccatgccacttgaaatctctagtgttttacacatttatacattattatatatctcagaatattatatatatatataatatataatattatatatattataaagtctatagtttagaaaagatgcattctggctaaggctaatcaggcagaagtcatagtggacttaaaacacacagacaaaccaaaacaaaagaaaagaaa

SEQ ID NO: 113808 - DNA, 607 bp, Homo sapiens
gtaagctttcatgatgctatctaaagtggtacaacatctttatacagactatggaatactgttactgtaatatctataataatcactaaataaaatgcaaagaggtacagcaaaaataaaacaatagatttatgtatgggttttctgttctgttccataggtctgtgtgtttgtttttatgccagttccatgctatttttgttattatcacttggtagtataaagtaatgcatagcttagcgactggaaaaaaatctgataagtgtatcattggcaaattcattgttgtgcaaacatcagagagtgttaaacatagatactatagtctagcatactcctggggtatatggcatagctyatttgctcctaggctataaacctgtacagcatgttactgtagtgaatactgtaggagattataacacatggtatttgtgtatctaaacatttaagtggtacagtaaaaatacgatatcataatattatggaaccgtaatcatatatgcagtccatcattgactgaaacatgtttatataatgtatgattgccagtgcatgcaatgcatggctgtctactgtttttggtatgagaagaaaaaggataggg

SEQ ID NO: 113809 - DNA, 557 bp, Homo sapiens
aattagcttttattatgttctagtgctagtcattaattgtgctaatactttatacacaatcctatataatttaatcctcaaaacacttgtgaataatagttgctgtcaccatttttcaaatgaggatcacatgaataaagtcttacatttagaagtgatgaaatgagaattcaatcaagtcctgtccaagtccaaaattatgccttctcatcagaccagttttattgtgtcctttactcaccaaagcttttcaggagagctacaagattcagtctgaatctttattctccatattcacccataccggatgatctagttagaagcactggaatagtctattctcatgctgctataaaggactaccaagactgggtaatttataaagaaaagaggtttaattgactcacagttcagtggggcaggtgaggcctcaggaagcctacaatcatggyggaaggggaagcaaacacgtccttcttcacatgtcggcaataggagaggtgccatgacaaaggaggaaaagccccttataaaaccatcagatctcatgagaactc

SEQ ID NO: 113810 - DNA, 606 bp, Homo sapiens
tggaacagcacatgtaaaaggacttcataatgaacattttattgctcatagtagtaattaattaaaatggaaaataattattaatttgtcatgctgcactagatactttgaaaatcattacatattcatcatttcatttaatacagcaatsctatgagctcgggagggtatgctatcatgctgttttacagatagtaaaattttgctctgtttacaattagtgtttataatacttataattcttctgatattaaacagaaggtattcaaagatagatattttcaagagtggtgttattatacacttatctgtcaccattatttcttcagtgttgtaatgaatttgttagtactaataattaaatttccaaatttctctagagatgcacttttaacaatatgaattacatcataaatggcattattcttatagcaacctgaaacttcttcatttgcattctaacatgcttcgttgagtggaagaaaaataatagggtaaaaactagaatgctagaaatggcatatattaatacatcacatcagatgaattattctgttgaatatatgctgatgtattttttaaaagcataaaaatacaaagatatcc

SEQ ID NO: 113811 - DNA, 595 bp, Homo sapiens
gaaaacaagcttaagcctcattgtctattgtgaaaacctccttttgcctttttgtctattaaaaaaaagaagtggccgaacrtggtggctcgtgcctctaattccagcactttgggaggctaaggtgggaggattacttgagcccaggagttcaagaacagcctgggcaacatggtgataccctgtctctacaaaaatttcatcagatgtggttatgcatacctgtggtcacaactacttaggaggctgaggcaggacgatccatcgcttgagcctaggaggttgaggttgcagtgaggcatgttcacaccacgtcactccagcctgggtgatagagcaagaccctatctcaggaaaaaataagtaataagatggcaaaattatgacacattttcctgtgaacagcacacttcagggtctgaggcagctgcagtttcaactggagagatctagatagcattaagtgtttatttaggtgtggcagactgaatcctcttgacctgtgaacatatactatttgactagagtgatgttttgcctttttaaattaaatttgagtagttttggttggagcattactactatttgcaacaat

SEQ ID NO: 113812 - DNA, 553 bp, Homo sapiens
tttcacactttttcaactagtccaaattcaaaatggttattccttaaagattctgtcaccagaaatatactcattcaaggaactttgtactctgtcatatgtgaataaatcagcttcatgttccrggtctattttatgctatgtaacttttttgtagacaacattaatgagattttagtctatcctgttattcctatattggagtgttttgtgttttgacttacttatcatagcttgtatttacaaagatgggactcagtaaagttggaaaatatatgttatgaagcaaatttatataactggacataacccatgaaatactgagtatgtctttaaatatatcagataaaattacataattaatactgcaatcacattttatgaaataaaggttttttaaaggaaagagcaaaaatatctctaagagttataactgagattgtctttttcatccatcaatcttctaaagtatatgttccagaaaaaaaaaaaaaacatggtgcactaaatcttagcaaagataatggatttctacagaagtaccttaagatca

SEQ ID NO: 113813 - DNA, 537 bp, Homo sapiens
acttttacagacatttgtaaatattctatgttattttaggtagtggtaatttttatggagaaaactacaatgcctcccagcttgtgtgggacagtttggatttgtgcctgttttcctgctgtgatgattaagattgcctctttttactctcaaaaatgtcctagttttggtgaccctctctgtaaaagaaatttcaaaacaatgataatatgaaaatatgtatgggaggggttcttttggactggatgrtcaggaaatgtctcactaggtgatatctgagctgagaattaaagtaatcacacagctcttaagggtgaatttgaatttgagaggggaaaactgtgtagtcaaacaaagacgtagtttagattctgacaaacctgattttatacctcagccccagcacaccctaggtttggtactttgggcttggctccctgtgagatactcaatagtataccttaagtctaataatgtgattcagaaatgaacacattaaattacatgggcaaagaaacttatatttatttatgatat

SEQ ID NO: 113814 - DNA, 537 bp, Homo sapiens
acttttacagacatttgtaaatattctatgttattttaggtagtggtaatttttatggagaaaactacaatgcctcccagcttgtgtgggacagtttggatttgtgcctgttttcctgctgtgatgattaagattgcctctttttactctcaaaaatgtcctagttttggtgaccctctctgtaaaagaaatttcaaaacaatgataatatgaaaatatgtatgggaggggttcttttggactggatgaycaggaaatgtctcactaggtgatatctgagctgagaattaaagtaatcacacagctcttaagggtgaatttgaatttgagaggggaaaactgtgtagtcaaacaaagacgtagtttagattctgacaaacctgattttatacctcagccccagcacaccctaggtttggtactttgggcttggctccctgtgagatactcaatagtataccttaagtctaataatgtgattcagaaatgaacacattaaattacatgggcaaagaaacttatatttatttatgatat

SEQ ID NO: 113815 - DNA, 628 bp, Homo sapiens
tgcctcggcaacatgatgagacccaatctctatttaaaaagtaaataagaagcctgatattttaaaacacacttacaagagtataataaccaattgactgattatgctttccccttccctccccctccccagaaactgtagcctaaaatattttacaaagagaaagctagattaatgctgagctgtatgaggaactacaatggttgcaactttcttgcagaagataaaatgggagaaattatatgcagccacttagacaggtgccagttcagggactatgcaatgaaaaccagaagcaaaccgtgagagagaatgaagtttctaagcagcgccttccttgaagacgtattcaggccattctgccacyaaaccagaagtgtgccatatgctgatggaaatccaataaaacccatccacctaaaagctttcctctgtcgcagagaaactcatccaaaaggagatattgcagtaatagtgtaattaccatgatcatctcatgactgatggacaggagtgtcatggcagaaggtttacttcctcaagacttttgacacagagaacacagtagtagttaagtctttgtcatgtgactacagaaccaatcgaatgaatttacacttatctgtta

SEQ ID NO: 113816 - DNA, 432 bp, Homo sapiens
ggaattcaaaatttttatgggaaagaaatccaataccaataaataaattgcctgcaaataatcaaggtwtgcaagattggactataattgttggatactgaagggcaaactgaccctggaaataaaggacttggaggcattcgagacattcagaatactcaatcatgtacaaatttttacacaaccaaaaagcagggagttatataattttgaggtcattctaacagccatattgcaaaaaaaaaaaaaattaatccttgcaaaaataaaaattaatccttgaaattagaaacattaataaatatgtcatgctaatgattaagatctttttcagttgaatgaaatataagaataaaaaagaaacaatgttttaccttggttcttaatcattaaccctccttctgaagagtctaaagaacttcacaaataaaa

SEQ ID NO: 113817 - DNA, 432 bp, Homo sapiens
ggaattcaaaatttttatgggaaagaaatccaataccaataaataaattgcctgcaaataatcaaggtttgcaagattggactataattgttggatactgaagggcaaactgaccctggarataaaggacttggaggcattcgagacattcagaatactcaatcatgtacaaatttttacacaaccaaaaagcagggagttatataattttgaggtcattctaacagccatattgcaaaaaaaaaaaaaattaatccttgcaaaaataaaaattaatccttgaaattagaaacattaataaatatgtcatgctaatgattaagatctttttcagttgaatgaaatataagaataaaaaagaaacaatgttttaccttggttcttaatcattaaccctccttctgaagagtctaaagaacttcacaaataaaa

SEQ ID NO: 113818 - DNA, 594 bp, Homo sapiens
tgtaaacttctaaggattgctgagtgagacttttctaaccccatatgtttttatgtaaaatattggagtaatttaaaacagacagaaatgagaaaatctgtctcataaaatggtgtaattttgctaagtgcctactctaaatcatctcccaccaccactctgggcttcatatttttactattatctcctcctttacctcatagttacacmtttagaagtatttataacactggtcaaaagcaaagtcactgaatacagaaactggatcttgtttaccactgtatatactcaacgtgcctaatgcctggcacatagtaggcactcaataactattagctatatgaattaatgaataagatatttttgtctctatgttattaacaacttgttttgcatccctggctttaaaattcccactttgtcaaatgtgctttttaatgtttactataactaacataatttttaaattccaggccagtttggtttagctaacaaatatcttcggagtatctacagttttctggatcattaagaaaaaaaaatttcaattaaaacttatgaagaacagtactgttcaatagaaatataattata

SEQ ID NO: 113819 - DNA, 594 bp, Homo sapiens
tgtaaacttctaaggattgctgagtgagacttttctaaccccatatgtttttatgtaaaatattggagtaatttaaaacagacagaaatgagaaaatctgtctcataaaatggtgtaattttgctaagtgcctactctaaatcatctcccaccaccactctgggcttcatatttttactattatctcctcctttacctcatagttacacatttagaagtatttataacactggtcaaaagcaaagtcactgaatacagaaactggatcttgtttaccactgtatatactcaacgtgcctaatgcctggcacatagtaggcactcaataactattagctatatgaattaatgaataagatatttttgtctctatgttattaacaacttgttttgcatccctggctttaaaattcccactttgtcaaatgtgctttttaatgtttactataactaacataatttttaaattccaggccagtttggtttagctaacaaatatcttcggagtatctacagttttctggatcattaagaaaaaaaaatttcaattraaacttatgaagaacagtactgttcaatagaaatataattata

SEQ ID NO: 113820 - DNA, 564 bp, Homo sapiens
atattcctttaaaaatctttacattctttatttttctttttcatgctttactacactagctaggatatatggtaaatattgaacagacaaggatagataatgataatgaaaaccttagtttcattcctgacctcactgggaaaggttttaacattttacatcaaatacaatttttaaaagttctttgtagatgtcaytgattacattcaggaagttctcttctactcctaagttgcaaatattttcttactaaaaaaattgtgttgtactttttcaaatgcttcctctgcatctactgagataatcaaaggattttaaattttattctgttaatttggtaaattacattaactattttttaggtaaaatttatatagtgtaaatggatgttaagggtactaataaatgagttttgacaaatgttataattttacatgtttttttcttaataggaaagaacaagagaaaggaaggaaggaaggaagttataccaggtatatacatttgtcaaatgtatgccagtattcccattgagattcacaaacatggaacatttccatcata

SEQ ID NO: 113821 - DNA, 622 bp, Homo sapiens
tggcccttcacagaaaatgtttgctagcccctacattaaaaggtacctactgcacgataatattctgtggtggttcttaggccaaacctagttttagctagagggtggtcttcgtgttcttattgcctcccaatccaaagtacacatgtttagcaaataaaacacaactttggcattttatttcagtcccttcttctagtcactgtgactcctagcacatttctttggacatagcctgcatgagttgatgaaattcaggattaattttgggaactgatgaaacatggcttcatttggcattcctaggcttcacgattcatgctttctttgccactggactttatttagataattttcttggctcataatagctacagggaatttataggaagattacatcgtccgttctctcttataccaaaatattgttaatgtggtgtgaaaagaggaaaataaatgttaatttattcttaaaactagaatcttcgtatrgccagtctcctctctggataaaggagaggactgacctagctggcccctaaggtcactgtatggttctcaaattttgaaattaagaggaccgtggctgagagggagtcctctttcagcaagaaaaatacag

SEQ ID NO: 113822 - DNA, 493 bp, Homo sapiens
tttggttgaaattatggatggatgtgtggataaaggaacaaagaattaggataaaatgctaaaaatctgaatgctcaaaagtaaaagggagcctgaaggaaaaaaaacaaatgagttgctaggatatgattgggagacacacacaggctttrgaatcaaacacacactgagtttaaggctcagcactgataccgtgagatgctggggcttcgaaaatgatactccagagtatggcagtttggcatcctttggcatcctttgtttccttttcttcaaacccaggatctcctgtttgtgcggaatatgttgaattcaaagactgaaagggcctcaaagattgaaagattgaaagggcctcagagcagtctctttgtgaccttctcctgctctcctttctctactaaggtaggtcatagatactggaatttctcttccccatggtgagtcatagaaactagaaattatactctaacctacccctatctttctgtgt

SEQ ID NO: 113823 - DNA, 493 bp, Homo sapiens
tttggttgaaattatggatggatgtgtggataaaggaacaaagaattaggataaaatgctaaaaatctgaatgctcaaaagtaaaagggagcctgaaggaaaaaaaacaaatgagttgctaggatatgattgggagacacacacaggctttggaatcaaacacacactgagtttaaggctcagcactgataccgtgagatgctggggcttcgaaaatgatactccagagtatggcagtttggcatmctttggcatcctttgtttccttttcttcaaacccaggatctcctgtttgtgcggaatatgttgaattcaaagactgaaagggcctcaaagattgaaagattgaaagggcctcagagcagtctctttgtgaccttctcctgctctcctttctctactaaggtaggtcatagatactggaatttctcttccccatggtgagtcatagaaactagaaattatactctaacctacccctatctttctgtgt

SEQ ID NO: 113824 - DNA, 493 bp, Homo sapiens
tttggttgaaattatggatggatgtgtggataaaggaacaaagaattaggataaaatgctaaaaatctgaatgctcaaaagtaaaagggagcctgaaggaaaaaaaacaaatgagttgctaggatatgattgggagacacacacaggctttggaatcaaacacacactgagtttaaggctcagcactgataccgtgagatgctggggcttcgaaaatgatactccagagtatggcagtttggcatcctttggcatcctttgtttccttttcttcaaacccaggatctcctgtttgtgcggartatgttgaattcaaagactgaaagggcctcaaagattgaaagattgaaagggcctcagagcagtctctttgtgaccttctcctgctctcctttctctactaaggtaggtcatagatactggaatttctcttccccatggtgagtcatagaaactagaaattatactctaacctacccctatctttctgtgt

SEQ ID NO: 113825 - DNA, 493 bp, Homo sapiens
tttggttgaaattatggatggatgtgtggataaaggaacaaagaattaggataaaatgctaaaaatctgaatgctcaaaagtaaaagggagcctgaaggaaaaaaaacaaatgagttgctaggatatgattgggagacacacacaggctttggaatcaaacacacactgagtttaaggctcagcactgataccgtgagatgctggggcttcgaaaatgatactccagagtatggcagtttggcatcctttggcatcctttgtttccttttcttcaaacccaggatctcctgtttgtgcggaatatgttgaaytcaaagactgaaagggcctcaaagattgaaagattgaaagggcctcagagcagtctctttgtgaccttctcctgctctcctttctctactaaggtaggtcatagatactggaatttctcttccccatggtgagtcatagaaactagaaattatactctaacctacccctatctttctgtgt

SEQ ID NO: 113826 - DNA, 387 bp, Homo sapiens
tttcttatccattttttttctttaagagatagagtcttgttctgtcacccaggctggagtgtggtggcatgttcttggcacacagcaacctcaaactcctggtctcaagcaatcttcccacctcatccttccaaagtgctgggaatacaggtgtgggccaccatgtctggcgcacrtcttctttatcgaggttgtgaaagaaatgagatgaaggcatctaatatcatttttagttaacaatgttatttgaaatatagtatagtaagaaaataaatagattaaacttgaaaaataaaactactggaaatatttcaaatgttggacacacaaatttgtagaaaatggcagcaacttgatttggaaacagccttacacccttccataatg

SEQ ID NO: 113827 - DNA, 554 bp, Homo sapiens
acaagagaatgtgacatgttctggtactagaaagcagttacgtgaggctattgggctttgaagcataccgttttmgggaatgaaatgcaggaagcagcctgagggtagaaagactgagtttccttcgtctttgtgcctttaagtacaaaggctagtaagtactaggctgtgagaaaatgtgcttggaatgagtagcgcacaatacttcccataccaaaggctcctgttacctagaactcggtagatgcacgggaaacatttataagtgaatatttgttagcaataataataaatattataaaaataaaaacaataataagtctacagcctcagcaggtgaaattatattcttccagataaagcctctaaggtcacaaagcccaccctaaaaatacaatgtataaacgtgatgtcacaggtttcaaaaatatggtgtagttgtaatgtacagctcctgaaatgggtgtcagtgccacatctcagcttgtgtaattaatttcttttcttgtgctaaacccatttataaaccaacgaagttttatgcctattttatt

SEQ ID NO: 113828 - DNA, 554 bp, Homo sapiens
acaagagaatgtgacatgttctggtactagaaagcagttacgtgaggctattgggctttgaagcataccgttttcgggaatgaaatgcaggaagcagcctgagggtagaaagactgagtttccttcgtctttgtgcctttaagtacaaaggctagtaagtactaggctgygagaaaatgtgcttggaatgagtagcgcacaatacttcccataccaaaggctcctgttacctagaactcggtagatgcacgggaaacatttataagtgaatatttgttagcaataataataaatattataaaaataaaaacaataataagtctacagcctcagcaggtgaaattatattcttccagataaagcctctaaggtcacaaagcccaccctaaaaatacaatgtataaacgtgatgtcacaggtttcaaaaatatggtgtagttgtaatgtacagctcctgaaatgggtgtcagtgccacatctcagcttgtgtaattaatttcttttcttgtgctaaacccatttataaaccaacgaagttttatgcctattttatt

SEQ ID NO: 113829 - DNA, 554 bp, Homo sapiens
acaagagaatgtgacatgttctggtactagaaagcagttacgtgaggctattgggctttgaagcataccgttttcgggaatgaaatgcaggaagcagcctgagggtagaaagactgagtttccttcgtctttgtgcctttaagtacaaaggctagtaagtactaggctgtgagaaaatgtgcttggaatgagtagcrcacaatacttcccataccaaaggctcctgttacctagaactcggtagatgcacgggaaacatttataagtgaatatttgttagcaataataataaatattataaaaataaaaacaataataagtctacagcctcagcaggtgaaattatattcttccagataaagcctctaaggtcacaaagcccaccctaaaaatacaatgtataaacgtgatgtcacaggtttcaaaaatatggtgtagttgtaatgtacagctcctgaaatgggtgtcagtgccacatctcagcttgtgtaattaatttcttttcttgtgctaaacccatttataaaccaacgaagttttatgcctattttatt

SEQ ID NO: 113830 - DNA, 549 bp, Homo sapiens
ggtatctgagaaaacccaacatctaattcaaaggtctggagctttggccaatagagagctttctaatcatgctgtgggggggtgttttcctagttcagagacatatgggatggatgtatccatgtccatttgcattctgctaatggcacacaagctgtctccttcttacaatccattctaaagcatctactcctttggccagcaattccccacmctcgttccataactaacttgttccacaacctaagggctgggatacaattagtgccctcatttccctttctttctgcctacagggaaaataatacttttcagaatatagattagagtttgtaaattgaacattatccaatactatttccagcaaaagtgataccaatatttagtacttgtcaacatttcaaagccaggggcatatattaacaaatgggaaagcatctataggtttctatgagaaagaaaatatggcatggacaaaacagtgactgagttttttcatacagtgtcacagaggatgcaaaaatagaatgaaattaacagccccagtct

SEQ ID NO: 113831 - DNA, 549 bp, Homo sapiens
ggtatctgagaaaacccaacatctaattcaaaggtctggagctttggccaatagagagctttctaatcatgctgtgggggggtgttttcctagttcagagacatatgggatggatgtatccatgtccatttgcattctgctaatggcacacaagctgtctccttcttacaatccattctaaagcatctactcctttggccagcaattccccaccctcgttccataactaacttgttccacaacytaagggctgggatacaattagtgccctcatttccctttctttctgcctacagggaaaataatacttttcagaatatagattagagtttgtaaattgaacattatccaatactatttccagcaaaagtgataccaatatttagtacttgtcaacatttcaaagccaggggcatatattaacaaatgggaaagcatctataggtttctatgagaaagaaaatatggcatggacaaaacagtgactgagttttttcatacagtgtcacagaggatgcaaaaatagaatgaaattaacagccccagtct

SEQ ID NO: 113832 - DNA, 549 bp, Homo sapiens
ggtatctgagaaaacccaacatctaattcaaaggtctggagctttggccaatagagagctttctaatcatgctgtgggggggtgttttcctagttcagagacatatgggatggatgtatccatgtccatttgcattctgctaatggcacacaagctgtctccttcttacaatccattctaaagcatctactcctttggccagcaattccccaccctcgttccataactaacttgttccacaacctaagggctgggatacaattagtgccctcrtttccctttctttctgcctacagggaaaataatacttttcagaatatagattagagtttgtaaattgaacattatccaatactatttccagcaaaagtgataccaatatttagtacttgtcaacatttcaaagccaggggcatatattaacaaatgggaaagcatctataggtttctatgagaaagaaaatatggcatggacaaaacagtgactgagttttttcatacagtgtcacagaggatgcaaaaatagaatgaaattaacagccccagtct

SEQ ID NO: 113833 - DNA, 576 bp, Homo sapiens
taactcaattattgatcccctgtgatctttataagaagcagaaattaagccataggtgacactgccatagatgcaggtcacatcacaaaagggtggacaatagtatcctaaagatcactgtgtaacaattctcatatcctgcctgtccctgacttcttagattgtgtaaaaggacaacgtgttgatgagaggatgcggttctaactaatacaataaaaaaaacaaaacaaaacaaaacaaaacaaaacaaaacaaaacacctgggtctccctggaactttcaggactaaagttactcattcatcagatagaaataggtgttggaattttactaatttgcagcagtgcagagctatgcgtgtctttattatacacataggggcgcatggtttccggaggctatgctgtgaaatggggcatctgtcttgcccagatgaagtgtctgcaaaggaccttctgtatacagtgtttcccacctccacmcccatacagtcccactttactattagaccaaagtgcctgcaactatcttatgaaactattaggtatttccagacactctcatggatggaagttt

SEQ ID NO: 113834 - DNA, 551 bp, Homo sapiens
ccactttaatcctcaatgcttgtgagatgatccagagtttgactgcatatttagcttttcagggatactgcagataatgatgagaattattcatctttcttcagcataaaccgtatttaacgaggggctagaaaaataatataaagaggctttatggtcaagtttcagagctgagttaggaaagtaattccaagtagtagagtttcagcatattttatttcctccttttacttctctaaattttccaaatggatttatactatttttaaaataaaaatggtcaagcctttaaacatttgtgccaattatgtagatagcctgcaaagctgagacacttctcactatgctaatcagataactggctcargctttctattttatttgataaactttggtcattctgaatttccaaatatcaccaaaaattctgactttgataaataatcaaatatttagctctattgtgtattttcttacaattttcaagtgatatgggtggcccatattatattcaccttaaattttattagaaaaagaatactttcgccggt

SEQ ID NO: 113835 - DNA, 551 bp, Homo sapiens
ccactttaatcctcaatgcttgtgagatgatccagagtttgactgcatatttagcttttcagggatactgcagataatgatgagaattattcatctttcttcagcataaaccgtatttaacgaggggctagaaaaataatataaagaggctttatggtcaagtttcagagctgagttaggaaagtaattccaagtagtagagtttcagcatattttatttcctccttttacttctctaaattttccaaatggatttatactatttttaaaataaaaatggtcaagcctttaaacatttgtgccaattatgtagatagcctgcaaagctgagacacttctcactatgctaatcagataactggctcaggctttctmttttatttgataaactttggtcattctgaatttccaaatatcaccaaaaattctgactttgataaataatcaaatatttagctctattgtgtattttcttacaattttcaagtgatatgggtggcccatattatattcaccttaaattttattagaaaaagaatactttcgccggt

SEQ ID NO: 113836 - DNA, 551 bp, Homo sapiens
ccactttaatcctcaatgcttgtgagatgatccagagtttgactgcatatttagcttttcagggatactgcagataatgatgagaattattcatctttcttcagcataaaccgtatttaacgaggggctagaaaaataatataaagaggctttatggtcaagtttcagagctgagttaggaaagtaattccaagtagtagagtttcagcatattttatttcctccttttacttctctaaattttccaaatggatttatactatttttaaaataaaaatggtcaagcctttaaacatttgtgccaattatgtagatagcctgcaaagctgagacacttctcactatgctaatcagataactggctcaggctttctattttatttgatraactttggtcattctgaatttccaaatatcaccaaaaattctgactttgataaataatcaaatatttagctctattgtgtattttcttacaattttcaagtgatatgggtggcccatattatattcaccttaaattttattagaaaaagaatactttcgccggt

SEQ ID NO: 113837 - DNA, 478 bp, Homo sapiens
caacactggggattccaattcaacatgaggtttgagcagaaacaaatatccaaactatatcagcctttctgtgcagcattccttcctctagaatatggaacaggatcccttctgaaggaagatcttatgatctacaataagattagggaataatccccaaaaatgtaaccatggaatccttttctcacactagattactgttctctccaaatacaatcttgaaaatgttaatgtggtrcaaggatgaggaatctcaaatctgggtgttagctgtagcagttatttaatttaattttatttggctcttaaagtactattcctgtattctagctactctctcccaagcaattcttttctttcagtagactttttttattttccccagtcatattttcagtttgagagatactcaagtgttctgagctatggctaagccattaatgaacatttcaaagggcataaaagatggcagaagaca

SEQ ID NO: 113838 - DNA, 478 bp, Homo sapiens
caacactggggattccaattcaacatgaggtttgagcagaaacaaatatccaaactatatcagcctttctgtgcagcattccttcctctagaatatggaacaggatcccttctgaaggaagatcttatgatctacaataagattagggaataatccccaaaaatgtaaccatggaatccttttctcacactagattactgttctctccaaatacaatcttgaaaatgttaatgtggtacaaggatgaggaatctcaaatctgggtgttagctgtagcagttatttaatttaattttatttggctcttaaagtactattcckgtattctagctactctctcccaagcaattcttttctttcagtagactttttttattttccccagtcatattttcagtttgagagatactcaagtgttctgagctatggctaagccattaatgaacatttcaaagggcataaaagatggcagaagaca

SEQ ID NO: 113839 - DNA, 585 bp, Homo sapiens
tgcactgcacacttctgattccatcatatcctgaatgaaccaaatttgattgtgaatagagtacacaaaagcttctgagataaaatttaaaccttaagaactgcctgaaatttggtggtgattttcaaatatttgtatagattttctttatgagaataaaatctgactgacttatttttattatgtataatatttttacaggaattgagaagacttacactactttttggtataatatttttagttacaaagtttttattataaacttttattatgagctctttataaaccacatttttactctgcttctatttrctaatttttccctccaagaagtcccacaaacttaaaaaaatagaactttataaatatactttgagaattatgctgttttgtgtttgtgttgtttgttgtattttttttttttttttttttttttttgagatggagtctcactctgttgccaggctgtagtgcagaggtatgatctgggctcactgcaacctccacctctcagtttcaagcgattctcctgcctcagcctcccaagttgtgggactataagcgcgcaccaccacacccagc

SEQ ID NO: 113840 - DNA, 521 bp, Homo sapiens
aacaactgatgcaaagattgccttcctctttagagacttatctttgaatctgttatattcttgaaagtgggcaaatcaggcttcctgaggttggagattaaagttctcaacagaactactaccattcgactcagcagtaccactactaggtatctaccaaaaggaaaagaaatgattacatcaraaagatacctgcattcgtatgtttactgcagcactattcacactagtaaagatatggaatcaaccagacagtccatcaatggttgattggataaagagaacatggcgtatatatgatagaatattcttcagccataaaaaagaatgaaatcctgtgttttgcagtaatgtggctggaactggaggccattatcttaagtgaaacaattgggaaatagaaagtcaaatatcgcatgttctcataagtggtagctaaagaaagtacacacagacagagtatggaataatagacagtggagactaggaagtgtggaagacggtaagggatgaaaaattat

SEQ ID NO: 113841 - DNA, 562 bp, Homo sapiens
gctggtattacaggcatgagccaccacacccagccccatcttacctttgactgaagatgggactgctgtctccttgcttccacctcccacacttgctcctgtggctccaaacttcaaacaggatctttctttgcctggcccactcctcctcatcctttacttagaagattagatcttttccagggaatcttcattcccaccacccggctctgggctcactcctcgggtgcccctctgggctcccacattacggttgctttcaggtccagcttccgcatgtggactatgaaactgtgaggacagccaagggtcakcatgtgcgaggaaaggcagggaagaggctagacgaggcactggggagcagggaggcccaagacccttaaatccacagacaggaagccctggctgaagggccaagtaaccaggtgttctacttcaatcttggcacccactgtatgcttagaccttgactcacacatgttcagctttaagccactgcacagatgagcaaacggggcggagattgcaggctgatcagtttgaagagccaagatcatctagc

SEQ ID NO: 113842 - DNA, 586 bp, Homo sapiens
taatattattaatagctatccaaaaaacactttccctcccactcaacaaccatccagggggaagtaaaagtcctgaaaagagaccagttcaacatggcctctaccctggcagaaacaaaaagtgagaagagaagaaaacagaaattaactaagaggtgttgccagtgtctctcaggagtggggccctggctgtcgccaggggtcatgaaaggcagagcctgcagcatgtagtagggcagccaggagaccttgcagccttatcttcctcacccccgcacatccacatcccaacttaggtgtcatggaaatccttcagcagggttctcctccactgctcggctacatgcatctggttctccaagtcccctctgtcatagctgtctgcatgytccactttccatgagaggttttcaatttcagcctcctgctcagcctgctggtattcaaacagctcattcctgggtccagactccatgtaatatgtatatgggttgatgtactgcagggtgtatcaacacctggccaagagcttggctgcactctgtaggtactgccagtcaatccatgtccccagattgttcatgac

SEQ ID NO: 113843 - DNA, 586 bp, Homo sapiens
taatattattaatagctatccaaaaaacactttccctcccactcaacaaccatccagggggaagtaaaagtcctgaaaagagaccagttcaacatggcctctaccctggcagaaacaaaaagtgagaagagaagaaaacagaaattaactaagaggtgttgccagtgtctctcaggagtggggccctggctgtcgccaggggtcatgaaaggcagagcctgcagcatgtagtagggcagccaggagaccttgcagccttatcttcctcacccccgcacatccacatcccaacttaggtgtcatggaaatccttcagcagggttctcctccactgctcggctacatgcatctggttctccaagtcccctctgtcatagctgtctgcatgttccactttccatgagaggttttcaatttcagcctcctgctcagcctgctggtattcaaacagctcattcctgggtccagactccatgtaatatgtatatgggttgatgtactgcagggtgtatcaacacctggccaagagcttggctgcaytctgtaggtactgccagtcaatccatgtccccagattgttcatgac

SEQ ID NO: 113844 - DNA, 566 bp, Homo sapiens
ttttgacagaaaaatctaaagcaaatatgacaaaactctaaaatttgatgaagctcatgggcccattcaaaggtattttttattctctataactttttttgaatattagaaatcttaaaaaaataaaaaacataaatgactaggacaagagattgaaaatgtagattatcaaaatattttagctatacactcctcatcttttattcctcttccctctygttgtgaattcagtggcctccttcattatatattatactcctgttatattagagatcatagggaatttgaatttggggacattttaggattttacaaaatatctactcctaattttatagcaaatttgaggatatagagaagataattaaatagtattttgacagatttttctgtactcaaagctttctcctgaatataagtaaaaaacaagatgttatttattactttgaatctatgatgtttcaaattagctacttggtaatcaattaaaggaagagagactaagtgtgactaagtgtaattgattaaattactaaaatgatattgcacctacaaaggttgtcata

SEQ ID NO: 113845 - DNA, 566 bp, Homo sapiens
ttttgacagaaaaatctaaagcaaatatgacaaaactctaaaatttgatgaagctcatgggcccattcaaaggtattttttattctctataactttttttgaatattagaaatcttaaaaaaataaaaaacataaatgactaggacaagagattgaaaatgtagattatcaaaatattttagctatacactcctcatcttttattcctcttccctctcgttgtgaattcagtggcctccttcattatatattatactcctgttatattagagatcatagggaatttgaatttggggacattttaggattttacaaaatatctactcctaattttatagcaaatttgaggatatagagaagataattaaatagtattttgacagatttttctgtactcaaagctttctccygaatataagtaaaaaacaagatgttatttattactttgaatctatgatgtttcaaattagctacttggtaatcaattaaaggaagagagactaagtgtgactaagtgtaattgattaaattactaaaatgatattgcacctacaaaggttgtcata

SEQ ID NO: 113846 - DNA, 639 bp, Homo sapiens
agcttttggtacattccttttttctaaatactgaatatcctggagaaaactggaaaattaatgtcttactccaattaatcataaagagcayatgccatgtataaatcttagatcttataaattatgatttgaatgcaaaacaattgttgctccctcaagattttcaacagcttccaaagatgaacattttctccagaatcaggctattatccactactctaccaaaaagagcacactgatgggcagaatcaccaatttatgagggaaaagactttgtataacagtgtaatctgtgattctgcctgttcctttaggccttcttctgatgctggaagattaatttgccttcagagcaactgacaagcattcatttaccgaataatgattttctaaattcataatttatcttgttatatgatgtcactaattacgtaaagctataatttacaaggttgaaaattcttttcagctagtcactgtcattggtttgatgtagttgtatgcgaaatgaatacttccctacacagtacctcctcgggtttagagactggacaaaaaagaaagccagggtcccttatgtccttttcatcataatataaactgcattataaaggacttatctataaatatgaggccaca

SEQ ID NO: 113847 - DNA, 562 bp, Homo sapiens
ttttgcagtttcaaggctgactatataattatggattgtcrgaacctgaaggccccacaacaatcgcagtgggtggggaaagacctgaactccaggctcagccattcccctgccacgcgaccttggacacgagctaagcctcagtttctttatccatagaatggaaatcatagtcctcgtcccatctgcctctcaggggaccatgaggattagattcaaatgagagcaggatggaaatcatgaagctctatgcaattgggggtcagggattgtgactgctttttagttgtaaatgttcagcatgttagagccagtacgcatgttagagattcttcactttacaaaagaacactgaggtagcagcaagtggacctctcccctcagggaaccagattctcctttcgggtattttttctattacacaatagtctcccccaaatctcacctatttgctcttggaaaagggtttagaggaggggttctctgaagtttcctggaaggcctcgctctactacagattgcatggataaggaggctctaagaactttctggctgggaccag

SEQ ID NO: 113848 - DNA, 616 bp, Homo sapiens
tttgatttggaaaatattaagtgtccaccatgtgcaggggcctttcacatgaattatcttacatgttaaawactcacagaaactttgcagaatatagtgggaccataactccttttagggctctgggtatacaagaaatgttattattctttatttcctttaagtcaactttggactctttgagttcttgttttaccaagaattttttttttttttttttttttttagcattctgcttcagttgttattggggtcccccttcctgtcttccttcctccttccctttcttttatccacctacttcccttaatcccctctatcccctttcattccccttccattctgctcttccccacctcttcataagtcccttctgactccctcttccctctgctcttcctcctcccaccttccttttctctctgccttcttaaccacacagagctccctgtgggtggggctgtggtccatactaataacagtaaattcccatttatcgagtgctcactgcatgccaggtgcatggatgagtctaattagtcctcacagcaaccctgtgagaaaagttgattggttatgatgctttaggctgcaagtaacaaaacccaactaacag

SEQ ID NO: 113849 - DNA, 545 bp, Homo sapiens
gaattatgtgatgctttcctttcaggagtagttaattttggcagtcagtttagcaggaagcaacattcccatttccagcccacgattcagagaaccaaaaggttctctttcaaatatgtgtagttttgattataatttccaaaaatttagagcctcattgtgatacaaataaagtgagcatatgtcaaagatttacttaattcattaatgaaggaacagcgacttggtaaggcaggtccaaagtgaattggagagagcacaagtaattatggcagaaaaacaggacgctacaattagattgctaayatagaatcaaagctggttaatgtcctataggacattaaagccacaattttgctgatatcatttgaatctccaccaaataaaattcatttgcaaagctacgagagaggagtcatcattactataggacaagtattatttgcatactttttgcttatctacaaattaacatctttactttagagctgtaaaatatattaataagtagtaaatgggaaattaaacaaaggcacactcaccta

SEQ ID NO: 113850 - DNA, 610 bp, Homo sapiens
tcccagagcagtatgtccaaactagatttcacatgatgagagtttatgttgttattctgtcaatgccttttagattttcagaaaaaaaatattgtaggttgcttacataatactttgttttactttttgctgtcttatctaaaagaacttccttaatgtgtctttttccagttcattggtattttgtaatttccagcttgaatctcacttattctytttttcatttttttcaatcattaccatgctgtggatgcatgtgaatgcataactctaaaatcaaatctttatgaatctttattatagccagtctttttgtttctatattacagaagaagaaatggttggaaataaatataaatattttgactataactggttgctaggtaaaccagtgagagaactagacataatattttatttatattagaaacagcatttctaaagcagtgttttttggtagactaattacttaacctggaagctgcacacaagaattttataaagacaatgcaacttccaaagaaggtgcaactgggaaaaaatactggactttaggtttagagaaacaagctttatttctagttcgactacttgtaaccttggccaagtt

SEQ ID NO: 113851 - DNA, 592 bp, Homo sapiens
taaatacatgtagttaggtataatatattagtaatgaagaataaaatataacagtaaaaataaactgctactgcacaaattttcactgctatattttattccatattattaatataccaagatgtcacaggtacacttgggagtgtcttttgatgaatatcaaatgttcttaattttattataacccacattatcaatctgttttttaggataggttcatttgtaccccatttaagtgttttatgatgccagtgtcctgacaatattctatgttttcctatagaaactttaatgttttatattttacatctagatagtattgcatctgaggttgatggaaataagattaattttcactcatggtcctatcgacctggctctattcactgaaggcttgtttattcccatgactgttcaatatycatttgttctaagtcaagactctgtttgtctgggcttgttattgatcctatattatattgtgttggccttttttttatatttctgcaaaaagtgatttgttaattaaagcaggttttcatgggtcttgttatttggaacttgatttcctcctgcttaatctctttgtgtt

SEQ ID NO: 113852 - DNA, 408 bp, Homo sapiens
atacaaggttactgagcaaaggggctggctgcctgatgtgcatatggcaccagcttgctttgatttgatttttttagagatggggtcttgctctgtaacccaggcttgagtgcagtagcatgatcatagctcactgcatccttgaactccaaggctcaagtgatctgcccatctcagccttccaagtgccccaccacacccagccaattaaaaaatatatattttttaattttagagatggggtcccgctgttgttgctcaggctagcttgagcctgagctcaagtgaacctggccccaagtgatcctccggcctgattctcttgagtagctgggattacaggcgcgagtcattgctccccgctcagcagtggrttttgagaaaagaaaagctttattgccagtcaac

SEQ ID NO: 113853 - DNA, 516 bp, Homo sapiens
ttcaaaggttggcaaaactagagatggattccaagtcgagtttctacaggagatgtatggtaggaagcggagagcagctgcggagaaagaccagtgctaacaggtctctaacgaattaacaagactatattccctgaaggtgaagcagcacagtgtaaaagctatgtgttgtgtctacaaaatggatataggaagtggatccctagagctgttatattttacaaatrcatagaggttcatactatacaaagaatgacataagcaagccatatttttagactgcaacctatctgttcagcagctggaaagaagaggtcctttgcttatgaacaccaattagcctgaaatacttccttgccccttactctatcacaagactctgcaagaaatagcttctctaggaaacccagtcctttcaataatgaataattgagaggagccaattaaatatcaatataagagtgtcatatgaataaagaaagcagaagaacatgattagtaacagacaagaaactg

SEQ ID NO: 113854 - DNA, 516 bp, Homo sapiens
ttcaaaggttggcaaaactagagatggattccaagtcgagtttctacaggagatgtatggtaggaagcggagagcagctgcggagaaagaccagtgctaacaggtctctaacgaattaacaagactatattccctgaaggtgaagcagcacagtgtaaaagctatgtgttgtgtctacaaaatggatataggaagtggatccctagagctgttatattttacaaatgyatagaggttcatactatacaaagaatgacataagcaagccatatttttagactgcaacctatctgttcagcagctggaaagaagaggtcctttgcttatgaacaccaattagcctgaaatacttccttgccccttactctatcacaagactctgcaagaaatagcttctctaggaaacccagtcctttcaataatgaataattgagaggagccaattaaatatcaatataagagtgtcatatgaataaagaaagcagaagaacatgattagtaacagacaagaaactg

SEQ ID NO: 113855 - DNA, 614 bp, Homo sapiens
gtatcaaatattgccaatgtagccagtggtataaaccattcagagcacattgattgggaagctctaccatcaaccagaaagtagatgcttatcgaatatatttgtggagttcttaaaaccatctctatcttctagccctcactactcactggaaattctctcttcacttgcttccttaatrcctagaattcctattagtaaaggagttaggaaaaggagatgagagaagggaacttaagttaattgaaagctgctgcatgtgaaataacttcggcaatgaactgaagatttagctccccacaaagttcaaatattgaaatcttaacctcaaagttatgctattagaaagtggaaactttggtaggagattagatcataagagtagagctcttatgattggcattagtgtttttataaaagacaacatagaaagctagtagctccttccaccacatggggattcagtgagaagccacaatctataaaccacacagcaggccctcaggagacaataaatctgctggtgccttgatcatgagcctcccagcctccacaactgtgagaaataaattacattgtttataagctatccagtttatggtatttaattgtag

SEQ ID NO: 113856 - DNA, 614 bp, Homo sapiens
gtatcaaatattgccaatgtagccagtggtataaaccattcagagcacattgattgggaagctctaccatcaaccagaaagtagatgcttatcgaatatatttgtggagttcttaaaaccatctctatcttctagccctcactactcactggaaattctctcttcacttgcttccttaatacctagaattcctattagtaaaggagttaggaaaaggagatgagagaagggaacttaagttaattgaaagctgctgcatgtgaaataacttcggcaatgaactgaagatttagctccccacaaagttcaaatattgaaatcttaacctcaaagttatgctattrgaaagtggaaactttggtaggagattagatcataagagtagagctcttatgattggcattagtgtttttataaaagacaacatagaaagctagtagctccttccaccacatggggattcagtgagaagccacaatctataaaccacacagcaggccctcaggagacaataaatctgctggtgccttgatcatgagcctcccagcctccacaactgtgagaaataaattacattgtttataagctatccagtttatggtatttaattgtag

SEQ ID NO: 113857 - DNA, 546 bp, Homo sapiens
tgccctgcaatttttacaggaaccatgttcattaaattaaaaataataaaccaggcaatgttcttgtgtaacctgtttcttagaacttgctgtccacatgactgccttccaggatgtcttttcttgtccatactaggttaaagcatcaacaaagctttgttttgtgttaaactcaaaggtgtctttctgcagattcttccagaactgcttgatgggggagagggaagatcatgcctggcaaaaagtgatttacactaacatatacacaaagaagataatcatcttgttttatgygccggttgcagtggctcacacttgtaatcctagcactttaggaggctgaggtgggcagatcgcttgaggccaggagtgtgagaccagcctgggcaacatggcaaaaccctgtctttacaaaaaatacaaaaaattagccaggtgtggtggtgtgtgcctgtagtctcatctacttgggaggctgaggtgggaggatcccctgagcctggggagatagaggctacggtgagccacgatcatgccactgcactg

SEQ ID NO: 113858 - DNA, 580 bp, Homo sapiens
ttgggagttccagggccctgcccaccaccggtccctctccgtaactactatagctgatgctttctggaaagcaaaaacttcttggcaggaggccaaccagcacaaaaatagagcattaaaccaccaagctaaggaccctcatggagtccactgcacactccaccatctcccctggaacaggcgctggtatccacagatcagaaacccatagacagtttacatcacaggactctgtgcagacaacactcagtaccagccyggagccaggtagattcactgggtgactagacccagaagagagacaacaaacactgcagtttggctcacaggaagtcacatctataggaaaaaggagagaatactacatcaagtgaacaccccgtgggacaaaataatctgaacaacagccttcagccctagaccttccctctgacagagcctatcccaatgagaaggaaccagaaaaccaaccctggttaaatgacaaacaaggctcttcatgccccccaaaaaatcacactagttcaccagcaaaggattcaaacaaggaagaaacccctgatttacctgaaaaagaatt

SEQ ID NO: 113859 - DNA, 569 bp, Homo sapiens
actggtaacagacaagcacagttcctgtttttcagaggggacttactttcaaacccacaatatcaasacgcttaacataagtggaaatttaaaatgtactgtttaatgtgggaaatttaaaacctgtatgctaattgagatctcatgtgccaggctttgtctgacaatgcctctcattcatctatgttctctcgttttatacgggacctaaaaatctgcaggaacactggttgtctggaactgagaatacattttcccacagaaatagggccaggccaatgagctaggattccttgatagtccgtgaaaatgtcttgaacttaaaatatgagaggttaaatttataatctaaaaagaaaatgatactacaatgatagttccaaaaccatttaaaagaaaatactcttgattaactgtgtttgaggaaatgtctaactacaggaggatgaagggacacagtcttccaagtgacactttcagacttcaactttagggtcattctggttctctaacatggtttcaattgatagtttcatttaaaatgcatagaattctcttactttggcata

SEQ ID NO: 113860 - DNA, 604 bp, Homo sapiens
gacagttggggaatatagttggtgttcctattcattggggcacaaagggcatgagagatggtagggggaataatactggaaaggaagatcgagatgaatgcatgaggagtttggaatgccagggcaaggaatttgtgctattgacaatgagatgttctaagcaaagcagtaagagaccccaaatctaccctcacatagcttagatttatctggtgaaaatattcttacaatgtaaagaagtygtgatcttttccaaggtgaatatagaagtggggaaattattaatacataagcattcacaatttagcccctgtccctagcttttagagtgactttcctttgtgtcagcagccagatgtcctcaattgtgcacagtttatatagtggggaaacaatgcaaaaactttgaaaacctaagagggtaagttgatcatataaagaaggatttacctggtggacaaggcagagagacagaaagtctgagtgttgaggctgaagaggttggaatttaacaagaaaagagagaaagattgattcttagggagctggtgccatccatatggaagaagctgagagtgataaggaaagagcgtttttagaatgt

SEQ ID NO: 113861 - DNA, 571 bp, Homo sapiens
acataaaatgtagaacacaagtggtaaacttaatgtaaacttcggactttgagcgacagtgatgtgtcactgtagattcatagattgttacaaatgtattattctgttgtgtaaatccacactgaggaaaattgaaaactttccactttccattcaattttgctgcaaacctaaaactattctaaaaaataaagtttattaaataaaaagaaaattgtcaaatattaaagagtgatactttcttttgtcttttttttgtgtgtttttaatgactttgtttcagaatagaaatggctttgaaaattttttataacattcttactttactgtttgcctatctcacaataaatgattcccaagagatcagagaagaaaatttgctgaatttaaattttttcaatctgaaacaatgtaccagagttggactatatttactttttgattagaaaacatataaaagatttctgaaaaaaatgtttttaaaattattmtacgctctaattctagatgacctcttcctcaaagcatttcctgtccttagaaaatcaactatttattctctctgcactct

SEQ ID NO: 113862 - DNA, 640 bp, Homo sapiens
aagcttgggttaagcagagcattcttcaatatgacaccaagagcaagatccatagagaaataaaatgaaaagttggaattcctctaaattaaaacctttatctctgtgaaagtcaccattaagagakaaaaagacaagtcacacgtttagaaaaaacattttcaactcacttgtctgaaaatgaacttgtattcaaaatatattagaaaaattacatcaacaataagaaactgaacaacctaactttaaaaatgacaaatgcttgataggatgtttcatcaaagaaaatatacttttagcaaataaacacatgaaaagatatttgcaggttttttagaagtggattgtttactttccaagtacaggggcagggagaaggttatatattcttatattattggattctagcttaattccatttcagtcagtgaaatctactagacagttgcttcatgatccatcatatggcctatgttgttgaagcatttttgtacctttgtaaaaatatggattctgcattgttggatgtgatgttttgtaaatttgactaagataagtgtgtttatagtctgcgatagacagaataatggtcctccaaagatgttcatgtcctaataattagaacctgtaaatatgttat

SEQ ID NO: 113863 - DNA, 511 bp, Homo sapiens
agagtctgtaacttctaatagtctttgccagtttggggaaacaccaaaccgatatggtccacattaactcagcctgggatctgttygtagttaaaatattttaaaattccaattaatgatataattcaaaataaatagcataaattgtgcagaaggtagaaccctttgtaaagtcacatttgttcattactggccttaacatagaatatgaaataatcgggaaaaaaaggtaaaatatgacatgcttacaaagtttatagacaacagaggaaggcagagagggagaattcacaataaaaatattttaaaaaatcagtgttcattgtgtaaatactatagagtatgacatgaagctgagatgtgtgggctatgagaccagattgtctgtgtaagaatttagccttggctatttagccttgcaaagttatctaccctctgtattcttatatatgccaaatttacacataaatggatatgaatgatgatgcttactttagacggttgctgagag

SEQ ID NO: 113864 - DNA, 511 bp, Homo sapiens
agagtctgtaacttctaatagtctttgccagtttggggaaacaccaaaccgatatggtccacattaactcagcctgggatctgtttgtagttaaaatattttaaaattccaattaatgatataattcaaaataaatagcataaattgtgcagaaggtagaaccctttgtaaagtcacatttgttcattactggccttaacatagaatatgaaataatcgggaaaaaaaggtaaaatatgacatgyttacaaagtttatagacaacagaggaaggcagagagggagaattcacaataaaaatattttaaaaaatcagtgttcattgtgtaaatactatagagtatgacatgaagctgagatgtgtgggctatgagaccagattgtctgtgtaagaatttagccttggctatttagccttgcaaagttatctaccctctgtattcttatatatgccaaatttacacataaatggatatgaatgatgatgcttactttagacggttgctgagag

SEQ ID NO: 113865 - DNA, 511 bp, Homo sapiens
agagtctgtaacttctaatagtctttgccagtttggggaaacaccaaaccgatatggtccacattaactcagcctgggatctgtttgtagttaaaatattttaaaattccaattaatgatataattcaaaataaatagcataaattgtgcagaaggtagaaccctttgtaaagtcacatttgttcattactggccttaacatagaatatgaaataatcgggaaaaaaaggtaaaatatgacatgcttacaaagtttatagacaacagaggaaggcagagagggagaattcacaatamaaatattttaaaaaatcagtgttcattgtgtaaatactatagagtatgacatgaagctgagatgtgtgggctatgagaccagattgtctgtgtaagaatttagccttggctatttagccttgcaaagttatctaccctctgtattcttatatatgccaaatttacacataaatggatatgaatgatgatgcttactttagacggttgctgagag

SEQ ID NO: 113866 - DNA, 511 bp, Homo sapiens
agagtctgtaacttctaatagtctttgccagtttggggaaacaccaaaccgatatggtccacattaactcagcctgggatctgtttgtagttaaaatattttaaaattccaattaatgatataattcaaaataaatagcataaattgtgcagaaggtagaaccctttgtaaagtcacatttgttcattactggccttaacatagaatatgaaataatcgggaaaaaaaggtaaaatatgacatgcttacaaagtttatagacaacagaggaaggcagagagggagaattcacaataaaaatattttaaaaaatcagtgttcattgtgtaaatactatagagtatgacatgaagctgagatgtgtgggctatgagaccagattgtctgtgtaagaatttagccttggctatttagccttgsaaagttatctaccctctgtattcttatatatgccaaatttacacataaatggatatgaatgatgatgcttactttagacggttgctgagag

SEQ ID NO: 113867 - DNA, 578 bp, Homo sapiens
aatttacatgccatgtgacatgcatataatcagttttagaagatgttcccaaaacatttccagaatakatgtactaaactatgctcttactagtaggctaagagatttctgattgttccatcgaattgtaatttctcatatctatcaactttgagcacttataatagttactgttcagtgagtaagcaatttgcatagattatcaattatccttataacaatcttacaaagtagaatgaaactttcactctgcaggagaagaaatttatgtcaaaaagggtaatatatttttcaaggtcaaatagccaataatatcagttcagggactttaattgtggtcttcctgaccatattgctttataatccgaatattatcgtaatcctattagtacattaaattagaatttaacaagataatatctgtggcagcctgctgtacagcttacaattcaacagccattgtttcttcaagttttatagtttcctacatcttttatatactatatgcacagaagctttgtgaggaagttttattctctccattttacaaatggggaaaatgagattcacaagagata

SEQ ID NO: 113868 - DNA, 592 bp, Homo sapiens
tctcatgataccctattccaatctctccaactttttacttcagattgcccttgttatattacttctacttctgaattggaggctaggattgtgtcttattcacattttgtccccactccttatttagttgttcccacattaagaatctcaataatggttgttaaatgaataaaataataaataaatcagtgaatagtctaggtttactatacaactttaaatgcatatagaaatttagagctgttattaggttgacataagaatctatayttttccttccttttttcattctaaatctacagttgtgcataaaataatgcagattttaataagtgttaagaaattacaagtaattaccatgaataaaataggtaattcaaaacttcaatgaccatggtttaagaaaaaataactctattcatgcttcaagacaagcttttaaaattagttggttagtttaataataacatatttaataattataaaatttatttgaaaaataaaaaatactaaaataattgaaaaatatagaaaatattcatttaaaaatgaaattatctgttgcatactaaaatctctgtgacctataata

SEQ ID NO: 113869 - DNA, 470 bp, Homo sapiens
tgtatttttgaactcatggtggggagggggaaccaaaagaggggatggttaatgcaatacttttaaaaataaaaattaatgcaaaaaatccatgatgaacaaaatatcaacattttaaataaagacaaggtgcttgtrtgcttgtctgtttccaatcagctgtggtttctgggccccatggcctccatgtccccatgagactgcttcatgagggctgacagtggcatgctgtattaggctgtttttgcattgctgtgaagaaatacccaggactggttaatttataaagaaaagaggtttgattggctcccggttctgcaggctgtacaagcatggtgctggcatctgctcggctgcagggaggcctcggggagcttttacttgtggcggaagaagaagggggagcaggcccttacatgacaaaagcaggagcaagggctggggtggaagtgccacacacgtaaacagcc

SEQ ID NO: 113870 - DNA, 535 bp, Homo sapiens
gtacccctttcatctcattgggatttgttggacagtgggtgcagcccacagagggcaagccaaagcagggtggggcaccrcctcacctgggaagcacaaggagttgggggatttcccttccctagccaagggaagccgtgagggaccatgctgtgaggaacagtgcactctggcccagatactgtgcttttcccacagtctttgcaacccgcagaccaagagattccctccagtgcctatgccagcagggccccgggtttcaagcacaatactgggcagccatctaggcagacactgagctaactgcaggaggttttttttcataccccagtgacagctggaatgccagtgagacagaaccattcactcccctggaaagggggctgaagccagggagccaagtggtctggctcagtgggtctcacccccacagagcccagcaagctaaggtaccctggcttgaaattctccctgccagcacagcagtctgaggccaacctgggatgctcgagcttggctgggggagtggtgactg

SEQ ID NO: 113871 - DNA, 535 bp, Homo sapiens
gtacccctttcatctcattgggatttgttggacagtgggtgcagcccacagagggcaagccaaagcagggtggggcaccacctcacctgggaagcacaaggagttgggggatttcccttccctagccaagggaagccgtgagggaccatgctgtgaggaacagtgcactctggcccagatactgtgcttttcccacagtctttgcaacccgcagaccaagagattccctccagtgcctatgccagcagggccccgggtttcaagcacaatactgggcagccatctaggcagacactgagctaactgcaggaggttttttttcataccccagtgacagctggaatgccagtgagacagaaccattcactcccctggaaagggggctgaagccagggagccaagtggtctggctcagtgggtcycacccccacagagcccagcaagctaaggtaccctggcttgaaattctccctgccagcacagcagtctgaggccaacctgggatgctcgagcttggctgggggagtggtgactg

SEQ ID NO: 113872 - DNA, 477 bp, Homo sapiens
acaagcctacttagctatctattttcaaatgaagaggcagctagaactgaatccttggttccaatctgtaaccttaaatataagtggttcctatgtagtaacctcttgattccatcctctgctttactgcattgtcttataaataaacctgaatctagtgcttctggwtttggagaacattgtatagcatgcacatttaaggttgtttttgcttgttgattgtttttatcctctcttgtgtatcagaagggaattgagagtcattctttgtacatcttcttttccctctgataatcttgcaggctggattggttaaaaagagaaagatatagaatatatagaaaattgttttaaaattgtctagttgaaaaatattctaaaagaataaaattagtttaactgtatcagacaaggaagagaataattaaatgaataatagccaggatgattgacaagatgacatactaggttattgtt

SEQ ID NO: 113873 - DNA, 350 bp, Homo sapiens
accattccaattgtaattaagtaatctatatggcattataattttttgaaatgcataataatttctattcattgttggggagtatatctttacctagaaaaggaacgctaaaatgggaagaagagtagttgttgaactgagatgttattgctaagtatcctgagggcatacaaaaattatttttaataacagatgctcattgaattcacaattggactagtgctcattgrccattctaatgccttatctaatacaacctcttcattattcaaataggaaactgagccttagagcagtgaattaatttgcccaagttcacagaggtagaaaatccagagccaggcccagaa

SEQ ID NO: 113874 - DNA, 534 bp, Homo sapiens
tgaattcattgtttcattattattaatccaaccaatatttactgagtactaactgttcaagtttctaagatagattcccacacacaaagatgatttgtagactcagggcaggagaaatacatactccaatgtatggagtatgcatggaaaaagataattaaaatatattgtgatgtgatcaagagtactgtcatcttttcaacaaataatgctgttggaatgtttggacgttcatatgcaaaaaaccacaactttgacccaaaccttacattttacacaaaaattagttccaaatggattatagacctaaatgcagaatgttagactgtaaaatgtttagaagaaaacataggagaaaatcttcttgacttggagctaggcaaggaggtcttgtatgtagtaccaaaagcataatccataaaagaaaaatttaatatattraacttttgccctaccaaagacactgcctagggaacaaaaatgcaaattagagattaagagaaaatatttgcaaatcacatatctgataaatga

SEQ ID NO: 113875 - DNA, 583 bp, Homo sapiens
cctcattcttgcttccttctgccatggcacattttcttatttaagctgttggcatttgaaaggtccctctgaataactgatgattttctggaaatatgcaaagagcatttttgccaagaacaggagccccatttggggagttggtcagattagaaattcagtttcaagtccaaatccctttcaacctgaaaccttctgtcagcttggaaaaggaaggccaggcctggtcagcacttggcaaggaaatagycatacataattaggaaatattttttaagtaacaaatatcactcatttcaatgaacaaaagcggctttgggaataattgtcactgtcattattcttttgtagtgcacaatcactgtatatgatatcactacataacaaatctcatgtccctacataagcacaaagaattaaggtcatgtctccactttatgtgactttttataaatcgtttacccatcgctgagaaggtgcaaaaacatattgttaaaagtactttttaaccaatgtatgggggaataaaggaaagagcaaaggattatgaccccttttctcatgcagacagttttggcacata

SEQ ID NO: 113876 - DNA, 522 bp, Homo sapiens
tactgagtactaactgttcaagtttctaagatagattcccacacacaaagatgatttgtagactcagggcaggagaaatacatactccaatgtatggagtatgcatggaaaaagataattaaaatatattgtgatgtgatcaagagtactgtcatcttttyaacaaataatgctgttggaatgtttggacgttcatatgcaaaaaaccacaactttgacccaaaccttacattttacacaaaaattagttccaaatggattatagacctaaatgcagaatgttagactgtaaaatgtttagaagaaaacataggagaaaatcttcttgacttggagctaggcaaggaggtcttgtatgtagtaccaaaagcataatccataaaagaaaaatttaatatattgaacttttgccctaccaaagacactgcctagggaacaaaaatgcaaattagagattaagagaaaatatttgcaaatcacatatctgataaatgacttacatccataacatataaagaattc

SEQ ID NO: 113877 - DNA, 526 bp, Homo sapiens
ataattatatataatgtgtgtattatatataattatatatataatgtgtgtattatatgtaattatatatataatrtgtgtattatatgtaattatatatataatatgtgtattatatgtaattatatatataatatgtgtattatatatacataatattgtctttatccactcaccaactgatggacacttaggttggttttgtatctttgtaatgaccaccataattcctactttacctgctaaacccagaacaacttcaaataataagcaaaataattctcctttatatttcctatactcccacattgtcctcagtgtttcatctcagatactaagctgtgggctaggaaggtagacacatgaaaaatatatcgtgagagacttaaactttgcctcagcctacagaataaccatactgagaaattatatcctctagtctgtggaagaacaactaaaataaataaattaattaaaaaacaacctgtccctagcaagtatctgtgggagggaaattaggtcccat

SEQ ID NO: 113878 - DNA, 629 bp, Homo sapiens
tgccaaattctcagttaatagctatgaatggtgttcaagcagctctcaaacatcactgtgtctcaaaaagaaaaaggaaaaaaaggagtctcgctctgttgcccaggcaggagtgcagtggcatgatctcrgctccctgcaacctccacctcctgggttgaagtgactctcatgccttagccacctgagtagctgggatttcaggcatgtgccaccacacccggctaattttcataattttagcagggacgggttttgccatgttggctaggcttgtcttgaatccctggcctcaagtgatctgcctgcctcagtctcccacagtgctgagattacaggcgtgagccactgtgcccggccccaacatcacttttattgacttcatgagattcttcatcttttgtaatatttgcatcataggatattttagacagtcactgagagatagacagacttaacaggacagcacctggtgttgagtggggactagttttatgtgggcaaggcatactttattctgatgaatttaagaagtgcatagcaaaaaccataccctgcaaatagaccatcggctgtatcaaaaactggggagaggaagactgtaaatgagccatctatgctcctataaa

SEQ ID NO: 113879 - DNA, 629 bp, Homo sapiens
tgccaaattctcagttaatagctatgaatggtgttcaagcagctctcaaacatcactgtgtctcaaaaagaaaaaggaaaaaaaggagtctcgctctgttgcccaggcaggagtgcagtggcatgatctcagctccctgcaacctccacctcctgggttgaagtgactctcatgccttagccacctgagtagctgggatttcaggcatgtgccaccacacccggctaattttcataattttagcagggacgggttttgccatgttggctaggcttgtcttgaatccctggcctcaagtgatctgcctgyctcagtctcccacagtgctgagattacaggcgtgagccactgtgcccggccccaacatcacttttattgacttcatgagattcttcatcttttgtaatatttgcatcataggatattttagacagtcactgagagatagacagacttaacaggacagcacctggtgttgagtggggactagttttatgtgggcaaggcatactttattctgatgaatttaagaagtgcatagcaaaaaccataccctgcaaatagaccatcggctgtatcaaaaactggggagaggaagactgtaaatgagccatctatgctcctataaa

SEQ ID NO: 113880 - DNA, 587 bp, Homo sapiens
aatgatgcaaatgccgaaggaccaaaatttcatgacacagactgtgaaataaagcaagatcaatgattcattaaatcaaaactttctctgcacaacatgataaaaagtggagtgtgatgttctgctttgtagtagtattgaaaactgttttctacatttattcatttgttcctcaagtatatattaagtgcttttcacttaatatttaaagtgcaaaaaaagaagttactaaaaaagcaaacttctagaggggttcatattttgattacaaagctgagatttatgtacataattaacaactaaaggaagtctttaactgagttcaagagtatggttgttaatgtttgtttcttataagtcttaacttttgaggtattaattgagagatccaaattccttctgcagaaaataatgatttctcttatttcgggtttttacattaatctttygtgtgtgtatgtgcctgtgtgtatgcgtgtgtgtgtgtgtatatattataaatctactgtttattttagtaattacatatatggattataggataaattctacatttattctcttttttaacatgtttacctaagact

SEQ ID NO: 113881 - DNA, 594 bp, Homo sapiens
cattttgcaaatgtccctccattgggacttgttagatgtttgtctcatgattagactatggtcataggttctgaagagtaagaccacagagggaaagtgccattttcatcacwtcacattaagagcacctactatcaacattaattatcactgttgatattgaccttgatcacatgactgagggagtatatgtcagatttcttcactgtaaacttatttttctcctctttccatactctactctttggaaggaagtcactatgtgtaaaccatacttaagaagtggagatttatagtccatctccttgaaagtgcagtatctgcataaattatctggaacttttctgcttgggtgatttgtctctagccctcatttatttgcttattcaattatgtattttagtacacactcataaatatttattatatattttggattatgattataatataaaattgtttcattgctcaaattgccccatctttggtcattgggagctcttcagttggttcttgtgtctctttgaatgaaatacatggattttgcttgcttatttatttatttacttatagacaggtctcactctgtcaccc

SEQ ID NO: 113882 - DNA, 599 bp, Homo sapiens
aagctccttaatgtatagttacaagatactgggaaaatgacagacctaaaatccaacctggctcctttggagctctctctcttctcattcagccatcatgctccagccacactggctgtctctgaggtcctcagattatccacacttccctccagctcaaagtccccacacatggtcttctctttgccaagaatacacttcctgacattcaacttgttcacacctattcctttttaagatctaaattcatttaccacttcctcaggggaacctccccaagactttcagggagacacagacatttttatggcaccctgtacttctgaaaagattagtatttaaataaataattggctaattagttattaaatcctagaatgtaaattcccctggggcaaaaacaatttcttgctgtgctttaattgactcycttgccctctggctccctgctggatttggcagagcagaaactatttctgtagactattagctgtttcataactgtttcaccagttcctttaactacatagtagttaaattacaagtgtataaaatatattaattattgaacactaactatgtgccaggcattgtactaa

SEQ ID NO: 113883 - DNA, 615 bp, Homo sapiens
actaggggattcagagtgctctgaattccctaacttaggataatttggcagcggtcatgccaatgaccaaggtagggaatgaatcaggggaggcatttctgaagaggagaacatggtaagctcagtttgggatatttaatgagtcacattcagtggttattaaaaggggagtctgttgctcggaagagcaatccagggctgaacatagaaattgagagtggagggaggcatattcattaaggtggaggccaaagccctaggaagcctcacagaacagaagacagcatggcaggaagccagcatgcaaggccttctgcccatctgccagtacatccaaggcatcagacaccaacactgggaactccattagctcccagattttcacagtgtcctagtatgctctgtggcttcccctgaactaagcatggggactgccatctagcgccatctgccatctagygtcttggctcccttacaaagccctcctaatccctggactaggatactattaccaaccactgaccacactgcccagccctccctatgatctccgtccatggtgggcagcctccctctgctcagttctcattcccagatgagccggagactctttca

SEQ ID NO: 113884 - DNA, 565 bp, Homo sapiens
cttgtattaagccaattgaaaacccagtttcaccagagagcaaatttgcgtaagagaagagggtcagctaacagcagagtgatgatctgcaatggtgaggaagaaagggagttagaaatggggaaaataattcaggacaacaggacacacttctgctttgttcttattaaaaattactaacatattgcttttcaaacatagttccrtaggcaattaaactcgtgtgtgtgcgcatgtttgtgtgtgtgtgtgtgtgtgccagacaccatacaagcaccttgtagtacttgtgctttatctccttttctcctttcactacttgctgagcaccactgaagtcaggaaatctctattttatgacaaggaagccaaggtaagggccaagatgactcagtaagtgaaacagccaagatctgaagctgttttcccacccaattccatgtgctgtcagagaaccttttcccctggagagcattttagttactgctcttggaaaaatttggacaaagcttgcggcatcatacaaatgttgcctgattcagcagctgaagtgagcaagggatgg

SEQ ID NO: 113885 - DNA, 565 bp, Homo sapiens
cttgtattaagccaattgaaaacccagtttcaccagagagcaaatttgcgtaagagaagagggtcagctaacagcagagtgatgatctgcaatggtgaggaagaaagggagttagaaatggggaaaataattcaggacaacaggacacacttctgctttgttcttattaaaaattactaacatattgcttttcaaacatagttccgtaggcaattaaactcgtgtgtgtgygcatgtttgtgtgtgtgtgtgtgtgtgccagacaccatacaagcaccttgtagtacttgtgctttatctccttttctcctttcactacttgctgagcaccactgaagtcaggaaatctctattttatgacaaggaagccaaggtaagggccaagatgactcagtaagtgaaacagccaagatctgaagctgttttcccacccaattccatgtgctgtcagagaaccttttcccctggagagcattttagttactgctcttggaaaaatttggacaaagcttgcggcatcatacaaatgttgcctgattcagcagctgaagtgagcaagggatgg

SEQ ID NO: 113886 - DNA, 657 bp, Homo sapiens
ttttggcacttgctggagaaggctgtacaagtgtacacgtgttatcacctgactacatcaagaaacggggcctgggcattggcgaggtttcttgggctttacaaggtatcaaatgacttttataaccctgtagtacctggctttctagtaggcaggactgtctctagtgtgtattaatatactaaatattatgcccacatgcacttaaaacactgatttttgagcactccaaaacaacaaggagcctagaaaatcagagaaacagatgttggatgaatagtaggccttctcagagtccatcatttaacttaagggaaatggcacaacagcggaagggaatcattcaaacccactcagtgaaaaataaacagagtgttccccaatggcagacatggtctgtggtgataacgaggctctggacacctggctgmgaccctcaagccccagcctcatcaataacactgacccagaaatggttcttttccaggtaccccatgggggctgagaagacatggcctcaaaactttggagatgctcatttaaataattataatgaacagcagatgcctggactgtggtgagtgtggtgagtgtacaagcttggatataagccctggcaagatagaaccaagaagactgtctacccattttccctga

SEQ ID NO: 113887 - DNA, 657 bp, Homo sapiens
ttttggcacttgctggagaaggctgtacaagtgtacacgtgttatcacctgactacatcaagaaacggggcctgggcattggcgaggtttcttgggctttacaaggtatcaaatgacttttataaccctgtagtacctggctttctagtaggcaggactgtctctagtgtgtattaatatactaaatattatgcccacatgcacttaaaacactgatttttgagcactccaaaacaacaaggagcctagaaaatcagagaaacagatgttggatgaatagtaggccttctcagagtccatcatttaacttaagggaaatggcacaacagcggaagggaatcattcaaacccactcagtgaaaaataaacagagtgttccccaatggcagacatggtctgtggtgataacgaggctctggacacctggctgagaccctcaagccccagcctcatcaataacactgacccagaaatggttcttttccaggtaccccatgggggctgagaagacatggcctcaaaactttggagmtgctcatttaaataattataatgaacagcagatgcctggactgtggtgagtgtggtgagtgtacaagcttggatataagccctggcaagatagaaccaagaagactgtctacccattttccctga

SEQ ID NO: 113888 - DNA, 560 bp, Homo sapiens
aagtcactttgaacagacaagttccaactattcttctggaatatcartgaatcttgaatgtccagatccaaagcagttgcctagtcattttttatcccctagctgagcacttgatatattagcaataattttcacatattatacatcattttgaaagacatgtaaggtacagaacatcaaaaatacaggtcaaaatgcaggtgtacataaaattatgagcagaaaacataaatttaaattgataccaccactaagaaaaaatagaacaaatatggaaaagctatagagatatgttcacaatttacagacaattctaagtttaccatcttagaatgaaaaggagatcctctaagttttcctaatagacactgttggtttctactcaggattggtatttttctcctttattaacaaaacaccattttattcatgtaactacaaagattaagagtaattcttggcaagggtgtggtggctcacacctgtagtcccagcacttttggaggctgaggcgggcggatcacgaggtcaagagattgagaccatctcggctaacaggg

SEQ ID NO: 113889 - DNA, 471 bp, Homo sapiens
cacttttgttttcttcataagctgggaaggtattatttgttgtaccgtgacaaacataaaacaaaattatcaatctgaagtgttatttaccagttatttacccagttgctcaattttcttctccatgagaaaggggtttctctttaaacacaagaatgcaaagagttgaactattaaatgtaagtagaggcagttacacaaaattaactactgctccatatatgtaatawgatggctaattaatgacagtgtaatatttaaatagtttgcctaattaggcacacaacagtgatgcctgtcttgggacgaaataaaaagcctcacatagatgtcagtttcacttgagtgctgatggaaattatagatttagcaaaggagaattgtagaaaaaatgttccatgataaaatttgaaattgaattgaatgcttagcatctggaatcgaccaagtgtacttctctcctacaattta

SEQ ID NO: 113890 - DNA, 614 bp, Homo sapiens
tgattctatgatagtctctgtcataacaaacaaattaaacagaagtgttgagcatagaactcrgtacaagagtcgacatgaacattggtttgaatgctggaggaactgagtccctatccttgttttcaagtgaaaattagtcatacatttgaacagaaattattttgctgtaaaatcaagatttccttgaagtgagttgttttctgggttgttctctcttccatgtgtcaggagtgtagagttatttatcagcattgtgagtctaggttgaggaaattcaaagagatcatgtagagaaattgatttctatgccttggagcttacggaatataatatattattattattaaaatgatggataaagtatttaaatgtctattgtgaacccaaaggactgcattttgaaagaaactgcatttccacagagggtgaataaatgggtgtgttttcatttgactaaatgcaggatttttgtgagggagttctggcttggcatggtcttacatgctgtccaagaggccaatctcaaaaggtgaggagacatttggaaagaagatgaaactgtactgttctatacccatagcatgagacagaaatgtaagcagccagctgga

SEQ ID NO: 113891 - DNA, 499 bp, Homo sapiens
cccaaggctgacaccttccctgggattctgtcctgagggataccggccccagtttataagatctcatttctggccccaggtattaggccctccccataccccacctaagtctgctccacctaccaggactcatctagttcttagcacaggctcccagtcacaatcgcaaagggrtctgatctgctcttgctgcaatgtgcatggaaagaaagttgcaagaaaatgtcatcaacacttttataaaacaaggtagtttaatctgaatacatgtagcttacagtcataacaaatggctaacatttattgaacaattccaaagttccaattccactgtgctaagttcttcacacacatgatttcaattaagccacaccacagctctctgatagtgtgcttttgttatcctcaatatatacagatgaagaaactgaggctcacagaagaaatgccttccccaagctcccacagttaagaagagatggagcctgtgtgtgtaaca

SEQ ID NO: 113892 - DNA, 601 bp, Homo sapiens
tttctgttcctgtgctaatttgcttaggattatggcctccaatttttcttaatgtgttctctgcctctgctagaggctcactcctgtccccttgttactggctctcatagtgctttgtaatgtcttcacgatacttagtggagtttgactataaatatttatgtgctgggtgatttgtttcctccatcaaagcttagacttcattagtgtagaccaggtctgttgagctcatttgtacctagcacaatccttggcacatggtcgaagctcaataaacatttgttggccagctgattgactacttgatgggctgaatgacataagaatgaccagtcattgttctggcagaggcagcaggccttttcttccttgctggcaggaaggtattttgctaatgaacttaggacgacaaggaaagactaagaactaataatttgaggaaattaaaactttgcstgtgtgacattgtcttgtccttttactcctattatactagcagtatattatttcgtttcacttgtacctggctataggaatgggctcctgtctaagaaacaggtaagtggatgacagttttgcaatttttgaaaaactgttatgg

SEQ ID NO: 113893 - DNA, 569 bp, Homo sapiens
tggtgatttttgaaccggttctggtcgggatctccttgatgccttgtcctagttgtgtatctggctcaccatttattctttgctacagtccaacccacacttgtcaggctactttcaaatattaatatttattcagaattgcagataacttgagtccttttgtcagcaactgctctaagttctttccttagattatacrctttctgtttcataacagagcttaattattattttgtctgtttcagatcttatggctgacttccatagctcaaatgtatagaatgcaagaggaagattctcctgagtgacactctttctacctgacattttcctcctctgatatacttccttaacctttgagacgtattttatagtctcctatgggtatcaataggaagaaaaataaacttttaaacctagagctgtgtggaagacttttcccattattcaaaattttagtctattttcattcactctaacagtcagctgctgaggagtattttccatactgaagaaaataggtacaaatacctatatatttgtaggtataataattagtaacatgatcc

SEQ ID NO: 113894 - DNA, 569 bp, Homo sapiens
tggtgatttttgaaccggttctggtcgggatctccttgatgccttgtcctagttgtgtatctggctcaccatttattctttgctacagtccaacccacacttgtcaggctactttcaaatattaatatttattcagaattgcagataacttgagtccttttgtcagcaactgctctaagttctttccttagattatacgctttctgtttcataacagagcttaattattattttgtctgtttcagatcttatggctgacttccatagctcaaatgtatagaatgcaagaggaagattctcctgagtgacactctttctacctgacattttcctcctctratatacttccttaacctttgagacgtattttatagtctcctatgggtatcaataggaagaaaaataaacttttaaacctagagctgtgtggaagacttttcccattattcaaaattttagtctattttcattcactctaacagtcagctgctgaggagtattttccatactgaagaaaataggtacaaatacctatatatttgtaggtataataattagtaacatgatcc

SEQ ID NO: 113895 - DNA, 569 bp, Homo sapiens
tggtgatttttgaaccggttctggtcgggatctccttgatgccttgtcctagttgtgtatctggctcaccatttattctttgctacagtccaacccacacttgtcaggctactttcaaatattaatatttattcagaattgcagataacttgagtccttttgtcagcaactgctctaagttctttccttagattatacgctttctgtttcataacagagcttaattattattttgtctgtttcagatcttatggctgacttccatagctcaaatgtatagaatgcaagaggaagattctcctgagtgacactctttctacctgacattttcctcctctgatatacttccttaamctttgagacgtattttatagtctcctatgggtatcaataggaagaaaaataaacttttaaacctagagctgtgtggaagacttttcccattattcaaaattttagtctattttcattcactctaacagtcagctgctgaggagtattttccatactgaagaaaataggtacaaatacctatatatttgtaggtataataattagtaacatgatcc

SEQ ID NO: 113896 - DNA, 569 bp, Homo sapiens
tggtgatttttgaaccggttctggtcgggatctccttgatgccttgtcctagttgtgtatctggctcaccatttattctttgctacagtccaacccacacttgtcaggctactttcaaatattaatatttattcagaattgcagataacttgagtccttttgtcagcaactgctctaagttctttccttagattatacgctttctgtttcataacagagcttaattattattttgtctgtttcagatcttatggctgacttccatagctcaaatgtatagaatgcaagaggaagattctcctgagtgacactctttctacctgacattttcctcctctgatatacttccttaacctttgagacgtattttatagtctcctatgggtatcaataggaagaaaaataaacttttaaacctagagctgtgtggaagacttttcccattattcaaaattttagtctmttttcattcactctaacagtcagctgctgaggagtattttccatactgaagaaaataggtacaaatacctatatatttgtaggtataataattagtaacatgatcc

SEQ ID NO: 113897 - DNA, 559 bp, Homo sapiens
gcatagtaaagggtttagtatatatggctatatatcttaatatacatttgccaagagtttaatactaaggttttaaccctttatactttaaatagctcattgtgccaagaaagggaagtggaggaagaggagaaaaaaggagaagaacttacactacctgatttcaaggcttactataaggctgcagtaaacaaggaagtrtgatattggcataaggctaaacgtatagatcactgaaacaaaatagaaagttcagaaacatacatacacatatatggtcaattaattccagggcaattcagtgggacaagatagttttgttttgttttgttttttcaacaaatgatgcccgacaactgacaagttatttttcaaaaaagagagacagagagagggaagagaacctccacttttaccttgtactatgcacaaaaagtaactctaaaatggatactaaatttataaatgtaaaagctaaaactacaaatcttgtgagaaaatgtacactgagacatgcaacacatggatgattcgtaaaaacgttatgctgagcaaaata

SEQ ID NO: 113898 - DNA, 597 bp, Homo sapiens
tgtgccagccagccagccaggcaccaagggcccaacagtttttctgtgaggtacctgtgttagtcccagttgtactacccagcagtgttcaccatagtacgagaaatttaatgtaagcatagttgaagaatctaaattcttccaggaagggtatctaactctcaatatggagaaaatacatttttcagagacataagaatacaaaagaaggtagctataggtgtgtttatgactaagaagagttagtcatgcatgtcccaccaccccaaacctaaaaatctcatgtaagtattgccctaagacttcaggcattcacagaggctaagcagggccaactagtcctttcttgctggatgccttgcaattcccaccagagatcaacagggtgccaggtggcttgggagyacttccttagtcagccactccatctggccatgtcccatctctggaaagagcctttttgcccctaagtgtcagtttcccaacttgcagagccacgtttagatgaccaatctactagtactataaaatttcattatattattattttaaattagaaacctctggattattttcattggaaattaaaatataatt

SEQ ID NO: 113899 - DNA, 597 bp, Homo sapiens
tgtgccagccagccagccaggcaccaagggcccaacagtttttctgtgaggtacctgtgttagtcccagttgtactacccagcagtgttcaccatagtacgagaaatttaatgtaagcatagttgaagaatctaaattcttccaggaagggtatctaactctcaatatggagaaaatacatttttcagagacataagaatacaaaagaaggtagctataggtgtgtttatgactaagaagagttagtcatgcatgtcccaccaccccaaacctaaaaatctcatgtaagtattgccctaagacttcaggcattcacagaggctaagcagggccaactagtcctttcttgctggatgccttgcaattcccaccagagatcaacagggtgccaggtggcttgggagtacttccttagtcagccactccatctggccatgtcccatctctggaaagagcctttttgcccctamgtgtcagtttcccaacttgcagagccacgtttagatgaccaatctactagtactataaaatttcattatattattattttaaattagaaacctctggattattttcattggaaattaaaatataatt

SEQ ID NO: 113900 - DNA, 445 bp, Homo sapiens
aatttaactttgacatagtatcagatacgagcctaaatatagaataagcagcttcaacatgtgccataatttagattmtagagatatttaattattggaatttatcttaacctctaaaagcagttactctttgctatttctagatgatcagatttaatttgaattcaatttcttccaagggctgagattaagatgtctatttagatatgagtagccatggacatattttttgaagaaaagatttagctatatacatccatacacacaaatcattttcctgtagtacttctcttgaaattcaatttcttatttagcatacttcatttacttgaaaattcaatagcctatttaacatacttcattttttccttttaatcttcacagtgttcaataaatatggtcaataaattttttatgataaaatacagtcatcatgatgataaaa

SEQ ID NO: 113901 - DNA, 439 bp, Homo sapiens
tattagggtgacactggcttcaaagaattatttagggaggattcctcctttcactctcccgtggaatagtgtcaataaaattggtaccaattctttgaatgtctgatagaattcagttgtgaatgaatctggtcctggccttctatttttggcaattttattattaccttttcgatcttgtgacttttattattggtctcttcagagtttctatattttcttggtttcatctaggaggctgttatatttccagaaatttatccatctcctctcagttttctagtttatgcatgtaaaggtgttcatagyagccttgaacaatcttttgtatttctgcagtattagtagtaatatctcccatttcatttctaattgaccttatttggatcttctttcttcttttctttgttagtgtcactaatggcctacgaattttatt

SEQ ID NO: 113902 - DNA, 571 bp, Homo sapiens
actatcaatgttctccatactattagaagtagagtccttagaatttggggtctaattatattaagcagccaactccagaaaccccaaaaccaatgaaagaactccatccttaatattctgttcttctagaaccacacctggtaccaaaatctgtatagtcagagttctctagagggacagaactaatggaatatatatatatacatatatatatacatatgtgtgtatatgtatataaaaggaagtttattaagtattaacacaagatcacaatgtcccacaataggccatctgygagctgaggagcaaggagagccggtccaagtcccaaaactgaagaatttggagtctgatgtttgaggacaagaagcgtccagcatgggagaaagatgtaggctgggaagctaagccagtctagtcttttcacatttttttctgcctgctttttatattctagccatgctggaagctgatttgattgtgtccacccagattaaatgtggttctgcctttcccagctcactacttcaaatgttaatctcctttggcaacaccatcacagacacaccga

SEQ ID NO: 113903 - DNA, 463 bp, Homo sapiens
tttgaattatctttgtatcctggtctactgagagggagctgttcttgtattccaaaacatgtgttttaacttttttgattggaggattaacttcttaaatgggatgagggaggcagggaactattttggaaaacagaagcccctattgaccaaggttaaagataccatgacatttcttttgtataaccattaacttctccctggttgcaaaatttcagtatattaaaatttaattacttcatgatgacaattragaaatagctcaccttaaattttatgttgtgtctttaacattgtagaaatttagtaaaactggaactagaagctgtggtgtacttgaacgcttgaataggtgaagattatgagttttggaattaaataaaatgaggttcaaatctttttttacaatttgaacttttattttagatttgggggtgcatgtgcaggtttgttacctgggtat

SEQ ID NO: 113904 - DNA, 463 bp, Homo sapiens
tttgaattatctttgtatcctggtctactgagagggagctgttcttgtattccaaaacatgtgttttaacttttttgattggaggattaacttcttaaatgggatgagggaggcagggaactattttggaaaacagaagcccctattgaccaaggttaaagataccatgacatttcttttgtataaccattaacttctccctggttgcaaaatttcagtatattaaaatttaattacttcatgatgacaattgagaaatagctcaccttaaattttatgttgtgtctttaacattgtagaaatttagtaaaactggaastagaagctgtggtgtacttgaacgcttgaataggtgaagattatgagttttggaattaaataaaatgaggttcaaatctttttttacaatttgaacttttattttagatttgggggtgcatgtgcaggtttgttacctgggtat

SEQ ID NO: 113905 - DNA, 587 bp, Homo sapiens
tctggcttaactgaaactttatgtccattgattaggaacttctcaattccccctctcctcagtccctggtaatcaccattcttctctgactttataaatttcactattttagatacctcatattcattgactaacacattgtttgtctttttgtggctagattattttacttagtgttctgtgtttctattaattatgacaattttaatccttcaaatgctatatacttctctggccaaaaaaaaaaaaaaatgtcataccaaatgacaaaagttaatttgattccacatgaytcaaatttagaaaaaattaagaaagctaacgctgttagtcatctatggcaaattcatggagagtcccgagaagctattctgcctacctggagcactggatttcccttcacctcctgcccccttcctatcttcccatattcctttctcctttgcctgactgctttatccttcaaggctcagcttaaatgtcacctccttagaaaagccctctaagttaacacccacctctaccattacatgctcttataacactctggaatattaccttatgacaattatcaaaaatgtagtaaa

SEQ ID NO: 113906 - DNA, 640 bp, Homo sapiens
gaacacatggacacaggaaggggaacatcacacaacagggcctgttgtggggtggggggagcagggaggrattgcattaggagatatacctaatgttaaatgatgagttaatgggtgcagcacaccagcatggcacatgtatacatatgtaactaacctgcatgttgtgcacatgtaccctaaaacttaaataaaaaaaagtaatgcacgaatgtttaagcaaatcaaataataaaaaaaaattaatctcatttcaaagatcgagtgttgaaagaggaacaagaacgattatttctatgaaataagtactatttttactctcaaaactttacaaaaaagcttctcattcagcccaaaatgaatttaacatgttccactctaaacttgtttgagttttaagagtgccagtgcctaggtgtgcttcttttacctagttgggtagagagtgcgtaagaaggaatggaccttggagggagggttaaggagatgaaatggcatccatggcaagtttgttggccaaacactttttgaatacaagtatgtgcaatactgtgtcaagtgttaaaacacattaggggtagtttgaggacacagacaaaataaaagttatactaatcatacactttcctaaaaacatatg

SEQ ID NO: 113907 - DNA, 640 bp, Homo sapiens
gaacacatggacacaggaaggggaacatcacacaacagggcctgttgtggggtggggggagcagggaggaattgcattaggagatatacctaatgttaaatgatgagttaatgggtgcagcacaccagcatggcacatgtatacatatgtaactaamctgcatgttgtgcacatgtaccctaaaacttaaataaaaaaaagtaatgcacgaatgtttaagcaaatcaaataataaaaaaaaattaatctcatttcaaagatcgagtgttgaaagaggaacaagaacgattatttctatgaaataagtactatttttactctcaaaactttacaaaaaagcttctcattcagcccaaaatgaatttaacatgttccactctaaacttgtttgagttttaagagtgccagtgcctaggtgtgcttcttttacctagttgggtagagagtgcgtaagaaggaatggaccttggagggagggttaaggagatgaaatggcatccatggcaagtttgttggccaaacactttttgaatacaagtatgtgcaatactgtgtcaagtgttaaaacacattaggggtagtttgaggacacagacaaaataaaagttatactaatcatacactttcctaaaaacatatg

SEQ ID NO: 113908 - DNA, 253 bp, Homo sapiens
aagagtgatcacagccagctttactatgtatgtatgtatgtatgtattataacacttcacagraaagactgatgacacaaagtttacaggcatacattctgggcagtgaagaacaaaggcaatggtaaaggtaaagacaaaccaagaaatcaaaaacaaaacaaataatatacttatttttaatcagatatataagagcagtgtgagttttatggttgaataaatccacaaatcaggtgtccacaaatgtttt

SEQ ID NO: 113909 - DNA, 508 bp, Homo sapiens
tgggatactggaataccagatcagactcctttctgctgcttagtcattagtgatggtctagaattatcatcccaggcagaaatatgagatccaacaatcatgaaatagggtttaaaacaaggaggtccagagacttaaatttatattttataacaaatgatctattttactagctaaagtgaaggccttaaaataggtgtaatagtgaaatatttgaggagacaaaaaagaccagccttgctaggctgacagcacaatgtcaaaagctgatagactgtccttctcagggtcttcratccaagaacattgaaatgattgagattttaagtacatctcactctcttttgataactgaacttgttcaagctcttccaaacctccaataattggaaacgtaaggcatcagaaattactggttgtcagtctgaaacccattcacccttcttacatgttttcctttggaaaattctcccactatgtgacttagtaaactgaatagtctaagcaa

SEQ ID NO: 113910 - DNA, 508 bp, Homo sapiens
tgggatactggaataccagatcagactcctttctgctgcttagtcattagtgatggtctagaattatcatcccaggcagaaatatgagatccaacaatcatgaaatagggtttaaaacaaggaggtccagagacttaaatttatattttataacaaatgatctattttactagctaaagtgaaggccttaaaataggtgtaatagtgaaatatttgaggagacaaaaaagaccagccttgctaggctgacagcacaatgtcaaaagctgatagactgtccttctcagggtcttcaatccaagaacattgaaatgattgagattttaagtacakctcactctcttttgataactgaacttgttcaagctcttccaaacctccaataattggaaacgtaaggcatcagaaattactggttgtcagtctgaaacccattcacccttcttacatgttttcctttggaaaattctcccactatgtgacttagtaaactgaatagtctaagcaa

SEQ ID NO: 113911 - DNA, 532 bp, Homo sapiens
ctccattaacaatctttaaacgccatttacatgacagactcataaggaatcataaaataggagtcacaattgtacataggaggggaagtacatttagaatttgggttaaacaattttagggaactttttttcataataaattcaaattgaatagctatttacaactgtatttaacttgaagctataatttttaccttcccttcccatatctgttggcagcctaaagttgggatcgtaagtttttattgttattgttctcattttgctttttatttttacctaaaatagatcttataaatcattttatttatgaattcatttatttacatcttcaaaaattatttttggaccatcttcgttggactgggcactgatttargcactggttatacaatggtgagcaaaatgggcatactgctgtccttaagcttataatccagtgtaggtgacacacactcaagaaaagtattggtttactcatttgaaatctatgtactgagtatatatttcttatgccttgttcagggagaca

SEQ ID NO: 113912 - DNA, 591 bp, Homo sapiens
ctccaaaggaatttttttaatttttagtttttaaacatgggtacataggtatatatatggggcacatgagatattttgatacaggcatgcaatgtataataatcacaacatggaaaatgggttattcatcccctcaagtatttatcctttttgttacaaacaatccaattatacccttttagttattttaaaatatacaattaaattatttggctataatcaccctgttgtgctataataggtcttattcatttctattttgttttttgtacccattaaccatcttctcctgcccccaccctcccaccatcctctccaccttctggtaaccatccttctactctctatctctstgtgtttaattgttttgatttttagttcccacaaataagtaagaacttatgtttgtgtttctgtacctggcttatttcacttaatataaccacttccagttccatccgtgttgttgccaatgataagatctcattcttttttatggctgaatagtattccatttccttattcattcatgtgttgatggagacttagattgcatccaaatcctggctattgtgaatagtgctgcaataa

SEQ ID NO: 113913 - DNA, 591 bp, Homo sapiens
ctccaaaggaatttttttaatttttagtttttaaacatgggtacataggtatatatatggggcacatgagatattttgatacaggcatgcaatgtataataatcacaacatggaaaatgggttattcatcccctcaagtatttatcctttttgttacaaacaatccaattatacccttttagttattttaaaatatacaattaaattatttggctataatcaccctgttgtgctataataggtcttattcatttctattttgttttttgtacccattaaccatcttctcctgcccccaccctcccaccatcctctccaccttctggtaaccatccttctactctctatctctgtgtgtttaattgttttgatttttagttcccacaaataagtaagaacttatgtttgtgtttctgtacctggcttatttcacttaatataaccacttccagttccatccgtgttgttgccaatgatargatctcattcttttttatggctgaatagtattccatttccttattcattcatgtgttgatggagacttagattgcatccaaatcctggctattgtgaatagtgctgcaataa

SEQ ID NO: 113914 - DNA, 621 bp, Homo sapiens
gccagtatatggaatctgcctaagtgtctatcaatggatgaattggtaaagaaaatgtagtatatgtacacaatggaatactattcaaccgcaaaaaagaaggaaattctgtcatttgtgacaacacatatgaaagtggataaattattattattattgagatggagtcttgctctgttaccaggctggagtgcagtggtgcgatcttggctcactgcaacctccacctcctggattcaaatgattctcctgcctcagcctcctgagtagctgggactacaggtgcctgccaccatgcccggctaatttttgtatttttagtagagacggtgtttcaccatgttggccaggatggtcttgatctcttgtccttgtgatccgcccacctcacgctcccaaagtgctgggattacaggcawgagccactgcgcctggctggataacattattttaagtgagataaaccaagcgcagaaaggtaaataccatattatctcacttatatatggaatctaaaaacattgaattcatagacgaaaagagtagaacagttgttactagaggctgtgttgggaagatgttggtcaaagaatataaaatttcatttagacaggagatata

SEQ ID NO: 113915 - DNA, 621 bp, Homo sapiens
gccagtatatggaatctgcctaagtgtctatcaatggatgaattggtaaagaaaatgtagtatatgtacacaatggaatactattcaaccgcaaaaaagaaggaaattctgtcatttgtgacaacacatatgaaagtggataaattattattattattgagatggagtcttgctctgttaccaggctggagtgcagtggtgcgatcttggctcactgcaacctccacctcctggattcaaatgattctcctgcctcagcctcctgagtagctgggactacaggtgcctgccaccatgcccggctaatttttgtatttttagtagagacggtgtttcaccatgttggccaggatggtcttgatctcttgtccttgtgatccgcccacctcacgctcccaaagtgctgggattacaggcaagagccactgcgcctggctggataacattattttaagtgagataaaccaagcgcagaaaggtaaataccatattatctcacttatatatggaatctaaaaacattgaattcatagaygaaaagagtagaacagttgttactagaggctgtgttgggaagatgttggtcaaagaatataaaatttcatttagacaggagatata

SEQ ID NO: 113916 - DNA, 607 bp, Homo sapiens
gactctgtgtgagggcttcaaccccacatttcccttctgcactgccctagcacaggttctccatgagggccccacccctaaagcaaacttctgcctagtcatacaggtgtttccatacatcctctgaaatctaggcagaggtttctgagcctcaattcttgacatatgtgcacctgcagcctcaaccacatggaaactgccaaagcttgggactcgtacccttagaaactatggcccaagctgtaccttggcctggttttagccacagctagagcagctaggacacagggcaccaagtcccgagrctgcacacagcagggggtgcctcagatctggcccaggaaaccatttttccttcctaggcctttgggcttgggatgggaagggctcccacgaatgtctcttacatgacctggagacattttccccattgtcttggagattcacatttggctcctcgttacttatgcaaatttctgcagctggcttgtatttctcctcagaaaatgggtttttcttttctactccataatcaggctgcaaatttttcaaatttttatgctctgcttcctcttggacactttgccacttagaaatttcttatgcc

SEQ ID NO: 113917 - DNA, 635 bp, Homo sapiens
tagtaggcacctaataaatacttctgggtgaatgaacattatttaccagaaaaataaacactatccctaaactaataagttgtttaacattagagataaagcagcttgacaaaaacaaaaagcttatcctcaggtttttcggtattgtggaagaattttaaaagactagtctaatagtcttttaataattgacttaaaatgtagaaagatttaagaaagaaaaaagaaaatgccacattcctacatatcggatgatatatacaacaagatattaactgtaactacatcattgtgggagaataaaaactatgaatcttacatacttaaggcagtgaaaagtttaaagacatttgccaaactttctttaatagtattttctgtttgtgagtaacccaaattttaaatatgttaaaaatataaatwcttcttcataaattgataatgatcaatatttactactaagaaaatacacatttttcatgggctacataatgaaactttttaatatccctctttgaaaacaagcaacacagttaggtacatatccactcagaaacttcagactgagagagaataaaagtaggatgttccaggttaaagaaaaaccgttaatgacaaatctagtatctcccata

SEQ ID NO: 113918 - DNA, 646 bp, Homo sapiens
ctaaatgtttgttattttaagttgctgagtttggagttaatctgtactgtatcaataaataactaatacagactttgttgaaagcaatacaaaacaaatatatatttacctcagatccttgattacctgatttcttagtctgcatggtttataagccaagactaattaattctgtcaaaaataattccaaagtttctgaaccagtaggtctgaatagccagactatacaaaatgtatatcctccgtgataactgcttaaagtgagtatagcagtataaagtgattataataccttatgtttacataggttttwgtttacagaccagtttcacataaatggcccatttttattctcagaaatcagtctatgaacttagctattacaatttcagttttaaagatgaataaagtagatagcagaaaagttagagacaagcacatactcattttctaataaataacaaaacaggccttaaatgtttgccttgtaactccaccatctaccctcagcactgttttggagttgttctggtttgatggcagtctgcagttgtatagacctagaagaataatttttaagtgccagacactgcttagcatcttataaattacaacttagctctaagaatatactggcttactcaga

SEQ ID NO: 113919 - DNA, 646 bp, Homo sapiens
ctaaatgtttgttattttaagttgctgagtttggagttaatctgtactgtatcaataaataactaatacagactttgttgaaagcaatacaaaacaaatatatatttacctcagatccttgattacctgatttcttagtctgcatggtttataagccaagactaattaattctgtcaaaaataattccaaagtttctgaaccagtaggtctgaatagccagactatacaaaatgtatatcctccgtgataactgcttaaagtgagtatagcagtataaagtgattataataccttatgtttacataggtttttgtttacagaccagtttcacataaatggcccatttttattctcagaaatcagtctatgaacttagctattacaatttcagttttaaagatgaataaagtagatagcagaaaagttagagacaagcmcatactcattttctaataaataacaaaacaggccttaaatgtttgccttgtaactccaccatctaccctcagcactgttttggagttgttctggtttgatggcagtctgcagttgtatagacctagaagaataatttttaagtgccagacactgcttagcatcttataaattacaacttagctctaagaatatactggcttactcaga

SEQ ID NO: 113920 - DNA, 539 bp, Homo sapiens
taggttttagaaacaaagaaaattgtgggattcccttaatggctttcttacacttgagttctaaaatatttatcaatctcaaatatattttgcattatgttgaaaaatgactattaatagtttctgctaaaaggaattatcaactttttatgcatcaccatttcagagttgggcttataaaaatatsagtatctgtcctacatatataccaatgtttttcaatttttagtcaattaagtatgtttcattgattttctgctgtgtgcgtaaaactgtgcatgatgatattatagaaggtactgtgaaaaggcttaaagcagtatatttaaccactgcctaccagaatagtacatagagaagcaaacctaatctataagcaacaatgagagcgtgctacagataacttttaatattgtaaatatatatgatacagattataaaatctttatgaaataatctatagaagaggtgaaatgggtctctgccaggagaatgcaaaggcagtaaaaaattaaaaaccaaaatattgagaattattt

SEQ ID NO: 113921 - DNA, 571 bp, Homo sapiens
tggcatgcatagtatactaacagtgatatacacagttactttcaggctcactgaatgagtagtggtcaatgaaayacagaacaaagtcatgcaattcactttcaagttgtgttcttgaaacttcccatggcacccatgaagatttcaagagtcatttgttattatatcccatcttgactaatactaagttgttagaaaaaaatgaaatactattgtaacaataagctaaaataagtggtattgtcttaacaatgagaaagagcatgaggaaacttaagatcatagatgatgaaaactgtttcccctatccccactcccaagaagggagaggttggggttatacaaagtgattaatctatgtgttcttcccagaaaaaaaaaaggcagagtttaatcaaataacttttccaacctttagtatatggttcattcaaactgtctgacctgtagtgtttcagaattaccaatggtcagtggtttctatgtactataccttatattttgcctttctaaatgggctatgagcattacatatcttagctcatttatcttttaaataactttaagaagc

SEQ ID NO: 113922 - DNA, 571 bp, Homo sapiens
tggcatgcatagtatactaacagtgatatacacagttactttcaggctcactgaatgagtagtggtcaatgaaatacagaacaaagtcatgcaattcactttcaagttgtgttcttgaaacttcccatggcacccatgaagatttcaagagtcatttgttattatatcccatcttgactaatacyaagttgttagaaaaaaatgaaatactattgtaacaataagctaaaataagtggtattgtcttaacaatgagaaagagcatgaggaaacttaagatcatagatgatgaaaactgtttcccctatccccactcccaagaagggagaggttggggttatacaaagtgattaatctatgtgttcttcccagaaaaaaaaaaggcagagtttaatcaaataacttttccaacctttagtatatggttcattcaaactgtctgacctgtagtgtttcagaattaccaatggtcagtggtttctatgtactataccttatattttgcctttctaaatgggctatgagcattacatatcttagctcatttatcttttaaataactttaagaagc

SEQ ID NO: 113923 - DNA, 571 bp, Homo sapiens
tggcatgcatagtatactaacagtgatatacacagttactttcaggctcactgaatgagtagtggtcaatgaaatacagaacaaagtcatgcaattcactttcaagttgtgttcttgaaacttcccatggcacccatgaagatttcaagagtcatttgttattatatcccatcttgactaatactaagttgttagaaaaaaatgaaatactattgtaacaataagctaaaataagtggtattgtcttaacaatgagaaagagcatgaggaaacttaagatcatagatgatgaaaactgtttcccctatccccactcccaagaagggagaggttgggrttatacaaagtgattaatctatgtgttcttcccagaaaaaaaaaaggcagagtttaatcaaataacttttccaacctttagtatatggttcattcaaactgtctgacctgtagtgtttcagaattaccaatggtcagtggtttctatgtactataccttatattttgcctttctaaatgggctatgagcattacatatcttagctcatttatcttttaaataactttaagaagc

SEQ ID NO: 113924 - DNA, 571 bp, Homo sapiens
tggcatgcatagtatactaacagtgatatacacagttactttcaggctcactgaatgagtagtggtcaatgaaatacagaacaaagtcatgcaattcactttcaagttgtgttcttgaaacttcccatggcacccatgaagatttcaagagtcatttgttattatatcccatcttgactaatactaagttgttagaaaaaaatgaaatactattgtaacaataagctaaaataagtggtattgtcttaacaatgagaaagagcatgaggaaacttaagatcatagatgatgaaaactgtttcccctatccccactcccaagaagggagaggttggggttatacaaagtgattaatctatgtgttcttcccagaaaaaaaaaaggcagagtttaatcaaataacttttccaacctttagtatatggttcattcaaactgtctgacctgtagtgtttcagaattaccaatggtcagtggtttctatgtactataccttatattttgcctttctaaatgggctatgagcattacatrtcttagctcatttatcttttaaataactttaagaagc

SEQ ID NO: 113925 - DNA, 611 bp, Homo sapiens
gtggcattaagcctgagggtgcacagagtacaagagttgagactagatttcagagaatgtatgaacaaacstagatgtacaatcagaaatctgctgcagggtcagagccctgatggagaatctctatgagggcactgaagagggaaaggggggttggagccaccacacagtgtccctactggacaactatctaggggagctatgagaagacggacactatcttccagaccccagaatggtagatccaccagcacttgtaccgtgtgcctggaactggtgcaagcactcaacaccagcccttgagagcagctgtaggagctgaaccctgcaaagtcacaggagtggagcagcacaaggctttgggagctcaatccttgcagtggtatgccctggatggcatcaaaggagatgttaagctttaagacttaataactttcctactgggtttcagacttgcatggggcccgtagccccttacttttggccaatttctcccttttgaaatgggagtatttacccaatccctgtacccccattatacattatatcttgggagtttttttttattttaattttacagggtcttaggcagaaggggcttgcctcatctc

SEQ ID NO: 113926 - DNA, 611 bp, Homo sapiens
gtggcattaagcctgagggtgcacagagtacaagagttgagactagatttcagagaatgtatgaacaaacgtagatgtacartcagaaatctgctgcagggtcagagccctgatggagaatctctatgagggcactgaagagggaaaggggggttggagccaccacacagtgtccctactggacaactatctaggggagctatgagaagacggacactatcttccagaccccagaatggtagatccaccagcacttgtaccgtgtgcctggaactggtgcaagcactcaacaccagcccttgagagcagctgtaggagctgaaccctgcaaagtcacaggagtggagcagcacaaggctttgggagctcaatccttgcagtggtatgccctggatggcatcaaaggagatgttaagctttaagacttaataactttcctactgggtttcagacttgcatggggcccgtagccccttacttttggccaatttctcccttttgaaatgggagtatttacccaatccctgtacccccattatacattatatcttgggagtttttttttattttaattttacagggtcttaggcagaaggggcttgcctcatctc

SEQ ID NO: 113927 - DNA, 611 bp, Homo sapiens
gtggcattaagcctgagggtgcacagagtacaagagttgagactagatttcagagaatgtatgaacaaacgtagatgtacaatcagaaatctgctgcagggtcagagccctgatggagaatctctatgagggcactgaagagggaaaggggggttggagccaccacacagtgtccctactggacaactatctaggggagctatgagaagacggacactatcttccagrccccagaatggtagatccaccagcacttgtaccgtgtgcctggaactggtgcaagcactcaacaccagcccttgagagcagctgtaggagctgaaccctgcaaagtcacaggagtggagcagcacaaggctttgggagctcaatccttgcagtggtatgccctggatggcatcaaaggagatgttaagctttaagacttaataactttcctactgggtttcagacttgcatggggcccgtagccccttacttttggccaatttctcccttttgaaatgggagtatttacccaatccctgtacccccattatacattatatcttgggagtttttttttattttaattttacagggtcttaggcagaaggggcttgcctcatctc

SEQ ID NO: 113928 - DNA, 595 bp, Homo sapiens
agactttagactttggatgtttgagttaatgctgaagtgagttaagactttgggggactgatgggaaggcatgaytatattttgcaaactgagaaagacataaaatttgggagggactagggcaaaataatatggtttggatctatgtccccaaccaaatctcatgtcaaattgtaatacccagtgttggaggtggggcctgatgggaggttattggattgtggagtggtttctttttaatggtttaataccatttccttggtgctattcttatgatagtgagtgagtgagttattaggaaatctggttgttaaaagggtgtagcacctccccacctctcacttttcttcctgctcccagctatatgaagcaccagctccctcttcattttcccaccatggttatacatttcatgaggcctccccagatgcccggcagatgcaacattctttctgtacagcatgcagaactgtgagtcagttagacctcttttctttataaattacccaatctcaggtatttctttatagcaatgcaataatggactaatacacacctaataatattatttccttgaatcacacaatcaattacc

SEQ ID NO: 113929 - DNA, 595 bp, Homo sapiens
agactttagactttggatgtttgagttaatgctgaagtgagttaagactttgggggactgatgggaaggcatgattatattttgcaaactgagaaagacataaaatttgggagggactagggcaaaataatatggtttggatctatgtccccaaccaaatctcatgtcaaattgtaatacccagtgttggaggtggggcctgatgggaggttattggattgtggagtggtttctttttaatggtttaataccatttccttggtgctattcttatgatagtgagtgagtgagttattakgaaatctggttgttaaaagggtgtagcacctccccacctctcacttttcttcctgctcccagctatatgaagcaccagctccctcttcattttcccaccatggttatacatttcatgaggcctccccagatgcccggcagatgcaacattctttctgtacagcatgcagaactgtgagtcagttagacctcttttctttataaattacccaatctcaggtatttctttatagcaatgcaataatggactaatacacacctaataatattatttccttgaatcacacaatcaattacc

SEQ ID NO: 113930 - DNA, 562 bp, Homo sapiens
tggtgtagtttcctggttgagctgataattattaagttaatgattagtaggttatttctcaacactgaagagattattagtgtttcaaagttttcactgtaattcatctgtaaaaccattcaacctacctccagtacasctcagtaatctggtgacaagagagtattcttgcgcactttatttcctcttcagtgatctaatgccaataatgccagcctatagaaacaacagccaattataacaaaaagcacattaaaaagtcaaatatagctgagtaatagacataaaaataccttattaacatttttgtaacactctcaactgaaataaacagaccactctcgattttagcatctggttccaaacaattcttgtttgggtgataactttttaaaaacaaatgctgggcatctttcatcgacttttcatcaagtaacagctgttcctttagaacaaaatgtatgcatgttggaagtgtgactgatgctcacttctgttttgttctgtgtgagaaagctttatgttgggtgcaattcagaaaacaaatggtttcaaatctttt

SEQ ID NO: 113931 - DNA, 562 bp, Homo sapiens
tggtgtagtttcctggttgagctgataattattaagttaatgattagtaggttatttctcaacactgaagagattattagtgtttcaaagttttcactgtaattcatctgtaaaaccattcaacctacctccagtacacctcagtaatctggtgacaagagagtattcttgcgcactttatttcctcttcagtgatctaatgccaataatgccagcctatagaaacaacagccaattataacaaaaagcacattaaaaagtcaaatatagytgagtaatagacataaaaataccttattaacatttttgtaacactctcaactgaaataaacagaccactctcgattttagcatctggttccaaacaattcttgtttgggtgataactttttaaaaacaaatgctgggcatctttcatcgacttttcatcaagtaacagctgttcctttagaacaaaatgtatgcatgttggaagtgtgactgatgctcacttctgttttgttctgtgtgagaaagctttatgttgggtgcaattcagaaaacaaatggtttcaaatctttt

SEQ ID NO: 113932 - DNA, 562 bp, Homo sapiens
tggtgtagtttcctggttgagctgataattattaagttaatgattagtaggttatttctcaacactgaagagattattagtgtttcaaagttttcactgtaattcatctgtaaaaccattcaacctacctccagtacacctcagtaatctggtgacaagagagtattcttgcgcactttatttcctcttcagtgatctaatgccaataatgccagcctatagaaacaacagccaattataacaaaaagcacattaaaaagtcaaatatagctgrgtaatagacataaaaataccttattaacatttttgtaacactctcaactgaaataaacagaccactctcgattttagcatctggttccaaacaattcttgtttgggtgataactttttaaaaacaaatgctgggcatctttcatcgacttttcatcaagtaacagctgttcctttagaacaaaatgtatgcatgttggaagtgtgactgatgctcacttctgttttgttctgtgtgagaaagctttatgttgggtgcaattcagaaaacaaatggtttcaaatctttt

SEQ ID NO: 113933 - DNA, 521 bp, Homo sapiens
gttctatttcaatagtttgcraacaatttgttagttctgctgaataaaaaaatttccaacacttgttaaaatggttaaggatcactttatttaagattaaaatgataggtgtcaagatgattctaataggaagagagataaggttcaactctgaacacagcaaagatatctgggaagtgcagctaatgagcagagtgaaaggttgtcgatgaatacaaattactaagaggagacatcaagggtaggggatttcttgttagctaacgtaagaggattcttgctgacggcaagccagagtgatcagatatcaagagtgggagattctctctaaagtgacttagcagcattcttgcaacagctggactaggcagtgtaaagacagggcccaaggacaaagtagagtcaaaaagagtgctcctagaagcctgactaaagcatagacaagaagaaagtcttcatcagttcaaaagtcactttctatacttatgatttggccatgagcattcctatctttacttagt

SEQ ID NO: 113934 - DNA, 512 bp, Homo sapiens
aagcaatttattttagttttcatgagaagttgttcttctagagtatgttatatgactctatgccctcagtttgaactctcattgaaccatatctaaattaactaataaaatgaactttgaattacatatgccactgtgtgcaaattaacattcattgactgtatgtgtatgtaaatattggccagtaaacagagccatttacatcttcataaagagaataacatttccaactaaaattccttctaaaattggactcatatcaattggaagtatttcaaacaattactaaactgatttacttggacaaayatagaaaatattatctaagctatgtgtacctattttttatattcctagaaattagggggaacttttatttcctttgattgaatatgagtttctaacttaacaaaatatataatagtgagtcagtaaaatgaatacttttaccaaggatggaaagtgttctgaattatctaaaagacattttcattgcagttaacatttgcctg

SEQ ID NO: 113935 - DNA, 421 bp, Homo sapiens
gaattcatgcatagctgaacagtgttaacagtaaagtagagacttaagaatgacaaaacagacccttcatagcaataagatgtcaacatgacagatagcaggccttgaaagaaatcaaagtatttcactacaaaaatacatttctttgacatattttgaaatggccctacaaggctgtttctgtggggaaaatctccattttgtagagaatccccttctctttccaagtctttttcctgatttttcctgattccaagtcctttttcctttttatgtctgataaaaatcatttacaatctattctcagtgaagcctgctacctgcaagcttcatctgcataagaacctyggtctctaaaacaccttatcttaacccatacactcctgtctattgattccagtctttagataaattattttag

SEQ ID NO: 113936 - DNA, 528 bp, Homo sapiens
tgtgagtgtatatatataaatatataatacttaataaactctcctatatatgtgtatatatgtatatatacacatatataacaatatgtgtatatatgtgtgtatatatgacatatatgacatatacatatatgtcatataagtgtttatatatacatatatacttaattcttaaacttgcctctatatatgcatttacataagtacttaaactccactatatatgtgtrtatatgtgtgtatatatacacacatatatatgactatatatagtatgtgtatatatatacatatatatgacatatatatgtgtgtgtgtgtgtgtgtatatatcctattagttctgtccctctaagagaaccctgactaatacagattttagtaccagaagtggggcatgcacagcagcattctatcatcaaatggaaatggtatatacatgattggacttgagcaggtcctgaaggcaaaagtcagttacatgaggaagtggctcaaatgctcatggtctccattcctgccacccta

SEQ ID NO: 113937 - DNA, 532 bp, Homo sapiens
atttaaacacattgtggcactgttaatctaccaccagttcaaatattacaggtagttacttcagctatccctgaagacttagttgaaaattttccttgataaccagatttttaatcaaggaaataaggcatatttaattatgcacatgggctgtgctttaaataattcttattaattgtgtgcttcacttcctagcacayaattcaggtgtgacatggcagatcctcctttaaccaatgcttgcttagattacaaccagagacagactcaatccaattagcaaactcatcctcatgtgaaaagtgaaaagctgctgacagttgcaaagatttccattagtgattttctatcactgtgttctctaacaatatcccgccactggtactgaggtgtcacaaaaggccagcaaagagacagtgaaatatacttgaatataataatgttgctttttgatggaaggaaagactataatctcacaaggacctacagtacaatgttgaagatagatagtcccttgaaacattttgttaaa

SEQ ID NO: 113938 - DNA, 588 bp, Homo sapiens
tggcttaaagagaccctagcaaaagcacaagagatgccttcttttggcaacatcctggaaggaagaaaacaaatgagttgacttgtgatacactacactgagggaaataacacacatgtatcagtaaacacaaatgatactcaacgatgtgaaacagatgtgtatgttttaaaattagtgtaggtaaatgtaaactttacaagtacctgaggaagaagaatacagagccttaaaataaaacagcattatgttccataattctgcatyccatttgggcctgtacttcttcttaatcccactctgatacccgtctcagacatctttcaatgcgtattataaaagactagctctcatagtgtcaaataatctaattctggttttctttgctaatatgtattgtattttaacatttcaaattgtattaagagaaatggcaaagaaaatttgggaaacattggaataagaagaattacagtaaaacaatgaaatgtcaatgagaaatcaatggaaaaataaaatatatttgaatacttacttctggtagacatattttaaatagaatttagaagaatgtaatcaataataact

SEQ ID NO: 113939 - DNA, 611 bp, Homo sapiens
taacatagggaaaacatacatcatcttgtatatggtgatgactttttagattcaacaccaaaaacatgatctatgaaaaattaattgataaactgaacttcattaaaattaaaaatttcttttcttataagacactgccaaagcaaggtaaagataagccacagtctggragaatatatttgcagaagatacatctgataaagaactcttttccaaaatatgtaaaaacctcttaaaactcaacaatactaaaataacctaattttaaaaatggaccaaagaccacaacagacacctcatcatagaagatatacagatggcaaataaggataagaaaagatgttccacattgtaatatgacatcagagaaatctgtttctgctgtttgccaggttaaggatgttttcttagtttcttcaattgcttagatattttatcattaatgaatattaaattatgtcaaatgcctttatgcatctttagcataatcacttgtgttttcttctttattctgtaaatatcatggactgcattgattaatttttaaatagctttattgagatataaattagttaccataaaatttatctttcacttaagtacacaaatca

SEQ ID NO: 113940 - DNA, 459 bp, Homo sapiens
ctagaattcggattcttggtgcttggctttggttggctcacttgcttttactttcccaaaaggaaattgctgggtgatgggaaccttatttattccctgtttattccatcacttggcaagatttacaggacaattcctaagaaccagaatattgatccaggattctatattacctatccgttttgkttttttctgagctgcaatcagagattgctggtaggttcacagaaacaagcagggttagtctaaaatgtaggcaaaaacttacatgtaataagtttagaatttagtgacaaatgtatgataattgttggaacataatttctctctctccagtcttcatttttattaaggaacaaattatcataggactgagttgtttaaatagattttagtcttatacttggcctgattattcgcataaagtgcagcaagaataatatttctacataggccttt

SEQ ID NO: 113941 - DNA, 540 bp, Homo sapiens
cagcttgaagtttgatcaaaacttatgctaattctttgctggcacttaataaatatatattttaaagttctattaagcacatgctttttttcttgaattctgcatgtaacatctgaagaaagtaggagtacataaagatatattggcaaattatgatatataacaaataaagaagaaatctgatttttaaaaataaactgatcaaatgaaaattgtttttaaatccctaagaataactttggttaaagtggaaaatgcagagtgaaaactaccataataatacatctgcctgcttagacattttgtgtgtatggaaacaaactttaatagctgaaaagctactaaattaaataatgttattttttggaaagagaaattaaaataaatgagacaaygaattggaaaatatagatcatcaggctttaagtaaagtcatgtaatgctttaacatatcgtacaaatttaatcaggaaccatctatttatttaccattaaatatctctcaaatttagcccctcttcaaatactgcatgtcttatt

SEQ ID NO: 113942 - DNA, 530 bp, Homo sapiens
gtttaaaatagaattgacttcttcattatttttataagcaagagaaatattctcagtacaaagacatttcctgagcatattgaaaataatttctatctgtataagaatatctgctaaacattaaaaccttaaagaattaggttactattgacaatacataagactatttaagctttcacaatattcccaaatgacccagaactaattttaatctttttaaataggtaagatattctttccccaaaattcttaaattgtttaattttatagtgtttattgttttcatactaaatctctgtggtgggcagaataatgtcctccaacaatatccatgacatattatatatcaccttatatggcaaaagagagttgcagatgtgattaagtttaaataragaccttgagttggggaaattttctaagtggacccaatctaatcacatgattcttaaaagaagagggaggcagaagagtgggctggcatgataagccatgagaataaggtctgtgagccaagaaatgtggcagtc

SEQ ID NO: 113943 - DNA, 564 bp, Homo sapiens
atattacctgctatagtgaaactttgcatttgaattctcttataatactagctttgtcaacctagagtgaggaatccatgttattaatcaagtcttgattatattttgtttcaaatacagtaaaaatatcatgactttgtagagtttcacatagaatatttaaaagatagacaagcaaataagactttccaccaaccaaccaaataaaacaagcaacaaatatcaaaaacaggtagctcggtttcataccttagcgaagctgttttgcctrgggtttgacctcagtactgttcagcatcagtaaaattttacacacagatcagaatatgagaatgtgtgcttatagactgtatttttaagaatttttcaggttgtgaaagcacatttgagctgatatattcagggaaacaatgtttccctgaataaaatatgcacgagtaagtaaagaagacaagaaactctgtcaataattgtacagtcataccacatagaaattgaaatgccattctagataaaagctaaatctaatgagtcaccatgatagtgactcagccactttctgct

SEQ ID NO: 113944 - DNA, 576 bp, Homo sapiens
gaattctattatgagagaggttttagaattaccacttcacaactgcagagtaacctagatgcctaccttaggaccaagagatatacaaagagaggcagaatgatgaaattcaaactatgatactcaaaaaaacctcaaaactataactccaaaaaaatggtttgtcaaaaaatgctttggagctgactcttaccccagaagacagcatttgtggtgtgtgtttccctcagatacacacagacatcagtggggagacaggcatacatgatgttggatataggaggatggagtttgtctgcaatttgagcatcagccaagtttagtccaaatacaatgagtctagattaatgagttgttgacttgtttcagcgtcttgattgatttggtctttrtttttttaacatgctgtatatttcacatcaactttgtcaatcatttttacgcccatatttaatctccaacttggaacatgacacagtgttttgcttttgccttagatatctgcctttcatagataagtccttgtatctcctctacactttcccttatatattttttcacattacagctttttct

SEQ ID NO: 113945 - DNA, 528 bp, Homo sapiens
ccatgttatgtaatttaatcatggatgtcctggacataataccagggaacatagatcatgggattatgtgggtcattttttaaatgttatcactataaataaattatacgtattagtcactctgataaaaaaaattcctattccttgcccagttgcaaaaactaagccactgtttaaacccagaacatattgatggaagaagtggtcatgttgctgggtgtttaggttgaaccctccagcaatacagcaaacgtatactgtaatgatttccacagatcttagccaaagatamaacaacctttttttttcaggtagctatacagaggggacatgggaacaccatgtattttttaggaaaatggaccatggaatctgatttgacataaggcctgaagcatcatcatcgtcccctgttagagaggaggcatatgggggccaagtcataaattgagttctggcctgtgtctggcttcagtgtatcccatgggtgggtctatggactaacctagtggttttctcagttcacac

SEQ ID NO: 113946 - DNA, 383 bp, Homo sapiens
cctgctaagccctcgtgcatcttgttctgcacaagtacaatttagtaactggccaaagactaaaataatctcatgcaatttctgaaactccttatccatatatctctyttctctctggtagtctgttccacaaactccactcacttcaacagccctgatgctgatctctgttaactccactttcgtgttattactacacactacttgtgctttactttctccattgagatcttgacagtgtctctaggtgaaaacccaggaaaaatgcagagttcatttcatcattttcccatatatctactcttacaatcctcagctatctgttgaacatttgtattagtcttctgttgctaacaactggccataatcttaactgctgaaac

SEQ ID NO: 113947 - DNA, 506 bp, Homo sapiens
tttttttgagatattttaagatgttgttatcaactaaaataatcagaattaatattccttgttcctttttgctttttgagccaaacaagatggtcaatgaagtatgtttagtgtactgtagtaacctcctgcaaaatagtagctcagaacaatcagaaattattatatttatcaaatttgtgaattatacatatttttaaataagttacttcatattttaaccatcaggaccgctaaaaatttgcaaaccagagcaaagggttaaagaaagctacataccaaaggctacaaattgaaaatatctctcaggcaaagcttcagtttcactctctattattacaattgttgcaatttcataatactttgtcttactttaagtgaaatcaaattctgaagaaaagtgcaattgtakttatttgtaagtactaatttctcagctgatatctttctctggtgtatatgggtaggacctttaatggtttctataagtctcaaagactggtttt

SEQ ID NO: 113948 - DNA, 381 bp, Homo sapiens
ttagaaatatgttaattaacaaaagcattatgtattatttattacaaaggtaataaaatattttagagtctctgaagtacactttttgttgtcatctatctttccctaagagtgaaaacaccatttcctttagagtcagctctatctgagttatctgagctatatggttgggttacttaatayggttgggttacttaatctccttggatcctatttttccaattttaaatgtgaatactaataccaacatgtgaatattaattaagataatatatattcctagggaagaggagagggccaggaaattcgatctcgcagctgcccttttcctgtcacgtaacagggctattgattgtgatacttgtacttaaggctgataat

SEQ ID NO: 113949 - DNA, 576 bp, Homo sapiens
ggaggggctgctgttaaggtctctgaaatgttttgaaggcatttttctcattgtcttgactattaacattctgcttctctttacttwcgcaaatttctgcagccagtttgaattcttcttcagaaaatgagtttttcttttctaccacatgttcaaggtgcaaatttgtcaaacgtgtgtgctctgcttacctttttaaatataaattccagtttcagatcatctctttgcttacacatatgaccatatgctgttagaagcagtgagaccacaatttgaatgctttgctgcttgaaatttcttccaccagataccttaaatcactgctctcaagttcaaagttccacagatatctagagcagggacacaagaatgacttttactcaagttcccaataagttcctcatctccaactgagaccacatcagcctggacttcgttttccatactactatcagcattttggtcacaacaatttaacaagacttggaagttccaaactttccatcatcttcctgtcttcttctgagccctccaaaccattccaaagtcacttccacattttcaggtatcttt

SEQ ID NO: 113950 - DNA, 509 bp, Homo sapiens
caaatatgcttgaagcatttgcctgcattcctctgctcaggccatgtcccctggactgtcttctctgcctttgaaaatgctgactgttctttcttttattcattaattaacaccaaagcattgatggagcaatagtgtatcagggactgggctaggtatggaaaaaagtgggtgaataaggcaggaaggatccatttctcaaagggcttaggattcgctggaagcattaagtttcaggacaaatgccatactctccacaaaataacccgttcctgataccctcagcaggaagtgaggactttctcttctcaacagccatagtacagtgaggaaacgtcgattataggatttaccataatctgatttaattacagttattgaggcatatgtcttatctctcatgctataagctccatttttgatagggactctaagaagctccctatttagtcctcacagcatgtagtgcaggatttctcattyaataagacctcaataaacaatattgg

SEQ ID NO: 113951 - DNA, 607 bp, Homo sapiens
ggtaccaatttctgtgccttaaaggggcctgcaatacaaatcaaaatctcagcttctccccctgcttgcttacagccccctttctaaggtctgctaaatcacttgccccatgtccagaagctcctgtttccaatattttttatgcttttgtctttgctcatgttctttgtccttcaaggtttcaatctgtttttttaatcccttaactattttagttagattctcagaggacaaggagataaatgctcgtgtttgatccatcatatttaatcagaactgaaggagaaattttgaaggcagttaaagggtgaggaaaagatcaagcctcctatgaatcataatccctaaacatcatctataatactcattaagcaatcttttttcctttaaaataactcaatacttttctagctatatattttaccatatccctgcagaaacagccaaatttcagttttaaagtgccacactcttgaaggagatcatattcaaatgaaggtcataaataatggcttaagagttyccagattctccaagaggaagttaaagaaaacactgcctctttgccaataaatatttaaaggtactgttaaaatgatgaagttta

SEQ ID NO: 113952 - DNA, 445 bp, Homo sapiens
tatagtacaaaatatatacttgtattattgaaagtagagcaagcattctatgtaccagtttgaatctaagataattaatttttaataattaattgaacataatttcagttccaaaatggtgttgtaaacacaagctggctgccaccacagaaaaccaaaaacaaatatacaatgccaagatkatcaccagcaatatcccagaactcaaatatgaaaatgagtcagttcctggggccatggagaagtgaaaaaaactctgagcagatggtaaaagaattggatttccatatctgcaagacccctcccctacatctgcccagcaccaagcatgcagaaaatttcttctgactcatggtttctacactggaaaaagttagattgaggtggacaatcagcttccccactatcttgggtttactggcaggagacctgtttctgcctcaac

SEQ ID NO: 113953 - DNA, 576 bp, Homo sapiens
ccatgattttatccccatgaggcatatttcagacgtctaacctccagaactatatattttttaagtgttgttttaagccctgaagttggtggtaatttgttagaacagcaatagaaaatgagtacaactctaaactaaacagtcatttatttctaaagttctgtcctaagttagaagccatgagaaattcacttgataatagttcagcagagaaagtgtaatgcacgtatctgaagtcatcaaccctaaaacaaagaaacttttgagtgtagactttagaaaacatgattctcgtggcagatggaatgcgagaatagaaattgtctttgtactcatcttacagtttgagaaatatgtttcgtagtatggktatttttcagagatcttgagaaagatactatctttatatctgtcagaatggaagatactggagaagcaagtgtctacattctgtatgtctgcgaagcatgatgagacttcgctgtgacagctccctgagtagagctcaaatcacgctgttgccacctgagcagtagggcagagcctactctgctcttctgaatatgaaacaggtcc

SEQ ID NO: 113954 - DNA, 576 bp, Homo sapiens
ccatgattttatccccatgaggcatatttcagacgtctaacctccagaactatatattttttaagtgttgttttaagccctgaagttggtggtaatttgttagaacagcaatagaaaatgagtacaactctaaactaaacagtcatttatttctaaagttctgtcctaagttagaagccatgagaaattcacttgataatagttcagcagagaaagtgtaatgcacgtatctgaagtcatcaaccctaaaacaaagaaacttttgagtgtagactttagaaaacatgattctcgtggcagatggaatgcgagaatagaaattgtctttgtactcatcttacagtttgagaaatatgtttcgtagtatgggtatttttcagagatcttgagaaagatactatctttatatctgtcagaatggaagatactggagargcaagtgtctacattctgtatgtctgcgaagcatgatgagacttcgctgtgacagctccctgagtagagctcaaatcacgctgttgccacctgagcagtagggcagagcctactctgctcttctgaatatgaaacaggtcc

SEQ ID NO: 113955 - DNA, 594 bp, Homo sapiens
catgatatttggtggagacacagatccaaaccatatcaacattcaatgcatttatttaccttaaaatagttgtcctaatcagcttgagctgctataacaattcgccatagactgggtggctgaaacaacagacagtttttggtgaaggcctcttgctggctggcaaattggttctttttcactgtgtccccacatgttggaaaaagaactctgatctcctcctgttcttaaaaggatactaattccctcawgggagacatgtcctcatgacctcatattaacttaattacatcccaacagccccatcttcaaataccatcacattatttcttaaggctttaacatacaaatttgaggagacaaaaagggttagtctataacaataatatatatcacaaatataccacccgagttaatagcaaaagctaactctctcattgtgatttatgcttttacacagctaggaaaagaagcaagtgttttattcttaatttaactaaaatactggtaatatgactaaaattcatttgataactgatattttgaaatctgaaaagtgttcttcattcctctgatagtataaggctatgtaat

SEQ ID NO: 113956 - DNA, 595 bp, Homo sapiens
atccccatgtttcaccttacacaaaagtcaactaaagatggatcaaaggcttaaatctaaaacctaacaccataaaaattgtagaagataacattggaaaaactcttctggacattggcttaggcaacgcattcatgactaagaccccgaatgcaaatgcaacaaaacaaaaataaataactgggacctaattaaactaaaatattctgcacagcaaaataaataatcagcagggtagagagacaactcacagagtgggagataatatttgcaaactatgcatccaacgaaggtctaatatccagaattgacaaggaactgaaacaaatcagcaagaaaaacaattccatcaaaaaatgggtaagggacatgaacagacatttttgcaaagaatatatacaaacagctaacaaacatgtaaaaactgcttaacatcactgatcagggaaatgaaaatcaaaaccaaaatgagattccaccttactcctgcaagaacagccataattaaaaagtcaaaaaacaatagatattggcatagatgtggtgaaaagggaacacttttacayggctgatgaaaatgtaaattagcacaacc

SEQ ID NO: 113957 - DNA, 607 bp, Homo sapiens
cactgttaggcacagattaatggggagtaatttatctccttctacatttacagctcccacaatgaaagcagacgggccacaaatatgcttttcctaagtggtcatttttagtggcaaactgctaacacagcaacatttctgggtccatttcttcaacacagactcacaggaaacccaacatgctgtagtagaatgaatcctgagtcgagagacatcagatggcatctgtggtactgctctggcattgtgtgactatgtgtcatgtggcttcttcctctatcctaaagtggttccttacacattgtacattctcttcaatgtttaggagtttgacaaagtactctgtagtatatagagccctttgctgtgtacattaatttattttcacatctccacaggataacataaccctgattttacaggtaggaaaactgctactcctctaggaagtgtaagtaaaygtctgatgccacattactggcaactgccagaatcagtacatcttctaagttctcatgtgtttagtgttaggtaagaaagttatctcagctcattatcccacagaggtcccacatgccaaagactggggccagagtggagcaaggca

SEQ ID NO: 113958 - DNA, 545 bp, Homo sapiens
atccccatttcttcagctctgagcataacagtcagtattcttgttaaaattcatcagtctagcagccactaaaratgtggttggagctctttaaagcctcatttttaaataagtgccttaaaaaaaaaaaaaaaaccctgcatggtgattttctggaaaaccgcacttgcaaggctgtatgtattgatctgatttggacctcacacattacaaaaaaaaaaaaagccaaacaaacaaacaaacaaaaaactcattctcaatgagcatttgttgaaaacatatacaggcaattgtgtaacttcatgactgcctgaagcagtggatagaaactgagcaaacaatagactaaccaaaaagcttaaaaagaaaattatgaaaatgagatgtctttagggactttgaaaagctccaacatgtttacacatgcccaggacagtgcaggtgatcagcaaaaacctgaaaaggtcctgagctctcacctctggatgatgttgtggctctggacaagcagaaagtaaagactaagtcaaagttggaaactgcca

SEQ ID NO: 113959 - DNA, 567 bp, Homo sapiens
gtaattattatagtgcctttctaagttttgtgtgttaatcaaacaaattgtcaaatctgagttcaggttttgaaaacacccaaatttgcagtaggcctggaagaagtacgggttccttggaattcctacttgccgcatctaagctgttggaagtcttgtggaactgagcttttaactagtagggtctatgctaactctgggtagttaatggcagaattgaattccattgtaatatactcgatttatgtcaacatttggaaaagtggatgttatatgagaaaaccaagcacartctcatcacttttgctatataaagtaaccaaatcaaaggggtgaatattctttcatgtctttgggtctcacccacagcttatgggaatttgattttaccgagcttatacaacagattgaggggtagcataaaaactaccttagagttcttccaaccacagcaatgatgtcaggtacctagtgtctaaaataatacttgacatatgtccagtattgatttgcttcttgacagttaagttttttcattgggtttactgtgtatacaagctaaaaact

SEQ ID NO: 113960 - DNA, 612 bp, Homo sapiens
gttttatcaagatggtctatactcaatcttgtacattttcttctataggcatgaacacwtccatttctccacaaaacacattatcttttaaattggacagtactacaatctgagtttattatattttctagttcttttcaggggatttaggattaatagataaagacaaagttacacagataaaggcttgtgaggccatactgatatttccatcttcatttccaattcaaaattataagatttttgcaagacttcttctatattacctctttgttgcaattcgtatgcctttataattctggctctcaaaatacaagagatgatagaatgagaataacctgtaattactcatttgcttgatttctcattgtacatacaactgtctcagaataacaatactaatactatcatctcaattatgattactaacaagagttttgttattttgttttgcatttctctgttctccaatttatattatttctacattgatgatttgtatcttctttccttgttcctgatcagtctgactagaagattataaattgtattaatcttctcaaagtatacattttgggtaaattgattaatcaatttatctattgtttgtag

SEQ ID NO: 113961 - DNA, 612 bp, Homo sapiens
gttttatcaagatggtctatactcaatcttgtacattttcttctataggcatgaacacttccatttctccacaaaacacattatcttttaaattggacagtactacaatctgagtttattatattttctagttcttttcaggggatttaggattaatagataaagacaaagttacacagataaaggcttgtgaggccatactgatatttccatcttcatttccaattcaaaattataagatttttgcaagacttcttctatattacctctttgttgcaattcrtatgcctttataattctggctctcaaaatacaagagatgatagaatgagaataacctgtaattactcatttgcttgatttctcattgtacatacaactgtctcagaataacaatactaatactatcatctcaattatgattactaacaagagttttgttattttgttttgcatttctctgttctccaatttatattatttctacattgatgatttgtatcttctttccttgttcctgatcagtctgactagaagattataaattgtattaatcttctcaaagtatacattttgggtaaattgattaatcaatttatctattgtttgtag

SEQ ID NO: 113962 - DNA, 612 bp, Homo sapiens
attgataggactgtgagtctagtcagataaagagaattttctggacatggggcttttaggagctccaaacttgttggacccctctaagtggtactacagtggtggtttttacaagtacattggttgtgagggaattattattattattatttttgatgtggggtctcactctgtggccaggctggattgcagaggcatgatctcggctcactgcaacctctgcatcccaggttcaattgattctcctgttgcagcccaagtagctgagattacaggtgtgcgccagcacacccagctaatttttgtatttttaatagagacagggtttcaccatgttagccaagattgtctccatctcctcaccttgtgattctcccgcctctgactcccaaagtgctgggattacaggtgtgagcctccrtgccagtctgaggttattgacttttgagggtaccgctatgaggagtgggatggaaatgaggcaatgtaagctaccaaaaagctcactgttctcattgacattcactatttttcttgaataagtgctcctgaaattttgcaaatttttagttaattttagagtcttgaaaacagtttgttttaaatttgttt

SEQ ID NO: 113963 - DNA, 571 bp, Homo sapiens
atatatagtgaaataaataatagagttttttctatcatcttacagattcaaaaatcrctgactaaaaacctcctacaataatgacaaaggcaccacactcaaactaagtcagtgaggaaaaccctgtcctgctcttccttaccatgtaataacaaggtggctgctcctgccaacttcaagccagggctgaagagactatagggtggaactttgtcatctgagtgactcacaaggttttataaacttaactgaaatgtaaagaacaacttccttaacaggttgacaatactgaaagagaggatttaaataagaaattgagacttaaaacctaatactcaaaacatccaagagatatgcaaaaaaatttttttcctacaaaaactaaaataatagtaatttgaataagaacagagatgaaagacatagaaagacagagaaaaaggattctgaagcagctggcataaccatgttctagaaagcatttttaaacactcttgaaacaggtaaaaaaaagaaaatctcagcagaagtatctgaggtacaaaaaagatataaagagaaaccaaagaat

SEQ ID NO: 113964 - DNA, 571 bp, Homo sapiens
atatatagtgaaataaataatagagttttttctatcatcttacagattcaaaaatcgctgactaaaaacctcctacaataatgacaaaggcaccacactcaaactaagtcagtgaggaaaaccctgtcctgctcttccttaccatgtaataacaaggtggctgctcctgccaacttcaagccagggctgaagagactatagggtggaactttgtcatctgagtgactcacaaggttttataaacttaactgaaatgtaaagaacaacttccttaacaggttgacaatactgaaagagaggatttaaataagaaattgagacttaaaacctaatactcaaaacwtccaagagatatgcaaaaaaatttttttcctacaaaaactaaaataatagtaatttgaataagaacagagatgaaagacatagaaagacagagaaaaaggattctgaagcagctggcataaccatgttctagaaagcatttttaaacactcttgaaacaggtaaaaaaaagaaaatctcagcagaagtatctgaggtacaaaaaagatataaagagaaaccaaagaat

SEQ ID NO: 113965 - DNA, 628 bp, Homo sapiens
ttcttctataaaggaatgtaataactaattagtaaccttccaaaaagaacatccttaattacaagttacttactaataaattcaaccaagcatttaagaaagaagtaataccaattctctatattctcttccccaaaatagaagcattagaagtactttctaactcattctatgagcccagcattatctcattatccaaatttagtaaacaattaaaagaaaaaaattcttaaaatatcaaaaactgsagaccttatctctcttatctacatacatctcctgaacacaaacagaaacatccttaacaagtaacatcagcctgtaaaattagcaagatggcaaaacaggaaactcaagttttggttccccacagaaatattttttaaaagcttgcaaatgaataaaataactatatagaagcagtggaaaacagtcaaaagtttacagcttcaagtaaatgaacaaacgaggaaaactcaacttttgtggcatttttgcttcctcttcccccactttctctccatttctgggttatcttagtcttggtctgaagacggtggcatgtaggcccaattgtcacttctctcccttgaaccgaactggagggagaagagcagacggtatttac

SEQ ID NO: 113966 - DNA, 628 bp, Homo sapiens
ttcttctataaaggaatgtaataactaattagtaaccttccaaaaagaacatccttaattacaagttacttactaataaattcaaccaagcatttaagaaagaagtaataccaattctctatattctcttccccaaaatagaagcattagaagtactttctaactcattctatgagcccagcattatctcattatccaaatttagtaaacaattaaaagaaaaaaattcttaaaatatcaaaaactgcagaccttatctctcttatctacatacatctcctgaacacaaacagaaacatccttaacaagtaacatcakcctgtaaaattagcaagatggcaaaacaggaaactcaagttttggttccccacagaaatattttttaaaagcttgcaaatgaataaaataactatatagaagcagtggaaaacagtcaaaagtttacagcttcaagtaaatgaacaaacgaggaaaactcaacttttgtggcatttttgcttcctcttcccccactttctctccatttctgggttatcttagtcttggtctgaagacggtggcatgtaggcccaattgtcacttctctcccttgaaccgaactggagggagaagagcagacggtatttac

SEQ ID NO: 113967 - DNA, 518 bp, Homo sapiens
tactcttgccctaatctagccccttcctactatctcttctgacatagcctatttgctgatgtccccacatccatcctggtctcctaacaatccacaccccacattgcaaccagaatgatcttgccaaaactctatttacttcttcccctgcttgaaactcctcagtggctctccattgttccccaacctcaaatcacactgacttttccttagcccccctcaggtaccatgctccctcstgccatagaatatttgcaaatgttgctctttttgcctgaaatgtccttctcttttcaccccatgccctgcctgagttaaatcatattccctcttcacctcagggcaaacaccacttctcggggaagacagtgttggtttccttgtcatgggttcacacttgcatatctgtcttcttttgtaagagctaccaaagttgtcattttacatttattcaggtgattttgtgattaataaatatccatctaccctcccagactgtaaactccataggagcaagg

SEQ ID NO: 113968 - DNA, 579 bp, Homo sapiens
tgaccccaaacttggatgccacactctgcatgggatggcatcattggttagatttaagagcagggactccaggaattttgctccctggcttcagatcttggttctttcatacactggcttgtgaccttggacaagttccttaatttctgttgcaggggaggaacaactttacctccaccctcttagggcctctggctgggtctgagaattcaattgacacaaaataaaccaacaggagaaaagcatacagatttttatgttgtgcctgtgagcctttgtaagaaaagaaagactcaaataagtggcaaaacctagctgcttatgtagcaggttgaactaagagtggcaattgtggagaagtgactgaaatgtaaaggaggtgaaaggaagataagagttattttaacaatttctgtttgtacagacttctytcagcctccacttcccgtatctggtgaaaagagtgtttcttttctcctgatacatgcagggcagagtgttacttttgtatctactgtcttccaagtgcctctagcttaaaataatccttatgccacagtggcatatttttgggctggc

SEQ ID NO: 113969 - DNA, 547 bp, Homo sapiens
tggaattagcagattagaactttaaagcagctacagaaataaattcaaagacttttttttaaagatgtaaggagtaagaatatgaagaatcttgacagaaaaatgtaaactattttttaaacccagacaataattataaaagtaaaaagtaaaatatctacaatgaaaattttactagatgctcccaaaaggaaattggagcttgaagaagacagggttaatgaacttaaaggcaaatcaatrgaatttatctaatctgaaggacagagatgggggtaggggaattaaagagacccagttttctgttaagcatcatcagtcaggtcagcatacatgtaatttgagtcccagaaggaaaagagagagcaaatgcgttagacaacaaaacatttttgaagaaatcatagtctataatttcccaaatgggttaaaaaaaaatctatttacaaatataaatagctcaagttttatacttgaatatattttggacctctttctatttctgttcccactaagattcaattatttttatttaaatttttatttt

SEQ ID NO: 113970 - DNA, 547 bp, Homo sapiens
tggaattagcagattagaactttaaagcagctacagaaataaattcaaagacttttttttaaagatgtaaggagtaagaatatgaagaatcttgacagaaaaatgtaaactattttttaaacccagacaataattataaaagtaaaaagtaaaatatctacaatgaaaattttactagatgctcccaaaaggaaattggagcttgaagaagacagggttaatgaacttaaaggcaaatcaatagaatttatctaatctgaaggacagagatgggggtaggggaattaaagagacccagttttctgttaagcatcatcagtcaggtcagcatacatgtaatttgagtcccagaaggaaaagagagagcaaatgcgttagacaacaaaacatttttgaagaaatcatagtctataatttcccaaatgggttaaaaaaaaatctakttacaaatataaatagctcaagttttatacttgaatatattttggacctctttctatttctgttcccactaagattcaattatttttatttaaatttttatttt

SEQ ID NO: 113971 - DNA, 547 bp, Homo sapiens
tggaattagcagattagaactttaaagcagctacagaaataaattcaaagacttttttttaaagatgtaaggagtaagaatatgaagaatcttgacagaaaaatgtaaactattttttaaacccagacaataattataaaagtaaaaagtaaaatatctacaatgaaaattttactagatgctcccaaaaggaaattggagcttgaagaagacagggttaatgaacttaaaggcaaatcaatagaatttatctaatctgaaggacagagatgggggtaggggaattaaagagacccagttttctgttaagcatcatcagtcaggtcagcatacatgtaatttgagtcccagaaggaaaagagagagcaaatgcgttagacaacaaaacatttttgaagaaatcatagtctataatttcccaaatgggttaaaaaaaaatctatttacaaatataaatagctcaagttttatacttgaatatattttggacctcyttctatttctgttcccactaagattcaattatttttatttaaatttttatttt

SEQ ID NO: 113972 - DNA, 554 bp, Homo sapiens
gcctgctctctaacgacaaaggagcctgggaaaatgagtaattgtcctgttcagcttttatagtgaagaatagtctcttctcacaaaaattcatatcacagaggaaacataggaaggaaactcagatgttaagaaaccccaaggtatcaaaaactgcttttatgactaattcaaataatcaccgagacaaatgggtagctcaatgtgttcaacaaaatgattcagaaattctgaactgattttcttagcacatgctttgtcttactatgtgaagattccagcttataaagaagaaaatttgcaagttggtcctggagagtgtgaagtgattgatgttcttcaactctttgcttcattatgcacatcatggccctcccaaccttggactgtctatgtaacgaagctttgttgtcccatgggcttgcacaatcattgaacagctcacacttccctccatcctgtgaagcaattactgttctgtaaacaaatgcttrccttatcctccaagctactatttaaaggaagcttgaagctgaacccttctttaaagggaa

SEQ ID NO: 113973 - DNA, 519 bp, Homo sapiens
atccttatgaaatagaataaacccatccacaaagaaagaaagaaagaactgacagtgcagggaaagaggactagaagcagcaagagcacaatgcaggagaggccagcagcaaggataagaaaaaggagtattagaaagagcatggacttagagtcgtagagacaggtctgaatgctggcttagcttcttatttaggagctgtgtggtctggtccaataatgtgattgcatgggctccagtttccttgtctgtaaaatgaagccaatatgactgagcccgaaggtgtcatgaggactcatcgtggtgaatgtctgtgtacagagactggctcaatacacgcagactttattcttctgatcctggtttgtcactgactctgtgggatgctggtccccagyagcctccctgcagtcctgcaagaggccagaagtccagccacttgagaagcacagaatgagctgggaaacttgggagactgtaggtgtctagtttcagacaccccttccagtagactcacca

SEQ ID NO: 113974 - DNA, 620 bp, Homo sapiens
tcctcgttccaccacacccagaccatcgctgcatcctctcttttctacctactggagtctctctgcactgctccctccagcctcctcgccatccctgcatggtctaacctcttccactctcccctcctctttgggtgcagcctcctgactagctccttttcttaatcttcctgcctccaatgtatgcactcaacaagtacctatggcgtgtaccttccttgtgttggtcttaagttggagagcctcgcaggggtgggacaagagtaggccactgggctgctgcgggaamaagacttaaggaggacctactctcgggctactgcaagctcagggcccatgtctgggagtgaaggtctcctcaaatgatgctccttaggcaacttgcctgccttccccaagtcctggccctaaaaccaagataagataaaatagagtgctctttgcccctgcagagcttgcatgccagggagaaacctaagaatcaaatgaacaaacccctaaaataacccgggccagtgccagaaggagcaaggcagagtgctgggagagagagggcacaggtgggcctgatccagtctcagggggtcatagaagttttctctgagaaagaatatttgagc

SEQ ID NO: 113975 - DNA, 621 bp, Homo sapiens
aaaggtactatgctggacaactttgcctgtctcacaaagatgatacagtacaacagtcatggatgaagagaggagtgacttgagggcacccaacttagggaagggccttgacgaatacaagagtccaagactaacagaaaggaggcagcagatggggagargaatgggcacgagggcctcatggcaaggacaagcactgagactacagcctgatctgatgggatgggctgggaggctggagacgagccacaggcatggggctgagggcagcttaccgagggggcttgagtccctccagaagcagtagttctcaagccctgatctgcagaaggatatgtttttgacctaagctggattattaatttttttcccaattcaaagagagaaataataagctaaagataggtttcttgcaattgatatgttcttctctcatgtacgtttctaaacccttagtaccccttactcatctagatgagagtctactataagagggtgtccaattcagcacaaaacacacattttttattcagagcagcatgttccggggctgtgatttctgggtgctgtggcccctcatcattttgcccactgttgctggaaatggtatctggtaagaag

SEQ ID NO: 113976 - DNA, 621 bp, Homo sapiens
aaaggtactatgctggacaactttgcctgtctcacaaagatgatacagtacaacagtcatggatgaagagaggagtgacttgagggcacccaacttagggaagggccttgacgaatacaagagtccaagactaacagaaaggaggcagcagatggggagaagaatgggcacgagggcctcatggcaaggacaagcactgagactacagcctgatctgatgggatgggctgggaggctggagacgagccacaggcatggggctgagggcagcttaccgagggggcttgagtccctccagaagcagtagttctcaagccctgatctgcagaaggatatgtttttgacctaagctggattattaatttttttcccaattcaaagagagaaataataagctaaagrtaggtttcttgcaattgatatgttcttctctcatgtacgtttctaaacccttagtaccccttactcatctagatgagagtctactataagagggtgtccaattcagcacaaaacacacattttttattcagagcagcatgttccggggctgtgatttctgggtgctgtggcccctcatcattttgcccactgttgctggaaatggtatctggtaagaag

SEQ ID NO: 113977 - DNA, 621 bp, Homo sapiens
aaaggtactatgctggacaactttgcctgtctcacaaagatgatacagtacaacagtcatggatgaagagaggagtgacttgagggcacccaacttagggaagggccttgacgaatacaagagtccaagactaacagaaaggaggcagcagatggggagaagaatgggcacgagggcctcatggcaaggacaagcactgagactacagcctgatctgatgggatgggctgggaggctggagacgagccacaggcatggggctgagggcagcttaccgagggggcttgagtccctccagaagcagtagttctcaagccctgatctgcagaaggatatgtttttgacctaagctggattattaatttttttcccaattcaaagagagaaataataagctaaagataggtttcttgcaattgatatgttcttctctcatgtacgtttctaaacccttagtaccccttactcatctagatgagagtctactataagagggtgtccaattcagcacaaaacacacattttttattyagagcagcatgttccggggctgtgatttctgggtgctgtggcccctcatcattttgcccactgttgctggaaatggtatctggtaagaag

SEQ ID NO: 113978 - DNA, 587 bp, Homo sapiens
ctccctcaaatctagatcaaggatcctttcttatcctcccatggcttgcagcgttctctcttataaccctcactaaactatttgtttatttaattgctttcccactaagaacatgagttccttgaggacagagattcttattgctgtatctacagggcatagcagagtgaaatagtcaatgattttttgagtgaataactgtattataatttttttaaaaaaggaactataaccatctaagtccatcttataaccatctaagttatagttttctatcagtattggacaaaactgaaattgggctttaagtctttgagaactttgtacaccctgttaataaatactaagaagaaatgtttgcaatgagcatacactttgttaggkggcaaatagtttcactttcagtgtttcgtggactaagcattccctttgcttataaaactttgcaaaaattatgcatgttctgcgtgctaggtgctagaattcagccagacaaagggtgtgtaccaggccctgctgaattagcatctttgtatggtaatgaagcgtgaagagtggccttttgctgtttctttgtgactctgttc

SEQ ID NO: 113979 - DNA, 569 bp, Homo sapiens
cagtaagttccattattcacacatggcagacagacacaaagacacaaaaaggttgaagaagacaaaacatttgtttaatttcacttgcatgttttagagtcagttatttttaaaacccagggaatgtaatcttgctcataggaaatgctttggaaggcaataaagtagattaaattaaagtatggtttgatggtgatgatttagcaaactgcagtagtgttagtaaaaatgaaatagaagatctctttgcatattatctccctaaagagtaccacataagaaaccctctttgcacataaaataatgagaatatatacatataataaacataaactacaatatatgaaaatatgcttcttccataaactctgtctgccaaacctccaataaggtggaaggatattaaaatacgaactggaaaaaatgagaagggttataagcaacttctagcaggcttgggtttgaaaataaaaccaactcattaacatctccctccctcccttcctagtgtctatgaactgtacatttmgaaatcacccacgctgtgacagagtaaggcatgcaggctt

SEQ ID NO: 113980 - DNA, 634 bp, Homo sapiens
aaacagtgtgaaactcagacctaagcttcaactccgtttttgagcaaagagagaaccatgagccccaaactggggtaaatggcaccaatttgttcagtaagaagaacaaatgggaagagacagygaggaggcacatgcgacctgagattttaacttatgtataaaagggaggtaaaaaataagcccagtggtgttaggtcactgccttttttaatagaatcatagactgtttccatattacaaatcttaccaatgaggtagtgggggctaggaatttgtgtggagctggaaatagaacccaaatcttttgactgccaagtgcagccctgtctggtagagggagataccatctcctttcatgccacaggctgtggagggaggttctccttactaagcattcttccctatccctctccctccttttctccctgcctccctcctcttctcctccaaagcctttctaacaagctcttagttccctaaattgcagaacaaagccagcttcctgctaacccctttggaattcaattacagacatactcaaatgtgttccctgctccagcaccctcagcactaaatagcatataagcacttttgcagggcttaatgtatacttgttgaaaaatgtacatta

SEQ ID NO: 113981 - DNA, 634 bp, Homo sapiens
aaacagtgtgaaactcagacctaagcttcaactccgtttttgagcaaagagagaaccatgagccccaaactggggtaaatggcaccaatttgttcagtaagaagaacaaatgggaagagacagtgaggaggcacatgcgacctgagattttaacttatgtataaaagggaggtaaaaaataagcccagtggtgttaggtcactgccttttttaatagaatcatagactgtttccatattacaaatcttaycaatgaggtagtgggggctaggaatttgtgtggagctggaaatagaacccaaatcttttgactgccaagtgcagccctgtctggtagagggagataccatctcctttcatgccacaggctgtggagggaggttctccttactaagcattcttccctatccctctccctccttttctccctgcctccctcctcttctcctccaaagcctttctaacaagctcttagttccctaaattgcagaacaaagccagcttcctgctaacccctttggaattcaattacagacatactcaaatgtgttccctgctccagcaccctcagcactaaatagcatataagcacttttgcagggcttaatgtatacttgttgaaaaatgtacatta

SEQ ID NO: 113982 - DNA, 636 bp, Homo sapiens
accacctgattaaatcatttatatttaggcaggtgcattttgtaaacactttacctaaaaacaaagccttagaggtagaaawaataatttcaagtatcatctttgtaaaaaatatttctaatttaaaatgtaagctttcttgcacttttaaagtgcaccaagaggtacaaacaagtatacaactctgtcagagattttggaaaatttaaagaatttgatattatcttttttcttttctttctttggtgacgcaatctttgcattttaattatgtgaatgatagaagaaatggttgtgatgttttacacaaggtctcaaaactcagaatgaacaatgtatttttcatttattatatagtagagtatcaaccaagtggtatgagaagtgttccgagtacttaagttgaaataaaacatatttcttggtccttcaatgtcagttctcttaatttcagaatggtgtttggttcaacatatcattagagccaaatagattatcttgaaaggatctgggactttggacccaactggaggcttgactgttggtccaactactttctagcttgtctgaacctaaatttccaccgaataaaatggagataatattggataatacttttcttggagacgtggtatg

SEQ ID NO: 113983 - DNA, 636 bp, Homo sapiens
accacctgattaaatcatttatatttaggcaggtgcattttgtaaacactttacctaaaaacaaagccttagaggtagaaataataatttcaagtatcatctttgtaaaaaatatttctaatttaaaatgtaagctttcttgcacttttaaagtgcaccaagaggtacaaacaagtatacaactctgtcagagattttggaaaatttaaagaatttgatattatcttttttcttttctttctttggtgacgcaatctttgcattttaattatgtgaatgatagaagaaatggttgtgatgttttacacaaggtctcaaaactcagaatgaacaatgtatttttcatttattatatagtagagtatcaaccaagtggtatgagaagtgttccgagtacttaagttgaaataaaacatatttcttggtccttcaatgtcagttctcttaatttcagaatggtgtttggttcaayatatcattagagccaaatagattatcttgaaaggatctgggactttggacccaactggaggcttgactgttggtccaactactttctagcttgtctgaacctaaatttccaccgaataaaatggagataatattggataatacttttcttggagacgtggtatg

SEQ ID NO: 113984 - DNA, 602 bp, Homo sapiens
ttccattgttcattcctgatgctgcttcacattggggggaaaagcttgaagaaaaggggctcaggaaacatctccaattcctccatccagaaaaggaattcaattcttcctattttgtgttttctttttagaatatcattttttattttgctgtaccaacrtaagtgagaaaataaaatggaaacatgtaacaatagagagtctactatggaccagaaaatatgccaaggaatttaacttagtctaatttaatgtgcagaaaatactcacccttctcctggtgagtaatttaaggctcagggagatttggcaacatagccaaggtcacacagccagtaggagttaaattgcatgtggggtgtattggcctttagatggcttttcagccagggtgatcaactcatcctagcttatcagggactttcctggtttactactgaaagttgtgtgtcccaggaaaccccctcactcacagacaaacaagcaaacttggtcactctaacagccaaagttcctcaaattctcaaatcctgtactgtcagtaatcactatttttcatgagattcctgaaggagatattcacacaagaaacaatatcagtt

SEQ ID NO: 113985 - DNA, 602 bp, Homo sapiens
ttccattgttcattcctgatgctgcttcacattggggggaaaagcttgaagaaaaggggctcaggaaacatctccaattcctccatccagaaaaggaattcaattcttcctattttgtgttttctttttagaatatcattttttattttgctgtaccaacgtaagtgagaaaataaaatggaaacatgtaacaatagagagtctactatggaccagaaaatatgccaaggaatttaacttagtctaatttaatrtgcagaaaatactcacccttctcctggtgagtaatttaaggctcagggagatttggcaacatagccaaggtcacacagccagtaggagttaaattgcatgtggggtgtattggcctttagatggcttttcagccagggtgatcaactcatcctagcttatcagggactttcctggtttactactgaaagttgtgtgtcccaggaaaccccctcactcacagacaaacaagcaaacttggtcactctaacagccaaagttcctcaaattctcaaatcctgtactgtcagtaatcactatttttcatgagattcctgaaggagatattcacacaagaaacaatatcagtt

SEQ ID NO: 113986 - DNA, 613 bp, Homo sapiens
gtaaatgaaagtggcattttataagctttaggtaagaaaagcagttatgtgaagttttgtctgccagtaactattgccaaattagccagtcttatttaagctactttacatcttaaataattttagggatgtatctgttttgaaagcatgagtctagtttatgcaagactgaatgataagaattcaaattcaaagctgaatgtgctttgtggtttactgtcctctgcaaagaatttgtctccatttaaaatggaggagtggagaggggcargataccacttcctcagtcacaaagggtttttgccgtgttccttatgtctcttgttatcgtggatctattcctgtaaaacttgtagtcattattatctaaaaaaagcctttgaggcctaactgctgacatataatcaaagtagaattattatgtatcttggtataatccactgtaatcaaagttgtatactctctgattacacgtgcaattgttctacagttatgaaacagttgctgggaatgttcttgagaaccagtttttccccttatcagtccttcatgaaatctgctgctgcatttacagtaaaaatcttaaagtctttgttccctcaaatactcatta

SEQ ID NO: 113987 - DNA, 470 bp, Homo sapiens
gaactggaacttgtgagtagaaagagcatgccgggtttctctgcagggcaggaccgaggtggactcaactttgggctgggtcctgccattaaaccagaaaacctggtaggaaatggtgtgccctcagctcagtagttctcctggatctctttcaaagcaaatccaaattctgtcagaagtaaaccatcatcaggttagactcccaggttttcaggggattaagattaatgaaatctaatcttacaaccaaagatcaccaatcccacaggaaaataatcctctgtaagcgagagtcagcaaaaaacaataaataacagacttggatcttctaggatgaaattatcagaatttgtcagatacrgaatgcaaaataaacaggtataaaatgtttttaaaaattaaaataggaatcactaaaatgcattaacaataagaaactatcaaaatgacagtaggtttgaaaatgaacc

SEQ ID NO: 113988 - DNA, 561 bp, Homo sapiens
taggttgaacaattagacttatatattttgaaaatagctattattgtattttggcattttcagcctcttcaggaatcaaaactcttacttagtctctttttctcttccacaaaacagggaagatgaaaagcttcagagaccaaaatctcctttattcccagataatgtcagcctaaaactagagggrgattgtcaaaataagaaaaaaaattaactcaacatcataggaaatgcacatcaacccaaataggagatttcaggttattaccagatgatttcaattattggggggtctgaagaaggcagaagggagtctagctccagagttggaaggcactttggactccaatgattctcaacagagaggctaagttggaggtattaacaggtgccggtgcagaaaaataggatctgtagatttgaagaccagtctcagatatgatttgggggtggtgcacatgggcaagaagcttaggtgtctgtctatatttcaagtattccaagcatacagccatagggagaaaaatatgtagtaaagagatgggcagaatttttctgaag

SEQ ID NO: 113989 - DNA, 604 bp, Homo sapiens
actttcttcttctgacttaggttgaacaattagacttatatattttgaaaatagctattattgtattttggcattttcagcctcttcaggaatcaaaactcttacttagtctctttttctcttccacaaaacagggaagatgaaaagcttcagagaccaaaatctcctttattcccagataatgtcagcctaaaactagagggggattgtcaaaataagaaaaaaaattaactcaacatcataggaaatgcacatcaacccaaataggagatttcaggttattaccagatgatttcaattattggggggtctgaagaaggcagaagggagtctagctccagagttkgaaggcactttggactccaatgattctcaacagagaggctaagttggaggtattaacaggtgccggtgcagaaaaataggatctgtagatttgaagaccagtctcagatatgatttgggggtggtgcacatgggcaagaagcttaggtgtctgtctatatttcaagtattccaagcatacagccatagggagaaaaatatgtagtaaagagatgggcagaatttttctgaagttcattctctcatttattacctttcc

SEQ ID NO: 113990 - DNA, 553 bp, Homo sapiens
tgttccttgtttcccttactttctttggattgagttttacatttctctttttttttcttttcatatgctatttttcccttccacctgttttataattaatgtgttagaaatatgctctgcgtggattagtttagtggtcacttcagctattttaacatgaatagctgtactagacagggtcaggctatgctgagttaaaaattaccccatatagctcggtgacttaacatagcaaaggttatttcacatcacactacatagctaagtggtcagtgagggactgagacacccaggcagccatctcctggctgccccctctgsaacgtgcagcctccaaggtcatcccagaaggggaagccagggtctacagcaataccaccctgaacacacctatcttgcctgatctcagaaactaggcagggctgggccaggttcaagcttggatgggagaagaagaagagaaagttagtttccctagaaacagactttgagaaaaagattcgggcacagaaagtttatgggggagtattctcaggaacaacccctgcaagga

SEQ ID NO: 113991 - DNA, 472 bp, Homo sapiens
gaattcaaatttccccttcttgtgagggacaccaggcagattggattaggacccwccctaatggcctcttgaaagatcttatctccgaatgcagttgcatctgaggtcctggaggttaggactttaacttaacagatgaattttgggagggacacagttgcctcccagatttagttcataatggcactttaacgaagaagaatctaaggctcagagaagtatgtcacagtccaaaatcatagtacaggccaggcgataagggttttatctctcgacagagccctccccaggcggagcaatgaaggacagtgcacaagaggacaggaaatggagtgtgctgtttgcattgaggtttcagctttgcttccgttacttttgagaacttgaataaatgccctaacctctccaggcctcagtttccttttctgtgaaatgagacaataaaaggctcttcctcacaagctggttgtga

SEQ ID NO: 113992 - DNA, 618 bp, Homo sapiens
gatctcagatttccagcctccagaattgtgagaaaataaatttcagttgtttaggccacaacagtctgtgatactttgttatggcagccctagcaaactaatgcagcataagagttaaataaggtttctcttttggtttaaaaaaaataaaataaaaaggctgggcatggtggctcacacctgtaatcccagcactttgggaggccaaggcaggaggagtgcttgaacccaggagttttgagaccagcctgggcaacacagtgagatcccatctctagaaaaataaaaaattcagtgtttcacccccaggacctatctcagaagaaatattcaataaatgtgtcctaggaatgaaccggcctggccacctctactattgagcaggagcagagttaggaagattgagcaggagcagagagggattcccacctccagcagactctgttagttaaggactgagaatgttccaaatcttgttaatgatctgtcatgaactattktctaggaaatgtcccccagaggggtgtttttcagctctgtacccctaggcccaagaggatgggacagaggtgaataaaatgttattaagaaacctgagtggtagcaaaagaaggccca

SEQ ID NO: 113993 - DNA, 541 bp, Homo sapiens
cacctagcatccagatggacggcagctctgggctttacgccaggatctcaggctggcaaattggaatacaggccaccagacaggtctggtggatcagtcactttgccttaagcaaagcaacctccaaacatcaagtaactaatgtatcgtgttgtccctgctagtggaaggttagtgactcttggtaaacacacctactggctatttatagaactcagtctagggaccagactgggcctttcaacacagtcaagtcaggatgtgggagccaagcagagaggctgggaggtggggcccaatggtctgcaaagcctgcgcayctgctgctgggatggggagttcagggcactcctggcttccaagaaagccaaccccacagtcccaaggtgcttcttcccagatggcattgcagatacatcttgatgagggtatcctagcctggtttcccccgagcagggcccaaatcagaggcttttgcaggatgagttctttgagtacattcctaggaagctgggaagggggcaactggtccaaggaggca

SEQ ID NO: 113994 - DNA, 604 bp, Homo sapiens
tgaattattttataataaacagagacactgctagttcaatagagatagagttcccttccctttttttcttgctcagtatcaatgtctcagggcagtatgtctggaccaaccctccagagatctgcatcacaccagaaacatgaattccccattggctaatgcctctctatgcaaatattgcttcaacaagttgtgtgcagaaaaaaaaattccaccaaccgtcaaaactaaataagtaatttaaacattccaaagaaggtatttgttcccaaggaatttatatcagrgttgcaaacacttgaccaattttcatataaagaatattaacaggacaaggcagcttataatacccaaagaaaggtctataaaatctcagaagaagaagaaaatgaggaaatgaggggataagacttgagttgtgatttcttcaaaggtcagggccttctgtagattccataaggttattgaggagtttggggatgtagtagagattgttttaatccttctgtgaccacttccatgtgtactattttgtgtagaggttttgcccctgaagaatctggagcttccgggtggtctgtatatgagttctaaatctggatgt

SEQ ID NO: 113995 - DNA, 604 bp, Homo sapiens
tgaattattttataataaacagagacactgctagttcaatagagatagagttcccttccctttttttcttgctcagtatcaatgtctcagggcagtatgtctggaccaaccctccagagatctgcatcacaccagaaacatgaattccccattggctaatgcctctctatgcaaatattgcttcaacaagttgtgtgcagaaaaaaaaattccaccaaccgtcaaaactaaataagtaatttaaacattccaaagaaggtatttgttcccaaggaatttatatcagggttgcaaacacttgaccaattttcatataaagaatattaacaggacaaggcagcttataatacccaaagaaaggtctataaaatctcagaagaagaagaaaatgaggaaatgaggggataagacttgagttgtgatttcttcaaaggtcagggccttctgtagattccataaggttattgaggagtttggggatgtagtagagattgttttaatccttctgtgaccacttccatgtgtaytattttgtgtagaggttttgcccctgaagaatctggagcttccgggtggtctgtatatgagttctaaatctggatgt

SEQ ID NO: 113996 - DNA, 567 bp, Homo sapiens
atgcagggtttttaaaatatataatgacttattttcctttggataaatacccagtagcaggattgctggatcaaatggtagatttacttttagtcctttaagaaaaatctctatactgtttttcatagagattgtactaatttacattcccaccagtagtgtataagcattcccttttcgccacacccatgccaacatctattgtttttttgactttttaataatggccattctgactgagtaagttggcatctcactgtggatttaatttgcatttctctgatgattagcaatgctgagcatttttttcatatgtttatgggccccttgtatatcttcttttgagaaatgtctatccayatcacgtgcccactttttgacaggattatttgctttttttttcttgctgatttatttgagttccttgtagattctggatataagtcctttgctggatgcacaggttgcaaatacttccttccattctgtgggttgtctgtttactccaatgattatttattttgctatgcaggagcttataagtatatatattttaaaagtgcttgt

SEQ ID NO: 113997 - DNA, 593 bp, Homo sapiens
ctgtttgaaataaatttctgttgtctataaactatttagtttatatattttgtgagagcccaatgggctaaaacagtgatgtaattggaggtccttggamtcttacaccagtgcaataaagttaccatgtttacatacctgcatacatcatcatgatactcctttccagttggaagggaagataataaacacataaatgaataaaataaacatcaccagatagtgagtccacaagctgtaggaaacactggggtgctttttcactctttggatgtgcctttctcatactgcacctacttacacatcattcattcaacatctttccatccttcatatttcagctccaaatcccctctcttaggaagacttccctaagactactttctccttttacttttccttcatattattcacagagtttgtaattatgaatttgtttatattatcattttactgtctatttacctctgtctaaaccagaagctctaaagagcaggggtatgttttgtcctgcactttttatatgttcctagtagctagcacagttatcctagcttttgtggaagtcgtatctccctgcaatgggaaaatta

SEQ ID NO: 113998 - DNA, 579 bp, Homo sapiens
tcctatgcatatgttccaagtgaatagtacttgttattccatttatttttctcctatcttgaaattctattaaaacgctggtgttctggttatctacagttgcagagaaaaccacctcaaaactaagtgtcacaaaataacaaatatcttattagtgcacatcatgatgtcatgtccatctctgggacctcgactgtaaggacacaaatggctatttgtgtaaatgactgtaagagtgacttgcatggctggagcctggaataatttggcagcttctgcactcatgtcttgcttggtaggtatggcggagtgaatggactytactgagactgttgactagaatgcatacagctggttactccatcatggtagtttcaaggtaatctgacttcttacacagcagtcaaggcttgcagagaaactgttccagtgagctaggaggaagctgcatgaccttttaagatctaggtttggaagtcatgcaaaaacttttctgccacattccattaaaagcccactcagaaagcaagcagggactttggggactcagggggaatgcgtggaaagagggtgaaggat

SEQ ID NO: 113999 - DNA, 606 bp, Homo sapiens
ataaataaatgaataagacaatgaaaacccatgttggcacaagcatatttgtgcaacaagttttaattttaaaagtattgattatgtgtattattatcttgcaattctaaattccaatgctacaaactttgttcagagttgcatgcaggttttggttaaggaatgatctgtgcacataatactaactttttttaatcttccaatgtgtggtttcattacagctttaagtcattattttcgtaagttctgaacatgtttttaaaaacagaaaccaaggctgtggctatatcaatagaggcgtgagaaattgctttatataaacaaattgcttaaatagagatctgaattatggatgacatgtcaccttcttgggctaaaaaaagaaatatttcaataaatttctgccaattcaaagttaaagatttatttaaaagaaaggtgccaaactcttctcagtcaggtaatcaatgagagaatagatttactgatataatttgttatttttgytaccaaaataagtatagtaagagaaaattttttaaaaatgaactagttaaactataggtaattttttttttcagaagaaaagttgagatccaagaggcc

SEQ ID NO: 114000 - DNA, 604 bp, Homo sapiens
agtatcaccccaaggttccctccagccacagccttttcctacccaccaagcctggggcctggtatccaggcaagattggcaagtagacttcactcacatactgcccaataaatggttctactatcttctagtctttgtctgtactttcttcgggttagtagaagtgttcccaacaacttcagaacatgcaaatgtcatcacacaaactctcatcatgcatataactccccattttgaactcccaacatgcatccaatccaataacaggcccrccttttatcagccaaattacctaaggcgtctctacacccttcaggcctcaatcttcaggcaaagttggaaaggtcaactctgtccttaatgcccaactcaccatgctggccttagaaacctgctagtcgtggacaaaaaaaaagttcccttttaccctcgtgagactccatgcaacaccaaaagcaccctttttatagtccctttgaaatcatgtgtggccaaactttagtcttagggccttcacccttaccagactctgagccactcaggagttacctctcctccttaatccagacatggtctttcattagtgaaacagcaaatgaggcca

SEQ ID NO: 114001 - DNA, 550 bp, Homo sapiens
tagaaatttctttggttaaattgaaaaatctgggaataattagcctaattagtctcggttccttagctctcacctctggacttttggtgccacggtctgaatcatcctttcttctcatgaaatgtgggacatatttgcaacttagcaggtttcttagcttgttttcttctaatagaattttgataactcataggcccctttcaatktttttcagtcactgtgtctttcaatttaaggtagtgatctctctctctctctctctgtgtgtgtttgtgtatatatgtgtgtgtgtgtgtatacatgtacacatatatacataaatgaactttgtggatcttctatgaatcttattgaattccactatattagagataaaaacacatccttaagtcttttagatataagtctttccctaccttgggcttctatgagatggctcagagatggcacacttaaggttcctaaaagccttgttgttgatagaggaggtggagcacttttaatctcttttgagagtcttttgtgtgaatatactctgagataccacttt

SEQ ID NO: 114002 - DNA, 312 bp, Homo sapiens
tccttgccttgtaactattttatgccctaggttcttcatctctgaaatgcaaatggtagtgatatctatcctgtagtgttgttacaaagataaataaggtaaatgtcaatttgttcattatgacatagagtaaatgtttactaaatatttgctcttattagtggtgctcacataacaaagmaaaagcaaggactagctttgaatatagatgtaaaaaaggaaaagcttattgaaaatgacatgaccaatgcaaaattacagaatgttcaacggtattgttgacaaatattaaaatgaatattttgtaaactc

SEQ ID NO: 114003 - DNA, 520 bp, Homo sapiens
atcaatgctgtcccatgtgtttgagatttttgaggcacgtatctgtggtacttgctttagacagagttttcagtcagagggaggctttctgctacaacctgacctctggctagaagtctcagagaaggccaaggttactgatttggatattatttgtttagaaacccttccattactattttaactattgaaattgtaattatgattgccttataatagggaaattaagatttcagttacggaatctttttcaatcagggaaaattaatggtgaggaataaactggtctaccaygagcaaacctttcaagctaaggactttgggttgaactttcctttcatcactgctattctatctcccatcatacattctttacatcattcatatttctgattcaattttcctaattttcacacggtttatagcagtaacttttaacattcttctgaagcatactgttcttaaagggcaagagtttttttctgttttgttcatttctttattctcagtacctggaata

SEQ ID NO: 114004 - DNA, 636 bp, Homo sapiens
agaaccccctcccttttcccacaagatatatccctaagtgacttgtgattctgactctggtgatcagttactgttattcttatcacccagtccaggcccagttatagttagacagttctagttatmtaagagagtgcttaaaaaattactggcacctaatggagatatatatatatatatatatatatatatatatatatatatatatatataaagtaatcccttaaaatgcttaatgaaaaaagaagttccatgaccaatatctttggaaaacatcatataaaggatttgtctcttggatattcacaataaacatatataataataaaagttctaaagagtgatggagtagaggagcctgttcaacattatttaatccagtttttctgaaacatagttgatttcagaacattgaataccatcttgtggagctaatgttctacagagcacattttgggcagacctggtttagaacagtcccctcttgttggcttttaacattataggtcagtgaatggagaatcatgattaaaaataaagcttcaatgaggatataattatctcagaaataaatttacaaaggattgaaaatggaaaaatgattcatttagattggttttctgcagtttctttaaa

SEQ ID NO: 114005 - DNA, 636 bp, Homo sapiens
agaaccccctcccttttcccacaagatatatccctaagtgacttgtgattctgactctggtgatcagttactgttattcttatcacccagtccaggcccagttatagttagacagttctagttatataagakagtgcttaaaaaattactggcacctaatggagatatatatatatatatatatatatatatatatatatatatatatatataaagtaatcccttaaaatgcttaatgaaaaaagaagttccatgaccaatatctttggaaaacatcatataaaggatttgtctcttggatattcacaataaacatatataataataaaagttctaaagagtgatggagtagaggagcctgttcaacattatttaatccagtttttctgaaacatagttgatttcagaacattgaataccatcttgtggagctaatgttctacagagcacattttgggcagacctggtttagaacagtcccctcttgttggcttttaacattataggtcagtgaatggagaatcatgattaaaaataaagcttcaatgaggatataattatctcagaaataaatttacaaaggattgaaaatggaaaaatgattcatttagattggttttctgcagtttctttaaa

SEQ ID NO: 114006 - DNA, 636 bp, Homo sapiens
agaaccccctcccttttcccacaagatatatccctaagtgacttgtgattctgactctggtgatcagttactgttattcttatcacccagtccaggcccagttatagttagacagttctagttatataagagagtgcttaaaaaattactggcamctaatggagatatatatatatatatatatatatatatatatatatatatatatatataaagtaatcccttaaaatgcttaatgaaaaaagaagttccatgaccaatatctttggaaaacatcatataaaggatttgtctcttggatattcacaataaacatatataataataaaagttctaaagagtgatggagtagaggagcctgttcaacattatttaatccagtttttctgaaacatagttgatttcagaacattgaataccatcttgtggagctaatgttctacagagcacattttgggcagacctggtttagaacagtcccctcttgttggcttttaacattataggtcagtgaatggagaatcatgattaaaaataaagcttcaatgaggatataattatctcagaaataaatttacaaaggattgaaaatggaaaaatgattcatttagattggttttctgcagtttctttaaa

SEQ ID NO: 114007 - DNA, 461 bp, Homo sapiens
agaatcacgagctcttgagattggtagacactttggagtttatccagtccaagttcccatcagatgcttatccagtctctacttggtcatttcccatcatggagagctaaagagatagaggggaaaaataaaaaattgctttttctcctctctrctctccactccacatgacacttctgacaccagctgtgtaggggttttccccacataccaagcaattctccagtggacaccagctgggtatcccttaattcaatttaattctgacactgtctacctagaggtaacatcagatcccacaggttaagagcttgatcccacaagactgccagaccccaccccgcttaagaggccaatcaatcacaagtagtaggttgtcagctatatttctaactcactggctataaattgcggatcctaggacctcatcttcaggttgactaaattttctagagcagctc

SEQ ID NO: 114008 - DNA, 530 bp, Homo sapiens
acaccatatcattatacaacagcatccccaacaaaactccctccccaacccacctcttccctggcctccctgtcctaaagccagtgacccctcaaagaatatggttgttccatatgggagcctagtcacagaactctaggggaagactcaagatgtgaagtaagaattctgcatggagtacagatggtcaatggggtttcccactctggactgcagaggcccagcttctgaggttgctaggaaacartcacccaggttactgagggaggtgtcgtcgctatccaggtcatggaaaaggggctcggcacctgaaatggagatgaaacactggcatgagggtcttgaagaagtgactcatttcagtgctaggatattcagctgaattcaacaagtgttgcctgagcacaggctccaggtgaaactttctacaaaaagtctatattctctttagggggctcaagtccaaagtgcaacaagtgaaaacaatctaaaccaggatatgacaaagtgctaaattgagtgcagcataa

SEQ ID NO: 114009 - DNA, 607 bp, Homo sapiens
catgtggtctccaggcatctggggtggggtgagaccctgtcggaagggatctgagctgtagacactctgctcgatggccaggagctgctgtggggtgggcagagccgtgtaggggttcatgattccttccatcccagcactcccaccaccgtttgtctgagctgtggaacaaagaagaagccaggtcattctcaacgtgcagcctggcatgtgatttccctgggtcctgattccctcatttataaaataaaatgggatgaggtgacatcagtggtcccagcctttgtcctaccagaggccatcaggaatcaccttggaggacaggaacagggtaggggctgggatgttgaactttgagaacatccttgaaatatattatttcaacaaaggttttgatgctagccrcatgtttggcagtcactagaatagatgtatctaaagatctttctacgataacccagtatgagcccatcagtcaagtgggagttgtgaccagttgacctcattgggttgatgggaagattccataggactgtgtatgctttggaattatatcttgctatgcttgtagatagaattttataagaaaagcaggattcacttcctg

SEQ ID NO: 114010 - DNA, 421 bp, Homo sapiens
aattgtacatcctacaagatctttagacagtcttcctcatgttgtcaaaatgactacataaatttgaaaccccattcatagctatgcatttcctgtataactatttggaaagacttagagaaatttatgacctggagtcctcagtatatttcccttgggtgaaagttacgtggctgtccctaaagaaatctctgaagacaaagatcaacggcatatactgatctacycaagcccgtttttctgaaccaaattccaaattccatggagaaggagttaggattgctcttattggacttcactagagcagggcccacctccaacctgggtaatgtcaggttcccctgaagcacatctgttacaggaaaggggtcctgatccagacccaagagagggttcttggatctcacacaagaaagaattc

SEQ ID NO: 114011 - DNA, 635 bp, Homo sapiens
tcctacttgcaccaccatccaaggacttacaaaatattttatcttttaatatgcaataccacatggcactgcattagaccaagggaaccattttctgacaaagcagctatgatcataggcacatgaaagcaaaatgtactggtgatttcatgttcctcattgagacagtcagcctaatagttagataaytggcctggtaaagcctcagttaagagtccttctcaaggaaatatgcaacagaattgaaatgctatgcttctggatgtatattcgatgaatcattaattaatataatcccaatagcatattgtctcagaaacaatgggtagaaacaggattggtccctcctaccttaactgtcagtatccaccttgtgaaatttgtgtgtctcctactctggaaatctcaggctcttctatgctagaggtctgcttactagggaataaatacttccaccgggagtcaataaggattcctctgatcattaacctccgaatataatcaattcgcctttagtccgttttgacagtatgttagcaatcttattactatgaaaactagccttgttgctctgaagacaagaaaataggaataaggagaaagactggaacccagggaattctctggcacaactc

SEQ ID NO: 114012 - DNA, 423 bp, Homo sapiens
aacatggtgaaaccccgtctctaccaaaaatacataaaatagccaggcatggtggtgcatgcctgtagtccaagctacttgggaggctgaggcaggagaattgcttgaacccaggaggcagaagttgcagtgagctgagatcacaccattgcactccagcctgggcgacagagactctgtctcaaaaaaaagaaagaaraaaaaaagtctccctgaattaatggatgatttaagggaaggaaaaaaattgtggggtcagggaatggagggaagaaaagaacagaagcaaggaaggaagagagaaataaatggcatggattctaatctggtctggtgtgttatgagggaatgaagaggtgagactattctctggcaagaatgataaagcagatacaaaacccctaaatacagtgtgagggtgat

SEQ ID NO: 114013 - DNA, 574 bp, Homo sapiens
tccatgcattatgactaaagctcttgaagataaggaggaaaagttaaaatgctgagccacatttcttctgggcagagctatggagcatttcagactataccttggaatagggcaaggcaaaatgcctagctttaattagagagagagagagagaggctggcattgatggagctaattctttctcgccaaattgctatgtagggaaagttcagtgttagaactgaaatcccaggctaaggaacagcttacctgaattcacaccagtaactctgggcagcttactaaacatagtgcctcagtttgcatatacctattaaaatggggatagaaacattaayacttcaaaaggtccttcgaagttttctttgctggattaaatgagttaatatctctaaagttcttacagcagagaatcacaaagttagcattagatatagttctatttctataaacacaggctgttatcactgttatcatcactagcccatgtttgaatgcaataactctaagtgactaaaataatagagaagggaaaaaaaagaaaaggaaactttctggtgaggagtgaaggtaa

SEQ ID NO: 114014 - DNA, 574 bp, Homo sapiens
tccatgcattatgactaaagctcttgaagataaggaggaaaagttaaaatgctgagccacatttcttctgggcagagctatggagcatttcagactataccttggaatagggcaaggcaaaatgcctagctttaattagagagagagagagagaggctggcattgatggagctaattctttctcgccaaattgctatgtagggaaagttcagtgttagaactgaaatcccaggctaaggaacagcttacctgaattcacaccagtaactctgggcagcttactaaacatagtgcctcagtttgcatatacctattaaaatggggatagaaacattaacacttcaaaaggtccttcraagttttctttgctggattaaatgagttaatatctctaaagttcttacagcagagaatcacaaagttagcattagatatagttctatttctataaacacaggctgttatcactgttatcatcactagcccatgtttgaatgcaataactctaagtgactaaaataatagagaagggaaaaaaaagaaaaggaaactttctggtgaggagtgaaggtaa

SEQ ID NO: 114015 - DNA, 627 bp, Homo sapiens
gtattatttgacatgttacgattaggaaacagttaatgcaacataaaatgtttgaaaactttaaatagagcaagtcagtgctcaagtttccctaatgtgatgttgacttttataaactctcaccatttacctatcaacttggttaccctaaaagccagctatttctataggtccatggtgtccccacagataaagattcccacacaaatccaaaataaaatgtgaagaaatagatttccccccattgcccaggagacggggaaccatggcccccactgtwttccatgcctactttgtgtgcgtttgggctgtgtaagtcatcccaaaccggcccaccgcactcaggctcgcccggcatattagctgatactgatcacctgcccaccgcacatagactcaccaggcatattagctgatattgatcatttggaactgacttaaaaccacctttttacttcagctactcatctaccaccaaaaacccagtgttattcaccaagttggaggttttttacgttattttttctaagtggaatggtaacacatttccatacaactcatttaaaaatttaataccaaagaaaattttataaatttttgttttctatgtaagagaaactgtccagg

SEQ ID NO: 114016 - DNA, 627 bp, Homo sapiens
gtattatttgacatgttacgattaggaaacagttaatgcaacataaaatgtttgaaaactttaaatagagcaagtcagtgctcaagtttccctaatgtgatgttgacttttataaactctcaccatttacctatcaacttggttaccctaaaagccagctatttctataggtccatggtgtccccacagataaagattcccacacaaatccaaaataaaatgtgaagaaatagatttccccccattgcccaggagacggggaaccatggcccccactgtattccatgcctactttgtgtgcgtttgggctgtgtaagtcatcccaaaccggcccaccgcactcaggctcgcccggcatattagctgatactgatcacctgcccaccgcacatagactcaccaggcatattagctgatattgatcatttggarctgacttaaaaccacctttttacttcagctactcatctaccaccaaaaacccagtgttattcaccaagttggaggttttttacgttattttttctaagtggaatggtaacacatttccatacaactcatttaaaaatttaataccaaagaaaattttataaatttttgttttctatgtaagagaaactgtccagg

SEQ ID NO: 114017 - DNA, 565 bp, Homo sapiens
cagaacacgtggacgcaggaaggggaacatcacactccggggactgttgtggggttgggagagtgtrgagagatagcattaggagatatacctaatgctaaatgacgagttaatgggtgcagcacaccagcatggcacatgtatacatatgaaacaaacccgcacgttgtgcacatgtaccctaaaacttaaagcataataataataaaatgtaaaaaaaagtctgtaaaggacatttccttcagttaataacgttaagaagactgtatttatgtagttaaattccaaggacactcagttctttagggatggactgaatgcctggcatcatcgcttacaaaagtgtcttgaggttgatggagcatatattgagaaataaagtttatatattttatttttaccttttaatattatttttccacaaactttttgaggtcccctcatatttccccatctgtgcccaagtgtaggaaaatatgttagatgcagaaagctctgtgtttacaaacgactttatacattatcaaaactgaacattacacaccttctgtgagataggcaaaaa

SEQ ID NO: 114018 - DNA, 578 bp, Homo sapiens
ctagtcacattcattgtgttacttttgactttgttcccatttctggataatgtgagttggtgtcacccttaggatttatgaaaatgaaacaaaacaaaatggtgatgttctgtttgtttgttttcccaaatacaaaagggcctgcattctaccaacacaagtattcagtccagagctctgttgctggtggctgctgactctgccctggaacctccattactttgagaaagataaaggttctgttytttgacccagctgcctgaggcagtgctgcagaatcagaggaggggtctagtagagaaagaaatattgaccccattgagccaacttacatgtagtccagtaaacttagtttcaattgagggtactgctcaatctagcttattcattcccaaactgtcattcaaatatatgtctctactgcttcctcatgaagtaactgttattgtaggatcatatcacaaacaagagaatattttcccttgttctgataccacagagaatgtcacagtagggaaataaatcagcacaggtacagtgattagtcagaagacaggtatggagaacagactgtaaga

SEQ ID NO: 114019 - DNA, 570 bp, Homo sapiens
agaaccctgggcagctcagtgggaccaggaagtctgacaacagaattctccctgacttcagtgtttcccattatagatagctgcagattttcctgattgatcccacaattagtaagaactctctggagtttaaacttcatgccccttgccctcttggggaaggagattatcttcctctaaaatatgagagggtaaagagaagtccttgaggctgaataagcagttatttgatctgcgggggactcaagttttgcctgcctggcatctattcacctttattctgaaacagcatcctrgttctattttgcattatgttttcttgaaaatgctgatttgtccagggatatgcatgagatctaagccaggctatcataattcaaaaccaggaattgctgagagttattgggaaataaaagcagtttctctgagtatttgctaagccagtggcaatatgaaccttgagcttctagtaaccatcttggcctctcagcgagagggccctcccaagagaacagctaacaccatcaaaagaagaggtgagagatgatgggagacagatttttcagcaac

SEQ ID NO: 114020 - DNA, 614 bp, Homo sapiens
tagttatttctattgcagtggagtttagtagaaaagaaaaataaagctatttaccatatatggagtatttgaaagggaaaaggatagtggataatctaatgtaaatgagaagataaaagcatataaaagtaagcatccttctgtaccatgtgttcatggcattctgtatttgcaaatagacagctgctacatgtatttgagctcttgctaacagaccctcatgtgatagagtcccttgtggacagcataattggtgacagaataacgaaaggaagaagaggcaataggcagtataattgttcgcctgcccagaggacagatttagcttttggaatctatctgacatctgacraaaaagagaagctgctggataaattgggtggggtgggagggatacacattaacgattagctataataatgacatcttggagagatttttttggttggtttttttttttaatcataggctaggatcctaaacataaagatagccttcagagtaggattgcttaggagagatgctagtgctttgagccaaagaaacccaaattcaaatttttagaaatataaaacttctgaggaagcttatttacaggttgaatgaaaatggaa

SEQ ID NO: 114021 - DNA, 599 bp, Homo sapiens
ctataaagaaatacctgaggctgggtaatttataaagaaaggaggtttaattggctcacagttctgcaggctgtacaggaagcatagtggcttctgtttctagggaggcctcagggagctttcaatcatggtggaaggcaaaggagaagcaaggcatgtcacatggccagaggaggaaggagaggggcggaggargcgccatacacttttaaacaaccagattgcatgataactcactcattcaacatcaggagaacagcactgggggattggtgatccatgatccaatcatctcccaccaggccccacctccagcactggggattacaattcgacatgggatttggggagggacaagatccaaaacatactacttagttaacacacttgtatcaccaccaggctgagagctattctaacagctctttgtatctttgtatcctcaacacaaagcacagtctttagcatatagtgtttataattatgttacaaatgaataacatagctcatttagtatgaagaaaaataaactatcagtgataataaagaatctatagttgaaaataggtatgattttcaagaaaaatctttttcaaaga

SEQ ID NO: 114022 - DNA, 607 bp, Homo sapiens
agtaacagtttagaagtctcggaatgatagatagaaatgaatagatagatgyaaaggattctgaggtaaaaaccaacaaaacttgaaaatgtattagattcagattagatagcttagaaatttttaatagcatcattgaaaacattttggtcattaaaacatgtcatttcctaatcgtagtgttttcatagcagttcagacttgaaaaggacataaaagttcatcttgtttttatatttgttttcctcagaatggtttgcagcttcataatgagatttattttgaatttccaaaagaataaacagccctaatccattattgaaaatggaattacttggaatatatcatacaacatagcagtttagaataatctgcatgacattagttctacttgttccttaataagagacaaggtttgtaaaatactatagtgtttgtggcttcacatattcctttattcagctgtttctgtgctacattgttagtagtgggtagcaaaacactgttgcagaaggcttacatggatgaattctagtagatgtgccacgttttctttatccagtctattattgatgggcatttgggttggttccaagtctttgctatt

SEQ ID NO: 114023 - DNA, 650 bp, Homo sapiens
ctctgggtcaaagtataggctagaggtaaggatactggcagacttagggatgctggatagacctgtagttcttttaaagttttgttttcaaaggaatttccacaataacacactcatgtgcattgatcagaccaaaacacgttccaaataaaawtcatgagtggatttaaaatgtttagattattcaatttctgttccattactattgaactatataaactattccattacttcagatatttaagtatcaactttagtaagctctttttgttattgtttaaagaaggttgcccatggatctttgcctaatgttaaagctgatcttgtttttaatcctcctttgaaatcctttctagctctggggtgctttgagggtgattggattagacttcgggatatcatttctcagactcagacttagtttttagaaattaaatacacttttttttaaaaaaagaaaaattcttctatgcattctggtacctatatgaacaatacatttgttactatggcaatgaagtcagtagattggaaaccagttattcctcctccctttaaaaaatttgaaaatgtgttaacaagtgactgaaactgttaccttgaacagagtctccaaaactagtctagattttgccaaatgtttactttgt

SEQ ID NO: 114024 - DNA, 650 bp, Homo sapiens
ctctgggtcaaagtataggctagaggtaaggatactggcagacttagggatgctggatagacctgtagttcttttaaagttttgttttcaaaggaatttccacaataacacactcatgtgcattgatcagaccaaaacacgttccaaataaaattcatgagtggatttaaaatgtttagattattcaatttctgttccattactattgaactatataaactattccattacttcagatatttaagtatcaactttagtaagctctttttgttattgtttaaagaaggttgcccatggatctttgcctaatgttaaagctgatcttgtttttaatcctcctttgaaatcctttctagctctggggtgctttgagggtgattggattagacttygggatatcatttctcagactcagacttagtttttagaaattaaatacacttttttttaaaaaaagaaaaattcttctatgcattctggtacctatatgaacaatacatttgttactatggcaatgaagtcagtagattggaaaccagttattcctcctccctttaaaaaatttgaaaatgtgttaacaagtgactgaaactgttaccttgaacagagtctccaaaactagtctagattttgccaaatgtttactttgt

SEQ ID NO: 114025 - DNA, 585 bp, Homo sapiens
tttccatcttccagtgcccagccttctttatgcagccatattctagacatccacttagagatagctcatgcartttctcagaaagcatggatgtctcatcaatatttttttcttaatgtatccccacactcttccacagtgcccagcagagagcaggaattgaagaaatgttggctaaatgaataaatatatcaagttctacagtcaacatttatcccattatgttatgtacacatgcatgcccctcttcctcattattctgcacctgtggatggagctacatccaccaagaaatgcaatctggaaaaccatgcatcttttttcagatttttctttattctatgatgctactgtaagttgcatttttcttttacattatttagttatttcttaatgtttagatataactgactttttgttattaattttgtatccagtaaccattgcaaactatcatattactgctaaaaatttgtctgtagagtttctcctcaatacttactgttttattgagtaaaatgcacctattttaacctccacaaactcctaccattgattctaatttctaggtatctttcaaaccca

SEQ ID NO: 114026 - DNA, 585 bp, Homo sapiens
tttccatcttccagtgcccagccttctttatgcagccatattctagacatccacttagagatagctcatgcagtttctcagaaagcatggatgtctcatcaatatttttttcttaatgtatccccacactcttccacagtgcccagcagagagcaggaattgaagaaatgttggctaaatgaataaatatatcaagttctacagtcaacatttatcccattatgttatgtacacatgcatgcccctcttcctcattattctgcacctgtggatggagctacatccaccaagaaatgcaatctggaaaaccatgcatcttttttcagatttttctttattctatgatgctactgtaagttgcatttttcttttacattatttagttatttcttwatgtttagatataactgactttttgttattaattttgtatccagtaaccattgcaaactatcatattactgctaaaaatttgtctgtagagtttctcctcaatacttactgttttattgagtaaaatgcacctattttaacctccacaaactcctaccattgattctaatttctaggtatctttcaaaccca

SEQ ID NO: 114027 - DNA, 585 bp, Homo sapiens
tttccatcttccagtgcccagccttctttatgcagccatattctagacatccacttagagatagctcatgcagtttctcagaaagcatggatgtctcatcaatatttttttcttaatgtatccccacactcttccacagtgcccagcagagagcaggaattgaagaaatgttggctaaatgaataaatatatcaagttctacagtcaacatttatcccattatgttatgtacacatgcatgcccctcttcctcattattctgcacctgtggatggagctacatccaccaagaaatgcaatctggaaaaccatgcatcttttttcagatttttctttattctatgatgctactgtaagttgcatttttcttttacattatttagttatttcttaatgtttagatataactgactttttgttattaattttgtatccagtaaycattgcaaactatcatattactgctaaaaatttgtctgtagagtttctcctcaatacttactgttttattgagtaaaatgcacctattttaacctccacaaactcctaccattgattctaatttctaggtatctttcaaaccca

SEQ ID NO: 114028 - DNA, 585 bp, Homo sapiens
tttccatcttccagtgcccagccttctttatgcagccatattctagacatccacttagagatagctcatgcagtttctcagaaagcatggatgtctcatcaatatttttttcttaatgtatccccacactcttccacagtgcccagcagagagcaggaattgaagaaatgttggctaaatgaataaatatatcaagttctacagtcaacatttatcccattatgttatgtacacatgcatgcccctcttcctcattattctgcacctgtggatggagctacatccaccaagaaatgcaatctggaaaaccatgcatcttttttcagatttttctttattctatgatgctactgtaagttgcatttttcttttacattatttagttatttcttaatgtttagatataactgactttttgttattaattttgtatccagtaaccattgcaaactatcatattactgctaaaaatttgtctgtagagtttctcctcaatacttactgytttattgagtaaaatgcacctattttaacctccacaaactcctaccattgattctaatttctaggtatctttcaaaccca

SEQ ID NO: 114029 - DNA, 558 bp, Homo sapiens
tgttttttgagacagagtcttgctctgttgcccaggctggaggctggagtgcagtggcactatcacagctcaatgcaacctccgcctcccaagttcaagcaattttcctgcctcagcctcctaagtagctgggattacaggcatgagccaccacggcccggctaattttttgtgtgtttttagtagagacggggtttcaccatgttggccatggtcaggagttggtctcgaactcctgacctcaagtgatcctcccacctcggcctcccaaagtgctgggattacaggcgtgagccactgctcctagccaacctagggattttttaaacacaagaaacatgaaaacagtagaacagggtacccaaggaggaagaactgtgggtctccattaggggagaagtgggacagatgtctgyaaattccatttatccatctcttcaacacataggagagtgaccagttttgtgggcaaatggagtctgggttttgcctggaggaaaagggagaagaaatgacttctctaggtcttctttagctcagggcagaaagcatgatggt

SEQ ID NO: 114030 - DNA, 655 bp, Homo sapiens
gaattcccgcttccaacgaaatcctcaaaactagccaaatatccacttgcagattccacaaaaagagcatttcaaaactgctctatcaaaagaaaggttcaactttgttagttgagtagatacagcataamcaagtttctgagaatgcttctgtccagtttttatgggaagatatttcctttttcaccttagccctgaaagcgctccaaaagtccagttccagatactacaaaaggagtgtttcaggactgctctatgaaagggagtgttcaacttttgacttgaatgcaaacatcagaaagcagtttctcagaacgctgctgtgtgctttttatatgtattcccgcttccagcgaaatccccaaagctagccaaatatccacttgcagattccagaaaaagagtgtttcaaaactgctccttcaaaacggtggttcaattctcttagttgagtacacacatctcaaataagtttctgagaatgcttctgtctagttgttatgggaagatatttccttttccaacataggcctgaaagcgctccaaatgtccacttccagatactacaaaaggagtgattcaaacctgctctatgatagggaatgttcaactctgtgtcctgaatacaaacatcacaaagatgtttctcagaacg

SEQ ID NO: 114031 - DNA, 423 bp, Homo sapiens
ttatgggaagatatttcctttttcaccttagccctgaaagcgctccaaawgtccagttccagatactacaaaaggagtgtttcaggactgctctatgaaagggagtgttcaacttttgacttgaatgcaaacatcagaaagcagtttctcagaacgctgctgtgtgctttttatatgtattcccgcttccagcgaaatccccaaagctagccaaatatccacttgcagattccagaaaaagagtgtttcaaaactgctccttcaaaacggtggttcaattctcttagttgagtacacacatctcaaataagtttctgagaatgcttctgtctagttgttatgggaagatatttccttttccaacataggcctgaaagcgctccaaatgtccacttccagatactacaaaaggagtgattcaaa

SEQ ID NO: 114032 - DNA, 655 bp, Homo sapiens
gaattcccgcttccaacgaaatcctcaaaactagccaaatatccacttgcagattccacaaaaagagcatttcaaaactgctctatcaaaagaaaggttcaactttgttagttgagtagatacagcataaacaagtttctgagaatgcttctgtccagtttttatgggaagatatttcctttttcaccttagccctgaaagcgctccaaaagtccagttccagatactacaaaaggrgtgtttcaggactgctctatgaaagggagtgttcaacttttgacttgaatgcaaacatcagaaagcagtttctcagaacgctgctgtgtgctttttatatgtattcccgcttccagcgaaatccccaaagctagccaaatatccacttgcagattccagaaaaagagtgtttcaaaactgctccttcaaaacggtggttcaattctcttagttgagtacacacatctcaaataagtttctgagaatgcttctgtctagttgttatgggaagatatttccttttccaacataggcctgaaagcgctccaaatgtccacttccagatactacaaaaggagtgattcaaacctgctctatgatagggaatgttcaactctgtgtcctgaatacaaacatcacaaagatgtttctcagaacg

SEQ ID NO: 114033 - DNA, 423 bp, Homo sapiens
ttatgggaagatatttcctttttcaccttagccctgaaagcgctccaaaagtccagttccagatactacaaaaggagtgtttcargactgctctatgaaagggagtgttcaacttttgacttgaatgcaaacatcagaaagcagtttctcagaacgctgctgtgtgctttttatatgtattcccgcttccagcgaaatccccaaagctagccaaatatccacttgcagattccagaaaaagagtgtttcaaaactgctccttcaaaacggtggttcaattctcttagttgagtacacacatctcaaataagtttctgagaatgcttctgtctagttgttatgggaagatatttccttttccaacataggcctgaaagcgctccaaatgtccacttccagatactacaaaaggagtgattcaaa

SEQ ID NO: 114034 - DNA, 423 bp, Homo sapiens
ttatgggaagatatttcctttttcaccttagccctgaaagcgctccaaaagtccagttccagatactacaaaaggagtgtttcaggactgctctatgaaagggagtgttcaacttttgacttgaatgcaaacatcagaaagcwgtttctcagaacgctgctgtgtgctttttatatgtattcccgcttccagcgaaatccccaaagctagccaaatatccacttgcagattccagaaaaagagtgtttcaaaactgctccttcaaaacggtggttcaattctcttagttgagtacacacatctcaaataagtttctgagaatgcttctgtctagttgttatgggaagatatttccttttccaacataggcctgaaagcgctccaaatgtccacttccagatactacaaaaggagtgattcaaa

SEQ ID NO: 114035 - DNA, 623 bp, Homo sapiens
gctgtgtgctttttatatgtattcccgcttccagcgaaatccccaaagctagccaaatatccacttgcagattccagaaaaagagtgtttcaaaactgctccttcaaaacggtggttcaattctcttagttgagtacacacatctcaaataagtttctgagaatgcttctgtctagttgttatgggaagatatttccttttccaacataggcctgaaagcgctccaaatgtccacttccagatactacaaaaggagtgattcaaacctgctctatgatagggaatgttcaactctgtgtcctgaatacaaacatcacaaagatgtttctcagaacgctgcagtctgcaatttgtatgaattcccgcttccaacgaaatcctcaaaactagccaaatatccacttgcagattccacaaaaagagcgtttcaaaacttctctatgaaaagraaggttctactcctttagttgaggacacacatcacgagtaagtttctgagaatgcttctgtctagtttttatgggaagatatttcctttttcaccttaggccggaaagtgctccaaatgtccacttacacacactacaaaaagagtgtttcaaacctgctctgtgaaagggaat

SEQ ID NO: 114036 - DNA, 535 bp, Homo sapiens
aactctgtgtcctgaatacaaacatcacaaagatgtttctcagaacgctgcagtctgcaatttgtatgaattcccgcttccaacgaaatcctcaaaactagccaaatatccacttgcagattccacaaaaagagcgtttcaaaacttctctatgaaaaggaaggttctactcctttagttgagkacacacatcacgagtaagtttctgagaatgcttctgtctagtttttatgggaagatatttcctttttcaccttaggccggaaagtgctccaaatgtccacttacacacactacaaaaagagtgtttcaaacctgctctgtgaaagggaatgttcaattctgtgacttgaatgcaatcatcacaaagaactttctgagaatgctgctgtctgctttttatatgtaatcccgtttccaacgaaatcctcaaatctagccaaatagccacttgcagattccacaaaaagagtgtttcaaaactgttctgtctaaagaaatgttcaactgtgttagttgaggacacacatcagaa

SEQ ID NO: 114037 - DNA, 522 bp, Homo sapiens
aagaaatgttcaactgtgttagttgaggacacacatcagaaactagtttctgagaatgcttctgtctagttgttatgggaagatatttccttttccaacgtaggccwgaaagcgatcaaaatgtccacttccatatactaaaaaaagagtgtttcaaacctgctctaccaaagggaatgttctactctgtgacttgaatgcaaacatcccaaagaagtttctgagaatgcttctgtctagatttcatctgaagacaatcccgtttccaacgaaatcctcaaggctaggcaaatatcctcttgcagattccagaaaaagagtgtttcaaaactgctccttcaaaacggtggttcaattctcttagttgagtacacacatctcaaataagtttctgagaatgcttctgcctagttgttacgggaagatatttccctttccaacataggcctgaaagcgctccaaatgtccacttccagatactacaaaaagagtgtttcaaacctgctctaccaaagggaatgt

SEQ ID NO: 114038 - DNA, 522 bp, Homo sapiens
aagaaatgttcaactgtgttagttgaggacacacatcagaaactagtttctgagaatgcttctgtctagttgttatgggaagatatttccttttccaacgtaggcctgaaagcgatcmaaatgtccacttccatatactaaaaaaagagtgtttcaaacctgctctaccaaagggaatgttctactctgtgacttgaatgcaaacatcccaaagaagtttctgagaatgcttctgtctagatttcatctgaagacaatcccgtttccaacgaaatcctcaaggctaggcaaatatcctcttgcagattccagaaaaagagtgtttcaaaactgctccttcaaaacggtggttcaattctcttagttgagtacacacatctcaaataagtttctgagaatgcttctgcctagttgttacgggaagatatttccctttccaacataggcctgaaagcgctccaaatgtccacttccagatactacaaaaagagtgtttcaaacctgctctaccaaagggaatgt

SEQ ID NO: 114039 - DNA, 522 bp, Homo sapiens
aagaaatgttcaactgtgttagttgaggacacacatcagaaactagtttctgagaatgcttctgtctagttgttatgggaagatatttccttttccaacgtaggcctgaaagcgatcaaaatgtccacttccatatactaaaaaaagagtgtttcaaacctgctctaccaaagggaatgttctactctgtgacttgaatgcaaacatcccaaagaagtttctgagaatgcttctgtctagatttcatctgaagacaatcccgtttccaacgaaatcytcaaggctaggcaaatatcctcttgcagattccagaaaaagagtgtttcaaaactgctccttcaaaacggtggttcaattctcttagttgagtacacacatctcaaataagtttctgagaatgcttctgcctagttgttacgggaagatatttccctttccaacataggcctgaaagcgctccaaatgtccacttccagatactacaaaaagagtgtttcaaacctgctctaccaaagggaatgt

SEQ ID NO: 114040 - DNA, 522 bp, Homo sapiens
aagaaatgttcaactgtgttagttgaggacacacatcagaaactagtttctgagaatgcttctgtctagttgttatgggaagatatttccttttccaacgtaggcctgaaagcgatcaaaatgtccacttccatatactaaaaaaagagtgtttcaaacctgctctaccaaagggaatgttctactctgtgacttgaatgcaaacatcccaaagaagtttctgagaatgcttctgtctagatttcatctgaagacaatcccgtttccaacgaaatcctcaaggctaggcaaatatcctcttgcagattscagaaaaagagtgtttcaaaactgctccttcaaaacggtggttcaattctcttagttgagtacacacatctcaaataagtttctgagaatgcttctgcctagttgttacgggaagatatttccctttccaacataggcctgaaagcgctccaaatgtccacttccagatactacaaaaagagtgtttcaaacctgctctaccaaagggaatgt

SEQ ID NO: 114041 - DNA, 553 bp, Homo sapiens
gtttcaaaactgctccttcaaaacggtggttcaattctcttasttgagtacacacatctcaaataagtttctgagaatgcttctgcctagttgttacgggaagatatttccctttccaacataggcctgaaagcgctccaaatgtccacttccagatactacaaaaagagtgtttcaaacctgctctaccaaagggaatgttctactctgtgacttgaatgcaaacatcccaaagaagtttctgagaatgcttctgtccagattttacctgaagacaatcccgtttcccacgaaatcctcaaagctatgcaaatatcctcttgcagattctacaaaaagagtgtttcaaaactgctctatgaaaagaaaggttcaactctgtcagtagagggcacacatcagaaacaagtttctgagaatgcttgtgtctagttgttatgggaagatatttcctttttcaacataggcctgaaagcgctccaaatgtccacttccagatactacaaaaggagtgattccaacctgctctatgatagggaatgttcaactctgt

SEQ ID NO: 114042 - DNA, 553 bp, Homo sapiens
gtttcaaaactgctccttcaaaacggtggttcaattctcttacttgagtacacacatctcaaataagtttctgagaatgcttctgcctagttgttacgggaagatatttccctttccaacataggcctgaaagcgctccaaatgtccacttccagatactacaaaaagagtgtttcaaacctgctctaccaaagggaatgttctactctgtgacttgaatgcaaacatcccaaagaagtttctgagaatgcttctgtcyagattttacctgaagacaatcccgtttcccacgaaatcctcaaagctatgcaaatatcctcttgcagattctacaaaaagagtgtttcaaaactgctctatgaaaagaaaggttcaactctgtcagtagagggcacacatcagaaacaagtttctgagaatgcttgtgtctagttgttatgggaagatatttcctttttcaacataggcctgaaagcgctccaaatgtccacttccagatactacaaaaggagtgattccaacctgctctatgatagggaatgttcaactctgt

SEQ ID NO: 114043 - DNA, 553 bp, Homo sapiens
gtttcaaaactgctccttcaaaacggtggttcaattctcttacttgagtacacacatctcaaataagtttctgagaatgcttctgcctagttgttacgggaagatatttccctttccaacataggcctgaaagcgctccaaatgtccacttccagatactacaaaaagagtgtttcaaacctgctctaccaaagggaatgttctactctgtgacttgaatgcaaacatcccaaagaagtttctgagaatgcttctgtccagattttacctgaagacaatcccgtttcccacgaaatcctcaaagctatgcaaatatcctcttgcagattctacaaaaagagtgtttcaaaactgctctatgaaaagaaaggttcaactctgtcagtagagggcacacatcasaaacaagtttctgagaatgcttgtgtctagttgttatgggaagatatttcctttttcaacataggcctgaaagcgctccaaatgtccacttccagatactacaaaaggagtgattccaacctgctctatgatagggaatgttcaactctgt

SEQ ID NO: 114044 - DNA, 565 bp, Homo sapiens
ttctgatgtgtgtcctcaactaacacagttgarcatttctttagacagaacagttttgaaacactctttttgtggaatctgcaagtggctatttggctagatttgaggatttcgttggaaacgggattacatataaaaagcagacagcagcattctcagaaagttctttgtgatgattgcattcaagtcacagaattgaacattccctttcacagagcaggtttgaaacactctttttgtagtgtgtgtaagtggacatttggagcactttccggcctaaggtgaaaaaggaaatatcttcccataaaaactagacagaagcattctcagaaacttactcgtgatgtgtgtcctcaactaaaggagtagaaccttccttttcatagagaagttttgaaacgctctttttgtggaatctgcaagtggatatttggctagttttgaggatttcgttggaagcgggaattcatacaaattgcagactgcagcgttctgagaaacatctttgtgatgtttgtattcaggacacagagttgaacattccctatcatagagcaggtttgaa

SEQ ID NO: 114045 - DNA, 203 bp, Homo sapiens
attccaacctgctctatgatagggaatgttcaactctstgtcctgaatacaaacatcacaaagatgtttctcagaacgctgcagtctgcaatttgtatgaattcccgcttccaacgaaatcctcaaaactagccaaatatccacttgcagattccacaaaaagagcatttcaaaactgctctatcaaaagaaaggttcaactt

SEQ ID NO: 114046 - DNA, 519 bp, Homo sapiens
cctagccttgaggatttcgttggaaacgggattgtcttcagatcaaatctagacagaagcattctcagaaacttctttgggatgtttgcattcaagtcacagagtagaacattccctttggtagagcaggtttgaaacactctttttttagtatatggaagtggacattttgatcgctttcaggcctacgttggaaaaggaaatatcttcccataacaactagacagaagcattctcagaaactagtttctsatgtgtgtcctcaactaacacagttgaacatttctttagacagaacagttttgaaacactctttttgtggaatctgcaagtggctatttggctagatttgaggatttcgttggaaacgggattacatataaaaagcagacagcagcattctcagaaagttctttgtgatgattgcattcaagtcacagaattgaacattccctttcacagagcaggtttgaaacactctttttgtagtgtgtgtaagtggacatttggagcactttc

SEQ ID NO: 114047 - DNA, 519 bp, Homo sapiens
cctagccttgaggatttcgttggaaacgggattgtcttcagatcaaatctagacagaagcattctcagaaacttctttgggatgtttgcattcaagtcacagagtagaacattccctttggtagagcaggtttgaaacactctttttttagtatatggaagtggacattttgatcgctttcaggcctacgttggaaaaggaaatatcttcccataacaactagacagaagcattctcagaaactagtttctgatgtgtgtcctcaactaacacagttgaacwtttctttagacagaacagttttgaaacactctttttgtggaatctgcaagtggctatttggctagatttgaggatttcgttggaaacgggattacatataaaaagcagacagcagcattctcagaaagttctttgtgatgattgcattcaagtcacagaattgaacattccctttcacagagcaggtttgaaacactctttttgtagtgtgtgtaagtggacatttggagcactttc

SEQ ID NO: 114048 - DNA, 519 bp, Homo sapiens
cctagccttgaggatttcgttggaaacgggattgtcttcagatcaaatctagacagaagcattctcagaaacttctttgggatgtttgcattcaagtcacagagtagaacattccctttggtagagcaggtttgaaacactctttttttagtatatggaagtggacattttgatcgctttcaggcctacgttggaaaaggaaatatcttcccataacaactagacagaagcattctcagaaactagtttctgatgtgtgtcctcaactaacacagttgaacatttctttagacagaacagttttgaaacactctttttgtggaatctgcaagtggctatttggctagatttgaggatttcgttggaaacgggattacatataaaaagcagacagcagcattctcagaaagttctttgtgatgaytgcattcaagtcacagaattgaacattccctttcacagagcaggtttgaaacactctttttgtagtgtgtgtaagtggacatttggagcactttc

SEQ ID NO: 114049 - DNA, 463 bp, Homo sapiens
tccagatactacaaaaggagtgtttcaggactgctctatgaaagggagtgttcaacttttgacttgaatgcaaacatcagaaagcagtttctcasaacgctgctgtgtgatttttatatgtattcccgcttccagcgaaatccccaaagctagccaaatatccacttgcagattccagaaaaagagtgtttcaaaactgctccttcaaaacggtggttcaattctcttagttgagtacacacatctcaaataagtttctgagaatgcttctgtctagttgttatgggaagatatttccttttccaacataggcctgaaagcgctccaaatgtccacttccagatactacaaaaggagtgattcaaacctgctctatgatagggaatgttcaactctgtgtcctgaatacaaacatcacaaagatgtttctcagaacgctgcagtctgcaatttgtatgaattc

SEQ ID NO: 114050 - DNA, 537 bp, Homo sapiens
tccaaaagtccagttccagatactacaaaaggagtgtttcaggactgctctatgaaagggagtgttcaacttttgacttgaatgcaaacatcagaaagcagtttctcacaacgctgctgtgtgmtttttatatgtattcccgcttccagcgaaatccccaaagctagccaaatatccacttgcagattccagaaaaagagtgtttcaaaactgctccttcaaaacggtggttcaattctcttagttgagtacacacatctcaaataagtttctgagaatgcttctgtctagttgttatgggaagatatttccttttccaacataggcctgaaagcgctccaaatgtccacttccagatactacaaaaggagtgattcaaacctgctctatgatagggaatgttcaactctgtgtcctgaatacaaacatcacaaagatgtttctcagaacgctgcagtctgcaatttgtatgaattcccgcttccaacgaaatcctcaaaactagccaaatatccacttgcagattccacaaaaaga

SEQ ID NO: 114051 - DNA, 592 bp, Homo sapiens
aaccactcacaccccagggggatgagctctccaagcccaggattctggcaagagaggtgaagaaagtggatgtgcagagtttggctggggaataggacatgctcctgagcaaaagcccatcctcactcagcgctaacatcagcagcagcccaaaaggtgaggcctgggggycttatgcagttgctttcttgggactcctgtaggctacatatgtttctctgtcttctgttctggaacatcaggttggttgggtggaaggaacctatctggaatcagacctatctgtatttgagctttgtaagttttatcaagagattcagcctccctgaatctattttctcatctgtaaaatggagataatgccaggtttacagagttgagagtttgacacatggagagtaaagcacttcacacagtgcctgatgtatggtaaacaggaatggtagctgctgtcttgtccccttatagtgaaagttctgaggttccccatctttcagggggtctagaggatcaaaactctttatttatttatttattttattttttatttttttgagacaggttctcactctgtcacccaggctggagtgca

SEQ ID NO: 114052 - DNA, 511 bp, Homo sapiens
acctcccatcacacacacacaagtttcatttaatatggcagcaagctcaggcttgaagtgcaagatcctaccatctttatcacagmcggtagggatgcaccctgggttgtggtttctgcggtataaccccttgagtgcatttcttgtcaacacaaagacgtaagaactaaagggacaacttgtctaccactcacccacccagcattctcctaaactgccagagaccctcctattgaacagagagaaaatgggagtcacaaagggaatattagaccatagaaattctgaaatacagcctgatgtgtgcttccacttacttgatttggacttcatgggaaccatcctctgtggctttttgtggtaccttcttggctctttgttgtatccttttcataagcaatgacctgtgttttcagctaagtagtttcttcagccagcttcctccctgtagaagctcttaggtcctaaggcctcttttcatttttactgtcttgttgtcttttaagccaag

SEQ ID NO: 114053 - DNA, 511 bp, Homo sapiens
acctcccatcacacacacacaagtttcatttaatatggcagcaagctcaggcttgaagtgcaagatcctaccatctttatcacagacggtagggatgcaccctgggttgtggtttctgcggtataaccccttgagtgcatttcttgtcaacacaaagacgtaagaactaaagggacaacttgtctaccactcacccacccagcrttctcctaaactgccagagaccctcctattgaacagagagaaaatgggagtcacaaagggaatattagaccatagaaattctgaaatacagcctgatgtgtgcttccacttacttgatttggacttcatgggaaccatcctctgtggctttttgtggtaccttcttggctctttgttgtatccttttcataagcaatgacctgtgttttcagctaagtagtttcttcagccagcttcctccctgtagaagctcttaggtcctaaggcctcttttcatttttactgtcttgttgtcttttaagccaag

SEQ ID NO: 114054 - DNA, 561 bp, Homo sapiens
tgagggcttggctcccatgagctaattacctccacaaagcctcaccttctgataacatcacctctgtgattaagtttcagcatatgagttctgggaggatgcaaatgtcagacaataccagatgcttattgtatcatttcctctgcttgctttgagtttaatttgttcttcttctttttyagtttcttctctttttttagtttcttaagataaaagtcaagaccattgacttgagagtcttctaatatagacattaagtgctaaaaaattttaagtactgttgtagctgtgttccacaaatcctgatatgtaatattttcattttcattcagttcaaaatactctctaatttctctttgcatcgtgtctttgacctagggttatttagatgtgtattactttgttttaaaatatttgaatattttgatgagatattttgttactaatttgtgacttgattgccatgtggtcagggaacatactttgtatgacttaaatctttctgacttaattctttcattaagattgattgcaggccgggtgcagtggctcacgcctgta

SEQ ID NO: 114055 - DNA, 519 bp, Homo sapiens
gcagaaaataatcttattttgtaaatcaaatttgtctaaattatatgaagctactgttgaaaaatatggtgtgtttcctactgaaatacattatcttttaaaagaaaggataatggcatgcatgtagggtacctttaaaaagaggattcactgcataacagcaccttggttttagcacaaggatcaacaaattggtgcttgtggagcaaatccagcccactgcctgttttcataaggaaatttccttgaaatgcagccacacttatgccctttataattcacaaggcctaaaatatttactaactggctctttacaaaaakagctgtccaattcttggttcagtagagctaagatcctctgttgtattttagtaagttttacccagtatattgaaaagctgacacggaacatgaatccccatgtgcaatcccttggcaatattcagattaatttgaggatctggtatttcagcactcacacattgacagcaaaaaacaaaaatttaataactagaattc

SEQ ID NO: 114056 - DNA, 392 bp, Homo sapiens
gaattcatcacgttccatagcttgaaaaaaatagctcaagaagtctggctctactcttcacttctgccatccctatggaattgtcagccagcacacagaaacggttctcagaaaacagaagcatcatcaacttctcagggttatggtagtgatttttaaggccaaaacatcccagtctcatctagtaacctattcaagcagttacagtttataagcagtcgcttgagaggtaacactttaaatctccagtcrtttacagtgtcattggtttacttttgccctcagaaaaagttccaaattccttaacatgtaatataaacacccacattcatttggttcttgtcaagttactcaggcttatctctcaccacttactttactctgcccctttg

SEQ ID NO: 114057 - DNA, 561 bp, Homo sapiens
tgagggcttggctcccatgagctaattacctccacaaagcctcaccttctgataacatcacctctgtgattaagtttcagcatatgagttctgggaggatgcaaatgtcagacaataccagatgcttattgtatcatttcctctgcttgctttgagtttaatttgttcttcttctttttcagtttcttctctttttttagtttcttaagataaaagtcaagaccattgacttgagagtcttctaatatagacattaagtgctaaaaaattttaagtactgttgtagctgtgttccacaaatcctgatatgtartattttcattttcattcagttcaaaatactctctaatttctctttgcatcgtgtctttgacctagggttatttagatgtgtattactttgttttaaaatatttgaatattttgatgagatattttgttactaatttgtgacttgattgccatgtggtcagggaacatactttgtatgacttaaatctttctgacttaattctttcattaagattgattgcaggccgggtgcagtggctcacgcctgta

SEQ ID NO: 114058 - DNA, 455 bp, Homo sapiens
gtgttgtgtgatttcattttttaaaaatttatcatgacttgctttatggtcaaacatgttgttgatcttggagtatgttctttgtgcagatgagaaaaaagtgtattctgtagttgtttggtggagtattctgtagatgtctgttaggtccaattagtcaagtgttaaatttaagcccagaagttctttgttagttttttgtctcaatgatttgccttaacactatcaatgagatgttgaagatccccactgttattgtgtgactgagtcttttggtaggtctggaagtacttggttgtttttgaatgtgggtgctccagtgttgggtgggtatgtatttaggatagggatgtcttcttggcgaagtgartcctttatcattgtgtaatgcccttcttcatccttttttggctgttgttggtttaaagtctgttttatctaagaataacaacccc

SEQ ID NO: 114059 - DNA, 561 bp, Homo sapiens
tgagggcttggctcccatgagctaattacctccacaaagcctcaccttctgataacatcacctctgtgattaagtttcagcatatgagttctgggaggatgcaaatgtcagacaataccagatgcttattgtatcatttcctctgcttgctttgagtttaatttgttcttcttctttttcagtttcttctctttttttagtttcttaagataaaagtcaagaccattgacttgagagtcttctaatatagacattaagtgctaaaaaattttaagtactgttgtagctgtgttccacaaatcctgatatgtaatattttcattttcattcagttcaaaatactctctaatttctctttgcatcgtgtctttgacctagggttatttagatgtgtattactttgttttaaaatatttgaatattttgatgagatattttgttactaatttgtgayttgattgccatgtggtcagggaacatactttgtatgacttaaatctttctgacttaattctttcattaagattgattgcaggccgggtgcagtggctcacgcctgta

SEQ ID NO: 114060 - DNA, 500 bp, Homo sapiens
tttgcaacctagccatctgacaaaggtctaatatccagcatctgccaggaacttaaatttacaagaaaaaaaacaaacaaccccatcaaaagtgggcaaaggacatgaacagatacttttcaaaagaakacataacatgtggccaagaaggctacgaaaaaaatgctcaaactcactaatcattagagaaatgcaaatcaaaaccacagtgagacaccatctcacaccagtcagaatgactattattaaaaggtcaaaaactaacagaagctggcaagttgtggagaaaaggggacgtttatgcacttctggtgggaatttaaacttgtttagtcattgtggaaagcagtttggcgatttctcaaagaacttagaattgccatttgatccagcagtcccattgctttccccattgctttttttaagtggagttgttgaaggttggatggttgtaggtgtgctgcattatttcttagctctctattctgttccattggtat

SEQ ID NO: 114061 - DNA, 544 bp, Homo sapiens
aaaaaaaatggagaaataccgcttctgtacctttagtatatgctataaatctttcgaggacattttgaaacagtattatttatcttataggtcaaaaaccaaatatatcctgaggctgactttgctgactcaatggagccatctgaaatagcctcagaggattgtgaattgtctcactctgtttatgagaattttatgttgctgattgaacaacttagaatggagtataaaggtaggaccactgcataaatgcaaggccttttgatgtatcctgcagtaatgtgtgtatacattgctgagaactgaygtgtgatagtgaagctcatctcagaaatacgctcagtgttaaaatagagaactaacttatactctacgccaaagagctatgataactccactgtacttttctcagtgtgagtggcattcccagtctttttgttgactctttctctcctattccttcccccaatgtcaggttaccatttttttctccacctggaatgctgcgagaatcttaggaatcttagaactgttttcccaaata

SEQ ID NO: 114062 - DNA, 544 bp, Homo sapiens
aaaaaaaatggagaaataccgcttctgtacctttagtatatgctataaatctttcgaggacattttgaaacagtattatttatcttataggtcaaaaaccaaatatatcctgaggctgactttgctgactcaatggagccatctgaaatagcctcagaggattgtgaattgtctcactctgtttatgagaattttatgttgctgattgaacaacttagaatggagtataaaggtaggaccactgcataaatgcaaggccttttgatgtatcctgcagtaatgtgtgtatacattgctgagaactgacgtgtgatagtgaagctcatctcagaaatacgctcagtgttaaaatagagaactarcttatactctacgccaaagagctatgataactccactgtacttttctcagtgtgagtggcattcccagtctttttgttgactctttctctcctattccttcccccaatgtcaggttaccatttttttctccacctggaatgctgcgagaatcttaggaatcttagaactgttttcccaaata

SEQ ID NO: 114063 - DNA, 544 bp, Homo sapiens
aaaaaaaatggagaaataccgcttctgtacctttagtatatgctataaatctttcgaggacattttgaaacagtattatttatcttataggtcaaaaaccaaatatatcctgaggctgactttgctgactcaatggagccatctgaaatagcctcagaggattgtgaattgtctcactctgtttatgagaattttatgttgctgattgaacaacttagaatggagtataaaggtaggaccactgcataaatgcaaggccttttgatgtatcctgcagtaatgtgtgtatacattgctgagaactgacgtgtgatagtgaagctcatctcagaaatacgctcagtgttaaaatagagaactaacttatactctacgccaaagagctatgataactccactgtacttytctcagtgtgagtggcattcccagtctttttgttgactctttctctcctattccttcccccaatgtcaggttaccatttttttctccacctggaatgctgcgagaatcttaggaatcttagaactgttttcccaaata

SEQ ID NO: 114064 - DNA, 418 bp, Homo sapiens
tacagcaaacatctgcctaggcatccaggcatttccatacatcctctgaaatccaggcaggggatcccaaacctcaattcttgacttctgtgcacttgcaggctcaataccacatggaagcttccaaggttatggacttgcaccctctcaagccatgacctgagctctatgttggcccctttcagccacagctggagtggttgggacacaggacaccaagtacctaggcygcacacagcatggggaccctgggcttggcacacaaaaccactttttcctctgaggcctccaggcctgtgatgggaggggctgctgtgaagacctctgacatgacctggagacattttccccattgtcttggggattagtcttcagttcctctttacgtatgcaaatttctgcagctggtttgaatttc

SEQ ID NO: 114065 - DNA, 577 bp, Homo sapiens
tgaggagaatacattaataccaattttggaaattatcttaaaatatcttgtttgaaagtaaaacaaataaattaatttccaatcaaggtatattgtctaaggattaatatttaacagtatgatttaagattctcaggcttagaattcaatatacagcatcaatatcactgtttctttaaggagaacacatttccctaccagargatacagaattggaagttgttgttctgggtagtttgcctgtattattttttaatccatattgcactcctataaggtaggtaatatcatccttatataacagaatgtaaaagtgaagtccaactttatcaatgataatctgccataattggtgaagccggaatgatatttatctagcctcaaaatatactcttataatagccacagtatatttcactattgaggattagagaatgctgcctaaggaaatcctaacatatatttgattgccctttgtttagctctgacctccatcagaacaaacatctgcagaactgtgattttggtcactttgtacctgctcttgtatgtcttcttttctgattctcataattct

SEQ ID NO: 114066 - DNA, 592 bp, Homo sapiens
tatgaaatctaggcagaggttcccaaacctcaactcttgtcttcctgcaagcctgaaggcccaacaccatatggaagctgccaagacttggggcttacaccctctgaagtcatggcctgaggtgtaccttggcctcgattagccatatctggaactagagtgtctaggacactgaacgccatgccccgaggctgcacagagcagtgggagtcctggtcctggttcacaaaatcactttttcctctaaggtctctgggcctgtgatgggaggggctgccatgaagatctccgaaatgccctggagatattttcctcattgtcttggctattaacatttagctccctgtcacttatgcaattttctgcagctgccttgaatttctcaccataaaatggattttttcctttctactgcattgtcagtctgcaaattttccacacttttatgccctagttcacttttacacataagttccaatttcagatcatcactttgtgaatgcatatgactatatrctttcagaaaaagccaggttacatcttgaatgctttgctgcttagaaatttcttctgccagataccctaaatcatc

SEQ ID NO: 114067 - DNA, 563 bp, Homo sapiens
tctctcagtgaggccttcctggccaagtcctgctccccacaccctggcacttcccattcccattttcccactctttttgcaggggaggggatgttcattgtgcttatcccctttcaacatcgtgtataacttccgtttcttttttttcttatctgacccaccctattaattagaatagaagctcatgagagcaaggaattttgtctatttggttcacaagatcctacaacagttgcctggcatgttatactgttatattgtcaaataaatgggtgaatggatcctggyacccaacagacctagtgctaaatcccagaatgctcttcactatttctactagaagatgtaggagaggtaaatacatctccttccttgatatccaagaattcccaatttaggtatgtcaattaggcctttaccatggtttttgctaaaattaatcagtcacctatgttcgtcacttggctacgtccattttttagttttctgtatgttttcctttttatcccttctgtttttgacactaccagtagagcatacttaaatgttaagatgtttaaggc

SEQ ID NO: 114068 - DNA, 557 bp, Homo sapiens
cctgaatacattttactagagtttagagaattgtaatagttgcattgtttctctggttacaacctcaaaatgcactgcagatttcttcaactgaaattgctccaatgttaatatgttgtgggaatgaaagactgatttcagcacttaagctacaccaccagaggaaacagcagtgaggagaaaccaagcgcgatcatgggacaagaggtcttttcttcctgtcttcatctgctgatctgctcacctgatattcactgagcaccaagtttatgccaggtaattgcactaggtgctgaaaacagaatagaaccctggctaagaggcccatttcagccctcatggagctttgaattaattgttgatgtayacttttttttttaacctctaaattacatcattttattgtcataatgactagccatttggtggcagaaatgattatcctgcaaaatgacaagtaaataacagaagctagcctagaattaaaaaatggctaatggaattttacatagtcgtttaaataaatatgcaaacatacaaaacaaacaaaacaatat

SEQ ID NO: 114069 - DNA, 399 bp, Homo sapiens
gtactctcccattctgagtccataaaagccctggacccagccacactaggagggagaccacccaacttcaggcgggggaccatcctcacattacctctccacygagagctgttctgtcactcaataaaattcttctttgccctcctcgccctttgattttagcataacctcatttttcttggatgtgggacaagaactcaagaaccaccaaatatgggtatgagctgtaacataggtgggctgggatgcacctggcccagctgcgggctgagcatggatctcactgtgtgcatgggatctgggccagggcacaagctcaggtcctgggctgagcgaggccagggcagggatgtcgctggccacggaggtccctagatggcaaaatgaccaagaaaaatc

SEQ ID NO: 114070 - DNA, 446 bp, Homo sapiens
tcacgtaatttctgcatttattttgcatgttgacatgacaatcagctggtttcacaagagttggaaattatttgtamgcacgcttcatgagtttagcactttgcaagccattttcagtaaatcaacatggtgtttaactttttctgtcttacagttgacaaacactgacagtgaagctccatgagtgtaaactgtttataaattgataagcttgtattgaataggaccagataaccaatcagatttgaagcaattttcagatgattctgaataaaacttggagttaataatgtttattttgggaatagaagtatacttgatttttgtttattttttggtcacctattgtgtatgaaaattgatattttagggacaattattacataaagtatttgtaaattttttaacatttttatttcctattacctttgcttctactttgttta

SEQ ID NO: 114071 - DNA, 639 bp, Homo sapiens
aggtacaatggtttggatgtaaaattatcatgtggcacatttcacttgtaaataggttcagcatgatcccctgcctcaaatttaaaagataacaaatgtattgttggcatatgtagactttcagtaagaatttattttttaaaaaagctatttataaacttaaagagcttgatggataggaatctgatctcattgtatatgtttaatacacagaggtagagaaaatgaaaagattcaattcaggaagctcaaaggagatatatccaacacatagaaaagcaatagaagaaaagaactgcaaatggtgtagagagattcctgaaagaagctttgctcattgtcactttatactttaggaaaggctatcttgcctgactcttaacaggctaccttacctctaaatcccatgttgccatattaaagagcacctagtattactcctggtcctagagcaaaatcttgcactctgtcacctagctaaggttgctttatcatcgactrtgctttgtggtagagcttttgtatttttactcagtattgaattttcagcacctagaatcttgttttaacatgtcactgattgcagagaataaataactaaataaacaaagcatcaagtatttgtagtaggttagcaag

SEQ ID NO: 114072 - DNA, 538 bp, Homo sapiens
aagaccacctcaagagaaatgaatgcatgcagaggaaagagactacgcggaggaacgtgagaagatgagtgcatttagcatgaaacctataacatctgacctttcaccaagatcatagcccaactcatagctgcatgtttaattggatcacttaacgtcagtgtagacacatcagtagagtgtcttggaatrgccttttttctcacatccaagtcaggaagttaatagcccaaagagatgacataatagcagaaatttagattccatgtgaatattctctaattataacaaaataattaggctatgtaccaatcccttttcatctgcctttatcagtgttgcctcaaaaagaaagcagtgaatgccctctccaaagttacttagcttgagaacctccaccttcttagaggtcctctagtgataagtagaagatggactttcaggtccaaagtggtgtgatcaaagtgcgacccttccaactgaacaactgagtgacagtcagcaagttcctttaccatcttagccataacgtattcat

SEQ ID NO: 114073 - DNA, 384 bp, Homo sapiens
ggcagcgattccagagccatcacaactcctggctgaaaccaaacatgacagatttaccattgggcaggctgctccatttattatttaacrctcgcaataaatatttgcatgacccagtgctggagggaacgctctgtgataactcactgcattttcctgccaaacaccagcacagtcggattccgaagctgcagcagagaatattttatgctattctaaaaatccaggtgatggccccttgttagaaaaccttttctcatccatttccatagaggaaaaaaggagcagggagaccttagctccgagaagcaactagaggaggaagaagaggaggaggaagatgctgacaggtgacatttacttagcacttactgagtgccaggc

SEQ ID NO: 114074 - DNA, 608 bp, Homo sapiens
gcttgaacccgggaggtggaggttgcagtgagccaagaatgcgccactgcactccagcctgggcgacagagtgagactctgtctcaaaaaaagaaaaaaaaaaggctaggcatggctgtaatctcagcactttgggatgctgaggtgggcagatcacctgaggtcaggagttcaagaccagcctgaccaacatggagaaaccccatctctactagatacacaaaattagctgggtgtggtggtacatggctgtaatcccagctactcaggaggctgaggcaggacaattgcttgaacctgggaggcagaggttggggtgagctgagatcctgccattgcactccagcctgggcgacaagagtgaaactctgtctcaaaaaaaacaaaaaaacaaacaaaygaaaaacataccctagactgagtaattcataaaggaaagagatttaattgactcagggaggcctcgggaaacttacaatcatggcagaagggaaagcaaacatgtccttcttcacatggcggcagaaaggggaagaatgagcaaaagaagaaaaagccccttataaaaccatcagattttgtgagaactcattcactatcataagaac

SEQ ID NO: 114075 - DNA, 535 bp, Homo sapiens
actaggcaatatgcacttctttggttttgctcttcctctttctctctttcccttatccctgctttcttgagattgcgtgacccaatgaaacattyacatatttgtatcaggcactgttggtaggctaagataacctccatccccaaaacctatgacacatggggtatctcctgaaggatgccattcaagttaatccccaaacattatggcttaaagccacaactgtttttattatagatcatgattttgagggtcaggaattcaagcaggacccagctgggcagttcttctgctcacacagtatcatctgaggtcactcagtagtattcagagggcttcggggctgctctgaagggtctagtgcagttttagtgatgtgccaggcaccttggtgggtgtattagtccattttcatgctcttaataaagacatacctgagactgggtcatttttacaggaaagaggtttaatggactcagagttccacatggctggggagcctcgcaatcatggtggaaggcaaggaggagcaagt

SEQ ID NO: 114076 - DNA, 535 bp, Homo sapiens
actaggcaatatgcacttctttggttttgctcttcctctttctctctttcccttatccctgctttcttgagattgcgtgacccaatgaaacattcrcatatttgtatcaggcactgttggtaggctaagataacctccatccccaaaacctatgacacatggggtatctcctgaaggatgccattcaagttaatccccaaacattatggcttaaagccacaactgtttttattatagatcatgattttgagggtcaggaattcaagcaggacccagctgggcagttcttctgctcacacagtatcatctgaggtcactcagtagtattcagagggcttcggggctgctctgaagggtctagtgcagttttagtgatgtgccaggcaccttggtgggtgtattagtccattttcatgctcttaataaagacatacctgagactgggtcatttttacaggaaagaggtttaatggactcagagttccacatggctggggagcctcgcaatcatggtggaaggcaaggaggagcaagt

SEQ ID NO: 114077 - DNA, 535 bp, Homo sapiens
actaggcaatatgcacttctttggttttgctcttcctctttctctctttcccttatccctgctttcttgagattgcgtgacccaatgaaacattcacatatttgtatcaggcactgttggtaggctaagataacctccatccccaaaacctatgacacatggggtatctcctgaaggatgccattcaagttaatccccaaacattatggcttaaagccacaactgtttttattatagatcatgattttgagggtcaggaattyaagcaggacccagctgggcagttcttctgctcacacagtatcatctgaggtcactcagtagtattcagagggcttcggggctgctctgaagggtctagtgcagttttagtgatgtgccaggcaccttggtgggtgtattagtccattttcatgctcttaataaagacatacctgagactgggtcatttttacaggaaagaggtttaatggactcagagttccacatggctggggagcctcgcaatcatggtggaaggcaaggaggagcaagt

SEQ ID NO: 114078 - DNA, 390 bp, Homo sapiens
ttctgctcacacagtatcatctgaggtcactcagtagtattcagagggcttcggggctgctctgaagggtctagtgcagttttagtgmtgtgccaggcaccttggtgggtgtattagtccattttcatgctcttaataaagacatacctgagactgggtcatttttacaggaaagaggtttaatggactcagagttccacatggctggggagcctcgcaatcatggtggaaggcaaggaggagcaagtcacgtcttacatggatggcagcaggcaaaaagagagcttgtgcagggaaactccctgttataaaaccatcagatctcatgagacttactatcatgagaatagcatgagaaagacccacccccatgattcaattacctcccac

SEQ ID NO: 114079 - DNA, 535 bp, Homo sapiens
actaggcaatatgcacttctttggttttgctcttcctctttctctctttcccttatccctgctttcttgagattgcgtgacccaatgaaacattcacatatttgtatcaggcactgttggtaggctaagataacctccatccccaaaacctatgacacatggggtatctcctgaaggatgccattcaagttaatccccaaacattatggcttaaagccacaactgtttttattatagatcatgattttgagggtcaggaattcaagcaggacccagctgggcagttcttctgctcacacagtatcatctgaggtcactcagtagtattcagagggcttcggggctgctctgaagggtctagtgcagttttagtgatgtgccaggcaccttggtgggtgtattagtccattttcatgctcttaayaaagacatacctgagactgggtcatttttacaggaaagaggtttaatggactcagagttccacatggctggggagcctcgcaatcatggtggaaggcaaggaggagcaagt

SEQ ID NO: 114080 - DNA, 555 bp, Homo sapiens
gtaaaggttaatgcgatagaatttacgaaagaataaatgaatgaacgaatgcctaaaatttgaggcaaaatctaacatttggagagattgacaggagcagagctgatctttccagagaacttagcatcttctagagctcgctgatgctaattttaacatctaccctttattgagcagttattatgtatgtaaatctttatgcacattatctcattgattattgtagcaactctatgaaatgagcactagcattagcctcattctgcacaggggaggatgggggactcaatgaggctgagtgactttacagggtcacagagctgttaagtggcagcgctgggccttgaggttggactttaagatccacactcttcagcattctctgacactgccttcttttccattcttcaacatcagtcccctctacaataatcctgctsagagaccatgtattaggccattcttgcattgctataaagaattacctgagactgggtaatttataaagaaaagaggtttaattggctcatagttccacaggctgtacaggaaaca

SEQ ID NO: 114081 - DNA, 454 bp, Homo sapiens
agcacatggacttaattagtgagataaagtgtgaccaaatctcctaacactttaacctttaaaaagaaacagtgagtttggaaattagaaacatcttgaaattagagaataaaatgcttttttatgttcttagcttatggttctcacagagaaatgaataacattctaggatttggtgtaactttcaatgctggaatagtttcatcatggctatgttgttttgtactgagctacattctttgtgatgtctttcatagaaatcaagtattggaagatagcttaaaaacagtaaatccaatatcttgcctacaggtccaaccttcccccgctcttcctcytccttctcctcctccttcacctcctcctcctcctccttcttcttcttcttcttcttattattattattattattattttgccttgttgacatggagaacctgaaaagtgagaaaaa

SEQ ID NO: 114082 - DNA, 580 bp, Homo sapiens
gcttatgccttatcatggtttataatgaccagcaaatggcccccatgaacccagtttcactgaatctaattttctgaatatggttccaacatcttgcaaaacttggggaaaataaatgccagaaaatggggccataatgctgggaggtcaagagaagagctcyctaatggcccaactggggggacactggggagaatgtcccccatccccataatgtttctctaaacacctcccagtctgccagaatcttagcaggaaagattcaggccttcatttagtctagttgaaacacaaattactgtgccaagaatgtattatatgctaagctcatcacccaactctcaagcttgtatcctactgtgagtggcagatcagagcttctccggagggcagctgtggtgggcagggcaggatgggctaggagccatacgaggaggcttagagaaagtgacaaggtactgaatattgtcttcctatttctgcttggagagaactagtatcaaaacactaaaatgctcggttactttggaaaatgattttttccaggctttcctcatcctcctcttcctctaggtaggtt

SEQ ID NO: 114083 - DNA, 580 bp, Homo sapiens
gcttatgccttatcatggtttataatgaccagcaaatggcccccatgaacccagtttcactgaatctaattttctgaatatggttccaacatcttgcaaaacttggggaaaataaatgccagaaaatggggccataatgctgggaggtcaagagaagagctccctaatggcccaactggggggacactggggagaatgtcccccatccccataatgtttctctaaacacctcccagtctgccagaatcttagcaggaaagattcaggccttcatttagtctagttgaaacacaaattactgtgccaagaatgtattatatgctaagctcatcasccaactctcaagcttgtatcctactgtgagtggcagatcagagcttctccggagggcagctgtggtgggcagggcaggatgggctaggagccatacgaggaggcttagagaaagtgacaaggtactgaatattgtcttcctatttctgcttggagagaactagtatcaaaacactaaaatgctcggttactttggaaaatgattttttccaggctttcctcatcctcctcttcctctaggtaggtt

SEQ ID NO: 114084 - DNA, 580 bp, Homo sapiens
gcttatgccttatcatggtttataatgaccagcaaatggcccccatgaacccagtttcactgaatctaattttctgaatatggttccaacatcttgcaaaacttggggaaaataaatgccagaaaatggggccataatgctgggaggtcaagagaagagctccctaatggcccaactggggggacactggggagaatgtcccccatccccataatgtttctctaaacacctcccagtctgccagaatcttagcaggaaagattcaggccttcatttagtctagttgaaacacaaattactgtgccaagaatgtattatatgctaagctcatcacccaactctcaagcttgtatcctactgtgagtggcagatcagagcttctccggagggcagctgtggtgggcagggcaggatgggctaggagccatackaggaggcttagagaaagtgacaaggtactgaatattgtcttcctatttctgcttggagagaactagtatcaaaacactaaaatgctcggttactttggaaaatgattttttccaggctttcctcatcctcctcttcctctaggtaggtt

SEQ ID NO: 114085 - DNA, 580 bp, Homo sapiens
gcttatgccttatcatggtttataatgaccagcaaatggcccccatgaacccagtttcactgaatctaattttctgaatatggttccaacatcttgcaaaacttggggaaaataaatgccagaaaatggggccataatgctgggaggtcaagagaagagctccctaatggcccaactggggggacactggggagaatgtcccccatccccataatgtttctctaaacacctcccagtctgccagaatcttagcaggaaagattcaggccttcatttagtctagttgaaacacaaattactgtgccaagaatgtattatatgctaagctcatcacccaactctcaagcttgtatcctactgtgagtggcagatcagagcttctccggagggcagctgtggtgggcagggcaggatgggctaggagccatacgaggaggcttagagaaagtgacaaggtactgaatattgtcttcctatttctgcttggagagaactagtatcaaaacaytaaaatgctcggttactttggaaaatgattttttccaggctttcctcatcctcctcttcctctaggtaggtt

SEQ ID NO: 114086 - DNA, 623 bp, Homo sapiens
tgaaactaagcttggggttatattgtacatactgatgtgtagcctgctttcccttttaatttatcatgaccatttcctgtgtcattgttagggacagctatcctttcgttggcccaacaccttcctcattgattgcccattgttctatagcatttcaggggtgcagtgggctgtgactgtatgaggtgatccccctctactacagggcaagacattccctttgtcacacaaggtagaaattgagcctgaggggttgcagctctctcatgaatggtggtcctgtgacttggggctgtgggccttccctggaaggaagggaagcagagaaggatgatctatagcgtgagagcagagcgagtagacaaagctcatcagagaggcactggtgagaagcagggcgtgtgcctttctgggttccctctgcacccactgatcctggcttagatcaccttccattgggccagatgggtaagggagcccacaaacatggtgtgtgacgacaaggggagcaccaaggccttctctgcctttgggaggtcctttgtacattgcagcccttgctgccctgccttgggctgctgggcagtcyctctgatggtgtgtctctcctcacactctcttca

SEQ ID NO: 114087 - DNA, 574 bp, Homo sapiens
ccctcttctaaattatatgctaatgtagttatgtatttgaattctcactatatattttttaatgcacaaacattattgattaaaacaatcaatttgcatttatttttacctaaatgcccatttatcaatatttatcaatatgcatttctcagcaccctcctaaacactctttaactgctttctacatctcttgtgtctgttttcttttacctaaagaacattcctgggtgtttgttttttttgttttttgttttttttttttaggtacaggttctttggcaacaaattactcaagttttgcttgtccgaaatgtctttacttcaccttgatgtttcaagggtgtttttttctaggcaggcctctaggttgccagccatttttcttcagcactttgatgatattatttttctatctttgtcttccatgtggctgttgagatgtcggctgtcrgcatgattgtgctccttctgtgttagccttgatgcagggcaggtgagccccacagtggggcttagcccagagggttcttggctttgcccaggaaagtattcaagggcaagctggaggtggaag

SEQ ID NO: 114088 - DNA, 543 bp, Homo sapiens
gctgtgtgagctttctttgctgcaaagagaagagagaagatatgatttagaactagtttcaagaaatgtgtatctataaagacccctgttgaagggaaagtaaccctagaatgggaacgagccttagctagaggccagtggtgacgagactgggcattcccctctggctgggccttgagtggtcccctaatgaagcagctactgagayccattgccctctagaagcaccctccccacacttaccttttacatgtggtttattttcctctgtgatgtagatatacgcggtggtgggcctccctttcagggagaagactcctagctcatcctgcaggtcaacatgcagctggcagaaggaaagcagggatgagtgctaggcttacaggctgctcatgggctttgagtctggggtgagatactgtgctgtgtttggggcaggaccccaaaaaggtattatgcctagtattcactttttttgaatttcttacgagagataaataataaatattagacctggagaggacataagaacattcagtcaga

SEQ ID NO: 114089 - DNA, 543 bp, Homo sapiens
gctgtgtgagctttctttgctgcaaagagaagagagaagatatgatttagaactagtttcaagaaatgtgtatctataaagacccctgttgaagggaaagtaaccctagaatgggaacgagccttagctagaggccagtggtgacgagactgggcattcccctctggctgggccttgagtggtcccctaatgaagcagctactgagatccattgccctctagaagcaccctccccacacttaccttttacatgtggtttrttttcctctgtgatgtagatatacgcggtggtgggcctccctttcagggagaagactcctagctcatcctgcaggtcaacatgcagctggcagaaggaaagcagggatgagtgctaggcttacaggctgctcatgggctttgagtctggggtgagatactgtgctgtgtttggggcaggaccccaaaaaggtattatgcctagtattcactttttttgaatttcttacgagagataaataataaatattagacctggagaggacataagaacattcagtcaga

SEQ ID NO: 114090 - DNA, 321 bp, Homo sapiens
atttcatcttgtatgtggatgaagcttggctttaagcccagccctatattctcargctctgggacctaggggaaggatttagctttttaagcctcagtttccctaactgtagaatcgggataataatacaaagtcggaagagttgttgtgagggcaaaaggaggcagtaaatataaatcacttagcacagtgcttgtcacatgggaagggctaaaacatgctcatcatttcaccttatcctcagaatctgatgcccccaaatctcccttaccagcagaatatgcagctggaggtaggcctgtctggagctggcactcacct

SEQ ID NO: 114091 - DNA, 559 bp, Homo sapiens
cctttagccattcttatagggtaagtctactggtgacaaattcttttagctttgtttcatttgagaaagtcgattttccatttatccctgagaaatatttttgctggatataagattctgggtycacagttattggttctctacacttgaaaatattgtgccactttcttttgggtctctatggtttttgtaagaaatctgctgtcattcaaggttcatttctctcttgatgtgttcaagatttttttttcttttctttaattttcagaagtttgactatgatgtgtgtgggtaaggatttcttttggtttctcctatttgggttggctcagattcttgagtctgtaggtttacatctttttgccaaatttgaaaagttttctgtcattattcctttgagtatattttcagtcccaccctcttttgtaactctttctggaactccaatgacaagcgcattagatctttagatcttttgttatggttccacagatccctgagcatcaattcattttttctcattagacttaaatagactttcaagggactcaaaacagag

SEQ ID NO: 114092 - DNA, 542 bp, Homo sapiens
cccacggtggacttgacggccgcaaaccctatcggattcaggttacctgaacacgatctcatatttccccacattcctccmcacggcggacttgatggccttacatctgatgggattccagttacctgaacgcgatctcatatttcccacggttcttcaattgcaggggctgcttcgcctcctctgtgaccctgacaatcccaaaatccagtcccccttcagctcctgcagagaccaggggccagggcagagaggggtgaatgggcatgagagtgggaagcaggggaagtgcctgttgaaattcacatggaaaacgcatggtgacagtttaagagaatttgttttctgaaagtactgtggctagaaaagcctcttataattgaatctgggcaaacaaacaacagatgctgctcttgatgcactctacagggctggtccctctggattccctccatcctaggatcattgcctttcatgtctaccatcagctaaaactttcagtatttaaaaaagtcttgcataaagttgggatattacacata

SEQ ID NO: 114093 - DNA, 560 bp, Homo sapiens
cctaaatttcagggatcccactaccatcttcgtgatttgtaagcrcacagtttgatgagttgtatacacatctgtggaactatcaccacattaataaacagaatgtttccatcatcctaaaaagttgctttgtgcaaacactcatctgcttaatatcactagagattaatttgcccacactttcatagaaatgaaattggaaacatgtacaaatttgtgtctgacttcctctgtttggcatgatgtttttgagatttgtccatgtttttgcatggagcaatgattctgttctttctttggagcagtattccatagtgtggatgttttcccatctttttgttgatggacacctttactatttctagcttttagatactatgaatcaagttgctatgaacatctgtgtacaagtctttttgtagacatatgttttcattcttcttgggtaaattccttggaagcgaattgctgggttgtatggtatatgtatatttaacattacaagaaactgccaaccagttttccaaaattgttgtaccactttacactaccacctgcat

SEQ ID NO: 114094 - DNA, 560 bp, Homo sapiens
cctaaatttcagggatcccactaccatcttcgtgatttgtaagcacacagtttgatgagttgtatacacatctgtggaactatcaccacattaataaacagaatgtttccatcatcctaaaaagttgctttgtgcaaacactcatctgcttaatatcactagagattaatttgcccacactttcatagaaatgaaattggaaacatgtacaaatttgtgtctgacttcctctgtttggcatgatgtttttgagatttgtccatgttwttgcatggagcaatgattctgttctttctttggagcagtattccatagtgtggatgttttcccatctttttgttgatggacacctttactatttctagcttttagatactatgaatcaagttgctatgaacatctgtgtacaagtctttttgtagacatatgttttcattcttcttgggtaaattccttggaagcgaattgctgggttgtatggtatatgtatatttaacattacaagaaactgccaaccagttttccaaaattgttgtaccactttacactaccacctgcat

SEQ ID NO: 114095 - DNA, 573 bp, Homo sapiens
ccttagctccctgctggctgttggctggaggcttcagttcctcactatgcgggcctctccctagagctgctttcaacatggcagctcgctcacttcccctaggatgagagatctaagagaaagagtgcacaagaatagaagccacaggccgggcgcggtggctcacacctgtaatcccagcactgtgggaggctgaggcaggcggatcacaaggtcaggagttcragaccagtctggccaacatagtgaaaccccatttctactaaaaatacaaaaattagccggccatgatggcatgtgcctgtattcctagctactcaggagggtgaggcaagtgaattgcttgaacctgggaagcagagattgcagtgagccgagatggcaacactgcaccccaacctgggtgacagagcgagactctgtctgaacggaataaaaaaagaatagaagtccccgggggttcatcatttaatctcagaagtgacatgccatcttttctgccatataccagtggtcacacaggtcagcccctggtatcatatgggagaagactacacgaggctgggaatcccc

SEQ ID NO: 114096 - DNA, 573 bp, Homo sapiens
ccttagctccctgctggctgttggctggaggcttcagttcctcactatgcgggcctctccctagagctgctttcaacatggcagctcgctcacttcccctaggatgagagatctaagagaaagagtgcacaagaatagaagccacaggccgggcgcggtggctcacacctgtaatcccagcactgtgggaggctgaggcaggcggatcacaaggtcaggagttcaagaccagtcyggccaacatagtgaaaccccatttctactaaaaatacaaaaattagccggccatgatggcatgtgcctgtattcctagctactcaggagggtgaggcaagtgaattgcttgaacctgggaagcagagattgcagtgagccgagatggcaacactgcaccccaacctgggtgacagagcgagactctgtctgaacggaataaaaaaagaatagaagtccccgggggttcatcatttaatctcagaagtgacatgccatcttttctgccatataccagtggtcacacaggtcagcccctggtatcatatgggagaagactacacgaggctgggaatcccc

SEQ ID NO: 114097 - DNA, 576 bp, Homo sapiens
aaaaagatatagcatttaaatagtaaccaacaagagctagggtacctatgctaatgtcaarcaaaatagacttacagacaaaaactattcctagcgatagataaagacatttttcaatgattgaaaattattcctagagataaagatattttataatgataaaagaatcactccatcaagaagacatagcaattataaacatgcatgtaacgacagagtcccaaaatacatgaaacaaaactgacagaattgaaggaagaaataaacaattcaacaatcatagttggagattacagtacctagttttaaacaatagatataactagacagaaggtcagcaaggaaataagaagacttgaatagcactatgaaagctctaggcctaacagacatatacagaacatttcatctaacagcaggagaatagacattcttttcaagtgaacatggaacattgtccaggattgaccagatattaggccataaaacatacctcaataaattaaaaggattgaaatcgtgcaaagtatgttcttcaaccacaatggaaagaaatttgggatgcccagcctaaca

SEQ ID NO: 114098 - DNA, 655 bp, Homo sapiens
actattaggatgattacattagttcacctaggaacagtgcttagaacactgcctggaacataagaaatgcccagttattgttagctgctgctgctgctgttatgattattattagtaccctgaatattaaattataagtgtgtcatgtaattttaaatactaattttaaatcttatctatctatacttcttgcatgatttaatgtaatctcagtcttactttgcttaaggcattgagctctatatgttggcctagctagactccttctctacagactgtaaggcagagaaggagaggttgtaatgaaaaggcctaggtgccttcctacccacatgtggagtagggtggacatgatcttttaagatcccttctggttgaacaattagtcataataataatagctcactttatggaatatttcctctgtgccctatttaatgactgtttcagtcacttaatctcatttaatcctcacaacagccctaagaaatagttatcattacccccattttacagatmagaaaacagagacccaagtgggccacataactcttcagagatcatttgggtaattagtgatggagcctagatccagactcctctctgcctgactctagaacatatactcctccctactgtgccttgttacctaatt

SEQ ID NO: 114099 - DNA, 570 bp, Homo sapiens
tggttttctggttccttcttatttgggtaggctctgtcagagggaaagtctatggctgaaggctgttgttcagattcttttgtcccacagggtgttcccttgatgtagtatgctcccccttttyctatggatgtggcttcctgagagccgagctgtgctgatggttatctctcttctgggtctagccacccagcaagtctaccaggctctgggcttgtacgggggttgtctgcacagagtcctgtgatgtgaaacatctatgggtctctcagtcatggacaccagcacctcttctggcggaggtggcaggggggtgaaatgaactctgtgaggattcttagctttggtggtttaatgctctatttctgtgctggttggcttcctgatgggagggggcactttccagagaccatcagctgtggtaatatggagaggaaggaaccagtggtgggtagtgccctagaactcccaagaatatatgccctttgtgttcaggtaccagggtgggtagggaaggaccatcagttggggacagggctaggcatgtctgagctcagactctctttgggc

SEQ ID NO: 114100 - DNA, 600 bp, Homo sapiens
ccatgttaatttttctttttgcgttaaatgttccttccttccaaggtgaaagaaagttgggataggagcaagtcaaatgcagcaaagaaaataataaagcaaaggttctgggactggggatgagaatgggaatgaagagagaagtgaaaaataacctgagagagaaaacatttattcctccagcattttcccatcctgctctcatatataatgaatgagcaatttccagagcaaatggtttgaaaatttaacagctacttcctgcctcagaataagcatgttgcctctagactaatagccattatcacaacagtaaaggttacagcccacctgagggcccagcctgtggaccactgggcctgtgaggcccagcaagtaactaaatatcttcatgtaatcctgtgcttctcatcctgtgtgtcaaggagctaaaggcatttcctgacaaatacgcagctgagttaactcccaggatttagaatgtctatgaggaaaggcaagaatgatttgtrgcaattgttgaattaccagagccagggagttcttcaagcagcagtctaacctatgatttggaaggtggagagtacaaaacaaggcaag

SEQ ID NO: 114101 - DNA, 560 bp, Homo sapiens
aattgtacagaatgaccatatgccattcctagtccctgcccaggacagccagaacccaaattctgtagatgattcctgggaatttgtccttcattgtgcttctgagggtgcagaagtgtgattgttataaagccaggtgatacgcaaaataccaagagatgtaaaagcataacctcaccttagggcccgagaatctactaaagaaaatatgattattatatatgaagtggtacatttaaaaaccagcatgatgagagtacgtgtgtagaatctggcccaggactggggatcactcagatcarttgccttaagcactaggcaatgaccagtttccttggaattttgaagggggctgacctttagtttggaggtcagccttcaaggactagtcttgagctaattgaatttctaagcacaggcatatagatgtggtttgaatactcaaatacctcaggtggcaggcagatacatgagggagggaagcaggccaatgtgagatggagtaagacgtggagtaggctgtggaaaattggaacgttcctggccctgctagaaggggc

SEQ ID NO: 114102 - DNA, 545 bp, Homo sapiens
tgtgaactcccctatggagagggtcacaggtcaagaaactgaggggcgcctctggctgacagctagcaatgagaccctctgtcaatcagtgagattgaattttactaagacgctgagtaaacttgaaagcagatccttccccagttgagttttctgctgagactttagtcctggccaacacctcaattgcaatgttctgagaaacctaataaatgggtgttaacagcaaagacgggaatgacacagttgagatgcaggctcagctgtggaatggggagcaggatcacaaacacatggacccctttccagagttgattcccagtactgcagactctagagtcagacagacmtatgaatcatcttgccccttgtttctcactcactagggagaacacaaggttacttagcatctctgagtcataaattattctacttcactggtagtgtgattcaacacatcacagggttgcatcacagaagacagttgccttatagaacccagcacagtgccttgccgaagcatatgcatcaatccatcaccatct

SEQ ID NO: 114103 - DNA, 549 bp, Homo sapiens
accaccatgcctggctaatttttgtattgtttggtagagacggggtttcaccatgttggccaggctggtctcgaactcctgacctcaagtgattcgcccacctcagtctcccaaaatgctgagattacaggcgtgagccactacgcccagccygaaagatatatatttaaccctatctttaaaacatattatgttttaaagagtaaattgaaataaatagtaagaacaggatttaaagacagcttgagtttaaaatacttatcaaaatgtgagattttcttgatatctatactagtactttgatgtgagaaatacacaataaatgttatttgcataacttcaaaaatcccgtattagatttttttaaaaaatgatattatgaaatggttgaagactcacaagaaatagtgcagatgctccttgtatcctccccccaactttcccccagtgacagtatcttacataaccacagtatgaaattgacattggtacaatactgttgacttaggtacagatcttatttggatttcaccaatttttactttttta

SEQ ID NO: 114104 - DNA, 549 bp, Homo sapiens
accaccatgcctggctaatttttgtattgtttggtagagacggggtttcaccatgttggccaggctggtctcgaactcctgacctcaagtgattcgcccacctcagtctcccaaaatgctgagattacaggcgtgagccactacgcccagcccgaaagatatatatttaaccctatctttaaaacatattatgttttaaagagtaaattgaaataaatagtaagaacaggatttaaagacagcttgagtttaaaatacttatcaaaatgtgagattttcttgatatctatactagtactttgatgtgagaaatacacaataaatgttatttgcataacttcaaaaatcccgtattagatttttttwaaaaatgatattatgaaatggttgaagactcacaagaaatagtgcagatgctccttgtatcctccccccaactttcccccagtgacagtatcttacataaccacagtatgaaattgacattggtacaatactgttgacttaggtacagatcttatttggatttcaccaatttttactttttta

SEQ ID NO: 114105 - DNA, 549 bp, Homo sapiens
accaccatgcctggctaatttttgtattgtttggtagagacggggtttcaccatgttggccaggctggtctcgaactcctgacctcaagtgattcgcccacctcagtctcccaaaatgctgagattacaggcgtgagccactacgcccagcccgaaagatatatatttaaccctatctttaaaacatattatgttttaaagagtaaattgaaataaatagtaagaacaggatttaaagacagcttgagtttaaaatacttatcaaaatgtgagattttcttgatatctatactagtactttgatgtgagaaatacacaataaatgttatttgcataacttcaaaaatcccgtattagatttttttaaaaaatgatattatgaaatggttgaagactcacaagaaatagtgcagatgctccttgtatcctccccccaactttcccccagtgacagtatcttacataaccacagtatgaaattgacattggtacaatactgttgacttaggtacagawcttatttggatttcaccaatttttactttttta

SEQ ID NO: 114106 - DNA, 520 bp, Homo sapiens
  misc_feature (1)...(520): n = A,T,C or G
tgttattggccaaatggctgcatgactcagtgactataagctcgggcttgacttacaggagagaggcactatcaaatgctgaataacttcaaacttcagggctgtgcgggcgccatatccacaaggggaggaggctcagtgttggcatatataaggtgccacagagactgctgtattgtggcaggaaccatgcatgtggcttgctgcccaaggcgagttaatgatggtataaatgaagtgactcaaagactattgcactntatactgcrtcaggaactgncacatgcacttgctgcccatgagttaggtaagaggagccttatggaaattatttgtagtttgtagctggaataaatcctttcatatccactgcaatggttgtagccatgagaatccatgaatcatttagaatacatcctcagaacatggaagatggccataaaaggtgagcttgcttttcctttcccaatcataacacatggaatgatgtccattgcactggcctgctgattatgaattc

SEQ ID NO: 114107 - DNA, 575 bp, Homo sapiens
tatgaaccacccctgctaccccagagtgtaaagctaatgtgtataatagggccctgcaggttgtaaagcattattattattgtttctttccatttatggtaaatttacttttgtgtaaagttttacaaccagacagctccgtagatatcatgatgatgaaaagttatagtaagtgtcttggtaaatgtatagcctacttttcccccaaatatggccatttattattactgaagtataaagattattcagacacttttatactttaactaattcattcttctcttttgcattatattcaattacctttccacagttacactgaaactttcttaccttcaactaagtcatgttgttctaattgcctttccattaatgcctggtgtcagatcagcatttgtctgacaaagagccataatttcyagtgttaaatcaagcttcagggatttatattcaaacccaggaaatatttactgagtgcttggtgccagatacttgtttaggtatggagtatgttgcagtgaacaaaacactcaaaaaatccctgccctcgtggagcttacattctaatgagggaa

SEQ ID NO: 114108 - DNA, 549 bp, Homo sapiens
aaggaataatctttgaacttgtaaggtagttgttctcaaattctagcagtcaatttactgaaatgcgtgattctctgagatgtgattcagttcttatggagtagagctgtatctgtatttcagtatgtgccccatgtgattctcatacatccaaagttttagatccactttcataaggartattcatccaagttcataattaataaagaatatcaagacaccaggtaacaatacagatttcaaagtctgaagcaattagtccataacatgtatctttagtaagattttagaacaaatgagctggcaatgtaaagaaagtgttagttacattattccttgaaaaaaattaagattacaattccttttcatatctacaaaataggttagtatagggagtgggttttcagtacagtaagttggctctcagaaatcccagctcatgcaagctcagaaaaaaataaatgaactgaatggttgaacttacttgtacatttttgcaataaggattctgaagctctgctctgcagaagcccaggacaggaagagctg

SEQ ID NO: 114109 - DNA, 566 bp, Homo sapiens
aggtgtgatactgagcacttaacatagaacatattatctaatctctgtaacagccctagaagatgagtcctataattaccctcgtttcccagatgagaaaattaatctagagaagaggtcaagccactttcytaaggttgcagtaagtcgcagagctgggatataaagccagcctagacccagaatttctaacagctgttgcacatatcctccctgatgctcagcagtctgagaagatactgtctccattcctcagagccttagtctctgtgcttgtggtattattaagatgagtcaacagcagggcacatgaagaatgctgatggtctccagtatccctaagatgcactcatttctggaactttcttaatgcacacatatgaagatgaatacttattcacagctggtgctatacctcccatacagcttactgagaaattgttttctctttgtgttttctaatggaccttattgattcttttctgtcatattgtatgaatcacctactgaacttagaaaggttaagaggcctcacaactggtggacttaattatgttggagcaaat

SEQ ID NO: 114110 - DNA, 540 bp, Homo sapiens
gaaatctcacacttactcatttgactttcttcctctgaaaatatcctttgtgactgaccaggtttctttccttccttcctggaaaataaattctgcattgcctctagtgctgtatattaaatcaaaaaagtttggaccctaattgtaccttgagaccttgagcttcctacctgcatagttcttacaaatattagagatttaggccagaggaagaagtatgagtgaaggaagaaatatgtgaaaagctgtttatacaacagtaacactaaattttatgtactgaagttcaattatataatgactcagaggacaaaagaaatggatgggaggtgggagtgaaaagaggaaaataaatatctgtgcttttcctcttgttcaaatgaggccttggccttttagttccatggcccaggaatccacagccagatgacmataacaataaaagctaactgtgaaatgttatgtttctaacaacccagcttctggcttgaaggaacaatgatttaaaattccaaagttaaccaagactatgtgcatgta

SEQ ID NO: 114111 - DNA, 496 bp, Homo sapiens
atttgaactaatagtaatggaggtaaaaggtaaaatgggcagctraaattttcctttcaatctattattttctatgtcattaggtgcaaaatgcagcatctctacaagaatattctctggaatgtgggttccatgaatggttaacagtagagaaaaaataatatttttatgaaatgctcatggaatctctggatcaaactgtcgtcaccatttaggcagtgcaggaaatcataaagaatggaaggagtggggaggggaatgggaaatcctgggagaacaatcagagggggagcattggtcagtgggagctgggtgctggagtcaagggtagggtgttgtatagcatttctcgcccttacctcatctgttaagtagaaataatggttcctacttcaatggttatggctgcttcatgtcaagtcaaatttctttattttcattacttatctttctgtaatttctgagtgtactgtcactaagattgataagggaccta

SEQ ID NO: 114112 - DNA, 496 bp, Homo sapiens
atttgaactaatagtaatggaggtaaaaggtaaaatgggcagctaaaattttcctttcaatctattattttctatgtcattaggtgcaaaatgcagcatctctacaagaatattctctggaatgtgggttccatgaatggttaacagtagagaaaaaataatatttttatgaaatgctcatggaatctctggatcaaactgtcgtcaccatttaggcagtgcaggaaatcataaagaatggaaggagtggggaggggaatgggaaatcctgggagaacaatcagagggggagcattggtcagtgggagctgggtgctggagtcaagggtagggtgttgtatagcatttctcgcccttacctcatctgttaagtrgaaataatggttcctacttcaatggttatggctgcttcatgtcaagtcaaatttctttattttcattacttatctttctgtaatttctgagtgtactgtcactaagattgataagggaccta

SEQ ID NO: 114113 - DNA, 323 bp, Homo sapiens
attccctgtattaccaacttgttatcttctcttactttctcctagacaaatagagtctctcttttcatgatgagcttcctggagctgggggtgaggttatacaagcaccaytgtggccaccaacactgggattgtgctgggtcagacccaaagtcagcatagtactaggtcttacccaaagcctgcagcaaccactgcctatctaccacagatgtttactcaaggaccaagcattcttcagtcagcaggtggaaaattcagccagacttttgtccttccctcagggcagttagctgccccaaccctccagccttggacatgtc

SEQ ID NO: 114114 - DNA, 430 bp, Homo sapiens
aattaagttgtggcttcattctctcagaraacactgttgagatggtctaagtctctgttgagcagagtcgcaggaggacagtatggtggccaagaatccagacctcaaaattagaaccacctcatcggattatagctaagactgaaaacattaaatgtgatagatatcagaatactcacaatctctggggaagggaattgattaagaggagtaataagagaattttctcgggtgatagaaatgttccctctcctgtttgaatattgttcccaaagatgttcagatttgtaaaactcattgggctatgtagctaatatctgtttgttttactagaagtaaattattcctcaatagatgtacatacatatatacatatctacatgaaagcatgcaaagtgcttagaaaaatgcatgctgtttagctattttt

SEQ ID NO: 114115 - DNA, 566 bp, Homo sapiens
ctcctcgctatttgtctctgagctggttaagttaaatatcatagatccataccatttaaaacagtctagctatttttttttaattttatgtttttatgggactatcagttatgttaagtggaccaagttagatttagagcattatgtaaaatatgctcttgtttgtgtaaaaaaaatataartgtgcatatgcactgaacatctatattgaataaagcctgaatatgtattaaacatttctgtaaggataaaaaataagctgataacactggttgcctcagtgtggggaggctgaaggtatgaatgagagaattgtttaactgcatgttctttgattcttttaaatatatgcacttgttgaatttgttttcggtaaaagtttttcaacactttggtattacatattttagctaagaattggaatatataactattaagttaatctgaatatttgtttaaaaagaaactgccattcctgggctagttcacataaataggtgcttacttttctggatgaattttgtaagaagcaaatgttgttacatcaaaactaaaagtgatgaatt

SEQ ID NO: 114116 - DNA, 578 bp, Homo sapiens
gatggtctcgatctcctgaacttgtgatccacctgcctcagcctcccaaagtgctgggattacaggygtgagccaccatgcccagcctcagcttcttatctctttattagtaatatgatataatttttaaaggttgttattaaattagggaaaaccacttgaattttttaagtggcttaaaaaatttggaagaattttctaggaaatggattctggctttgcatatttcaaactttattagccacacatttccagtgctggttgccataggacatttatagtgccataaaacctgccataacgtagataagtaacaatagaaaatacttagtataaaaatggcttctagaatagcatggaagccattgctataccaaggcagctactgatcacaatgagtggaagtcattgcaaaagacaaatacaccccaccaagaccacctaaatgtatcctgagctcaactttatcttcactggatcctagacatgcccttgactgctctccaactactctacatgggggcaactgtgacagaggggaagttggaataaaattgatggtggtcttaactaatggt

SEQ ID NO: 114117 - DNA, 615 bp, Homo sapiens
attttcatcatgatcaatcaatacaaggaaaaataacttcaggaggcatgtgggagagaggtgggcttttaagtgggtaaaacctctattatactgactcgcttaatgactcaccgagctgtttgatttgagagacagcaaatccgagggatgtaaaatgccgatctttctgagtggcaattatttgtgattaaatcacagtgtcttctgaaggaaggaggaagtcactttgtctccagagtgaggtgagtcatggaaaatatcacttccaggagagaaggaaaaagccgcaagtgcagttgaagaggcacaggtaccccgatagacactcagggaagcccccaactcccgaactagtcccaggagttgactgtgttcttattttgctttcagtgtatattaaataaaattaggaaaattcagaaaagaaggaaacaattctcagtcccagcaccctaatataccaatactaacattytgatttatttccttctagcttttctccctctctgcatgtatctctttctttgttttcattattgtaatcttccagttttgtacatggtctcagtgtgagtagaaaaatcataggattagaaaccagagattaaattt

SEQ ID NO: 114118 - DNA, 556 bp, Homo sapiens
atttgtcatgtttaggtacatgggattgccaaaaatgatgttcaatcttctttaggttatatcttagtaaatagtgctatatatgttccagaattgtatgggatttttaaaattccaatgtctgaatatatgctatcaattataattaaggtttttacgttaatttattgtaaaccacagagataagsaaacttctttgtcaatcctgtttctaaccataactgccctggacattttgttaaaacagacaattgcctagttttaatccttttcaaaggtggcttataatgagctatagaactttaacaggtgctctcaaatacaggcttctgataactttagatattgtaacattggaaaaaaggaaaatggacaggactcataaagagctgcaatacttatgaatatgaagcaaaataagatttaactaaatggactgaactcagaaagctgaagctctgaagcaaatatttttgacttttgcttggaatattgctgatccttgttttgtttttcagtgtcaaggaaacttattttttaactatttacagccttt

SEQ ID NO: 114119 - DNA, 590 bp, Homo sapiens
catcatattttaaaaaaataattacatactcatgcctctatgttaaagtcattggaaacagaactagctttcmaagagttttctagtgattccggctggtggtgggtttctacctgtcaagctttgttacaccttgttccactttgcagaagcacctctccagtcttggaatgtttaggtagatatctgtctccacattccctccaagtggcgttgggctaaaataatttaaatgaaaagatttacatagctaacttggtaagaatgtccatcagtaaagcaactatgaatggactctttccttttgggttattctgatagttggattttctttgcctcaaaaaagaactttcatttaagagtcaatcaaatgtttcaagacaagtcctctggaaagctagttaacttctgtattgcagcagtgaatttcctcttctattcccctttcttgacaaaaactctcgaaatagcagtgtgtcagccctggctctcgggaggttgacaacattcatagaaatagacacgattttttcaggatcgctggcagagtcgttgacacggctgacaccactgcatgttgagatgagaag

SEQ ID NO: 114120 - DNA, 615 bp, Homo sapiens
tatcaaaaataatctcttctaccaagaatgtaaatatgtcgatggggagtcagagtatattataaacaaataaataggcagagtgtaaacagggattggattgaaggctgagctcagcttcttaccttgccctgcagccattttgaggctatactcactactttttctgtcttaccacttccaagatgtatctatctatctatctatctatmtatctatctatctatcatctatctacctatctatctatctacctatctatctatgtatctgtctatctatcatctgtctaatagatatctagagatagagcaaaaggagatagagatagagggagaaagaacaggagagcatgagagagagaaagagaaatgttttgctaagtgttttgtgtcgatatggggaagagaagtcacatccacactggatagctccataataaaattctcatcatacatcctggtttttctttacttctttgcaccctcagaggctctttggctctttcctctatcttccccctacattctgtctcagaggttcatctatcataacgtcgaggcatcttggaaaatattcacacttttgcttctccatgttacacttcacttcccc

SEQ ID NO: 114121 - DNA, 578 bp, Homo sapiens
ttctggcttgtagagtttctgccgagagatctgctgttagtctgatgggcttccctttgtgggtaactctacctttctctctggctgcccttaacattttttccttcatttcaactttggtgaatctgccaattatgtgtcttgcagttgctcttctcgaggagtatctttgtggcgttctctgtatttcctgaatctgaatgttggcctgcccttgctagattggggaagttctcctggataatatcctgcagagtgttttcaaacttggttccattctccccgtcactcaggtacaccaatcagaygtagatttggtcttttcacatagtcccatatttcttggaggctttgtttgtttatttttattcttttttctctaaacttcccttctcacttcatttcattcatttcatcttccatcactgataccctttcttccagttgatcgcaccggctcctgaggcttctgcattcttcacgtagttctcgagccttggctttcagctccatcagctcctttaagcactttctgtattgattattctagttatacattcacctaaatttttttcaaa

SEQ ID NO: 114122 - DNA, 578 bp, Homo sapiens
ttctggcttgtagagtttctgccgagagatctgctgttagtctgatgggcttccctttgtgggtaactctacctttctctctggctgcccttaacattttttccttcatttcaactttggtgaatctgccaattatgtgtcttgcagttgctcttctcgaggagtatctttgtggcgttctctgtatttcctgaatctgaatgttggcctgcccttgctagattggggaagttctcctggataatatcctgcagagtgttttcaaacttggttccattctccccgtcactcaggtacaccaatcagacgtagatttggtcttttcacatagtcccatatttcttggaggctttgtttgtttatttttattcttttttctctaaacttcccttctcacttcatttcattcatttcatcttccatcactgataccctttcttccagttgatcgcaccggctcctgaggcttctgcattcttcacgtagttctcgagccttggctttcagctccatcagctcctttaagcactttctgtattgrttattctagttatacattcacctaaatttttttcaaa

SEQ ID NO: 114123 - DNA, 640 bp, Homo sapiens
agtgcaagtattttttggaatataaaaattcatttctgagagtaggagtgttgccagataatgccctgaaatatttatctatgcactttctttttccactacctagtcagagtcatacagtgcctcaaggcaaagtataaataaaaataaataataagctaaatttaaaataagacaataaaaaagcaagaaacagcctgtcttagtccattttttgtggctgtaatagaataccacagattgggtaatttataaagagaagcagtttgtttggctcatggtatagagcttgggaagtccaagatcaagggcaggcctctagtgagggccttctcactgcatcatcccatagcaaaaggtgagagagcaggagaaaggggaccaaacttcatccttttatcaggaacccatttccacaataacaacattaaacttcacgagggcgaagaactygtgacacaataacctcttattaggcccacctcccaacactgttgcattgggattaagtttctgatatggttttgatatttgtaccctccgaatgtcatgttgaaatgtgatccccaatgttggaggtggggcctagtgggagttattggatcatggggatgcatccctcatgaatggcttagcagca

SEQ ID NO: 114124 - DNA, 567 bp, Homo sapiens
gtttcaggaggcaaatttaaaataatttttagtccctgatgggagttccaaggcaagggcatacatgagtgcttgtacgggaacacacacggaagatgacgattctaacctagcatctcagtgaggtgcccaaagccacattttgcagatagacgaaattagagagcaggtgcttcctcctccctttaaataggaatgaaatgatgtcccagaaggggrtcctgtggagagaggctgacaggaagggggaacacaagcaggtggttacaagaactgaaagacttgagagcagcaggaaacagaaaagggagataagtaaacaccagcccttggagaagccagagctgcttgtctgatttctccaccaagatctgtgcagtgaagtctaaaaccctctttccacactctacagaagaccctggacaacttgcatctcatttatttgttttaaaaaaaatagttcaggggctcactaaaaggtcccactggattgaggatggaagtgggaggaagtgaagtaaggaggagggaaggacacaatgaggaaatagtatttactgcacgtgg

SEQ ID NO: 114125 - DNA, 521 bp, Homo sapiens
gatttgccatatattgcttttatgattttgaggtatgttccttctatgcctagtttattggaggtttttatcataaagctatgctgaattttatcgaatgcattttctgtgtctattgagatgatcacgtagttatttgttttaattgtgtttatgtgatgaatcatatttattgactaatatattttaaaccatccctgaatcctcaggataaagcccacttgatcatggagaattatctttttgatgtgctgttggatgtggtttgctggtatttttgcatctatattcatcagggatattagtctgtagttttctttttttgttatgtcctttcctggctttgttatcaagatgagagtggcttcatagaatgagttacagaggattccctatttctcaatcttctggaatactttcagtatgattggtaccaattcgtctttgaatttctagtaaaatttggytgtgagtctgtctggtcctgggcttcttttagctgacaatattttttattactg

SEQ ID NO: 114126 - DNA, 622 bp, Homo sapiens
gaacctgtcacccaggtagtaagcataataaccaataggtagtttacagccttttctctcctccctctccccattctattagtcccaagtatctgttgtttccatctttatttccatgtgtactcaatgtttagtgcccacttacaagcgaaagtaatgtgatatttggttttctgtttttgcactrgttcatataggaagttggtctccagctgcacccatgttgttgcgaaggagataatttcattttttttattactgcatagtattccattatgtatatgtgccacattttctttatccagtccaccactgatgagcagcttggttagttccatgttttcgctattataaatagtggtatgatgaccatatgggtgcatatgcttttggtagaatgatttattttcctttgggtatgtacccagtaatgtgtttgctgagtcaaatagtagttcaactcttagtctttgagaattttccaaactgctttccacagtggctggaacaatttatatttccaccaacaccgtataaggattcccttttctctgcagcctcgccaacatttgttattttttgacttttcaacaaaagccacctgactggtgccagatggtat

SEQ ID NO: 114127 - DNA, 585 bp, Homo sapiens
tctatttcttatttttatttttttctagttctttctcaccacaaataatatcaagaaggtgaataaacatgtgccattgaataatcatcagtgaaccatatttaatattaaaaagtatatgagcgggcacagtggctcatgcctgtaatcccagcactttgggaggccgaggtgggcagatcacttgaggtcaagggttcaagaccaggctggccaacatggtgaaaccttgtctctactaaaaatacaaaaaccagccaggcgtggtggtgcatacctgtaaccccaggtatttgggaggctgaggcaggagaatcacttgaacccaggaggcagaggttacagtgagccaagatcctgccattgcactccagcctgggtgacaagagcaaaactccgtctcaaaaaaaaaaaaaagtataaaacatgaaatacagatttgaacctattaatatgaatgccacaattgcarattttttatttgcatctttattttatctgccttggatttgtccattgaaagctgttatattgttagttataattcggctgccaccatatttttcttttataatacttaccaaa

SEQ ID NO: 114128 - DNA, 566 bp, Homo sapiens
gtctccacccacagagacagggacaagttattctcctcagatgtctatagaatgtggccagcacattgttcgcgatgtcctcaagttcagttttggacagaaacggtcatacttatatgacacacacccatttgcctcagtttcccccactaggagacagtaaaaagattggtggttgccaggggctgaggggagggagggatgaacaggagagcacaggggattttcggggcaygagactggtctgcatgatgttctattggtggatgcatgtcattacacatttgtccaaatccatagaatatacaataccaagagtgaaccctaatgtaaactatgaactctgggtgataatgatgtgccaatgtaggttgatcgattgccccacccccaccagccacacaacccacatcagcactttgaagttattctatatttatatacttagattgcatacacaacctgaagacttgaatggatgcaaatgcaggcaaaacaataaggaggtaacagtttataacaggcaataaatattggcaaatttcctgattaaagtcaggtttaga

SEQ ID NO: 114129 - DNA, 588 bp, Homo sapiens
tagcaaagtaaaaactaaataactaagatttgctcaacaggcttcctgtgtgtgatcagagatgtgaagcccttcactcacagtctctcgggacatgggcaaatgtggtattgattctccagcatactgaggtctggactacataggtttgcactgcaggacagctgtgctctctgctcctaaggatctctaagcagaaatttcctacaccaactgccccctgcctggctccacttcaaagtatggactcaaggactccaagaatgcaaaggaagagagggttctgagcacaccagagatgcctaagagatttatctataggacacacaactgccagaattattcttttgactcagagtctgtccctccattagatttagtgttccttcccccatagaattattgtttgcaaaatacaaaacagaaccatctcagktaagtctgatgaaaagagtttgtgtttacttcattaggtttttaccttcattttcttttcttttttttttttatactttaagttttagggtacatgtgccaaactctgaggttgctttcctcttagctgaacattacttagcaacaaaaaaa

SEQ ID NO: 114130 - DNA, 534 bp, Homo sapiens
ttgaaactgatgcagatatgacacagatgacagaatctgtagtcaacagcatcaaaacagtaattataactgcatcccatatgttcaaggaagacctcgaagagataaggaagaaacaacttgcaacatgccagctgtaacatacaaaatatttgcagataattgcaaacgagacagtatctcccaagtcattctatgaggccaactttgatatcaaaaccagacaaagacagaaagaaagaaaactacatgaatgtagttttctattcctcatgaatgagtattcctcatgaatgtagatgttaacattcttaaaaagamtttaagaaatcaaacccaaaatatatcaaaaggttaacacctcatgatcaagtggctttcatgtcatcaatgaaagactgggttatcatttgaaattcaattaacgtaattcatcatatgaactgtatagaagtaaactcatgtaataatctcaatagatgcaaaaattattggataaaaatcaaaattaattccttataagaactctcaatc

SEQ ID NO: 114131 - DNA, 546 bp, Homo sapiens
acacacttataaatgattaagtggcaaatttatgtttttyttgtgtgtgtgtgtgtaaaagcacagtaaaaacttaaaaagtaaacaggaatatattatcaggaactggaaaaagggagaactgcattacacaatgggtgaaaactgccaaaactgctacctttgttaatatgaaaggcaaaacacataagttgaattacatagctaaggaaatttccaaacaaagtgttgaaggtgctgcttggtctcttcatgctgcttacagtgaaatgtaggtgaagaaagactgaggaatggattattaaactaaaagaacaggaactggatgattttggaaatcagtcacttttaatggcaaaagatgcaaaaaatatgaaatagctttcacagtcctttcaagtactgttagggaaggttggaatacagtaaaagctgatgtagtgactgtaaaaccttttattgtaacctcagaaagatgaaagaattggagtagtatttagttacacaaagagtcctttctagagcaagtgtgtgcctcacagatcc

SEQ ID NO: 114132 - DNA, 640 bp, Homo sapiens
ctgtcaaaataaaagaagaaaaagaaaagtaaaagaaaagcaagaaaggagcatttcttggtgcccctcarcccttaatgttgatttaaagacagagtatacaccaaataaatttttaccatacacttttctgaatcttcatatctatgttgaaggacaacctaccaccttcaatagtttgttacattatgtttagcctagcctaaagttgtctccttaaataggttaaattcagcctaatgctttcttcatatacagtgaaccgtaggggtataaataggttgtaattttctcttgtaacaagttgctaagtctcagcctatcacaaccactgaatttcagccaatcacagcagctgagtcgtagctgtgttcaaataaggcaaaagcggagctgtaactaacccagctgttcctgtagcccattttccttctgttcataactgtgtctggccacatgacagctgcactgccactctgaactgattctggttctgggtgctgcccaattcatgaatcattctttgctcaattaaacgttgttaaatttaatttgcctgaagtttctctcttaacaaatcaatagaatgtttcttttcaatacttttgccataggcttaaaaacaaaaattaagaataga

SEQ ID NO: 114133 - DNA, 573 bp, Homo sapiens
ataaagcatatctggttctcatttctgaactcaacaccagatgttgttttcaaggtttgtctttttttttttttttcaactttcatgaagccatttcagtccaagggagatgggggaactccttgcagaccaaaatttttaattttatattttgctattaagccatgcttatggtgaacatctccagtgaatgatccataataacaaaagagatcctttatatatgtgtgtgtgtgtatatatatatatatatatgcgtgtgtttatatgtatatatgtgtgtgtgtgtgtatatrtatacatatatatatatatatatatctcgtatattgtccaatccttttaacctagaatatgggataaaaatctgctcccagtagaaatgccatgttccttaagaagtccctcacactctgcagtgggagacggaggaacttgggaagaacttggcatcacaggagacttgtgagactttgtttttgcagtcagtatttgctctgaaagcttgtgctggggacaaagtgagtcatatgttatggggaagctcagccattcatgaaacaaaaaaaactt

SEQ ID NO: 114134 - DNA, 447 bp, Homo sapiens
gttttctttatgttcaatctttttttgaggatagtatttttttattaatgagaataaaatctctgtcataaactgaaacatattttagggtataatatattgaaagataaagagttttgtttctaagcactgcaaaaaagtagcaaaaacttattttaaatagcaagtttaattatgaactggacatattttaaagtgtctttctctcactatggaaaactttactaatattgtcacatggtrtggtgctacacatctgtagtcccagttagtcgaaggctgaggcaggatgattgcttgagaccacaaggtcgaggctgaataaattatgatcacactactgtattccagcctgagtgaaagacagaaagaaggaaggaaggaagaaaggaaggaaggaagaaaggaaggaaggaaggattgtcacatatatattttaacaaaaga

SEQ ID NO: 114135 - DNA, 561 bp, Homo sapiens
aaggcccctgtggtagatctcgtctgacaaaaaaagttgtagtttgctgaacaccaatcaattatccaacaccaactggctgtccaacaactcaattctgacaccacccagagtcaacacagaatccacaagttcagggytcagtcccacaacactgtcgcaactacagatgccagtcacatggctctggataaccatctatttctgaactactgctaacaagccaaggtcttccacatcttcctcctcaagttcaataatttgaataatttgaaagattactcagagaactcagcaaagcactgagcttacatgttgggaacaggccccccaaaatctggccaaaaagtggccccaaaactggccataaagaaaatctctgcagcactgtaacatgttcatgatggccataacgcccacgctgggaggttgtgggtttaccagaatgagggcaaggaacacctggcccacccaggaaggaaaactgcataaaggcattcttaaaccacaaaaaaaagcatgctcctgctgcagataactagcccaacccatccctttatt

SEQ ID NO: 114136 - DNA, 604 bp, Homo sapiens
tattactagtagacttacactatgagaaatgataaaatgtttgagtcgaaaattattctaagatttcacttattccaagattacatctggtctaagctgtacatttggtacaaatggtatctctgaataaatgaaaagtaatagaaatgttaaatatataggttaaattaaaaggktatataattttgttgtcttaatttcattaaacatcaaagaactttttaaaaataattattatttttcttttaagttctgggatacacgtgcagaatgtgcaggtttgttacataggtaaatgtgtgccatggtggtttgttgcacccatcaacctgtcagctaggtattaagcccagcatacattaatggtctcccctgacacactcccccaacaggccacagtaagtgttattcccgtccctgtgtccatgtatcctgtgtccatttttcagctcccacttataagtgagaacatgcagtgtttggttttctattcctgcattagtttacttagggtaaggacttccagctttatccatgtccctgcaaagaacatgatctcattccttttttatggctgtgtagtattccattgtacatgtaccac

SEQ ID NO: 114137 - DNA, 576 bp, Homo sapiens
atatttggaaataaatgaaaacaaaatagtgaatagaactaaatatatgggaaaagaagaaattgtacttttcaacaccatagaaaaagagaaatttctggagcacttaatatccaaactcaaggataatacatttttagaagaaatgaaacattaaaaaatgagagcagttataaaaaatacaacttgttttaagagaccacatgaaagttttcctttttataagtaaaatataaaatcaataataatcaattatttcaaacatagcttcatgtaccttgtttaaattctgacaggggcatttttaataggcctaaaagaaaaaaatgtatgatctktttggttggttattaaacagatgataatggaaaatatttaaagacttaagggaaattatcaaaaaatatgtagatgaagtgaattatgaaaacagttatgagctaaattcttcataattaataaacagtatacaagggatagagtttacgtaagatatttagttcaacaatttgttgtgaaatagattgcgtaacattaaaatagtaattgttggaagcactagaaatagagttgtag

SEQ ID NO: 114138 - DNA, 576 bp, Homo sapiens
atatttggaaataaatgaaaacaaaatagtgaatagaactaaatatatgggaaaagaagaaattgtacttttcaacaccatagaaaaagagaaatttctggagcacttaatatccaaactcaaggataatacatttttagaagaaatgaaacattaaaaaatgagagcagttataaaaaatacaacttgttttaagagaccacatgaaagttttcctttttataagtaaaatataaaatcaataataatcaattatttcaaacatagcttcatgtaccttgtttaaattctgacaggggcatttttaataggcctaaaagaaaaaaatgtatgatctttttggttggttattaaacagatgataatggaaaatatttaaagacttaagggaaattatcaaaaaatatgtagatgaagtgaattatgaaaacagttatgagctaaattcttcataattaataaacagtatacaakggatagagtttacgtaagatatttagttcaacaatttgttgtgaaatagattgcgtaacattaaaatagtaattgttggaagcactagaaatagagttgtag

SEQ ID NO: 114139 - DNA, 572 bp, Homo sapiens
ctagcaataccttcatttatctagccactaggaatattgtttattcaccaaggtcaaggcaatctggttatcattcttatgttaagtatgtccgtcttccctataaactttactaactgctacctagtctctgctgtttctcactgatactgggaagcttagtttcatatcaacattccaacaaacattaacttcagcacacacaggacagtcgccattggacattacattaacaatgacaattgactgrgatagtctatatcatcttaatgaaatgaaagttttatgtgccctcctgaggaacttaatgtccttatagatttttctggttctaatagtaaatccattctaatattaatttaaataaatttaaaatttatttgaaataaactcaaataagataattctaataattcatcaatttttatagtctgtatttggcaagcttcaaagaggcatcccagcagcaaattaagactggatccaggtgtttatatcaataaattatattttaagtttattatcaacaaacttactcagccttgtattctgcccactgtgtccagcaccct

SEQ ID NO: 114140 - DNA, 572 bp, Homo sapiens
ctagcaataccttcatttatctagccactaggaatattgtttattcaccaaggtcaaggcaatctggttatcattcttatgttaagtatgtccgtcttccctataaactttactaactgctacctagtctctgctgtttctcactgatactgggaagcttagtttcatatcaacattccaacaaacattaacttcagcacacacaggacagtcgccattggacattacattaacaatgacaattgactgagatagtctatatcatcttaatgaaatgaaagttttatgtgccctcctgaggaacttaatgtccttatagatttttctggttctaatagtaaatccattytaatattaatttaaataaatttaaaatttatttgaaataaactcaaataagataattctaataattcatcaatttttatagtctgtatttggcaagcttcaaagaggcatcccagcagcaaattaagactggatccaggtgtttatatcaataaattatattttaagtttattatcaacaaacttactcagccttgtattctgcccactgtgtccagcaccct

SEQ ID NO: 114141 - DNA, 572 bp, Homo sapiens
ctagcaataccttcatttatctagccactaggaatattgtttattcaccaaggtcaaggcaatctggttatcattcttatgttaagtatgtccgtcttccctataaactttactaactgctacctagtctctgctgtttctcactgatactgggaagcttagtttcatatcaacattccaacaaacattaacttcagcacacacaggacagtcgccattggacattacattaacaatgacaattgactgagatagtctatatcatcttaatgaaatgaaagttttatgtgccctcctgaggaacttaatgtccttatagatttttctggttctaatagtaaatccattctaatattaatttaaataaatttaaaatttatttgaaataaactcaaataagataattctaayaattcatcaatttttatagtctgtatttggcaagcttcaaagaggcatcccagcagcaaattaagactggatccaggtgtttatatcaataaattatattttaagtttattatcaacaaacttactcagccttgtattctgcccactgtgtccagcaccct

SEQ ID NO: 114142 - DNA, 555 bp, Homo sapiens
ggtttggctggggatgaaaacatgggttgaagctgtcttcttgtgttgagtcaactcctcagagatcacagaactagttgagttagtttcttggtatcagttactgatctgggtagtgcaagctggtccatcagaatgcaaggtctgaagaacacctcaaataccagacttagggtttaccataatgatgtaatctataggagaaattggggaggttacaaatcttgtgacctctggctccatgactcctgaactataattctaaccttgtgacaaatttgttatttttctaaaggcagtttcaatctccaagcacggacacagttagtttcaggaaagagctattatcatttttattttaaagttagactataagttagatttctcccatagttagcttggactatgtccagggatgagcaaagatagatagcttgtgaggttggaaacaagatgaagtcagctatgtcagatttccctcagtgtcataatwtttccaaaggcagtttcaaagccacagaggagggaaacttgaaaattataaaagaacctaaa

SEQ ID NO: 114143 - DNA, 606 bp, Homo sapiens
ggccatggtcactcatgtttggctcagaataaatctcttcaaatgttttacagagtttggctcctttcatcaacaaactcaatccccagtgtaacagtagtaagcggtggggcatttaagagatgattgggcctcatgagggattaatggattaatgggttatcmtgttagtgggttagttttggagagtgggtctgttatataaaaagccagttttgctctacctcgtgagcccctttacaatgtgatgccccgaccctccttgggactctgcggagtccccaacagcaagaaggctctcaccagatgcagcttcttgaccttggactttccagcccctagaactgcaagaaataaatttattttcttcataaattactcagtctccggtactcagttacagcaaaagaaaacagattaagacaatactctattacattctgcataaagaaaagcatgggatggagatggtgttatacgacaggaatacatgctgcaaataatgatcccactacttgctgactaggtgaccttggagcagctacttaaccttgtacatcatgggtttcccctctgtatcatgaggatgatagcacacactccgtg

SEQ ID NO: 114144 - DNA, 516 bp, Homo sapiens
tctaagacatgtcaaagagagagcatttgtttcataagcttagatcagtggaatgaaatgatacacatgactcacagaatgacagttttaatattaagctgctattgtactcattagaataatgctagcttttattacaaataaggcagaaatgtattctggcctgaaagtaatatagacatayttgttagtcatgcttactaaatgggtgaagaaaggttgattgacacttttcaacacaatcattcagaagtacagagtgatggaagctttgttgttttcaacagatgttttccagggtcatcctgggactcttctccatcccagccagagggaagaggaggagaatggaggtctatttatggaaagtttataaggtccaggactatgagtggaactttttcctatacatggtccctggctaaagctcagtcacaaggccactttaactgcaaaggaaattaggaaatatgccccatttccggggaggagaaaatggatttgataagcagctag

SEQ ID NO: 114145 - DNA, 527 bp, Homo sapiens
gggctatgggatgagacagatgtggttggggcaggaagggctcagtgtgccccctgctcggggacgtgcctcctgccaggggctctggccctcagtggtatcctttcccaytgctgaacctttctgaggccgtgtcttctggcttggcttcccctgagccttgccgcagcctggtgggtctctctggccctgtctggtgtgcgtagggaatgcacagctggagtccctgggccatgggggcaggtggtcaggtgcacttgggaaatagtcacacttgtcgtgatttccacccctctccacccctctgctaacggccctggggggtggatgagccacaggttttgggagtacttcactgcttgccagagtgtgtagccagcatgtcccccgcccctcccactgtcctctgcccagcactgcccttggcatgcaacactcagcccttgctgaactccagtgggctgagtgggttcccggagatccatttaggacaactgacatgcacctctttatcagaggtgcccagc

SEQ ID NO: 114146 - DNA, 349 bp, Homo sapiens
tggaatttatctgagaaactgccttgtgatctttgtattcacctcatggagataaacttttctttccatgcagcagtttgtaaacactgttgtagaatctgcagaaggatatttatgagtgccctgtggcctatggtgaaaaataaaatatcttcagataaaaactagagggaagctttctgagaaactgctttgtgatgtgtgcatacatctgatagagttaaaactgtcttttgattcagcagtttggaaacacagtttttgtccaattagtgagtggaaatttggarctcattgaagcctatagcaaaaaagcaaatttctcaggataagagctagaaggaagcta

SEQ ID NO: 114147 - DNA, 565 bp, Homo sapiens
tgctctgttcttcttttgggttcctttcaacactggtttccgtcttgttttctaatgtcactaagtgaacaaagttttgtgcacacaggacacagcatggtctgatgctcatagcaatttattttctgtcattacagaaatcctcaggagttatacaaaagggtatgtattggggaacccctctcatactgatgagtaatccagatgatgagcaatgtgccactgtctctctggccttcctgtagacaggcagcctgagtggagcttcccctcatgaatgasggcataggctgtgatgggagaaattgttgttccagataaagcatgatggtcacattctgcagtccctgggaacaactgtggtctctgaagttaggtgaggttgtgcgcattgagttgctgcgtgtctttttgaattaatgtggtgagtgtccaaaatacgtaatgtcaaggtcatgtacaggctcagcctctatcatgcagcctagttctggtttccgtcttctatgctcaggaaacacagcaacatgaaaagataaccaaaaggcttgccctagggtgttac

SEQ ID NO: 114148 - DNA, 514 bp, Homo sapiens
gagtcctgagggccgaacacatgattgagcacatttttggcctccactcctcacccagtcccatccaatcccaaatccttgggctttgaatgaaacctaaattggttttcgttggagaggcccgagtccagctgtagctcaaggccctctgtggctggcaggaatcctaggggatatatgtggaggggctgctgtgttgctgtaggcagtggctctcaccgtctgtgtagcctggtccctggaatccactgggcccagggcagagcctctgggcagctggcayggggtcatttatcttgtcacaccctcctctctggcccagcagccttgtcctgctccccatactcctgtcaggcccagcttgttctctgtgtcaggtctgccaggtgccctccctcttagtcttcccacagctcaggcaaaccctgggagggccccctcatttctgtgctgaaaactgctggcctcacctgcagattaaggcaactgggacaaggggctttactctgaattc

SEQ ID NO: 114149 - DNA, 515 bp, Homo sapiens
aggggctttactctgaattctgttccattgtttccaaatattcagaagctgatgggattgttttgagggctgaatattttccaagtctctaaggtcattccaggcatagaacagtcactgtatctgtgacatcagccatcattgcctcccacaggccccaacacaaccccaagcctgtgggaggtgctgccgacccagggtgagatccgtcggttgattgtaggccctggaagtgaagccttgaccttctttctgatattcttcttttggagaacagtaggactggtggaggtccacatggagaaaggaaatgggattcatgagggaacagaagcaggccctacaggacgaggagggagggaattccatgtcatgcacaaggttgtgaagagggtggctgcctcttggaggaacagaatgatgcggcttmccctcccttggctcagtgatggtatgtgagggctgggcaagtatgtgggaagtcagagatccctcccttatagcacagaagaaat

SEQ ID NO: 114150 - DNA, 595 bp, Homo sapiens
tgagtggattcatctcacaaagttaaacttttttttgattcagcagattggaaacactcttttcagaaaatctgtgagcccacaagggcctgaggggaaaaatcaaatatccccagatacaaagcggaaagaaactatctgtgaaactgctttttgatgtgttgattcctctcacagaattaaacytttctttttatttagcatggtggaaacactctttttggggactctgggaatgcacatttgggagcccattgaagcccatgggaagaaaatgagtatccccagaaaaaataaattagaaaaaagctagctgcaaaactgctttgtaatgtgtggattcatctcacagagttaaatcatcctttttattcagcaggttataaacactcgttttggagaatctgcaaagggacatttgtgagccagttgaggcctacagaaaaaatccaaatatccccagaaaaaaagtagaaagaatctttgtgaaactggtttttgatgtgtggactctactcacagagttaaattattcttttgattcagcatgttggaaaatctttttggagaatttgcaaagcaacattttgaagcc

SEQ ID NO: 114151 - DNA, 576 bp, Homo sapiens
ttccacagtttggtaaaactctttttggagaatctgtgatgggacttttggaagttttttgaaacttatgaaaataaattgaatatccccagataaaaactacaaagaatttttatgtgaaatgctttgtgatatgtagattcatctcacagagttaaatttttcttttgattcagcatgttggaaacactctttttggagaatctgcaaagggacatttggaagcccactgaggtccttggaataaaaaccaaatatccccagataaaagagaacaaaaatgctggctgaaatggctttgtgatgtgtgtattcaattcacagatttaaaatttyattttgattcagcaagttggaagcattcttttggagcatctgtgaagggacattttggagttcattgtagcctatggggaaaaactgaatatcagagataaaaattaaaaacaaggtatctgtgaaacagtattgtgatgtgtggatgcatctcacgagttaatgttttcttcttgttcagagggttgcaaacactctttttgtagaatctgtgaagggacattttggagttccttaagg

SEQ ID NO: 114152 - DNA, 489 bp, Homo sapiens
tatgtagaaaaataaaatatctttagataaaaactagaaagaagctatctgagaaactgctttctgatgtgtacattcatctcactgagttaaagctttcttatgattcagcagtttggaaactctttttgtccattctgcgaatggacatttgggagctaattgagaccaatggcaaaaaagcgaatatctcaggataaaaactagagggaagctgtttaagaaactgatttgtgatatgggcattcatctcaccgagttaaaacatttctttgattcagcagtttggaaacagtattttygtccattctgcaaaaggacttttgggagctcactgaggccaaaggtgaaaaagtgaatatctcaaatgaaaactagaaggaagctgtctgagaagcccctttttgatgtgggctttcatttcgcagaattaacactttcttttaattcagcagtttggaatcactgtttttgtggattctacgaagg

SEQ ID NO: 114153 - DNA, 602 bp, Homo sapiens
gatgtgtggattcatctcaaagatttaaacctatcttttgattcagtagtttggaaaccacgtttttgtagaatctgccaagggacacttgggagctcattgagaacaatgttggaaaagcaaatattcactgataaaactagaaagaagctatatgtgaaagttatttgtgatgtgtggatttatcttccagtgttaatcttttctttggattcagcatgttggaaacactgtttctgtagaatctgcaaagggatakttgggagtgcattgaagccagccatgaaagagtgactatccccgtataaaaacaagaaagaagctatctgcaaaactgctttgtcatgtttggattcagctgaccgagttaagacttccttttcattcagcagtttggaaacactgtttttgtagaatctacaaagggacacttgcaaacacattgaggcctacaataaaaaagaaaatattcgaagataaatcttgaaagaagctgcatgtgaaactgctttgtgatgtgtagattcgtctcacagagttaaagacttgtttcaattcagcaattttgaaacactgtttctgtagaatccacaagcagacat

SEQ ID NO: 114154 - DNA, 574 bp, Homo sapiens
cttttagatctatggtgaaaaaacatatatccccagataaaaactagaaagaagttatctttgaaattgatttgtgatgtgtggattcatctcaaagatttaaacctatcttttgattcagtagtttggaaaccacgtttttgtagaatctgccaagggacacttgggagctcattgagaacaatgttggaaaagcaaatattcactgataaaactagaaagaagctatatgtgaaagttatttgtgatgtgtggatttatcttccagtgttaatcttttctttggattcagcatgttggaaacactgtttctgtagaatctgcaaagggatatttgggagtgcattgaagccagccatgaaagagygactatccccgtataaaaacaagaaagaagctatctgcaaaactgctttgtcatgtttggattcagctgaccgagttaagacttccttttcattcagcagtttggaaacactgtttttgtagaatctacaaagggacacttgcaaacacattgaggcctacaataaaaaagaaaatattcgaagataaatcttgaaagaagctgcat

SEQ ID NO: 114155 - DNA, 593 bp, Homo sapiens
aggaaaaaggctagaaaaaaacaaaacaaaaaaaccttgtgttcccacagtgacttttccaaagaacttcacactgataaagcattcttcattttttaagatctctagatatgtgtatatatatctatttcataaagtctaagggtaactcctcctctggacagactggggaacttagacttttgtggccatcactgccattaatatcctttttgtttccttgctacttttaatctagttacttggtatgatgtctggctacgactatggagctgaagccccatcagcaggccttctgtaatgtataattaggacactcatttcccttttagatagatgacacatattatgatttactgcgctttcagaaagagacaataagactaacaaaatatcaactcttttttttttttttttttttttttttkgaggagtctcactctgttgctcaggctggagtacaggggcgtgatcttggctcactgcaatctccgccttccccgttcaagcgattctcctgcctcagcctcctgagtagctgggattacaagcacctgctgccacacccggctaatttttatatttttagtaaa

SEQ ID NO: 114156 - DNA, 593 bp, Homo sapiens
aggaaaaaggctagaaaaaaacaaaacaaaaaaaccttgtgttcccacagtgacttttccaaagaacttcacactgataaagcattcttcattttttaagatctctagatatgtgtatatatatctatttcataaagtctaagggtaactcctcctctggacagactggggaacttagacttttgtggccatcactgccattaatatcctttttgtttccttgctacttttaatctagttacttggtatgatgtctggctacgactatggagctgaagccccatcagcaggccttctgtaatgtataattaggacactcatttcccttttagatagatgacacatattatgatttactgcgctttcagaaagagacaataagactaacaaaatatcaactcttttttttttttttttttttttttttggakgagtctcactctgttgctcaggctggagtacaggggcgtgatcttggctcactgcaatctccgccttccccgttcaagcgattctcctgcctcagcctcctgagtagctgggattacaagcacctgctgccacacccggctaatttttatatttttagtaaa

SEQ ID NO: 114157 - DNA, 593 bp, Homo sapiens
aggaaaaaggctagaaaaaaacaaaacaaaaaaaccttgtgttcccacagtgacttttccaaagaacttcacactgataaagcattcttcattttttaagatctctagatatgtgtatatatatctatttcataaagtctaagggtaactcctcctctggacagactggggaacttagacttttgtggccatcactgccattaatatcctttttgtttccttgctacttttaatctagttacttggtatgatgtctggctacgactatggagctgaagccccatcagcaggccttctgtaatgtataattaggacactcatttcccttttagatagatgacacatattatgatttactgcgctttcagaaagagacaataagactaacaaaatatcaactcttttttttttttttttttttttttttggaggagtctcactctgttgctcaggctggagtacagkggcgtgatcttggctcactgcaatctccgccttccccgttcaagcgattctcctgcctcagcctcctgagtagctgggattacaagcacctgctgccacacccggctaatttttatatttttagtaaa

SEQ ID NO: 114158 - DNA, 579 bp, Homo sapiens
acagaattataattctaaaggcattctagtatttaactttatatgaattatataaaattgttgttttatatgaactatataaaatacttgtgttttatatgaactatataaaatgtattatatatgaattatatagttgtattttatatgaactatataaaatagttatgttttatatgaattaatataaaatagctatattttatataaatattaggagcatttatgaagcactgaagtagacatgagtatttttggatgctctactgcagagaaggcaggattttaatattctggtagtgttttcaccgtgacaggttgcctcaaatcaaagatgaaatcttaggactcagaatctcaggctttgggggaatcaagatgtcagtgttaaaatgctcatcttctactgcttacgcttccattatcacaaacaggttgaatttaaggaccgtaggagcacgcatttactaaattttcttctaatgtacctgccagagagatgactggaggattttaggatccattttgatactcactttctttayctgcattctaaaatttaattagccaacatatctg

SEQ ID NO: 114159 - DNA, 361 bp, Homo sapiens
aatatctgttcttcctgtcctttccactccttcctcaaccaaagtgacttccagatttcctagtgaaatggagagtgcagttgagatttgaaataaaaagcaaagagatggaaggaaaytttttgcaagtggcagaaatggttttaactcagaatttgctcctcatgggccaggccattttttcttatcctgcatgtacagggatatccagttctgcttgcagcttctcaagatgtaacctctttcaaacctcagtgctggaaggctgcctcccactgtgattctagagcattcttgtcaaaggaagcactacccacactcaacatacacattgacatactcttctgattttattttgtca

SEQ ID NO: 114160 - DNA, 361 bp, Homo sapiens
aatatctgttcttcctgtcctttccactccttcctcaaccaaagtgacttccagatttcctagtgaaatggagagtgcagttgagatttgaaataaaaagcaaagagatggaaggaaactttttgcaagtggcagaaatggttttaactcagaatttgctcctcatgggccaggccattttttcttatcctgcatgtacagggatatccagttctgcttgcagcttctcaagatgtaacctctttcaaacctcagtgctggaaggctgcctcccactgtgattctagagcattcttgtcaaaggaagcactacccacactcaacatacacattgacrtactcttctgattttattttgtca

SEQ ID NO: 114161 - DNA, 651 bp, Homo sapiens
tgtcattgtactcagctatgctgctttcagcttttctctgtttgcagtcaagaaataggaaaggaaacaattgttggtattaaagcagaggagagactctgtgaagctgatttcagtgatgggacagagatattttaagaatggaatgttggtctgtagggtctagattgaatggagaagaaaatgagggaagaatgggttgaggatatgaggtgaaaggaaagagttggggactgggaatagccttggagaaaaaggagagcatggagcaaggttttataagatagagaagccartatagtagagatgagataataacagaattgggaaggtagtgagctatggttacgaattggaagtaagaaataaataggtattgttttggtttggtgaagattaggatggctaaatttgtaaatataaagaaacctttgtttattcatccattctgctccagttgagaacttgagtcctcaatgatgtaggcagaaagtggaaaaggtaagatgacttgtgcaccagaatttcaaatgtttgatgaccttaaaagcaaaaagggaagaggggagtagttatggagaatggtaggactcctctaaccccacaaaataagatagaattattgcaggaagcaaccacagagtgcagaaa

SEQ ID NO: 114162 - DNA, 642 bp, Homo sapiens
ccttgggcgtctccaaccttgtggctttgcrgggtgtagtcccctcagctgcctgcagtttttcccatctcacagtgaaggctgtctggatctatcattctggggtctggaggatggtggtcctcttttacagctcactaggcagtgccccagtagggactctgggtgataactccaaccccacatttcccctctgcactgccctggtaaaggttctccatgagggtttctcccctctagcagacttctgcctggacatctatgcattaccatacatcctctgaaacctaggcaaagactcccaagcctcaactcttgacttctgtgcacccacaggcttataccacatatgcgctaccaaggcatatggcctgcaccctctggagcaacctgagatgtatccaatgacgttttagccacagttggagctggaatagctggacacagggaacagtgtcctgaggttgtgcagcagggccctaagctgagcccattaaattatttttccctcttaagcctttggccctgtgaaaggagaggctgccttgaaggtctctgatatggctttgaggcattttcctcattgacttggctattaacatttggctactctttacttatgcaaatttctgtagccagctt

SEQ ID NO: 114163 - DNA, 579 bp, Homo sapiens
taaacaaacttgtttgcagtaaaattatacacaagcctttctgtagcaatagacattacagagttcaatttaggactaaccatttcaaattgtcaaaaatacaaaatyaaacttttttataatattttactgtgcttagttttgttgctcaagttttctttttaattctaagtccatgccagcaaattttatttaataacatatattcatttaaacttgtattaatttcatttttgaaatgcaaaatgaacaaacaatatagaattctcttaccacaaagaccttatcttgtagaagattagcttgacacatagacaaacatttgtcagaattttcaaggacattggatatgccacaatgaatgtggaaacccaaagaaataagtaataaaagggattaccatttaccaatattccactggttgtcgctggctgagtaacataaaagtacaccacaatgcgctagtttactcattattaaaatatggaaatagtttaccttgagctcccaagtgactctctgatgtctcagacatcctagtcacttccacagggcacatgaactatcatatagccagca

SEQ ID NO: 114164 - DNA, 531 bp, Homo sapiens
aaaccaaacaccacatgttctcactcataggtgggaattgaacaatgagaacacatggtcacaggaaggggaacatcacactctggggactgttgtagggwcgggggaggggggagggatagcattaggatatatacctaacactaaatgatgagttaatgggtgcagcacaccagcatggcacatgtacacatatgtaactaacctgcacattgtgcacatgtaccctaaaacttaaagtataataataataaaataaaattaaaaaaaggagatacctttctcattaatatacttaaaaccatattatcaatataagaaattacatagtgttgaatttacccaagcaacagtacaatatattactggaggttataaccacacaacaaaccaaaaacattaataagtctaaaaattactctccaaaatatagaaaggtatcctaaaatatcaagaaaatggaagcaagccaataaaatggattatgtctatgactaggcaatttatagaaaagtacataaagatgactaa

SEQ ID NO: 114165 - DNA, 606 bp, Homo sapiens
atgattcaagggagattctgtgatattgatattttaagtacatgtttgtataaacagcatcctattattcaaatgtggttaggtcacaattggctacactttcatattttaaatatacagacatcgagaatagcatgggtataaaaaaaatctcttcatgtcactatcacagattgaattgtgtcgtttttcgtttgttcattttttgagacagtcttgctctgttgtccaggctggagtgcagtggtacaatctcagctcactgcaacctccacctcccgggtttcaagcaattcttgcaccttagcctcccgagtagctgggactacaggtgtgcacccccacgcccagctaattttttgtattttagtagacatgcagttttgccatgttggccaaactgatctcraactcctgagctcaagcaatccgcctgccttggcctcccaaagtgctaggattacacacatgagccaatgtgcctggcctgaattgtgtccttctgaaattcatgttggttggggggagcttcctaacccccagcgtgattgctgtttgagatagggctcttaaggaggtaattaaggttaaatgaaatcgtaaggg

SEQ ID NO: 114166 - DNA, 634 bp, Homo sapiens
gcatacccagcattgagttaaagataaaactagcctcaatgtccacattttcctcaaatacaccctgtggaagtttgggaatctttaaaaggggtttggtaatgtattttctggactccaataatactttataaatgctgatgttgctccaataaaaaracctagaattaggagggaaaatcaccctctgaaaaggaaaaataatagaaatcagaccataatctatatattgaaatatcattgaggcatctagcttaaaaagtagtttattatatatcactgaaaagtgtaggagaaatattttttaagtatgtaatgtcgaaatttagaaaaggagattcaaaggacaatatataacatgaatttatttttagtccttttgagtgactctgaccatgcacataattaattttctatttttttctctccatagttgaatgggtttattataataacttattttaatatattttttaataagattatcccattcttgtccaatttctaggctgttgcccaggagaaaatggactgacaagttgatttaagttttcttttatacttggacataatagtatctgcctcttatgaattttgtcattctaaactcttcagaattccggatgaattaaac

SEQ ID NO: 114167 - DNA, 366 bp, Homo sapiens
aattgaccttgaaaaggatagaaaaccagaccaggctaatggttagatgaaaaactgaaaagatagccaaaattatattccctctcccacaaaaaagaacatcaagggcagaagcgttttactgrtgacttccaattcttcaaagagcaggtacttcttataaactgtttccagaaacaggaaaataaccagggatcctccactcatttaataggaataaatatcagtgtatacaaattggaggataacaaaatggaagaaagaaaggaaggaaggagagagagggagggaggagacagcagaagcatcgctccagtttggtttgacccgtgctgtcgtctctatgtatctttcttttcttttaat

SEQ ID NO: 114168 - DNA, 436 bp, Homo sapiens
atcaattgtttgtataacaaaaatggatttactgaaggggatgagatggcccaggaagagaatatagaacaggaagagcactgaagatgcaattttggagaggagagtgaagatccagaaacgaamccaataattagtgattagagagagccgaggaacagcagaaaggagagggagaagctctaagaaggaggaaagtgctcctggtgccacatgctgcagagaagctgcagcagcgagaagggacattgatgacttcggccctttgcctgaagttctagcttaaatatggtttctctgccttaaaacttcccttcccagcagattgaattaaactctctcaccctctgttctactattcatgctcccattgttttcccactaatttctatctggtctgaggaaacctctgggtgaccgcttgatgctggtacaa

SEQ ID NO: 114169 - DNA, 282 bp, Homo sapiens
ctctagacatggctttttttggcttcaaggaataaacatctcttcaaactagcaaaggtgaaaaagaagcttttactgagaggactgagggatctcatggggcccgagatcaggaaatgagttatggagsccagggtcactgagccgcaaagggacactgagaagtctagaatcttctccctccacagtcgggccttccccctcccctcccgcagccccgcactctgtgactgtctgctgtttcagtctctgtacatcagccccttccatgcactcatcagc

SEQ ID NO: 114170 - DNA, 560 bp, Homo sapiens
aagatacctacaaatttggggtcacgttagaaaattattacatggtgctccatcccygagcatatgcccttgacttattttgaatcacagagactgaagtaaggctttggttgtcctaatttactaataattctgtgctcaaaaatttccagtgattctccactgtttgcagaggaaaatacaaaatcctcttaggcctatttggcccttaaaaagccagtgccacctcaatatctctttcaccttctgcttttcttcattgtatcccagcaacacgactcccttgctgttaccagaccatagcaggtgcactcctgcctaaatatttgaacttgttgttcttccagcctgagttgtttttctcctgagtcatacacatgactttgcacaaagtcactttgttaaaaagatcttcactatctatcttgtttcaatttaaaccaagccacatctgtgtactccttctcctctgaccaactttatttacctccatagcatttacaggcttccactatacaatggcatttatttactgtggccaacagactttcaaggtggtc

SEQ ID NO: 114171 - DNA, 560 bp, Homo sapiens
aagatacctacaaatttggggtcacgttagaaaattattacatggtgctccatccccgagcatatgcccttgacttattttgaatcacagagactgaagtaaggctttggttgtcctaatttactaataattctgtgctcaaaaatttccagtgattctccactgtttgcagaggaaaatacaaaatcctcttaggcctatttggcccttaaaaagccagtgccacctcaatatctctttcaccttctgcttttcttcattgtatcccagcaacacgactcccttgctgttaccagaccatagcaggtgcactcctgcctaaatatttgaacttgttgttcttccagcctgagttgtttttctcctgagtcatacacatgactttgcacaaagtcactttgttaaaaagatcttcactatctatcttgtttcaatttaaaccaagccacatctgtgtactccttctcctctgaccaactttatttacctccatagcatttacmggcttccactatacaatggcatttatttactgtggccaacagactttcaaggtggtc

SEQ ID NO: 114172 - DNA, 560 bp, Homo sapiens
aagatacctacaaatttggggtcacgttagaaaattattacatggtgctccatccccgagcatatgcccttgacttattttgaatcacagagactgaagtaaggctttggttgtcctaatttactaataattctgtgctcaaaaatttccagtgattctccactgtttgcagaggaaaatacaaaatcctcttaggcctatttggcccttaaaaagccagtgccacctcaatatctctttcaccttctgcttttcttcattgtatcccagcaacacgactcccttgctgttaccagaccatagcaggtgcactcctgcctaaatatttgaacttgttgttcttccagcctgagttgtttttctcctgagtcatacacatgactttgcacaaagtcactttgttaaaaagatcttcactatctatcttgtttcaatttaaaccaagccacatctgtgtactccttctcctctgaccaactttatttacctccatagcatttacargcttccactatacaatggcatttatttactgtggccaacagactttcaaggtggtc

SEQ ID NO: 114173 - DNA, 570 bp, Homo sapiens
atgaacatacctgggggtaaattatgtcccaatccttaccagatttcttttctcatgccccaaatctatgatcaattctttcyagacttgaataattatataaatagatagggaaataattatataaatagttattgataatataataatcaataactaaaataatactgtaattaattatacaaatacctaaaataattatataaatagtaaaacactcaataaaaattcagtaaagttataaaaatatacaaatagtttaaaagaataaaagagcaaggaatgaacagaaaaaaatgaataaagacaaaacaataaaatggcagacctaacaaacacatcaacaatcatattaaatataaatggtgtaatcacaataattaaaaagaaaaagggaatgtcaaactctatttttaaaattggtaaacgggattttatcaaagctcaaaatttatgctctgagaaatgcaggagtaggagaaggaaaaggcaagccaaagtgtggaaaaaatattttcaaatcacacaccttaaaaagaacttttgtgaagaatatataaagaattctaa

SEQ ID NO: 114174 - DNA, 570 bp, Homo sapiens
atgaacatacctgggggtaaattatgtcccaatccttaccagatttcttttctcatgccccaaatctatgatcaattctttctagacttgaataattatataaatagatagggaaataattatataaatagttattgataatataataatcaataactaaaataatactgtaattaattatacaaatacctaaaataattatataaatagtaaaacactcaataaaaattcagtaaarttataaaaatatacaaatagtttaaaagaataaaagagcaaggaatgaacagaaaaaaatgaataaagacaaaacaataaaatggcagacctaacaaacacatcaacaatcatattaaatataaatggtgtaatcacaataattaaaaagaaaaagggaatgtcaaactctatttttaaaattggtaaacgggattttatcaaagctcaaaatttatgctctgagaaatgcaggagtaggagaaggaaaaggcaagccaaagtgtggaaaaaatattttcaaatcacacaccttaaaaagaacttttgtgaagaatatataaagaattctaa

SEQ ID NO: 114175 - DNA, 570 bp, Homo sapiens
atgaacatacctgggggtaaattatgtcccaatccttaccagatttcttttctcatgccccaaatctatgatcaattctttctagacttgaataattatataaatagatagggaaataattatataaatagttattgataatataataatcaataactaaaataatactgtaattaattatacaaatacctaaaataattatataaatagtaaaacactcaataaaaattcagtaaagttataaaartatacaaatagtttaaaagaataaaagagcaaggaatgaacagaaaaaaatgaataaagacaaaacaataaaatggcagacctaacaaacacatcaacaatcatattaaatataaatggtgtaatcacaataattaaaaagaaaaagggaatgtcaaactctatttttaaaattggtaaacgggattttatcaaagctcaaaatttatgctctgagaaatgcaggagtaggagaaggaaaaggcaagccaaagtgtggaaaaaatattttcaaatcacacaccttaaaaagaacttttgtgaagaatatataaagaattctaa

SEQ ID NO: 114176 - DNA, 570 bp, Homo sapiens
atgaacatacctgggggtaaattatgtcccaatccttaccagatttcttttctcatgccccaaatctatgatcaattctttctagacttgaataattatataaatagatagggaaataattatataaatagttattgataatataataatcaataactaaaataatactgtaattaattatacaaatacctaaaataattatataaatagtaaaacactcaataaaaattcagtaaagttataaaaatatacaaatagtttaaaagaataaaagagcaaggaatgaacagaaaaaaatgaataaagayaaaacaataaaatggcagacctaacaaacacatcaacaatcatattaaatataaatggtgtaatcacaataattaaaaagaaaaagggaatgtcaaactctatttttaaaattggtaaacgggattttatcaaagctcaaaatttatgctctgagaaatgcaggagtaggagaaggaaaaggcaagccaaagtgtggaaaaaatattttcaaatcacacaccttaaaaagaacttttgtgaagaatatataaagaattctaa

SEQ ID NO: 114177 - DNA, 556 bp, Homo sapiens
ttagtgtttttgtttttgttgtttcttgagtcatggtttgtgtattctacagagacgtggagtttgcttaaccgaccccaacccccacccccatgccccaataaagcataattggatagaggctgctaccaaaagcaaaaacaaaaacaaaccaaataaaacagaacaaaagaacaaaaaagaaaacaaaacaatttggcctaagagacagtaggycttttagcaaactttgtcaatgtacatggattgctgtggtgatagatgtcaggaagtgggaatgatagaagaaaaatggggagataaaatggtatttatttcttcacttacatagtgtggattaagagacattatctcaagataacggaagaatacatacaggcttatatatgttatttaaaatgataaagataaaaaaatgcctatctacaaaactcacatgaggaaagaaaatatgatctaaattcctcaaattaaaaggggctagtcagttgataatattcgagctaaaatttaaaaagttgaggtgttagtcgattgtttataattacagcagtaa

SEQ ID NO: 114178 - DNA, 537 bp, Homo sapiens
ctgccactctcctcccccagcccactaccaccactgaaagaagacaggacactatagaaaatatcagtctatgaaaacatgactgaggatattggtttgacatggggattttgttcattaatttactctttcacttctttatmtaatgtctcctggagatggaccaagtgttaagcttcattataggacaaagataaacaagacatagttctgttcctaagaagctcattgtttagtgtgagagtcagacatgtgaacacacaaacatggcaaagataaatagaaattttgaaaaccaacagagaaacaccttacttgaatgagaagagtataaggacacagccacctttctcagtacagagaatcagagataatccaaggtattcaacactaaaaacagacatgcgatggctggacttgagacctgattcttagctctcaagtttccctttaagatcacttatcaattatagctgtcgtcaacactttttttgtttcaggagtagttcttttactaaattcattgcagatgattag

SEQ ID NO: 114179 - DNA, 576 bp, Homo sapiens
gatattttgatacaagcatgtaacatgtaataataaaatcagggtagttaggatattcatcaccacaagcatttattatttgtgttaggaactttcaattccattcttttagttatttttaaatatacattaaattattattaactatagttgcagtattgtgctactgaacactagatcttatttattctatctaactgtatttttgaaccccctaaccaaccactctttatctcctgcctcccaactacccttcccaggctctggtaactatcattctaytctctatctccatgagttcaatttttttaactcccacatgagtgagaacatgcgatgtttgtctttcaatgcctggcttattttgcttaacataatgtcatccagtttcatccatgttgctacaaatgacaggattttattcttttttacagctgaatagtattccattgccttcttccattcatctgcttatggacacctaggttgattccatatcttggctattgtgaatagtgctgcagtaaacatgggtatgtagatatagctttgatattctgatttcctatttttgga

SEQ ID NO: 114180 - DNA, 498 bp, Homo sapiens
ttaacattaggagtattacctatcatcataatgaaaatctaagtttcaggcatctatttccactatatttactcattatttactcaataatgaaggtaaatgttcaggcaagaagacaacagatattttcaatttaaaacttcaaggctagaggagtctttttcaagataacatcatttcctgcaaaattatgactgagatttttattgtgattaagttttcagtcctttacacatttgcattcaccacatctaaacctaagacaagatcaatattcaatcatataactatattatttgtctttstttttttctcttgattttctcctttagaatcttgtcataacatatatatatatgattacatcccattgttttctcttcaatgagatttttcaatatttctaatttctcgatttgcttattaaagtaagacttttaaacttttcctgtggcatattatgttttagctgttttttcatatatacaaagaatattc

SEQ ID NO: 114181 - DNA, 601 bp, Homo sapiens
  misc_feature (1)...(601): n = A,T,C or G
nnnnnagccaccataaaagttaattatttttactatatcaactaaactggacagttgtagcttgcaccaggtaaatagtactgctttgatttagttgaggacataaagcacaggacctctcataagctttgccttgttgggaattggaacggacctgtggccattaattttatgtgtttctgccctcaaaagcataaaagtatgaggcaggtgagtcacactctgagatccaccaatttcaaggggtctactcattagctttggtgggttcacaaaccctctaacgggcattcagagtactstgtgtgtgtgtgtgtgtgtgtgtgtgtgttgtatattggtttccctttcacttgagagagtctgtaactttaagctaaatcttaaatgagactataaatacccccgccattgtcaccatcaatttaattgccttgccatagtacagagtctcttcttcattggctgactgacctcagtactccaatcacacatgccgcactttaagctaccagccttcctgtatcatggctcttttgtttccttgtcttttatgacctagttatttcttgctcatggtcatgttctagctttgcttggt

SEQ ID NO: 114182 - DNA, 634 bp, Homo sapiens
cacactatcatacaaagctacagtaattaagacagtgtgatactgacataaagatagacatatcacttaatggaatggaactcaaagtctgtaaataaacctgtgcaatttagttttgacaatggcactaaggtcatttaatcaaaagagaatatttttcaacaaattgtttggggacaactgaatatccagatgaaaacaaatgaatttgggcacatacctcacaatgtatacaaaaaacttcatataaatcagagtcttaagactattaactaaaactgtacaactcttaggagaaaacaatgaggaaaatattcatagcattggatttggcaatgatttcataggcataacaccaatagcacagccaacaaaataaaatatagataaattgggcttcaaatmcaaaacttttgttcttcaaatgacactattaagaaagtacaaaaacccacaaagtggataacatatttgtaaatcatatgtctgataagggattaatatccagaatatataaagaactctatataactcaacaattaaaaaaaaacccaaataatccagtttaaaatgggcaaaggatctgaacaaatatttctctaaacatgtaaaaatgataaataaccatgtaaaa

SEQ ID NO: 114183 - DNA, 568 bp, Homo sapiens
gcaattgcccataaatgtgtttgtacatacacttcttgaacctacctcatgatgtacgcatgcacttgtgtaatactcacaaaaatgcttcatgtcattacttcaaatatttttatgtttagcttagtcaagcacagattgctttaatagcatcatggattttgttgctatgatataagaccatagtgctatattttcatttctctatgctttgctcatttatatcatcctcctttgcttgcaatacttaatagaactttcagtttaaatgcaaatagytgaaagaattatttcttatttgttcctgttatggtggatctggcttaaccatccttacccagagcatgagcatttttcttcactttgctttgaagatcatttaagctcatctctaaactgcctcattatgtctttcagaaatacagttctcatataacaactaatcaggaaattcaaagtgtttgaagtatgttgggaaaaacagatgtttgctatttaaagtactgcagatgattgttatttctttttctagtcaaaagacgttcatatccactaaataaatgtattg

SEQ ID NO: 114184 - DNA, 299 bp, Homo sapiens
caattcttttatccaagaatgttcagaacggctgacactaccagtgaggcaccttttgccttacctgtgtggtagggcactgtaggtttagcaayacggagggactggtacagcgtaacaggttaaagtaaaacaaaatggtcttgttcctgttaagaaagaaaacataatctttttagtgaccatggaaatgttccatatcatttcagaccctgaacactttttataaataacctttaaaaattggtttcattatctacagaggctgaaatatattctccctctcccttaggtaccta

SEQ ID NO: 114185 - DNA, 591 bp, Homo sapiens
tcatgtgtcacactgagggaattccccactaattcaagaatcccctatacttcttcagaatgtgttcactacccttcggtgaacacattgagtgatgggtacttacttttacatgacatggcttattctattttcttatcaaggtattagaaatttcttcattatctgcctgtttgcaacctatatcctctaacttctggggaagaaatgaccattttaccattttttccacatagcaacacttcaggtaattccttattcttttttctttggaaaatataatgtctatttgcagttaaatgtatttttaaattataaatttaaattatatttgaaaatataatttctaaaatgcaattttggaaaatataattatcaaggataataatttctttgatattttctaataggacatggcttgtgaaatgttcactaactgactgcatyacttctaatgacttctgttacatgatcttttcagcatatgacactggattaaacacaatactgtttcatatggccattgagaaataagatgaaaatcttatcactcctaatgcattgatgcttagatttttttgtatttgctac

SEQ ID NO: 114186 - DNA, 572 bp, Homo sapiens
ttttgttatttaacaaaagaagatgccaggctataaaatgaagctttatggagttgaaaggtactagcctagaagtcagaatctctgggttagaaccaggctttccaataacaagctgtggccagtcacatttcacctgtataggtcatagcttcctcatcagtaaaataaagacattggaaaaaattaatgcctaagatttgttcatagcaycctataaaattaatcactacttaaaaaaaattcagatgtatgccctgctgtttatcactgtcctaatgtgagtaaatgaagattagcctttagtatacgtaaataccaagatttctccggatctatttagtaataaacttctcctggtaaatctttctttattcttgggagcaatttaaacactgaaaatagaatccttcccgcaaaacaaacttctaaagaggcggataatgacaaaacagctaatctgatttttttcctacctttaaaatcatactcaattctttatcaaatttacataagatgctctgtcatatgttttgccttttcatgtgcacaatttattttcctgacctctc

SEQ ID NO: 114187 - DNA, 572 bp, Homo sapiens
ttttgttatttaacaaaagaagatgccaggctataaaatgaagctttatggagttgaaaggtactagcctagaagtcagaatctctgggttagaaccaggctttccaataacaagctgtggccagtcacatttcacctgtataggtcatagcttcctcatcagtaaaataaagacattggaaaaaattaatgcctaagatttgttcatagcaccctataaaattaatcactacttaaaaaaaattcagatgtatgccctgctgtttatcactgtcctaatgtgagtaaatgaagattagcctttagtatacgtaaataccaagatttctccggatctatttagtaataaacttctcctggtaaatcttyctttattcttgggagcaatttaaacactgaaaatagaatccttcccgcaaaacaaacttctaaagaggcggataatgacaaaacagctaatctgatttttttcctacctttaaaatcatactcaattctttatcaaatttacataagatgctctgtcatatgttttgccttttcatgtgcacaatttattttcctgacctctc

SEQ ID NO: 114188 - DNA, 560 bp, Homo sapiens
gtaataacatacatatcgagacattgctataaagaatagatgatatagagagggatggatgcattgtattttcccctgtgcttttaaaagttttcgcttgactaattgattcaaatacttgaagaggaacttgtggtgggctgtcctttttgatatrtttaaaatttcccctaaaattttttcttacttttttcttccacattctgttattaggttttctaagtttattttctatggaaaaagaattaagagaaaaattaatccactcctgggaaagactagaatatggaagtcttcaggctgagtcagagaaaatttcttttcaaagtttagattaaaaatgttgctgattgtggagactgagaagaaaaggagagagatttgaggagcccgtagaaagaatggggagttgatacatttgcagggacaatgactaaggaccagatgtaacgaaggatgtctgggcaggggccacagtagtttgataaagagatagttactaatggcctatttccaagccagcttctcaaacttaaatgtaatcacaaagaaaagggggt

SEQ ID NO: 114189 - DNA, 261 bp, Homo sapiens
atctcctaacactcctagaggtaayttaaactgcatacacacacatatattcataactgaacaagctttatgcatatttacaaattaaatgtgccatcactgaaattcaaattaaaagcattaatcaaatgtgaccaacatactgtttgactaaaattgaacctcttctgctccaaggaggataaggagctgacagctatgttacaagatctatctagttttgtactatatagaccatgtgttatgcaatgactcaatatc

SEQ ID NO: 114190 - DNA, 261 bp, Homo sapiens
atctcctaacactcctagaggtaacttaaactgcatacacacacatatattcataactgaacaagctttatgcatatttacaaattawatgtgccatcactgaaattcaaattaaaagcattaatcaaatgtgaccaacatactgtttgactaaaattgaacctcttctgctccaaggaggataaggagctgacagctatgttacaagatctatctagttttgtactatatagaccatgtgttatgcaatgactcaatatc

SEQ ID NO: 114191 - DNA, 490 bp, Homo sapiens
tctcaaacagcgggactaggaaatctaagtcaagtctgaagagaaaggtagtgaaagacttaccatttttctttttctttttcaaaagaagtcaatggccattcagtgtttaaatgagaacaaagactacaggggggaaaaattaaggtaaatatttgtaataatgtgtcattgcattttacataatgggccagcagtctttgaaatgtgacgacatycatatctacagttttatttgttttttcttatttgctctcctgaggcaagtctcttttaggctgtcagccaccaaagcagctagcaaatacaaggacactgaaaggcattctgccaacacgacctcagaagtatttacagactgcaatggagaccatgatataattcagtttctgcatggctatactctttgccaattaatattctaatgtatcctttgaggatgtggtaaatgttggtttaagataaaacagcaaagacaaatattagtgtg

SEQ ID NO: 114192 - DNA, 579 bp, Homo sapiens
gtcatctgtgggtctggaggagtttctataatcttagcacttgtatatcagagtctggcttatcatggaaactcctacaaattagctatatgaaaaataccttcattctattccaatggttccccaagtcttaactcattctggcaacaactctaaagtccagagtctcatctaaatatcatctaaatcagatatgagtgagacttgaggtatgattcatcctgaggcagaattcttctccagctgtgaacctgtgaaaccagacaaattatgtgcttccaaaattcaatggtgagaaagacacagcatagacattcccattccaaacagaactaggaaaaaaggagagggtgaaggatcttgagcaagyccaaatctagcaagacaaatttaatcagactttaggattgagaataatcctctttggtttgatgctctgcccttctggtccactggtgtggtggtggtccagcccccaaaactccaggtggtcctgaaccgcctcaaaggttccaccggacagtcctagacccaagactttagtggaaggctgtctggcctgttgaaactgagatggtg

SEQ ID NO: 114193 - DNA, 574 bp, Homo sapiens
aaggggaggggatatagacctttatctcttgatgagagaatgccaaagaatttgtgaccatgtttaaaaaccaccattccttctaatagtagaaaactagacaattttctcattagtttaacaactctagacttttctacaatcttttttctacttccctcacttctgtcactggaaacattgccatgattcaaaactataagtattttatttttaaaaacacattttcagttgagttgtattctttgcccatgtgcrtggggacagccatggccctcagcatgactttggctttatctgtccattctttctgctacccacttctggccactttacagcttgctggtgcctccaccagagggtggcaggagcagagaaagtgaactcaaatttgtccgtttaaaaaaacttgttatttggcagcagttttgcataaaggcagaaagcaaattaaaactaaaagtacatattttgaagattaactgtgaaactcaaccactcattacaaagaacaccagagctggctattctttctattaatccaaggccttatttcaaagacccctaaagatgt

SEQ ID NO: 114194 - DNA, 574 bp, Homo sapiens
aaggggaggggatatagacctttatctcttgatgagagaatgccaaagaatttgtgaccatgtttaaaaaccaccattccttctaatagtagaaaactagacaattttctcattagtttaacaactctagacttttctacaatcttttttctacttccctcacttctgtcactggaaacattgccatgattcaaaactataagtattttatttttaaaaacacattttcagttgagttgtattctttgcccatgtgcgtggggacagccatggccctcagcatgactttggctttatctgtccattctttctgctacccacttctggccactttacagcttgctggtgcctccaccagagggtggcaggagcagagaaagtgaactcaaatttgtccrtttaaaaaaacttgttatttggcagcagttttgcataaaggcagaaagcaaattaaaactaaaagtacatattttgaagattaactgtgaaactcaaccactcattacaaagaacaccagagctggctattctttctattaatccaaggccttatttcaaagacccctaaagatgt

SEQ ID NO: 114195 - DNA, 574 bp, Homo sapiens
aaggggaggggatatagacctttatctcttgatgagagaatgccaaagaatttgtgaccatgtttaaaaaccaccattccttctaatagtagaaaactagacaattttctcattagtttaacaactctagacttttctacaatcttttttctacttccctcacttctgtcactggaaacattgccatgattcaaaactataagtattttatttttaaaaacacattttcagttgagttgtattctttgcccatgtgcgtggggacagccatggccctcagcatgactttggctttatctgtccattctttctgctacccacttctggccactttacagcttgctggtgcctccaccagagggtggcaggagcagagaaagtgaactcaaatttgtccgtttaaaaaaacttgttatttggcagcagttttgcataaaggcagaaagcaaattaaaactaaaagtacatattttgaagattaactgtgaaactcaaccactcattacaaagaacaccagagctggcyattctttctattaatccaaggccttatttcaaagacccctaaagatgt

SEQ ID NO: 114196 - DNA, 609 bp, Homo sapiens
actaattgtcatgcaatgtgataaatgctttgcaaaatgtgtatgtattttcagggggcttggaggctcatagcaaaggtccttgaagagagcaagaaaaagtcttcccaggaaaagtggacacctgagtgagtgttacaacgagaaggggggcatcccaggcaaggcagctaccaagcacaggtgtgaaggtgagcttctgcgcaggtttctcgaaggttgttggcacagctggagcataaggcacatgcaggaggcacttgcaaaagatacagccaggatgtgtacagggctgatcatgaaggatgtacttaagtgaaatatattttgcagaatttcaacccagagactctcccttttgatttacctgcaaacaaaaagaatcatacttccctttgactgtctctgaactctgaattttcgcttctactcactttttgaagccaaattgcatgaaattaggccccttccttccttccttcctttcttttcattcgttcrttcttttttgagacaaggtagagtacagtggtgccatcatagctcactgcagacccgacttcctgagggtcaggtgatcctcccgactcagtctcccaggtagctggg

SEQ ID NO: 114197 - DNA, 597 bp, Homo sapiens
tggcaactttcagttgcttcagtttctcaggtctactggagaataagttcttggagcaatttgtcctacatgtttagcttatcatagggtggggaggtgacatgaatagataatcaaaggtcaggctgcatcctcgacacacagaggtctatgaggacctgccctgttgccatggtaacaaaaaggacagtggtggacttgctgctaggctggaaggtatatagctgaggtcataaactcacagctcatgggttgattctagttagcagacatatttcgactgagccataagtctataaaatttttataagttatttgctaacatctaaaatttgggatatttcatttaaaatccgaatttccaacttctcttgcaaatttgaaatctctggacacatggggcttcattccttcttgtcagtgattgcttagagtgggaratggcttccttttagagagaaccagagttctccagctttgtttacttgtttttccttttacctaacctttgtcatcactggtgttatcggcctattccctggcaccactgagtgtacaaccatcgctctataaattgcacaaagaatttgtgctatt

SEQ ID NO: 114198 - DNA, 532 bp, Homo sapiens
tggatcagctgagcccaggagtttgagaccagcctgggcaacatggcaagaccccatctctacaaaaamtacaaaaattagctaggtgtggtggtgagttcctgtagtcccagctactcgggaggctgagatgggggaatcacacgagcctggaaggtggaggttgcagtgagctgagatcattccaccgcactccagcctgggccacagagtgagaccctgtctcaaaaagaaagctcccagagggattctaatatgcagccaagtttgagcaggacaaacttaggtcctctttcaaagagagggatcgaatttctggtcacctggctgtcattttggaaactgaagttgttctagaagcaattgtccgaatctctaggagttttgagggaggtttttcctaatctgactaaatttgctgagattttattaatttggtctcagcttactaaaaaggagaagaaagaatgcttaatacatcttccttggaaatgcagcacgaaaaagacaaagaacttcagtcaaggttaaa

SEQ ID NO: 114199 - DNA, 532 bp, Homo sapiens
tggatcagctgagcccaggagtttgagaccagcctgggcaacatggcaagaccccatctctacaaaaactacaaaaattagctaggtgtggtggtgagttcctgtagtcccagctactcgggaggctgagatgggggaatcacacgagcctggaaggtggaggttgcagtgagctgagatcattccaccgcactccagcctgggccacagagtgagaccctgtctcaaaaagaaagctcccagagggattctaatatgcagccaagtttgagcaggacaaacttaggtcctctttcaaagagagggatcraatttctggtcacctggctgtcattttggaaactgaagttgttctagaagcaattgtccgaatctctaggagttttgagggaggtttttcctaatctgactaaatttgctgagattttattaatttggtctcagcttactaaaaaggagaagaaagaatgcttaatacatcttccttggaaatgcagcacgaaaaagacaaagaacttcagtcaaggttaaa

SEQ ID NO: 114200 - DNA, 532 bp, Homo sapiens
tggatcagctgagcccaggagtttgagaccagcctgggcaacatggcaagaccccatctctacaaaaactacaaaaattagctaggtgtggtggtgagttcctgtagtcccagctactcgggaggctgagatgggggaatcacacgagcctggaaggtggaggttgcagtgagctgagatcattccaccgcactccagcctgggccacagagtgagaccctgtctcaaaaagaaagctcccagagggattctaatatgcagccaagtttgagcaggacaaacttaggtcctctttcaaagagagggatcgaatttctggtcacctggctgtcattttggaaactgaagttgttctagaagcaattgtccgaatctctaggagttttgagggaggtttttsctaatctgactaaatttgctgagattttattaatttggtctcagcttactaaaaaggagaagaaagaatgcttaatacatcttccttggaaatgcagcacgaaaaagacaaagaacttcagtcaaggttaaa

SEQ ID NO: 114201 - DNA, 568 bp, Homo sapiens
tacaggatcaagcagggttaggctaaaataggtgaaaacttaaaaacaactaatgagtttagaatttaatgacaaatgtacaagttttgaaatataatttttctctctccagtcctcatttttgttaaaaaaaaatcatcatggaactaaatggtttgcaaaatagacttttgtcttaaacttgcctgattatttgcatacagtgcagcaagaataattatttacttcataggccyttcggattggctgtgatggatgtctgttccatagggaaggccttttaaagctatgcccagccatgggtttatcctcaaatacctgtgagttggatgattctttcctcttaagatcccaaggtaaacttggagctcctaggcctgttagaaagtgacattctttactgaccacaggtcaggaaccctgtacagggactgtgtagatgagggcatgagcccagtctctcatgggaattttatcagctctgtaagtagagcttgactccttaaagtcaagggcagcatacccttccagtcaaagtcttggtaaaataactactttctacaattgt

SEQ ID NO: 114202 - DNA, 511 bp, Homo sapiens
ttttcctgtaggtccttcaatgcttacacatgtgctgtgtgggcaagagtaaaaagttgtaggaaaaaattgtgtagcaacaaataatatactacacttgcaaagtgcttgttttgccttattaacaaagataaatctataaaaaaatcatttggctgatttagttggttggggaattcatttgttcccagagaagttacattaggattccatccagttccttataatgtatccagatgcaagaaatttaatttatgctttaaatatagtaaatattctagattaaggactgagtgcctgccaaattttaagctcagctgttttattttatttttttgcttaagatatgaaataatgtcttgaactatataaaaccaagctattyacttcctaattttttgaatgtgctgatttgtatcaaattttgtagtgatcttgccaggcaggcttagagcctatatattaaaatgtagcccaaaggatttgttttaaaaatcagcttctatgagat

SEQ ID NO: 114203 - DNA, 662 bp, Homo sapiens
gagaaagcaacatctagtaagttctcagtgtttgcttacgaactctctttttctgtcaaacttattcattttctgagtgtcctctcctcattgcttatttttgttgattttgttgaagatcagatggttgtaggcattaaaaacatacatcagtataatagccatctatgacaaacacacagccaacatgaaagagttaatgatgaatcttttttagaaagtaagcttccatttatttctaggggtgtatttttctttttaccttttctttaataatttcaactattattttagattcaggggatacatgtgtaggtttgctacatgggtatattgagtgaaaytaaggtgtgaggtacaaatgatcctgtcacccaggtagtaagcatagtacccaataggtagtttttcagccctttcccttctcccactcctagtaatacccagtgtctattgttgtaatctttatgtccctgtgtacccaatgtttagctctcacttataaatgagaacatgacatatttggttttctatttctgcattagttcccataaaataatggcgtctggctgtatccatgttgctgcaaaggagatgattttgttcttttttatggctgtacagtatagtgtgtatgcacactttctttatcagttccactg

SEQ ID NO: 114204 - DNA, 662 bp, Homo sapiens
gagaaagcaacatctagtaagttctcagtgtttgcttacgaactctctttttctgtcaaacttattcattttctgagtgtcctctcctcattgcttatttttgttgattttgttgaagatcagatggttgtaggcattaaaaacatacatcagtataatagccatctatgacaaacacacagccaacatgaaagagttaatgatgaatcttttttagaaagtaagcttccatttatttctaggggtgtatttttctttttaccttttctttaataatttcaactattattttagattcaggggatacatgtgtaggtttgctacatgggtatattgagtgaaactaaggtgtgaggtacaaatgatcctgtcacccaggtagtaagcatagtacccaataggtagtttttcagccctttcccttctcccactcctagtaatacccagtgtctattgttgtaatctttatgtccctgtgtacccaatgtttagctctcacttataaatgagaacatgacatatttggttttctattyctgcattagttcccataaaataatggcgtctggctgtatccatgttgctgcaaaggagatgattttgttcttttttatggctgtacagtatagtgtgtatgcacactttctttatcagttccactg

SEQ ID NO: 114205 - DNA, 597 bp, Homo sapiens
tgctgttagttcttttttttgaaagtttattagaattcatcagtgaagctattctgtcctgaacttttctttgttggctgactttgtactagtgatttaatcttgttactgattatcggttgttgaggttatctatttcttcttggttctctcctggtaagttgtaaggatacaggaatgtatccatttcttctagtttttccaatttgttggcatgaagtcttcatgtatgtatgctttgatgaattgcctgctttccaaggtgtagggcactgtgtggacttgggtgctggtgccatgactgcaayaccaggcccagcttttgctgtgacactgcagccatctgagtggatgtggtgagatggtaagcagggccatatttatggagcctggagctgttgggtcccaggggtcagatggttgctctgctctcagaatggtgccatgttgcagcagcctgggtcccagggaatgagggtgctccagcataaatgttctctctagaataatgtaatcacatggactccagccactatctttactagactcatggcttgtgagggctgcgggtctctcctatagctaggattgcaggca

SEQ ID NO: 114206 - DNA, 597 bp, Homo sapiens
tgctgttagttcttttttttgaaagtttattagaattcatcagtgaagctattctgtcctgaacttttctttgttggctgactttgtactagtgatttaatcttgttactgattatcggttgttgaggttatctatttcttcttggttctctcctggtaagttgtaaggatacaggaatgtatccatttcttctagtttttccaatttgttggcatgaagtcttcatgtatgtatgctttgatgaattgcctgctttccaaggtgtagggcactgtgtggacttgggtgctggtgccatgactgcaacaccaggcccagcttttgctgtgacactgcagccatctgagtggatgtggtgagatggtaagcagggccatatttatggagcctggagctgttgggtcccaggggtcagatggttgctctgctctcagaatggtgccatgttgcagcagcctgggtcccagggaatgagggtgctccagcataaatkttctctctagaataatgtaatcacatggactccagccactatctttactagactcatggcttgtgagggctgcgggtctctcctatagctaggattgcaggca

SEQ ID NO: 114207 - DNA, 569 bp, Homo sapiens
gactattcactaatatttactatttataagtagaagaagaatcagaataataaagtttgagtcctggttgtgtgatacaaattcaactgcctttggtctctatctgcttacttgctacacgtaggtactgatttttcttaccttacaaggttttcctactgataatatccttaaacaacatattacagtacatacaaggcaggtactcagtagatgcttgctacttctatcctctcttgtatatcgcctctatagttaaccactagattttctttgtgaaattaatacttctttaatacaaaaatatttatataaagtagaataaaaagcaaactactaacttttgtaagttaaacactgcaaaatactctataytgaataaagaatcagataactaagcatttctaagatatttgaaaacataaacgtcagcctcatgggccaatcagcctattatatatgtgcaggcatttattttagagaaactcacaatgggataattacctattcactttaacagtcttggctgtagctaccactgaatcaatggaagttaatgtagcagatag

SEQ ID NO: 114208 - DNA, 569 bp, Homo sapiens
gactattcactaatatttactatttataagtagaagaagaatcagaataataaagtttgagtcctggttgtgtgatacaaattcaactgcctttggtctctatctgcttacttgctacacgtaggtactgatttttcttaccttacaaggttttcctactgataatatccttaaacaacatattacagtacatacaaggcaggtactcagtagatgcttgctacttctatcctctcttgtatatcgcctctatagttaaccactagattttctttgtgaaattaatacttctttaatacaaaaatatttatataaagtagaataaaaagcaaactactaacttttgtaagttaaacactgcaaaatactctatattgaataaagaatcagataactaagcatttctaagatatttgaaaacataaacrtcagcctcatgggccaatcagcctattatatatgtgcaggcatttattttagagaaactcacaatgggataattacctattcactttaacagtcttggctgtagctaccactgaatcaatggaagttaatgtagcagatag

SEQ ID NO: 114209 - DNA, 652 bp, Homo sapiens
agacaccaaatttagaaataaatccaagatatgactaacaccgtgaatttggctagattttaatgctagaataagaagcctactgtcgaggaaaatttccaaccttagcaaacataactataagttgctttctcttctctctgagtttttacttctaactcagtgtttttggtgtgtatgctaccttctttattcagccagagagtcatggtgtcaaactccctgaattatgaatgtagaaactctcagaaagtcacaaacaatagatcaccgaaagaaagatgtttkccatttgaacctatacttaacagtaaagtgcaaactaattatcttaatatttaacataaaacaaaataaaataaagtattatctggtaaaattcattttggcatgataatattagagattaagttattatctgtcagtcttggtgatataaataaaaaaatgataggcaggttcactcccccaccaatatgttaaaaaataaacaaacagtaaagcaatctgcaattacaaaacattaaaatttatctgtaccaatatatgatttactaatttttaaaataaattactcaagtcactcattgaggatagaattggcctgtcacacatttatagaaacaaatgagaaagactgacagaaaagtgt

SEQ ID NO: 114210 - DNA, 652 bp, Homo sapiens
agacaccaaatttagaaataaatccaagatatgactaacaccgtgaatttggctagattttaatgctagaataagaagcctactgtcgaggaaaatttccaaccttagcaaacataactataagttgctttctcttctctctgagtttttacttctaactcagtgtttttggtgtgtatgctaccttctttattcagccagagagtcatggtgtcaaactccctgaattatgaatgtagaaactctcagaaagtcacaaacaatagatcaccgaaagaaagatgttttccatttgaacctatacttaacagtaaagtgcaaactaattatcttaatatttaacataaaacaaaataaaataaagtattatctggtaaaattcattttgscatgataatattagagattaagttattatctgtcagtcttggtgatataaataaaaaaatgataggcaggttcactcccccaccaatatgttaaaaaataaacaaacagtaaagcaatctgcaattacaaaacattaaaatttatctgtaccaatatatgatttactaatttttaaaataaattactcaagtcactcattgaggatagaattggcctgtcacacatttatagaaacaaatgagaaagactgacagaaaagtgt

SEQ ID NO: 114211 - DNA, 533 bp, Homo sapiens
gtcagttttcacaagtttggttgctttgtgaaatatcaagtatgcttacatgagatagaagtcacagaactgtaaataaaatataacattattgatggccatggggcttttttcactatggacaatgtttttgaaaaataatcagtaatgtcatttaatttcaaaattacctcagtgttatacattcaaatataaataatgaattgttgaaaaaaatctttgtatgtacatctcaccacaataaaatcaaagtgaactctataaaagctctaaaatattagaaagaacataagaaatctataatttactattatgtatatgtatgtgtgtatatatgtacatatatacatatataaaaatattaaattttgaatkttttaaattctagaaataatactccacattatacagagaaataatataatgtacacctacatgcccattaactggattaataattgttcacattttttcatatttatatcttttatttatgataaaatatttaaattattgacattatgaattttctc

SEQ ID NO: 114212 - DNA, 533 bp, Homo sapiens
gtcagttttcacaagtttggttgctttgtgaaatatcaagtatgcttacatgagatagaagtcacagaactgtaaataaaatataacattattgatggccatggggcttttttcactatggacaatgtttttgaaaaataatcagtaatgtcatttaatttcaaaattacctcagtgttatacattcaaatataaataatgaattgttgaaaaaaatctttgtatgtacatctcaccacaataaaatcaaagtgaactctataaaagctctaaaatattagaaagaacataagaaatctataatttactattatgtatatgtatgtgtgtatatatgtacatatatacatatataaaaatattaaattttgaatgttttaaattctagaaataataytccacattatacagagaaataatataatgtacacctacatgcccattaactggattaataattgttcacattttttcatatttatatcttttatttatgataaaatatttaaattattgacattatgaattttctc

SEQ ID NO: 114213 - DNA, 577 bp, Homo sapiens
ataggtgaaaaactgtaaggtcacatttagacaaggcaaaattgatctttagagaagactccaaaaccgaggtcacctaatttcatagaacatgatatgccagagaataaattcacgtaggaaattgcaaaatacacaaggagaaagaaccaacagatgcaacgtttgggagtatttaagccccaagtactacagaataaaataatcttaagagatttaaaaataagtatatggaactgaaactttcagagctaataaagagatattgaagttataagacaaacaaaaagaagtatgagaaaaatgcagtaatgtaccatctataaacaagtagtatagccatggcgtgtggaacagatatggtaagtagccagattaatattgttrtaaataaaataagtgaattggaagataatctaaagaaatagctcaaaagagaggcagaaaatatcaaagagaaggcaagagatacagaagattaggaaaatttcaagatttatttaatactatttttagaaaaggaaaatggataaataaatgaggcaacacagttttcaaaaacaaactgaaaaagaga

SEQ ID NO: 114214 - DNA, 587 bp, Homo sapiens
gggtgtttatccaagcctggtacctgtccaagaatattttatacctatgaatgtcatttttcatgctgctcatggatcagtgaacagaatttgatactttttgcccttgtgggtcaaaaattaatgcaatgtgaatagctaatatagtctacaaagaagcttaggtaaatacaaataatgacaataaaagcaataataaaaattgtgaaatgtagtcaaaccagattggaaaaaatatggtagcaattgtaatttagagtaatatttatcattatcatcttattggggaaagctataygtaattaaatacagcctgcaatcttttaacagaaatgcacatttgatttaattagctttttctttcaataaaatttacttgctattatataaattgctttttaaaatcacaaattaccaaaagcagctagtgtctagtaaattttgtacctcttcctaccaataaaatttcagaagtctgctgatacttatcgttggcaataaaataattctgctgatgtattttagttgattaatgtgcatttgattttataacaaactggaaatacatttctaagatacagtaaact

SEQ ID NO: 114215 - DNA, 195 bp, Homo sapiens
attaccgtacaaattgtgccatatgataccggaatctttatgagagactgttgccatgctgatgggcatayggatttttaaatggcaagtgttatattgagtaattaaacccagcagttcaagtcatactgattgcttttttgcctcctgtactacacaaacaaagaattgttctgtgggcatgttctagattgt

SEQ ID NO: 114216 - DNA, 612 bp, Homo sapiens
aaaaaaagaaaaccacaggccagtatctctgatgaacattgatggaaaaatcttcaacaaaatgctagcaaactgaatttaactatacattaaaaatcattcatcatgaccaagtgaaattacaaggagagttcgacatacacaaatcaatcaatgtaatacatcatatcaataaaataaagtaaaaaaatccataagatcatttaaattcatactgaaaaagcattttataaaattaaacatcacttcataaaaatcctcaaaaaacttgatatagaaggaacatacctcaacataataaaagccttatataacaaacctacagctagtatcatacagaatggggaaaaactgaaagcctttcctctaaaatctagaacatgacaaggatgcccactgtcaccactgttattcaacrttgtgctggaggtcctagctagagcaattagacagcagaaaaaaaataaagagcatccaaactggaaaagaaaaagtcaaatccttcttgtttatagataacataatcttatatttggaaaaatctagactccataaaaatattagaattgataaattcagtaaagtcgcaagatacaaaatcaacatacaaaa

SEQ ID NO: 114217 - DNA, 613 bp, Homo sapiens
ttatgcaaactgcatctagcccttttatcagcagactttaaatacatctttttagccacctctagccaaaatgagtattgagtttccagcttctaagaggtgaacaatggagatggaggttggaaatacgggtggggtaggccaaccaaatgtctgccacagaaaccaagatgtgacttgggatttcaagatgtgaaatctatcctttgcctctatactgaagtctgggaaagcagggaatagggatggaatctgcattctccatattcttagatacacaacttttcttgctcactgcaacccaatatgtcactggtcatagagagagatgttcaccaaacrtcttttactgtttccttcagctccatagtgaatgtgacacttctttatcccttttcctcctcccccaccaacctaagaagcttcatacttgaaaatctttattaaagagcattattaatatattgataagtgcatgaggaaagtgtgaaagaatacatacaaacatatacacatgtatagatagatagatagacagatagacagattgatagatagatatagacatataatatggcaccagtattggtgggtgttgctgggagatgagagg

SEQ ID NO: 114218 - DNA, 613 bp, Homo sapiens
ttatgcaaactgcatctagcccttttatcagcagactttaaatacatctttttagccacctctagccaaaatgagtattgagtttccagcttctaagaggtgaacaatggagatggaggttggaaatacgggtggggtaggccaaccaaatgtctgccacagaaaccaagatgtgacttgggatttcaagatgtgaaatctatcctttgcctctatactgaagtctgggaaagcagggaatagggatggaatctgcattctccatattcttagatacacaacttttcttgctcactgcaacccaatatgtcactggtcatagagagagatgttcaccaaacatcttttactgtttccttcagctccatagtgaatgtgacacttctttatcccttttcctcctcccccaccaacytaagaagcttcatacttgaaaatctttattaaagagcattattaatatattgataagtgcatgaggaaagtgtgaaagaatacatacaaacatatacacatgtatagatagatagatagacagatagacagattgatagatagatatagacatataatatggcaccagtattggtgggtgttgctgggagatgagagg

SEQ ID NO: 114219 - DNA, 613 bp, Homo sapiens
ttatgcaaactgcatctagcccttttatcagcagactttaaatacatctttttagccacctctagccaaaatgagtattgagtttccagcttctaagaggtgaacaatggagatggaggttggaaatacgggtggggtaggccaaccaaatgtctgccacagaaaccaagatgtgacttgggatttcaagatgtgaaatctatcctttgcctctatactgaagtctgggaaagcagggaatagggatggaatctgcattctccatattcttagatacacaacttttcttgctcactgcaacccaatatgtcactggtcatagagagagatgttcaccaaacatcttttactgtttccttcagctccatagtgaatgtgacacttctttatcccttttcctcctcccccaccaacctaagaagcttcakacttgaaaatctttattaaagagcattattaatatattgataagtgcatgaggaaagtgtgaaagaatacatacaaacatatacacatgtatagatagatagatagacagatagacagattgatagatagatatagacatataatatggcaccagtattggtgggtgttgctgggagatgagagg

SEQ ID NO: 114220 - DNA, 612 bp, Homo sapiens
ttcacaatcgtccatatgtcagttggaagaagaaaatcgagactaagagagtggaaacatagctggaaagttaatgcttcaagcggaatcccagacttaaacccatgaatgttttgaagatggattatacattttaatcayagacaaagagcattatagaaaagttgggctcttaatttaaaatgaagccgaaaaagggtgagttttcaaacatgacacttcccaatatgctaacacataggagccacatgaaaaatatttatttagtgaattaattgatgatgcaagcaacaatgaaattgctgtaaggctcacttgaaaaatccctcttgaggtgtttgggccttttttttttttttctaaaccatcttttccctctcaagcccagactctgtaagtgcccactctacttctaccatgccagacatttgctgtcagtccactgtcagttcccagagtacctgcagtggagtaccataggtctgctgcattgagggtaaatgggactctgttgtggctggcagggagccctgcctgcgagctgacaactacatgaaattgactgacaagctctgcaagcagatacagagttaatgagcaaacattacccaa

SEQ ID NO: 114221 - DNA, 604 bp, Homo sapiens
ttagtttagtcaactaaaataatcatgtaataaactttgtgaagacagatttattccttcatcctttcctattttccccagcactttgcaaggatcacagtgtgtgtacagcagtcagaagtgtttttaaaacttagcacatgtggtgttcttattgcgagggctacggaatattagtcacaagaccctagcatgcaggaggagttacactacatcacagaatactatgcagacataaaaagaagaacaggattatgtcctctgcaggaacatgaaaggagctggaggccattatccttagcaaactaatgcaggaacagaaaaccaaataccacatgtacgtggaagctaaatgatgagggcacatggacacatggcaggggacgtgaaacactggggtctacttgagggtggagggtgggaggagggagaggatcaggaaagataactagtgggtactaggcttaatacctggatgatgaaataatctatacaasaagcccccgtgacacaagtatacctatgtgacaaacctgcacatgtacccctgaaattgtaagtttaaagaaagatgaaagcacagtagctgaagtcaagaaataaa

SEQ ID NO: 114222 - DNA, 563 bp, Homo sapiens
acaaaaggattttactggaaaacaaactatttttggctctcaggtccttaaatatagctcaagcattgaccttcactaattcacacatcagtgttgttcagcttttttatacgagaatcctaaaagtaagccatttgggggtttgcrtgacaagaaggtaagtccaggttgggtatataacctgcttaaatttgctacctaccatgtgttctccgtgtggtagaaacctttggggacagtgtctcctatcagaatcctgtgactgacaagatcacagcacgactccagccagcggaatcattccttgttgtcatattgacgttgcagtcatcttgtgttttctctatgctaatggtgtggagaagaaactaacaaaatgtcaaaagagtcaactccaaacccacagtctatgaatggcttccttagcagtgaaggtcctggcctagaaagtttctgaattttggcatcacctgcctgtttgtttcacatagttctatgcccagacccagtctccttatattgttgttagtaacaattatatcgaatattaagtgggtgaagag

SEQ ID NO: 114223 - DNA, 522 bp, Homo sapiens
aaaggtgacacagcactgaacctggcacaggtgccagaaatagaacccaaagtacttgactctcaatccagaactccctgcttcatatgtgggtctcaaaccgagaggcttgttaaaaatgcaggttcccatgtctcaccccacaaggatggaagcataatctccaaggagacatgtgtttagcaatgttgaaatgcttttaaaaattgagtctgcctctctctcaatttcaaagcagaaagtttaactgcatgaaatcaggamaggcaaagctgtcaagttagaggaaggaatttactgtctcagtaattctctaagatcttgaagagctgagattggctacttttcaaatcagggaagacaactttggcgggcttttggaaacatgatagtaattgagattcaggagggatgtgacaggtctcattctgtacaattggggaattcattcatctctaaccacccaggtattcatttagtttgaaagaaaatgatgtatttgtgctagatttctgctatttt

SEQ ID NO: 114224 - DNA, 522 bp, Homo sapiens
aaaggtgacacagcactgaacctggcacaggtgccagaaatagaacccaaagtacttgactctcaatccagaactccctgcttcatatgtgggtctcaaaccgagaggcttgttaaaaatgcaggttcccatgtctcaccccacaaggatggaagcataatctccaaggagacatgtgtttagcaatgttgaaatgcttttaaaaattgagtctgcctctctctcaatttcaaagcagaaagtttaactgcatgaaatcaggaaaggcaaagctgtcaagttagaggaaggaatttactgtctcaktaattctctaagatcttgaagagctgagattggctacttttcaaatcagggaagacaactttggcgggcttttggaaacatgatagtaattgagattcaggagggatgtgacaggtctcattctgtacaattggggaattcattcatctctaaccacccaggtattcatttagtttgaaagaaaatgatgtatttgtgctagatttctgctatttt

SEQ ID NO: 114225 - DNA, 597 bp, Homo sapiens
tcccaccctgcttctgctcaccctctgtgggctgcacccactgtctaaccagttccagtgagatgagtctggtacctcagttggaaatgcagaaatcatccaccttctgtgttgatcttgctgggaactgcagacctgagcttttcttatttggccatcttgccagctgcccacacaagtctttttatatctgcacccatcatgaatgggtgtcagtccacatggtctgcatcaggtwtggcaaagtccttcaccatccttagtggtcatttctgcaatcccctcaaccctacctctacttccacccaacagagctaacatatgccaggcattgtgctaaaaactttacatgaactcacttgtttactcctcagagcaactttttgatataggtattaatattattcttgttttccagatggagaaactgaggtacagagaggtaaactagctcaagttctatattgcttccagctgatgttggtgtaaccttacctgtagtctgatatttcctgtcaaaaaaaaatctcatcaggatatatctaattgattttaccacacatatggatccacttcatcattcactaaaagtttgca

SEQ ID NO: 114226 - DNA, 432 bp, Homo sapiens
ttgaaagagtaaaggtggtatgtaaagacctggaatcagaagggagtgtccgggttaagacaaggggatgtggaggccaaggttcttattatgcaggtgaagcctccaggtagcaggtttcagagaatagactgtaaatgtttcttatcacacttaaaaaggtgccagactcttagttaattatctcctggatgagggaaaagacctggaaaaggaaagtgattctctacagaatgtagattttcccctaagayacagttttgccgggccatttcaaaatatgtcaaagaaatatgttttcaggtaaaatactttgatttctttcagggcctgttatctgtcatgttggtatcttattgctacaaggagtttattttgtcagtcctaagattgctgttttaaggttagtgctggttagtcatacctgaattc

SEQ ID NO: 114227 - DNA, 519 bp, Homo sapiens
tttccagtctacgaaatggatccaaataatagcatctatcttatgggatagtaaggattaaataatttactaaaagcatctcgtacttaataccagtaatctgttcccgaaaattgaatgtgtatgcacaaatgctcaccaacctatattattccaaattagaaaaatccacagtcgacttcctaaatagaaactgaagcagtaacactgtgcctatttataactaacagagaatcgtttggggattaaaatgttcaaaacgtctctttctgatcactaaacatcattaatatgcttgtttaaaaactttctatgaagtaacatcttttccacttgtttttctcagtggctttgccatttcactatcatcttgtctatttttttcaatattttcttattacacagttttaggcaaaacaaggcctaaatacaaaggcattgtagaaacagttcaggaccagcacacaatgacagagtgggggtcacactgagtacratgcagtgacgccccagctggag

SEQ ID NO: 114228 - DNA, 543 bp, Homo sapiens
tgatcattcacatactcaaaaataatacattaatccttttgcacaacaccaagtatgcttaagttcaacatatatactttatgaatggatcatttgtagcaaatacaaagctaagtcataagtaattcgaagagagtctaagtttcttgtctgagttgatccaatcacaactgccttttaatgaataagactttacacaactgtgctaaaaggtttatatttttcttatagcttcaaattatcttttgaaggatttgttgaagtaacaaatagattwtatatttataatatcacttgaacatgatttcttaattactctccaatattactctagctcactggtactaattatttgaacaagtaaatacaggcatacctccagcaatattacaggttcagctccatactaccacaataaggcaaatatcacaataaaatgagtcacacaaattttgtggtttctcagtgaatataaaagttttgttatattatactgtactattatattaatgttatattatactgcagtatattaattgtgca

SEQ ID NO: 114229 - DNA, 556 bp, Homo sapiens
acttttgttccaaaaaccattgcaggagtgtaccgggaaaacagagaattcacagatattctgaaagaagcggcatgctgctacaaattctatgagacaggcgaaaaactgtgagttcccaaagtgtgagaggggaaaaatctgcctcckaacatatcccactggggaatctgaaaatccagatcactggagaaggatttaaacttacctagagctggaaaggatttagggagtcacacaaaacataaatgtagaagtagcagcaggaagagccttataggcactcccattctccagcttgcacccagggaagccatccctgactatatctcacaggggccctcaggaaaggcagccagcacaattaagtaggggtcacagggtgaaagcagcttcaaactaaattttgtagtaatattgattgggcatgaacctgcctgagcagaatccaggggtaaaagggaactgttgcagatttgagtgcagaagttggtattgtggacaaattgggagagatgtggcctaaaagccccacttgctttctcagcattgaagc

SEQ ID NO: 114230 - DNA, 556 bp, Homo sapiens
acttttgttccaaaaaccattgcaggagtgtaccgggaaaacagagaattcacagatattctgaaagaagcggcatgctgctacaaattctatgagacaggcgaaaaactgtgagttcccaaagtgtgagaggggaaaaatctgcctcctaacatatcccactggggaatctgaaaatccagatcactggagaaggatttaaacttacctagagctggaaaggatttagggagtcacacaaaacataaatgtagaagtagcagcaggaagagccttataggcactcccattctccagcttgcacccagggaagccatccctgactatatctcacaggggccctcaggaaaggcagccagcacaattaagtaggggtcayagggtgaaagcagcttcaaactaaattttgtagtaatattgattgggcatgaacctgcctgagcagaatccaggggtaaaagggaactgttgcagatttgagtgcagaagttggtattgtggacaaattgggagagatgtggcctaaaagccccacttgctttctcagcattgaagc

SEQ ID NO: 114231 - DNA, 584 bp, Homo sapiens
aaaaactgaatttactctatcaaagagtaaaagtttttgcgttttgaaatmttttatttattattttggctaaatgaatgactatttttttatagtgatctgtgattttattttgatcaaatgctctaaacctttgacagttttgagagtcttcccaaaatcatatttcaaaatcaaaattaagtctttttgacatcaacctaactttagcatgatccagaggcccctgaagcatgtgaaacagagataagaaacacgcttattttatgtattaaattatataggaagtgtcaaataagaaatgatgttttctcttctttgagctatatttatatgaatgtttattaatatgtgttccaaatttgtttgagattcttaaaattttgatatgccttggtatatgttattagtcgtaattataattattatataaaattgtggtaagacacctaaaataaccaaatttgatttttaattgcatgtttaaccatggccattttaggtcttgtccataagtaattgcgttattgtggtactttctttttttctgaatgctttttgcaaatcctgaagtattttgtctt

SEQ ID NO: 114232 - DNA, 584 bp, Homo sapiens
aaaaactgaatttactctatcaaagagtaaaagtttttgcgttttgaaatattttatttattattttggctaaatgaatgactattwttttatagtgatctgtgattttattttgatcaaatgctctaaacctttgacagttttgagagtcttcccaaaatcatatttcaaaatcaaaattaagtctttttgacatcaacctaactttagcatgatccagaggcccctgaagcatgtgaaacagagataagaaacacgcttattttatgtattaaattatataggaagtgtcaaataagaaatgatgttttctcttctttgagctatatttatatgaatgtttattaatatgtgttccaaatttgtttgagattcttaaaattttgatatgccttggtatatgttattagtcgtaattataattattatataaaattgtggtaagacacctaaaataaccaaatttgatttttaattgcatgtttaaccatggccattttaggtcttgtccataagtaattgcgttattgtggtactttctttttttctgaatgctttttgcaaatcctgaagtattttgtctt

SEQ ID NO: 114233 - DNA, 584 bp, Homo sapiens
aaaaactgaatttactctatcaaagagtaaaagtttttgcgttttgaaatattttatttattattttggctaaatgaatgactatttttttatagtgatctgtgattttattttgatcaaatgctctaaacctttgacagttttgagagtcttcccaaaatcatatttcaaaatcaaaattaagtctttttgacatcaayctaactttagcatgatccagaggcccctgaagcatgtgaaacagagataagaaacacgcttattttatgtattaaattatataggaagtgtcaaataagaaatgatgttttctcttctttgagctatatttatatgaatgtttattaatatgtgttccaaatttgtttgagattcttaaaattttgatatgccttggtatatgttattagtcgtaattataattattatataaaattgtggtaagacacctaaaataaccaaatttgatttttaattgcatgtttaaccatggccattttaggtcttgtccataagtaattgcgttattgtggtactttctttttttctgaatgctttttgcaaatcctgaagtattttgtctt

SEQ ID NO: 114234 - DNA, 584 bp, Homo sapiens
aaaaactgaatttactctatcaaagagtaaaagtttttgcgttttgaaatattttatttattattttggctaaatgaatgactatttttttatagtgatctgtgattttattttgatcaaatgctctaaacctttgacagttttgagagtcttcccaaaatcatatttcaaaatcaaaattaagtctttttgacatcaacctaactttagcatgatccagaggcccctgaagcatgtgaaacagagataagaaacacgcttattttatgtattaaattatataggaagtgtcaaataagaaatgatgtttwctcttctttgagctatatttatatgaatgtttattaatatgtgttccaaatttgtttgagattcttaaaattttgatatgccttggtatatgttattagtcgtaattataattattatataaaattgtggtaagacacctaaaataaccaaatttgatttttaattgcatgtttaaccatggccattttaggtcttgtccataagtaattgcgttattgtggtactttctttttttctgaatgctttttgcaaatcctgaagtattttgtctt

SEQ ID NO: 114235 - DNA, 595 bp, Homo sapiens
ttaattagtgcgagcatattatatatatgtatttatgacattgacttatgagttttactgaatttatgtctttatatctgaagtgggtttcttgctgaaagtatgtagttgggtcttacttttttattcaacaatctttgttttgtaattggagtatatagcctatttatatataatgtggttataatatgattaggtttaaatctgtcatcttgcaatttgtttcatttttttcatttttttttgctccctttttctttttcttcccatattctggattgattatattttatcattctattttatctcyatttgcttatcatttatagctttctaaaatagtgttagtggttgttctagagtttataatatacatctgtaacttcatgctctaaattaggatgatatatcatttcatatataaagaaatacaatatgctatataaaggaatacaatatattcctgtaatacaaaatatacacaaaatattttattcccttgaatactgttgggaagtaccctgggttacaattagatgttttgtactcagtttgagccttttgagagttgcttttaagctttgttatagcaata

SEQ ID NO: 114236 - DNA, 609 bp, Homo sapiens
ttgtccccactcctcacattgtagctttgaaactttttccaggcgttgatctgggtctatcacagtgtcacctcatttgtcttccttttctcagggatcactgtcctgggctacatgttgtccaaagtctgaaactgtgtttaaaaacatatattttgattattttttagtgattttagctgggacrgttaatccagttctggctattttgttgtggctataagcagaagtccttcttaaattattaaaggcacttagaatgctacttattttctatataattattcaattatatagtaatctggcaactatatcaaatcttcttacaagttttagtaacttatctgtatggtttcttggattatatacttagaatattaaattggatataaatattgtcaattttgtctctttccaattctttgcctatttctttttatcttaaaattttccatagaaatttgacaattttgctcaatgagaaatgacatttaaagtgtgctttaagacaaaataaatttagaaaaatatatgcatttttatagttttttaaaaaatcttttgttttggcattatgctgaaaatcaaatatatcttgcagtaatacaa

SEQ ID NO: 114237 - DNA, 530 bp, Homo sapiens
caactaaaacatccctgaaagtcatacacttgatcatttcatactttatttatatcactcaaatggctttcagtcacatttatattaaatgtcaaactccttaccagggtctttcaggtcctcaattattcaatacctactaaaaatctgttcaatgtcyagtggctagaatgatccttttaaaatgtatttcttatcatgaaacatcccctttcagtgcactcagatggcatcccatcctacacagatgaaatccaaagttctcaacatggtgttaaatttccctgttatcttgtccgtagtgttctttatggcatcattttaccattgtctacttcattgaccataatgaattttattaacttttttactgcttttcaaacttcccataaactttctgacattaattccattgcctttgctggaattaatctggagtgctcttattttatttttatttttatttatctttattattatttttttgagatgaagtctcactgtgctgcccaggctggagtgcagtgcca

SEQ ID NO: 114238 - DNA, 566 bp, Homo sapiens
aaacaaacaaaattaaagatggaagagagataacaataagggtgctgaaaggaatgaagagcacagtgtggaaaggaaaaactcgaaatagctgagctcactgtgcttctcacagggggatctaagaggggctgtctgaggaggtgatatctggcaggatgagaatgcagcatctgtgtgcacagtcagcgggagagcacatgttccaggcaaaggcgacagtactggggcatctaatagcgccatttccaggtaactgaagcttactcttgagtgccaattttaaaagcaaagtagccagttcagtggaaactgtctacaattcattacacaccatactgctttctagaagagaggccactggacctgtccttgggtttttgtttatgagattatccacaggtatataaatgtattcattttagctaagcatcgcgtacytaattggtacgcgttccaaattatttttgaaacctaggaaaaagaagtctcatgtggaagttcttagggaaaaatgatgggcagctcatacttataattagtcttttcacattacttaatgtttt

SEQ ID NO: 114239 - DNA, 603 bp, Homo sapiens
aaattatatagtgttaaaaatatttgcaacagatggcaaactatataaaccattctccaattttttttgttgtttaaaactgacacagacacaatgaaacccgtatgtctgtcggttaatgctttgtgaggcataggttagttcaaacctcaatccaaactgttgagcatctctcctatctgtaaataatgtcttcrtgcactaaggctttaaatttctatgactatataagcatcttcactgacatgaactttttttctttggtgtctcattctacaatgtttggtatttctctctttaaaacaaatgatttctcatttgacaggtgataaaaataaatgtttcatttaccaccacattaaaataagttgacaaaagttctttattgttatttcctgtcactgcttcttcataaggcttttttttcctttcacactcagtgtaatagtaatcaatatgccctcggaatgtattatgttttatggttatattttccccaaattcaagctatggaagttaatattttatatagatctgtatacgttacagaaaaataagtgatagtgcacttagggaaggtacattaactacagatagacatca

SEQ ID NO: 114240 - DNA, 578 bp, Homo sapiens
tatctctgtgtactgaggtctgagagcagagctaggcaggtggaactgcacgacatgtgtattaataacataaatagtggccgccaagttgttgatgaataaacatagaacaagaaaggtacatattttgggtattttataaattattaaagcatggttttacaataattaagagtgatagatcttactatttggatcagttcctagctctgctagttatttagaaackatgtgattaggatcaatagcattaattttcattttagtttctccatttataaaaaagagataaggataatgcgtattgttgtattatatgtatactaacattataaaacatctcagtataaatggacctttctaaaccaacgggcctgtattcttcaataccttcaaatcacataaaaataaagctgaagcatttttctctatttaaggagactaaagatacatgaaaacaaaatgcaattcatgttcactccttgagtgccagatttttttgatagctataaagtacaacttgggtacacttgaattttttatattagctaataattgtttaattattaatattgtat

SEQ ID NO: 114241 - DNA, 455 bp, Homo sapiens
ggagtgcaagccaggcatggctcagtgggctgagtagacaagacaactcttgcagcatgcctgggatgagaaagacctgggcagggtgttgtcagccagaggtgtggagctggtaaagtggctgaggaaaatctcgcatcattactcctttcatgcctatcaggggtgcctggattcttatgcctaatctctrgctattagcgttcttttccccttcagatcagtcctctcatcaggtctctttcccaggcacagaacacagctgtctacaggggcagtctcctgtctcagttcaaacactaccagagcctaactagcatctctcagttccaattccaaatgtcttctcatcaagtctgattggtccagcctgggtcagttatctatccagcttaataaactgggtcccatgggtcaagaccacaatcctctccatcttcagagaaaggcaacct

SEQ ID NO: 114242 - DNA, 455 bp, Homo sapiens
ggagtgcaagccaggcatggctcagtgggctgagtagacaagacaactcttgcagcatgcctgggatgagaaagacctgggcagggtgttgtcagccagaggtgtggagctggtaaagtggctgaggaaaatctcgcatcattactcctttcatgcctatcaggggtgcctggattcttatgcctaatctctagctattagcrttcttttccccttcagatcagtcctctcatcaggtctctttcccaggcacagaacacagctgtctacaggggcagtctcctgtctcagttcaaacactaccagagcctaactagcatctctcagttccaattccaaatgtcttctcatcaagtctgattggtccagcctgggtcagttatctatccagcttaataaactgggtcccatgggtcaagaccacaatcctctccatcttcagagaaaggcaacct

SEQ ID NO: 114243 - DNA, 516 bp, Homo sapiens
tcatgagcatgatctccattagccattaaagcaaatctgtgaaatgggtaatatggacccagttttgccattgaaaagttaggcccagagaattaaagttccatagattataagtgagaaagcaaagaggcttaatccaaagatttcaggtgacaccttgtgtaagggatatcagtgagactttacccattcactaaataccaacaaggaccatattctgttctcctggcctattttcaggtgayggaggtttggtgataataactgcacttcggctgataagaaaaatttccagtcaagttctaaattaataggataacaaatcaccaaagttaaagttaagtagaaaacttgatgaaaatttagaaaaatgtactttctcttcaaaggtggagtccaaatttttactgactttttgccttctgcagtctgggagaagggtcttgctgcttttctttctactttgtccttgaatgctgctcataattgccttcggcccatgatactgtaccatca

SEQ ID NO: 114244 - DNA, 552 bp, Homo sapiens
aatcctgatattcttaacgtatacacaatacctctgagaattctgtaacacatgaccaatttttcattagtaraaagaattcctatattcagtgttgcatcaactaaaatataaatgaaaaactaaattttaccagaaactgcctaattcagagccaacctagctgattattggtatcacttagctaagattttaagtggtagattgttctgaagatattgtaaatgaagtgggtttttttgtggtttacattttttgaaagataaatttgtggaaagtaatggatggcttggatgaaaccactggggaaagtagtatggtctagtttttcaggccaaaagccttgttgttttttctagaaagagaaactttatattttagtcctcatggcctctttacagtccaactatgatatgaaatgccttacctggaattagcctacatagcagttggaaatttgcagaaaataattaaagaagaattgataaatgaaaccaggtaggttgaattcaccattccatcaatatattagggagttaacttttgagttta

SEQ ID NO: 114245 - DNA, 392 bp, Homo sapiens
aaagaatttaactgatgagaggccagcccacatgggaaaaactggagttatcactcacatcakcctccctaaaagctcagaggttagggtttgcatggacaatttgatgactgggagactagggaatgggtgctgctgattggttggggatgaaatcatagggtgtggaaaatggtcctcatgcattgaggctgcctctgggtagggccacaggaccagttgtatcatgagtcacaggtcctggcagggccagtctgttgtaaaaatgtctgaaaaaatctcataagatcaagcttaggttctacaatggtgatgttatccataggagcaactgaggaagtcacaaatcctgttacctctggctacatgactcctgagcagtaaggaattat

SEQ ID NO: 114246 - DNA, 564 bp, Homo sapiens
ctataattcctattaggtgagaattagtataatttgatgctgatataacctgacaagatgaaaatactgttccactaaaatccrtggagagattatatcctcaaagttttgaagcaaactattttcactaacaacatgtgattattgaaaagttattttaaatccttgctgaccaaactgatcagagataacgaaatatttaaggatcttctggtcaaatggacaccaaagcttgttggataaaatacatgccagttggatttatggtaatacataagtcagcaagtccctggatttgtctgttatactttctgctatgtattatcaggcctcttgaataaagatccatttcagtacaaaaactagttaagattttaagattgaccataaattcagagttttgaactgacgataaactcaatgtgtctgtttataaagataaaaagttgttttaaaaaaaaatccatgttagtagaaaactaaaaatagcaaatagtcccatatttatatctcagtagtcagaatacaaataaacatccttggtgaaaacacatcagtgcttcc

SEQ ID NO: 114247 - DNA, 528 bp, Homo sapiens
ctgttacattggagaataagcttccaacacatgaactttaggagacacattcaaattttagcactaagtcatttaattatcatccagtctctgtggtaattaccagtcactttattttataaatgyggaaattgaaggactggcaggttgagtaacttgttcaaatcactcagcaagtaaaagacagacacagtttgaatccacatatctctccacagaagccatgctcttagttcctccactgcctgggaaagtgaaacgaaagacttagtagaaatgaccttgaatgtctgaaggaagaatcttttatgcagtttgtggataaacaggaagttattgaaagatgtagagtagcagaatgttatcactcaatctgcaactgaaggaatagttggaaagagtattccaaatgagaaaatggagaagagacagaaaaagcagttagaagagtatcacagcaatgcagctcagcaaaaactaggtagttcaattaaaatatggaaaacagaagtgaaaataaggggctag

SEQ ID NO: 114248 - DNA, 566 bp, Homo sapiens
  misc_feature (1)...(566): n = A,T,C or G
agaatatatagaggataatagaagctaagacttaaagccaagtagaggaagattttttaaggccttaaagaatgaaattggaygtttttagccacagtcaataaggaatttctaaatatttttgagcaggtaagtgccatgaacaagcctttgtaacaatgtgaattgtgaagtgtccatgatgggatatctagagtgagaacaaagaacacagaagatttatttcaaacttttaaaaataaggtggtcagcacctgaacaaaggccttgtagaagaagtgaaaagaagagaactgagagaactggtgaaggaagactcaactggatacaaaagtcaagggcaaaggagaaggaaagaaggaaaagtgaaatacaaatttcatgcagtgatcaatgctactatgaatatgtacagggaactctatggggtggaaacatatacagaatgacaggaattaaaaaccaanctagagcagtacctaagttgacaatttcacttagatttggagatacagatttttgctttatttttaattctgagttttatctttacttctttacttact

SEQ ID NO: 114249 - DNA, 566 bp, Homo sapiens
  misc_feature (1)...(566): n = A,T,C or G
agaatatatagaggataatagaagctaagacttaaagccaagtagaggaagattttttaaggccttaaagaatgaaattggacgtttttagccacagtcaataaggaatttctaaatatttttgagcaggtaagtgccatgaacaagcctttgtaacaatgtgaattgtgaagtgtccatgaygggatatctagagtgagaacaaagaacacagaagatttatttcaaacttttaaaaataaggtggtcagcacctgaacaaaggccttgtagaagaagtgaaaagaagagaactgagagaactggtgaaggaagactcaactggatacaaaagtcaagggcaaaggagaaggaaagaaggaaaagtgaaatacaaatttcatgcagtgatcaatgctactatgaatatgtacagggaactctatggggtggaaacatatacagaatgacaggaattaaaaaccaanctagagcagtacctaagttgacaatttcacttagatttggagatacagatttttgctttatttttaattctgagttttatctttacttctttacttact

SEQ ID NO: 114250 - DNA, 600 bp, Homo sapiens
acctttgattttcttacatctacatctagatttacatctgtaagggaacaatctagcccaaatttgaccaggttcaagcctcacctactgttgattttgagctgccttagctccattcacaaytgcaatcagtttgtgaatcactgttagatgaggggaaatgaatgaaactactgagagaaatttataatcctggaggagaaacattccagaggtggagaaaggataatgagtttaggtttatacctgtaaatagttatagtataatttagatgtcacttgaattccttgccatttacagctaggtagattttacccaaacaacacgtatttttgtacttcctggggaaatctaaagcctctaaaagatgtgtgaaaattcttcaggacttaatgtataaatatccactctttttccagtctttggtttccacacgtactatcaggaccacactgtatttacccagatgctaaaacttaaaattattcaattgcaaaaataaaagcaaacaaacaaaaagcatacattcacatatatggactattgagtaatctttgtctttattcaagatggtgtagggaatattaaagttggattta

SEQ ID NO: 114251 - DNA, 568 bp, Homo sapiens
tcctttaatacttacttcatgtatcccttttgacatacattgatgatgtaactatagaracatgtaaggtcatgggcttgttaccatctgaagtgttttgtggtcattgtaattaggaacacaggggcagttttgcatcatgcacgaatgagtttttagatccagagttattattgtattacctcactgatgcatctttttctatctgtccccattttctagtatctacccctcttctcacaagctcttccttatcccagaacttctcagcgttgtttgagaaccccataatgttacctttacttgattggaggatacagctacaactgacccctatttaaccagcaaaccctgaggttaatgtcaagcactttgggatctttctcctctctcctggatcagcaccactcacctgtttcagttccctccacttaactttgcttctctcacattcgttcctcatacacatgacaagatctatgagttctggtgttctcttatttcagtctcattatgtccatgaaggattgtaagaaatacaaactatcatcagagaatactatataca

SEQ ID NO: 114252 - DNA, 580 bp, Homo sapiens
attgctataagcttgtcttccatgtacgtactttaaagtatgtaaggcagttaacaattatggggttgaaattgggtgatgtgagcctggtaactctagattttgagaagattttctttacaggttatctgccaattcccaaagacatggctacagggttaaacaatgaatagaactcytggctacctcatgggactagggggggaaatggagcaagagctctattgactggtcccctgcctaatccccttttgtgtaaggactctgaagccttttgggtttcatggaagctgagtgaaacctgagattgcccgctttcccctacttccctgacaacctgcatgacacagtagaggcagtcataatcctcctaagaacataactccatttacctgggaaccacaaccccatcccccccagcagccgcagcaagacccacccaagaagagtctgagctcagacaggcctagccctgccaccacctgatggtccacccctacccaccctgatagctgaagataaagggcatacactttcgggagttctagggccccacacatcacctgatcctccccatatg

SEQ ID NO: 114253 - DNA, 580 bp, Homo sapiens
attgctataagcttgtcttccatgtacgtactttaaagtatgtaaggcagttaacaattatggggttgaaattgggtgatgtgagcctggtaactctagattttgagaagattttctttacaggttatctgccaattcccaaagacatggctacagggttaaacaatgaatagaactcctggctacctcatgggactagggggggaaatggagcaagagctctattgactggtcccctgcctaatccccttttgtgtaaggactctgaagccttttgggtttcatggaagctgagtgaaacctgagattgcccgctttcccctacttccctgacaacctgcatgacacagtagaggcagtcataatcctcctaagaacataactccatttacctgggaaccacaaccccatcccccscagcagccgcagcaagacccacccaagaagagtctgagctcagacaggcctagccctgccaccacctgatggtccacccctacccaccctgatagctgaagataaagggcatacactttcgggagttctagggccccacacatcacctgatcctccccatatg

SEQ ID NO: 114254 - DNA, 579 bp, Homo sapiens
gacaagactttcaaattaacctaatccaacaaagacaaagaaaaaaagaattaaaataaatgaacaaagcttccaagaagtttgggattatgttaaatgatcaaatctaagaataattggtgttcctgaggaagaagagtaatgtaaaagtttggaaaacagacttgagggattaatcaaggaaaacttccctggccttgctagagacctagacatccaaatacaagaagctcaaagaacacctgagaaattcattgcaaaaagattatcgcttaggcacattgtcatcaggttatctaaagtcaagatgaaggaaaaaagtcttaagagctgtgaggcaaaagcatcaggtaacctatgaaagaaaacctatcatattaacatcagatttctcagcaggaaccccacaagctaaaagggactggcatcttatctttagcctccttaaaaaaarcaattatcaaccaagaattttgtatccagtgaaactaagcttcataaataaaggaaagatacagtctttttcagataaacaaatgctgacagaattcaacactacgaagccagcactacaagaac

SEQ ID NO: 114255 - DNA, 514 bp, Homo sapiens
cattaactaataagtaacttattaggttaaacatattgtgatcactgtaagctgcaatctatgtctcatattttatttattctttcattgccattatcaactgctataattttggtatattttctatattctcacaaaccaccttttattcattccagaataaggcagggtataaataaatagccaagccactaaataaatgcatatgcacatacatatatasgcacaaacataaacagaacagactaaaagggaaaatgtctgaagattaaagatggctcgtctgtgtttcagtgtcaaagaaaaatctgagagaaggttgcgaaaattggtatcagtaggaaacgagaatggcatttgttacttattttccagggtcagttcaaaaataaggaggatacttctttaagagatttctgaacacaaatatatagatgcctgacaaaggttcttgaaatcaaagaactgatatattattcaaacaactaaaatataagtaatcataaatatacat

SEQ ID NO: 114256 - DNA, 590 bp, Homo sapiens
acaacgcacaggaaagaatctcagagctggacaactggctttctgaaataagacagtcagacaagaatagcaaagaaaagaatgaaaagaagtgaacaaaacctcccagacatataagattatgtaatgagaccaaatctacactcattgatgtccctgaaagagaaaagggtgaatggaaccaacttgcaaaacatatctcagtatatcatccatgaaaactttgccaacctagctagacaagccaacattcaaattcaagaaacaaagaggaccccagtaagatactccgatactccacgagaagatcatccccaagacacataatcattagattctccaaggttgcaayggaagaaaaaatgccaaggcagctagaaagaaaggtcaaaccacctaccaatagaagcccatcagactaacagtggacctgtcaacagaaaccctataagccagaagagattggggacttacattcaacatgcttaaagaaagaaattccaacaaagaatttcatgtccaaccaaacagagcttcataagcaaaggagaaataagatccttttctgacaagcaaatgctgagagaatt

SEQ ID NO: 114257 - DNA, 524 bp, Homo sapiens
atatttacagtcttattccaattatcttacaaatcaaaatgaaagtgtacagcctttacacatacaaaagaatggtacagattcagtcctaagtcaaataacacatgttttatataccaygagagttcagaaggaaacaccatttcagccacaattggcctggaaaacttcacaggtaaaatagaagtatgaaatcgaaatcaatggataggacaagagggatgttggaagaagaagaatttgcatgagccagacacagaagaataaataaccctgaagacccagaactcagggctgagacccatctttctgttaaagagccctcacgttcatgaagaatattcagaattcatttgtttccaactaacatggggcataatgctgagcattggaaatagagatataaaaagacatagtcttccccttcaaggacttctgagcccagtagaaagcaaagaaaatcaagccagcatctacaatactaattaaaattctgagctttcaagtcacactgaccaggtgta

SEQ ID NO: 114258 - DNA, 608 bp, Homo sapiens
taaaacaagtctcaaagaatttttaaagtttcaggccatacaaagtatgttctttgaacataatggaattaaattagaaaccaataaccaaaagagctttacaaaatcctcaaacatttaggaacacaataacacacttccaaataacccatggttcagagaagaaatcaaaggggaaaacaggaagtattytaagttgaatgaaaaataaaacataacatatttgagagaagccacaaaagcagtacttaggaggaacttatagcaccaaatacctatattagaaaagaagaaacttctcaagtaaatgacttcagctggtaccgtaagaaattaggaagagagcaattaaatcttaagtaaactaaagaaaagaaataataaagatcatagtggaaatcaatgagatataaaacagaaaaacagaagaaaaaatctgtaagccaaaagctgcactttgaaaagatcaataacatcaataaatctctaaccaggcttatcaggaaaaaagaaagaagtcaaaaattaatcaataatcaggaatgagagaggtaatatccctaccaattcttaaatattaaaaggattataagaaaatattataaaca

SEQ ID NO: 114259 - DNA, 608 bp, Homo sapiens
taaaacaagtctcaaagaatttttaaagtttcaggccatacaaagtatgttctttgaacataatggaattaaattagaaaccaataaccaaaagagctttacaaaatcctcaaacatttaggaacacaataacacacttccaaataacccatggttcagagaagaaatcaaaggggaaaacaggaagtattttaagttgaatgaaaaataaaacataacatatttgagagaagccacaaaagcagtacttaggaggaacttatagcaccaaatacctatattagaaaagaagaaacttctcaagtaaatgacttcagctggtaccgtaagaaattaggaagagagcaattaaatcttaagtaaactaaagaaaagaaataataaagatcatagtggaaatcaatgagatataaaacagaaaaacagaagaaaaaatctgtaagccaaaagctrcactttgaaaagatcaataacatcaataaatctctaaccaggcttatcaggaaaaaagaaagaagtcaaaaattaatcaataatcaggaatgagagaggtaatatccctaccaattcttaaatattaaaaggattataagaaaatattataaaca

SEQ ID NO: 114260 - DNA, 600 bp, Homo sapiens
tataccacactatgtactataatgtatagtttattttataattgttaactcatttgaatgagttctctggggactttttaatatatttgggaagatgaggcttgcttgctagaaataattggaaataccacaaaagcagtgaatgagcagtgatcaaattgtgtgagtgaaaacaagttttgagaagataagagctggaacatcctgggaacatagcttagaggagaaaccattctttttggttttaaaatgccagcattttcccaagggacactcattttaggaagccactgtatgatcattacagtccacatctacatccataataagcactgtcatatattcartactttttcttttttcaaccattttgacacactttggtttgtttgatctgtaatcaccttgtaaggtgggcagggctgatattgtactcattttattgcggagataaaaacagactgactcacccagaatcccacaattgctcggtgagggaggcaagtccaaagtcagatctcgtaaccctggattcagctcttttttctctaggacagtgtttccaagaatctagtacatgtagccttgatgattgagatg

SEQ ID NO: 114261 - DNA, 590 bp, Homo sapiens
tgaagtttcctgtctcctcagttctttgctcaatttttgtcctcctttaaacatagtttctttctgttttaagacttgctactcttaaaacagaataacaaaataaagaaatcaatgtcttaaatattacactaaattttcatagctcttgtttctctctttaaaaacattttttttagagatggggtctttctatgttgcccaggctgctctcaagcttctgtcatcaagcaattctcctgcctcagcctcccaaagtgctggggttatgggcacaagycactggacctgtcttatagcttctgtttctattggatgataaaatataaaatcaaggatgggtttgcctttctcagcagcttctctgagcttttgtcttaggccatttttagtgctatcactgaatgccacaaactgggtaatttataaagaacagaaatttattggcttacagttctggaggctagaaagtccaatatcaaggtgccagcatggcaagcgccctctttctgcatcaaaacatggcatcaggcaccacacagcaaagggcaaagagacagagagagcaagaaggggtgaacctactccca

SEQ ID NO: 114262 - DNA, 594 bp, Homo sapiens
acgtaggggctggggttaatgatttatccaaggtcagcagcaaagctagtaccaaactgaaaattacactgcatctttcctttggggtgacttatgattttcctgtattttaaaaaattattatgagggaaggctttccatgaaaagaaacattttatktttaggagctgaaagagaaatcagcttttccaaatatctcaatttcaacttgaggaaactgaggcacagagagataaagcagcttacccgtggcttcccagcaggtccgcgggaaagctgagcttgaatcctgagtgcccacccacttggtcagtccatttttcactaaacttccagttgggatgttgaggcatagtagaatatttcaaatacaatagcgtattttaaaactttgattgagaaagttctctaggagtgtattgagaaagcaaaggaagaaaagtgagaaccaagatttgttatatttttagacatgaataaagatagaaaggctgtgtgattcagaagcaggcacatggcctgcttttcattcagctgtggtcagtttgcagctaatccaggaggcatctccaggatgacctgggaggtaaacca

SEQ ID NO: 114263 - DNA, 536 bp, Homo sapiens
gtgaaatcatatttaatctcttttagatatttagaatgtaattttttagtaatctttgcttcgggagtaagctttatatctaaatgaaatctttttaatttatgttttctgaagtttaacttgaattatagtgcctagcacataataggacatcacaatrtatgttgcatgaatgaaggagtaacactttgttttgtcttcataaaaatgtctgcagaagatgacttggaggttttttgtcatttcttctggcacctcactttttttttcttttgagataggatcttacttcatcacccaggctggagtgcagagatctgatcatggctcatggcagtctcaacctcctgggctgaagcaattctcccacctcagcttcccaagttgctgggactgtaggtgtgcaccaccatgactggctaagttttaaattattttttgtggtgataggttctccctgcgtttcccaggctggccttgaactcctggactcaagcgatccttcctcctcggcctcccaaagtgctgggattata

SEQ ID NO: 114264 - DNA, 536 bp, Homo sapiens
gtgaaatcatatttaatctcttttagatatttagaatgtaattttttagtaatctttgcttcgggagtaagctttatatctaaatgaaatctttttaatttatgttttctgaagtttaacttgaattatagtgcctagcacataataggacatcacaatgtatgttgcatgaatgaaggagtaacactttgttttgtcttcataaaaatgtctgcagaagatgacttggaggttttttgtcatttcttctggcacctcactttttttttcttttgagataggatcttacttcatcacccaggctggagtgcagagatctgatcatggctcatggcagtctcaacctcctgggctgaagcaattctcccacctcagcttcccaagttgctgggactgtaggtgtgcaccaccatgactggctaagttttaaattattttttgtggtgataggttctccctgcrtttcccaggctggccttgaactcctggactcaagcgatccttcctcctcggcctcccaaagtgctgggattata

SEQ ID NO: 114265 - DNA, 559 bp, Homo sapiens
tacttgtcctcccattttccaagatctaatcacaatgattcccagtccttacattataagatttgatcagatctgttctttgtttcctagcagcatgtgttccctagcagtcatacattccacaggtcctgatgtcattagaactgtgtgtgtcagtgtattgtgctgtctttagctgaaggtgaatgtgtcagagtatttgaatgccattccatagctcttccttatcactaagtattcagtaacctgatctatttgtgtatatggttgactagactatttctacaaaatcagggtaggaggaatgattaacwcaaagttttatatgaactattaatttttttttttagatagagatgttaggctgcatcaggcatccccggcctgaagagtgataagccagtatgtgatttgcctgatgggtaaatgcttttgatgtctcatttttggttgcttggtgtgattatccttcagactgagagtgctcctcaaaaatatgaatggaaagtctttcagaaatgattttcttaatcatgatcttcttaacattttgcagatt

SEQ ID NO: 114266 - DNA, 410 bp, Homo sapiens
acgaattctagataaagggagcaagagctaggcactggggcataaaattgtgtgtgcatgtgtgtgtgtgtggtgggggarggggaatacaatttagtgttaactgaagtgtgaaaatcaagatgggttacagcaggtgatgggaccaagtcagagacttaaccctcagagcaatgactggccactgcataattttaaatcacatttgcatcttagaaggattatacaggatgcagtttgggggattaatttaaggggccagaagaaagatagggaaacacgttaactggttctcaaaatggtctgagcaagtgatgtggtctgatgtacaacagtggtagacatgaaaatgggaaggttttttaaaggaaggagcattagctggtgatggctgggagagaagaatgggc

SEQ ID NO: 114267 - DNA, 604 bp, Homo sapiens
ccgcttcttgttgaagttgtctcacaaccacctgagaaaatatttttgttactgattttataaattgccttattaaattatgttaataatatttaactctaacatacgtactttgaaaattatcaccacacatatcaattcaccttcttttaatcacatgtacacatttttatttattactgaattcagtgagggatgcacaatatgttctcttcctgccaaattggtattctcttacttacataacagattcatcccaccattcaatcatcttagaagctcaactcaacctcaaagttcctcacatattcaatcacctgttcaaatccttccaacagattcctatctcagaataaaagtaaaattccaatggcctttgaggtcctaggtaaacaggtctctacctccctctctgacttcaaagctcctacaactccctyctgtaattactccattcccactgtacgtgaagcctgccacccctctgtctgaaaatagggatctaatgccttactcataaatcacaggcagctacaagtatctttgtactgaacaaaattatattccaatgatagtcattaagccttgaaataaaaattaggag

SEQ ID NO: 114268 - DNA, 604 bp, Homo sapiens
ccgcttcttgttgaagttgtctcacaaccacctgagaaaatatttttgttactgattttataaattgccttattaaattatgttaataatatttaactctaacatacgtactttgaaaattatcaccacacatatcaattcaccttcttttaatcacatgtacacatttttatttattactgaattcagtgagggatgcacaatatgttctcttcctgccaaattggtattctcttacttacataacagattcatcccaccattcaatcatcttagaagctcaactcaacctcaaagttcctcacatattcaatcacctgttcaaatccttccaacagattcctatctcagaataaaagtaaaattccaatggcctttgaggtcctaggtaaacaggtctctacctccctctctgacttcaaagctcctacaactccctcctgtaattactccattcccactgtacgtgaagcctgccacccctcwgtctgaaaatagggatctaatgccttactcataaatcacaggcagctacaagtatctttgtactgaacaaaattatattccaatgatagtcattaagccttgaaataaaaattaggag

SEQ ID NO: 114269 - DNA, 483 bp, Homo sapiens
gttagaagttcaaaattaccttttcaaatcacacagtcataattactacctgattagaaaaggtcatttacaatcaactaaatttttaaagttactatttattgacaagcgtataagttcactagaaataarttttcatctctatgaaatattgcaggtgtctctccaaatgatttacagagtaagatatctctcacacaaactatatctgcagattattgtcatctaaaactaggctaaagagtctaacatctgttaccccacactttttctaattctttcttaatacttccagttcaccttcttattacatatattttatatatttattaagctattgttcattatgtgtaatatataattaatgcccttaataagtgtgtgtatgtttacacaagttatgttttcctgtgaaatctagtcccagaagtggagttgttgagttaaagggatgtcaggttatttgaaattttgataaacagc

SEQ ID NO: 114270 - DNA, 483 bp, Homo sapiens
gttagaagttcaaaattaccttttcaaatcacacagtcataattactacctgattagaaaaggtcatttacaatcaactaaatttttaaagttactatttattgacaagcgtataagttcactagaaataaattttcatctctatgaaatattgcaggtgtctctccaaatgatttacagagtaagatatctctcacacaaactrtatctgcagattattgtcatctaaaactaggctaaagagtctaacatctgttaccccacactttttctaattctttcttaatacttccagttcaccttcttattacatatattttatatatttattaagctattgttcattatgtgtaatatataattaatgcccttaataagtgtgtgtatgtttacacaagttatgttttcctgtgaaatctagtcccagaagtggagttgttgagttaaagggatgtcaggttatttgaaattttgataaacagc

SEQ ID NO: 114271 - DNA, 483 bp, Homo sapiens
gttagaagttcaaaattaccttttcaaatcacacagtcataattactacctgattagaaaaggtcatttacaatcaactaaatttttaaagttactatttattgacaagcgtataagttcactagaaataaattttcatctctatgaaatattgcaggtgtctctccaaatgatttacagagtaagatatctctcacacaaactatatctgcagattattgtcatctaaaactaggctaaagagtctaacatctgttaccccacactttttctaattctttcttaatacttccarttcaccttcttattacatatattttatatatttattaagctattgttcattatgtgtaatatataattaatgcccttaataagtgtgtgtatgtttacacaagttatgttttcctgtgaaatctagtcccagaagtggagttgttgagttaaagggatgtcaggttatttgaaattttgataaacagc

SEQ ID NO: 114272 - DNA, 424 bp, Homo sapiens
aacacagtgtacagaactcaactttctactaaagagtcaaaggttaaatttttagctaagaaattatgcttcttacatgataaaaatcatacatgccaaaacttaccatactttattaaacaacataatgtaaggtctgattcaacagaaatattggagtggtgatttttttaaatatgtggaagtatatatttgttttcaaaatattrgaaataaccatgatggaactataaattcaaacagtttgagctaagcagataaacttgcatgcatgaaaacacattaaacagactcatttgtctgggaatattcattgcaactctcaaggctagaagtgtttttgtggctcatctcagtcattgcttccctcccattgtattcccattctatcattaaataaatgtaattcatctctaaatgacta

SEQ ID NO: 114273 - DNA, 412 bp, Homo sapiens
agtgtacagaactcaactttctactaaagagtcaaaggttaaatttttagctaagaaattatgcttcttacatgataaaaatcatacatgccaaaacttaccatactttattaaacaacataatgtaaggtctgattcaacagaaatattggagtggtgatttttttaaatatgtggaagtatatatttgttttcaaaatattggaaataaccatgatggaactataaattcaaacagtttgagctaagcagataaacttgcatgcatgaaaacacattaaacagactcatttgtctgggaatattcattgcaactctcaaggckagaagtgtttttgtggctcatctcagtcattgcttccctcccattgtattcccattctatcattaaataaatgtaattcatctctaa

SEQ ID NO: 114274 - DNA, 665 bp, Homo sapiens
catctgcttttactttgaaagaagaaaatctctagatttttgtctatctttagaacacagtgtacagaactcaactttctactaaagagtcaaaggttaaatttttagctaagaaattatgcttcttacatgataaaaatcatacatgccaaaacttaccatactttattaaacaacataatgtaaggtctgattcaacagaaatattggagtggtgatttttttaaatatgtggaagtatatatttgttttcaaaatattggaaataaccatgatggaactataaattcaaacagtttgagctaagcagataaacttgcatgcatgaaaacacattaaacagactcatttgtctgggaatattcattgcaactctcaaggctagamgtgtttttgtggctcatctcagtcattgcttccctcccattgtattcccattctatcattaaataaatgtaattcatctctaaatgactatagtaaaaagaatctagaatctaaagcttatttctttagcaatttctttatgttgatctggttcagaaggtcacatggtatatggctgaattagtttcccagctcatatgccacttggaagactgagagtgagacttaggttgattaatgaacaaacattatgagaacattctccgaaccattgttta

SEQ ID NO: 114275 - DNA, 422 bp, Homo sapiens
tttttcttggtggtgttttgtttgttttgttttgtttttgattccacttttctttcctgtgattcccccatgcgtgtaataaatgtgtacacattttcttcttttgacatgcctgttatccatttattcaatagactcagttatcayaccttcagagggtagagggaaagttctccaactccaacagttccaaaagaaaatagctagtaactgcaaatgcaaaagtcatataaactttgagacaaagttagcttcttatacgatatgttcagaaagaagaggtgtgttgcacaccaagggacatttccctggtcttagctcctaagtttctctgagaagaagcagttactactacagcagttaaacacctgactcccaaattataaaagcctaagttatgattttaaatcattaattgtcac

SEQ ID NO: 114276 - DNA, 577 bp, Homo sapiens
tagcttcttatacgatatgttcagaaagaagaggtgtgttgcacaccaagggacatttccctggtctwagctcctaagtttctctgagaagaagcagttactactacagcagttaaacacctgactcccaaattataaaagcctaagttatgattttaaatcattaattgtcacctgtgaatcataaagtctgaactctttaaattgcaaacacacatataaaagggattcttatacaaggatccatgagtggaactgcaaagttttgtcaaaatctgtatatatgttttctttttaagggtcatagatttcaatatatgttaaaagatatctgtagctagtaaagattaataaccattttcagttttgtgctgaaattggcaaatcatggcttttctccctccaacacaccccctcccgccccagcacacccctggttaatctttattttcaggagagaaaaagatgtttcatattaataaaggtagattatccacttgtttgttttatacttttccacctcttaagcttaatcgtgttttaataatatataattgaatacattaatatttagatg

SEQ ID NO: 114277 - DNA, 422 bp, Homo sapiens
tttttcttggtggtgttttgtttgttttgttttgtttttgattccacttttctttcctgtgattcccccatgcgtgtaataaatgtgtacacattttcttcttttgacatgcctgttatccatttattcaatagactcagttatcacaccttcagagggtagagggaaagttctccaactccaacagttccaaaagaaaatagctagtaactgcaaatgcaaaagtcatataaactttgagacaaagttagcttcttatacgatatgttcagaaagaagaggtgtgttgcacaccaagggacatttccctggtcttagctcctaagtttctctgagaagaagcagttactactacagcwgttaaacacctgactcccaaattataaaagcctaagttatgattttaaatcattaattgtcac

SEQ ID NO: 114278 - DNA, 474 bp, Homo sapiens
ttggacagtatggccattttcagaatattgattcttcctacccatgaacatggaaggttcttacatttgtttgtatcttatttcattgagcagtggtttgtagttttccttgaagaggtccttcacatcccttktaagttggatttctaggtgttttattctctttgaagcaattgagatccttattgtgagagtcagttcagaatctggggttttgttttgttttgttttgttttgttttgttttgttttgttttgagatggagtctctctctgttaccaggctggagtacagtggcacagtctcagctcatgcaacctctgcctcccaggtccaagtgattctcctgcctcagcctcccaagtagctgggactacaggcacgtgccaccatgcccagctaactttcgtatttttttttagtagagatggggtttcgccatgttggccaggatggtcccgatctgttgacctt

SEQ ID NO: 114279 - DNA, 474 bp, Homo sapiens
ttggacagtatggccattttcagaatattgattcttcctacccatgaacatggaaggttcttacatttgtttgtatcttatttcattgagcagtggtttgtagttttccttgaagaggtccttcacatcccttttaagttggatttctaggtgttttattctctttgaagcaattgagatccttattgtgagagtcagttcagaatctggggttttgttttgttttgttttgttttgttttgttttgttttgttttgagatggagtctctctctgttaccaggctggagtacagtggcacagtctcagctcatgcaacctctgccycccaggtccaagtgattctcctgcctcagcctcccaagtagctgggactacaggcacgtgccaccatgcccagctaactttcgtatttttttttagtagagatggggtttcgccatgttggccaggatggtcccgatctgttgacctt

SEQ ID NO: 114280 - DNA, 474 bp, Homo sapiens
ttggacagtatggccattttcagaatattgattcttcctacccatgaacatggaaggttcttacatttgtttgtatcttatttcattgagcagtggtttgtagttttccttgaagaggtccttcacatcccttttaagttggatttctaggtgttttattctctttgaagcaattgagatccttattgtgagagtcagttcagaatctggggttttgttttgttttgttttgttttgttttgttttgttttgttttgagatggagtctctctctgttaccaggctggagtacagtggcacagtctcagctcatgcaacctctgcctcccaggtccaagtgattctcctgcctcagcctcccaagtagctgggactacaggcacgtgccaccatgcccagctaactttcgtatttttttttagtagagatggggtttygccatgttggccaggatggtcccgatctgttgacctt

SEQ ID NO: 114281 - DNA, 581 bp, Homo sapiens
tacccgccttctgaagcctacttctgtcaatccatcaaactcattgtctgtccagttttgttctcttgctggtgaggagttgtgatcttctggaggagaagaggcattctggtttwtggagttttcagcctttttgcactggtttctccccatctttgtggatttatctacctttggactttgatgttggtgatgttgatactattcctttatgtttgttagttttccttctaccagtcaggtccctctgctgcaggtttgctcgagtttgctggaggtccactccagaccctgtttgcctgggtatcaccagtggaggctcagttggaaatgcatgaaccacctgccttctgtgttgatcccactgggtgttgcagaccggagctgttcctattcagacatcttgccagctctcctgtaatacttttatgaatgggtgtagtcctatcttctcaaggtccccaaataacttgaggttcctgggcccgtcagaaaatgacattctttacttcttaccacaaggacagcaactttgtaaaggacccttgtagacaagacaccaagccagtcattctaagggg

SEQ ID NO: 114282 - DNA, 581 bp, Homo sapiens
tacccgccttctgaagcctacttctgtcaatccatcaaactcattgtctgtccagttttgttctcttgctggtgaggagttgtgatcttctggaggagaagaggcattctggtttttggagttttcagcctttttgcactggtttctccccatctttgtggatttatctacctttggactttgatgttggtgatgttgatactattcctttatgtttgttagttttccttctaccagtcaggtccctctgctgcaggtttgctcgagtttgctggaggtccactccagaccctgtttgcctgggtatcaccagtggaggctcagttggaaatgcatgaaccacctgccttctgtgttgatcccactgggtgytgcagaccggagctgttcctattcagacatcttgccagctctcctgtaatacttttatgaatgggtgtagtcctatcttctcaaggtccccaaataacttgaggttcctgggcccgtcagaaaatgacattctttacttcttaccacaaggacagcaactttgtaaaggacccttgtagacaagacaccaagccagtcattctaagggg

SEQ ID NO: 114283 - DNA, 562 bp, Homo sapiens
attttcctagtccaatggtatgatccccaaagttatctgaaaccatatttaagagaacttgtcagagtcctttccattaaaagtaatttagatgatagctgattgtaaaggcttttttttttgagacatggtctggttctatcactcaggatggagtgcagtggcatgatcttggctcaccacaatttytccctcccaaactcaagccatcctcctacctcagcctccgaagtagttgggaccataggcatgcaccatcatgctggctaatttttgtatttttgtagagacagggttttaccatgttgcccaggatgctttcaaacttctgagttcaagcaattcacccacctcggccttgcaaagtgctgggatttttacacgtgtgagccaccgtgccctgcaccacgcccagcactgtgccctgcacagcctccagcagcacgcccggcctgtaaagggttttagagaagaactttaaacaatcaacgtggatgacaaaaacttagaatatcctttggttaaaatccagtggaagttctcgacctgcgagaaaatttag

SEQ ID NO: 114284 - DNA, 605 bp, Homo sapiens
gggccatgaataaaatcttttccttcttttataagttcagtccaatgtaactaaatcttgttctgcttgatttcaaatagcaattctcattcagttttttgtgttttgcttgatttcaattggaaatcctcattcagctttttagagtcctggaagattttcctagtccaatggtatgatccccaaagttatctgaaaccatatttaagagaacttgtcagagtcctttccattaaaagtaatttagatgatagctgattgtaaaggcttttttttttgagacatggtctggttctatcactcaggatggagtgcagtggcatgatcttggctcaccacaatttttccctcccaaactcaagccatcctcctacctcagcctccgaagtagttgggaccataggcatgcaccatcatrctggctaatttttgtatttttgtagagacagggttttaccatgttgcccaggatgctttcaaacttctgagttcaagcaattcacccacctcggccttgcaaagtgctgggatttttacacgtgtgagccaccgtgccctgcaccacgcccagcactgtgccctgcacagcctccagcagcacgccc

SEQ ID NO: 114285 - DNA, 562 bp, Homo sapiens
attttcctagtccaatggtatgatccccaaagttatctgaaaccatatttaagagaacttgtcagagtcctttccattaaaagtaatttagatgatagctgattgtaaaggcttttttttttgagacatggtctggttctatcactcaggatggagtgcagtggcatgatcttggctcaccacaatttttccctcccaaactcaagccatcctcctacctcagcctccgaagtagttgggaccataggcatgcaccatcatgctggctaatttttgtatttttgtagagacagggttttaccatgttgcccaggatgctttcaaacttctgagttcaagcaattcacccacctcggccttgcaaagtgctggratttttacacgtgtgagccaccgtgccctgcaccacgcccagcactgtgccctgcacagcctccagcagcacgcccggcctgtaaagggttttagagaagaactttaaacaatcaacgtggatgacaaaaacttagaatatcctttggttaaaatccagtggaagttctcgacctgcgagaaaatttag

SEQ ID NO: 114286 - DNA, 562 bp, Homo sapiens
attttcctagtccaatggtatgatccccaaagttatctgaaaccatatttaagagaacttgtcagagtcctttccattaaaagtaatttagatgatagctgattgtaaaggcttttttttttgagacatggtctggttctatcactcaggatggagtgcagtggcatgatcttggctcaccacaatttttccctcccaaactcaagccatcctcctacctcagcctccgaagtagttgggaccataggcatgcaccatcatgctggctaatttttgtatttttgtagagacagggttttaccatgttgcccaggatgctttcaaacttctgagttcaagcaattcacccacctcggccttgcaaagtgctgggatttttacacgtgtgagccaccgtgccctgcaccacgcccmgcactgtgccctgcacagcctccagcagcacgcccggcctgtaaagggttttagagaagaactttaaacaatcaacgtggatgacaaaaacttagaatatcctttggttaaaatccagtggaagttctcgacctgcgagaaaatttag

SEQ ID NO: 114287 - DNA, 562 bp, Homo sapiens
attttcctagtccaatggtatgatccccaaagttatctgaaaccatatttaagagaacttgtcagagtcctttccattaaaagtaatttagatgatagctgattgtaaaggcttttttttttgagacatggtctggttctatcactcaggatggagtgcagtggcatgatcttggctcaccacaatttttccctcccaaactcaagccatcctcctacctcagcctccgaagtagttgggaccataggcatgcaccatcatgctggctaatttttgtatttttgtagagacagggttttaccatgttgcccaggatgctttcaaacttctgagttcaagcaattcacccacctcggccttgcaaagtgctgggatttttacacgtgtgagccaccgtgccctgcaccacgcccagcactgtgccctgcacagcctccagcagcacgcccggcctgtaaagggttttagagaagaactttaaacaatcamcgtggatgacaaaaacttagaatatcctttggttaaaatccagtggaagttctcgacctgcgagaaaatttag

SEQ ID NO: 114288 - DNA, 627 bp, Homo sapiens
aagttgaacttctgatatacaaatctgaaaagtttttatagtaacagatttcaggattaaaagtcaatatttattacctcttattatgagcaaataaatacattaagaaaaccttgttgttttaaccaaaatttttagttttttatcactgtttttaatattatagctaatttaaataaactttataaacaatctatctgatctcaatcagttttggcctcgakgtaagatttacataaacttttaataaccttgtataattttttcatctttcccaactttttacacacatgtagttttatctatcttttttattccttcaatttaaaataatccttaaaaatctctaagtgaatttactttctctgaaacaaaaaccggtatacattttgcatacagaattgtttctcttgtatctagtagtcttaatcacacatatctagcaagatattaacacttagtaacccttattttaataaaaaacctaggaagcaagaaatctggaattgtcatatagcagtatcttacatatgagaataatttcataatttagaattatgtgttcctaaaacatattttttaagatggattttcgctcttgttgcccaggctggagtgcaatggtgt

SEQ ID NO: 114289 - DNA, 627 bp, Homo sapiens
aagttgaacttctgatatacaaatctgaaaagtttttatagtaacagatttcaggattaaaagtcaatatttattacctcttattatgagcaaataaatacattaagaaaaccttgttgttttaaccaaaatttttagttttttatcactgtttttaatattatagctaatttaaataaactttataaacaatctatctgatctcaatcagttttggcctcgatgtaagatttacataaacttttaataaccttgtataattttttcatctttcccaactttttacacacatgtagttttatctatcttttttattccttcaatttaaaataatccttaaaaatctctaagtgaatttactttctctgaaacaaaaaccggtatacattttgcatacagaattgtttctcttgtatctagtagtcttaatcacacatatctagcaagatattaacacttagtaacccttattttaataaaaawcctaggaagcaagaaatctggaattgtcatatagcagtatcttacatatgagaataatttcataatttagaattatgtgttcctaaaacatattttttaagatggattttcgctcttgttgcccaggctggagtgcaatggtgt

SEQ ID NO: 114290 - DNA, 653 bp, Homo sapiens
ttctgttgagtcctatactagtaagattttcaacacaaggtgactctcgacctcaccttgtaggaagagtgctgagaaaatatttcacctgctctttctccataaagagctgatactgatcattgctattttcttattcgatctgtaaaggtagcaaagacaaatgcttaatatttcatttttccttaaatgattcttaatgacttgcagtttttaaaaacttaccctgagagtaaaccaaattacccactaaatagtgttttcacacagaagatgtgtaagagcatacctgttgtaaggaattataattttaaaatcattctaaagaagcaccattgtttctaaggtgatttctactgaacwagcagttcaaacaaagtagacagggaagagaaatggctatcagtgatgtatggctcaacaggtaaaacttcctgccttctaaaatggctctacttggaagattctgaagattccattagaaatacttgtatttaaagggtaataatgtgggaaaatgaatatgttgatttgcttgattataagaaccacttcactagaaataattatatcaaaacatcatgttgtactccttaatgtaggttaagaaaactaaaatgaaagaaaaaaaatctaggaacacttgtgtttag

SEQ ID NO: 114291 - DNA, 530 bp, Homo sapiens
caaatgcttaatatttcatttttccttaaatgattcttaatgacttgcagtttttaaaaacttaccctgagagtaaaccaaattacccactaaatagtgttttcacacagaagatgtgtaagagcatacctgttgtaaggaattataattttaaaatcattctaaagaagcaccattgtttctaaggtgatttctactgaacaagcagttcaaacaaagtagacagggaagagaaatggctatcagtgatgtatggctcaacaggtaaaacttcctgccttctaaaatggctstacttggaagattctgaagattccattagaaatacttgtatttaaagggtaataatgtgggaaaatgaatatgttgatttgcttgattataagaaccacttcactagaaataattatatcaaaacatcatgttgtactccttaatgtaggttaagaaaactaaaatgaaagaaaaaaaatctaggaacacttgtgtttagtaaaccagttttagatttcactcttgtacacacccat

SEQ ID NO: 114292 - DNA, 653 bp, Homo sapiens
ttctgttgagtcctatactagtaagattttcaacacaaggtgactctcgacctcaccttgtaggaagagtgctgagaaaatatttcacctgctctttctccataaagagctgatactgatcattgctattttcttattcgatctgtaaaggtagcaaagacaaatgcttaatatttcatttttccttaaatgattcttaatgacttgcagtttttaaaaacttaccctgagagtaaaccaaattacccactaaatagtgttttcacacagaagatgtgtaagagcatacctgttgtaaggaattataattttaaaatcattctaaagaagcaccattgtttctaaggtgatttctactgaacaagcagttcaaacaaagtagacagggaagagaaatggctatcagtgatgtatggctcaacaggtaaaacttcctgccttctaaaatggctctacttggaagattctgaagattccattagaaatacttgtatttaaagggtaataatgtgggaaaatgaatatgttgatttgcttgattataagaaccacttcactagaaataattatatcaaaacatcatgttgtactccttaatgtasgttaagaaaactaaaatgaaagaaaaaaaatctaggaacacttgtgtttag

SEQ ID NO: 114293 - DNA, 661 bp, Homo sapiens
agtaaaccaaattacccactaaatagtgttttcacacagaagatgtgtaagagcatacctgttgtaaggaattataattttaaaatcattctaaagaagcaccattgtttctaaggtgatttctactgaacaagcagttcaaacaaagtagacagggaagagaaatggctatcagtgatgtatggctcaacaggtaaaacttcctgccttctaaaatggctctacttggaagattctgaagattccattagaaatacttgtatttaaagggtaataatgtgggaaaatgaatatgttgatttgcttgattataagaaccacttcactagaaataattatatcaaaacatcatgttgtactccttaatgtaggttaagaaaactaaaatgaamgaaaaaaaatctaggaacacttgtgtttagtaaaccagttttagatttcactcttgtacacacccattatctaggaccaattaaacatttggcactgaggaataattcagagcaacaactcctaggggagaactagattgtctggttggtgatcaaaaagaactaaagcatctctgaaggcaattagtccccaacactgtgaccaaggccctggaggtggggcatgttctttctgccttccacacaccgcttcaggctgaacaaggtgt

SEQ ID NO: 114294 - DNA, 661 bp, Homo sapiens
agtaaaccaaattacccactaaatagtgttttcacacagaagatgtgtaagagcatacctgttgtaaggaattataattttaaaatcattctaaagaagcaccattgtttctaaggtgatttctactgaacaagcagttcaaacaaagtagacagggaagagaaatggctatcagtgatgtatggctcaacaggtaaaacttcctgccttctaaaatggctctacttggaagattctgaagattccattagaaatacttgtatttaaagggtaataatgtgggaaaatgaatatgttgatttgcttgattataagaaccacttcactagaaataattatatcaaaacatcatgttgtactccttaatgtaggttaagaaaactaaaatgaaagaaaaaaaatctaggaacacttgtgtttagtaaaccagttttagatttcactcttgtacacacccattatctaggaccaattaaacatttggcactgaggaataattcagagcaacaactcctaggggagaactagattgtctggttggtgatcaaaaagaaytaaagcatctctgaaggcaattagtccccaacactgtgaccaaggccctggaggtggggcatgttctttctgccttccacacaccgcttcaggctgaacaaggtgt

SEQ ID NO: 114295 - DNA, 578 bp, Homo sapiens
agcaatatcaaaactaataactgaattcagaattaagtctgatttgtaaaaatttgaaatcataattatgctagtattaatgtaatctggtcatataaaaagtaatagaatccattcatagttttaaaaagtgatcaatgaacactgtagcttaagaccaattcataattatcacataatttctaaawcacaattttttcctatgccaactggtcttaatcatcaaatgactccataatgagaatcattactctgaaagattgattttgttataataataatggaaatttaaatatttaaaagaaaaaacagataccatttttttctagaactctacaaagcagattgctacaagagaggcaatctctttatatatatatatatctccaaaatataatttgcagtgaaataaatgaaagcacattacaagtaaacttacctgatttaaacaactcacctgtaaatggatttcttctaatttttctactgcctgcattgccctttcatctagctctgatttatattcttgtagtttactaagttctaccatactgttttccatatgtgtcttaagattt

SEQ ID NO: 114296 - DNA, 652 bp, Homo sapiens
agaatccattcatagttttaaaaagtgatcaatgaacactgtagcttaagaccaattcataattatcacataatttctaaaacacaattttttcctatgccaactggtcttaatcatcaaatgactccataatgagaatcattactctgaaagatwgattttgttataataataatggaaatttaaatatttaaaagaaaaaacagataccatttttttctagaactctacaaagcagattgctacaagagaggcaatctctttatatatatatatatctccaaaatataatttgcagtgaaataaatgaaagcacattacaagtaaacttacctgatttaaacaactcacctgtaaatggatttcttctaatttttctactgcctgcattgccctttcatctagctctgatttatattcttgtagtttactaagttctaccatactgttttccatatgtgtcttaagatttaatatttcttcttccaacatctttttatcttcctcaagtttttcacattcctgttgtacttttttcatagataataactcctgttgaaaaacttgattctctttagccaaattgacacattttgaagatacagcttccttctccgccataagatcatcaaactgcaagaataaaatagta

SEQ ID NO: 114297 - DNA, 652 bp, Homo sapiens
agaatccattcatagttttaaaaagtgatcaatgaacactgtagcttaagaccaattcataattatcacataatttctaaaacacaattttttcctatgccaactggtcttaatcatcaaatgactccataatgagaatcattactctgaaagattgattttgttatamtaataatggaaatttaaatatttaaaagaaaaaacagataccatttttttctagaactctacaaagcagattgctacaagagaggcaatctctttatatatatatatatctccaaaatataatttgcagtgaaataaatgaaagcacattacaagtaaacttacctgatttaaacaactcacctgtaaatggatttcttctaatttttctactgcctgcattgccctttcatctagctctgatttatattcttgtagtttactaagttctaccatactgttttccatatgtgtcttaagatttaatatttcttcttccaacatctttttatcttcctcaagtttttcacattcctgttgtacttttttcatagataataactcctgttgaaaaacttgattctctttagccaaattgacacattttgaagatacagcttccttctccgccataagatcatcaaactgcaagaataaaatagta

SEQ ID NO: 114298 - DNA, 652 bp, Homo sapiens
agaatccattcatagttttaaaaagtgatcaatgaacactgtagcttaagaccaattcataattatcacataatttctaaaacacaattttttcctatgccaactggtcttaatcatcaaatgactccataatgagaatcattactctgaaagattgattttgttataataataatggaaatttaaatatttaaaagaaaaaacagataccatttttttctagaactctacaaagcagattgctacaagagaggcaatctctttatatatatatatatctccaaaatataatttgcagtgaaataaatgaaagcacattacaagtaaacttacctgatttaaacaactcacctgtaaatggatttcttctaatttttctactgcctgcattgccctttcatctagctctgatttatattcttgtagtttactaagttctaccatactgttttccatatgtgtcttaagatttaatatttcttcttccaacatctttttatcytcctcaagtttttcacattcctgttgtacttttttcatagataataactcctgttgaaaaacttgattctctttagccaaattgacacattttgaagatacagcttccttctccgccataagatcatcaaactgcaagaataaaatagta

SEQ ID NO: 114299 - DNA, 506 bp, Homo sapiens
taaatgaggaaataaggagaatattatggaatgatttttattcttcacagaagtaaaataagcatagtgtgttttgagtgttaagacacaaatgcaacttctcctttaccttactccaagcttgtttgtatggagaagttaagaccatcccatttctatgttatgccacaatgcttctctatagcacacaacttggctctgaaattttgaaagtcaaaatactaatctactatgtgtctctgataaattgcctgaacsttacctgattttgaagtgctgcactcctaagactttttcttggaatgagttaaacgttttattccaagaatcctctactgagctagaaagcagagctgtgcatctctgtttcagtaaaaggaggtcaatatagggaactgtggtttctgagaatgcaagatctgcactaataaaaggattagccacagtgctacccaagagaaccagctaccaggaggaaagagggtctgtaaactgcaagatgatga

SEQ ID NO: 114300 - DNA, 506 bp, Homo sapiens
taaatgaggaaataaggagaatattatggaatgatttttattcttcacagaagtaaaataagcatagtgtgttttgagtgttaagacacaaatgcaacttctcctttaccttactccaagcttgtttgtatggagaagttaagaccatcccatttctatgttatgccacaatgcttctctatagcacacaacttggctctgaaattttgaaagtcaaaatactaatctactatgtgtctctgataaattgcctgaacgttacctgaytttgaagtgctgcactcctaagactttttcttggaatgagttaaacgttttattccaagaatcctctactgagctagaaagcagagctgtgcatctctgtttcagtaaaaggaggtcaatatagggaactgtggtttctgagaatgcaagatctgcactaataaaaggattagccacagtgctacccaagagaaccagctaccaggaggaaagagggtctgtaaactgcaagatgatga

SEQ ID NO: 114301 - DNA, 462 bp, Homo sapiens
tggccgcttcagctcatgtgmtcctggtattcaattgtgaggtggaaacctctttgcaggacccctctctttgctgagagctgtgctttcacataataaattctgccctcctcaatgtgtctgcatgcttaatttttcctggtcacgagagaagaacacagatgtagctgaactaaggagcaaaaacccagcatcaatacctgctacagcacagatgcagcatgaaaaattatgctaagtgaaataagccagtcccagcagaccacttgctttttatttcagaggcttataggcaaatctatacaaagaaggtgggtggttccctagggctgagggaggaagggaaaactagtgaagatggctaaatgatgtggggtttgtttttagggtgatgaaaatgttctaaaattaattgtaatgatgacggcataactctctgaaaatactaaagttaatgaattc

SEQ ID NO: 114302 - DNA, 463 bp, Homo sapiens
ctggccgcttcagctcatgtgctcctggtattcaattgtgaggtggaaacctctttgcaggacccckctctttgctgagagctgtgctttcacataataaattctgccctcctcaatgtgtctgcatgcttaatttttcctggtcacgagagaagaacacagatgtagctgaactaaggagcaaaaacccagcatcaatacctgctacagcacagatgcagcatgaaaaattatgctaagtgaaataagccagtcccagcagaccacttgctttttatttcagaggcttataggcaaatctatacaaagaaggtgggtggttccctagggctgagggaggaagggaaaactagtgaagatggctaaatgatgtggggtttgtttttagggtgatgaaaatgttctaaaattaattgtaatgatgacggcataactctctgaaaatactaaagttaatgaattc

SEQ ID NO: 114303 - DNA, 449 bp, Homo sapiens
tcatgtgctcctggtattcaattgtgaggtggaaacctctttgcaggacccctctctttgctgagagctgtgctttcacataataaattctgccctcctcaatgtgtctgcatgcttaatttttcctgrtcacgagagaagaacacagatgtagctgaactaaggagcaaaaacccagcatcaatacctgctacagcacagatgcagcatgaaaaattatgctaagtgaaataagccagtcccagcagaccacttgctttttatttcagaggcttataggcaaatctatacaaagaaggtgggtggttccctagggctgagggaggaagggaaaactagtgaagatggctaaatgatgtggggtttgtttttagggtgatgaaaatgttctaaaattaattgtaatgatgacggcataactctctgaaaatactaaagttaatgaattc

SEQ ID NO: 114304 - DNA, 462 bp, Homo sapiens
tggccgcttcagctcatgtgctcctggtattcaattgtgaggtggaaacctctttgcaggacccctctctttgctgagagctgtgctttcacataataaattctgccctcctcaatgtgtctgcatgcttaatttttcctggtcacgagagaagaacacagatgtagctgaactaaggagcaaaaacccrgcatcaatacctgctacagcacagatgcagcatgaaaaattatgctaagtgaaataagccagtcccagcagaccacttgctttttatttcagaggcttataggcaaatctatacaaagaaggtgggtggttccctagggctgagggaggaagggaaaactagtgaagatggctaaatgatgtggggtttgtttttagggtgatgaaaatgttctaaaattaattgtaatgatgacggcataactctctgaaaatactaaagttaatgaattc

SEQ ID NO: 114305 - DNA, 459 bp, Homo sapiens
gaattcacaccttatgcagaggaggagcctggccgcttcagctcatgtgctcctggtattcaattgtgaggtggaaacctctttgcaggacccctctctttgctgagagctgtgctttcacataataaattctgccctcctcaatgtgtctgcatgcttaatttttcctggtcacgagagaagaacacagatgtagctgaactaaggagcaaaaacccagcatcaatacctgctacagcacagatgcagcatgaaaaattatgctaagtgaaataagccagtcccagcagaccacttgctttttatttcagaggcttataggcaaatctatacaaagaaggtgggtggttccctagggctgagggaggaagggaaaactagtgaagatggctaaatgmtgtggggtttgtttttagggtgatgaaaatgttctaaaattaattgtaatgatgacggcat

SEQ ID NO: 114306 - DNA, 573 bp, Homo sapiens
tccggcgtggttaggaggggcctgatcagtgtgggcctggtcagtggacctaggtcagtgaggactatttagtgggatcrtggtcagcagaggtctgcttagagagggtctcattagtggggtctagtagtgggggttttggtgagtggggacctattggctgccagttgtttggtgtctggtcagtgcaaacctgggctgtggggcttgatcagtggagacctggtcagctggggcttagtgctggcctggtcagcatgggctggggcactggtgaccaggtcaaggggtgctattcagtggaggactgggcacatggaacctagtcagcagaccctggtgggcgtgtcctcatcagtgaggcccttgtcagtggggccctggtcagggcagccttgtcagtgggacctaatctgtagtgtcctagtcagagaggacttggtcagtggtgacttttgtagcaccggtctacagggtgacctggtcagcggggatctcagcatttggtgccagttcagtggggtctactcactagggtcccagtcaggggcatctggtgaccttaggcctggt

SEQ ID NO: 114307 - DNA, 573 bp, Homo sapiens
tccggcgtggttaggaggggcctgatcagtgtgggcctggtcagtggacctaggtcagtgaggactatttagtgggatcatggtcagcagaggtctgcttagagagggtctcattastggggtctagtagtgggggttttggtgagtggggacctattggctgccagttgtttggtgtctggtcagtgcaaacctgggctgtggggcttgatcagtggagacctggtcagctggggcttagtgctggcctggtcagcatgggctggggcactggtgaccaggtcaaggggtgctattcagtggaggactgggcacatggaacctagtcagcagaccctggtgggcgtgtcctcatcagtgaggcccttgtcagtggggccctggtcagggcagccttgtcagtgggacctaatctgtagtgtcctagtcagagaggacttggtcagtggtgacttttgtagcaccggtctacagggtgacctggtcagcggggatctcagcatttggtgccagttcagtggggtctactcactagggtcccagtcaggggcatctggtgaccttaggcctggt

SEQ ID NO: 114308 - DNA, 573 bp, Homo sapiens
tccggcgtggttaggaggggcctgatcagtgtgggcctggtcagtggacctaggtcagtgaggactatttagtgggatcatggtcagcagaggtctgcttagagagggtctcattagtggggtctagtagtgggggttttggtgagtggggacctattggctgccagttgtttggtgtctggtcagtgcaaacctgggctgtggggcttgatcagtggagacctggtcagctggggcttagtgctggcctggtcagcatgggctggggcactggtgaccaggtcaaggggtgctattcagtggaggactgggcacatggaacmtagtcagcagaccctggtgggcgtgtcctcatcagtgaggcccttgtcagtggggccctggtcagggcagccttgtcagtgggacctaatctgtagtgtcctagtcagagaggacttggtcagtggtgacttttgtagcaccggtctacagggtgacctggtcagcggggatctcagcatttggtgccagttcagtggggtctactcactagggtcccagtcaggggcatctggtgaccttaggcctggt

SEQ ID NO: 114309 - DNA, 557 bp, Homo sapiens
gcttatccctcatataggattccagaacactcctgctgtggtctaaatgtttgttcctcacataggattccagaatactcctgccgtggtctgaatgtttgtccctcacataggattccagaatactcctgccgtagtctgaatgtttgtccctcacataggattccagaatactcctgccgtggtctgaatgtttgtccctcacataggattccagaacattcatgctggggtctcaatgtttcccttaacataggatttcagaacactgctcttggggtctgaatgtttgtcactcacataggattacagaacactgstgctggagtctgaatgtttgtcagtcacatagaattccagaacactgctacaagggtgtgaatatttctccctcacctagtattccagaacactgttgcaagtgtctgaacgttggtccgtcatataggattccagaacactgctgctgtagtctgaatgtttgtccctcacatagaattccggaacactgctacaagggtctgaatgtttgtccttcacataccattccagaacac

SEQ ID NO: 114310 - DNA, 386 bp, Homo sapiens
tggtctgaatgtttgcccctcacataggattccagaacattcctgctgtggtctgattgttcctcatataggattccagaacactgctacraggttctgaatttttgcccctcacataagattgcagaacactgctacaagggtttgaaagttttcccctcacataggattccacaacactactgctggggtctgaatgtttgtccctcacataggattcccgagcactcctgttgtggtctgaatgtttttccctcacataggattcctgaagactgctgctgtcactatagtcgttgcgagtgtctgaatgtttgaccttcaccaaacactaaatattctgcccctttagtcttggactttccagcctccagatctgtgagcaa

SEQ ID NO: 114311 - DNA, 386 bp, Homo sapiens
tggtctgaatgtttgcccctcacataggattccagaacattcctgctgtggtctgattgttcctcatataggattccagaacactgctacaaggttctgaatttttgcccctcacatargattgcagaacactgctacaagggtttgaaagttttcccctcacataggattccacaacactactgctggggtctgaatgtttgtccctcacataggattcccgagcactcctgttgtggtctgaatgtttttccctcacataggattcctgaagactgctgctgtcactatagtcgttgcgagtgtctgaatgtttgaccttcaccaaacactaaatattctgcccctttagtcttggactttccagcctccagatctgtgagcaa

SEQ ID NO: 114312 - DNA, 386 bp, Homo sapiens
tggtctgaatgtttgcccctcacataggattccagaacattcctgctgtggtctgattgttcctcatataggattccagaacactgctacaaggttctgaatttttgcccctcacataagattgcagaacactgctacaagggtttgaaagttttcccctcacataggattccacaacactactgctggggtctgaatgtttgtccctcacataggattcccgagcactcctgttgtggtctgaatgtttttccctcacataggattcctgaagactgctgctgtcactatartcgttgcgagtgtctgaatgtttgaccttcaccaaacactaaatattctgcccctttagtcttggactttccagcctccagatctgtgagcaa

SEQ ID NO: 114313 - DNA, 591 bp, Homo sapiens
ccagtattaatgtcagacaccaaaccaaagatccaggaagctcagagaccaccargcagaataaatgccaacaacctacacttggacatataattttcaaactatatgaaataaaagataaaggaaaactctgaaagaaaccagaggtggggcagaaaacaccttacctacagagacacaaagataagaactgcattcaacattgcagaaactgtgaaagcaagaagacagtgaaatgaaaaattcaaaatgttgacagaaaaaaacccaccaacctaagtttctgtacccactgaaaccacccttcaaaagtgaaggagaattaaggccttcctcagaaaaatacaaattcaagaaacttgttgccaggagacctgtcttgcaagaaatgttaaatgaaattctttagagggaaacaaaagatatataactgaaacctggatcaacatttttttaaaaagagcattaaagaattgtggtacaataaaaacctatgtatttattcttaattgatctgaccaagaagttcatagacaataacaaatacacacagatagattatgtatgcttatacacaattgaaatgagtga

SEQ ID NO: 114314 - DNA, 591 bp, Homo sapiens
ccagtattaatgtcagacaccaaaccaaagatccaggaagctcagagaccaccaggcagaataaatgccaacaacctacacttggacatataattttcaaactatatgaaataaaagataaaggaaaactctgaaagaaaccagaggtggggcagaaaacaccttacctacagagacacaaagataagaactgcattcaacattgcagaaactgtgaaagcaagaagacagtgaaatgaaaaattcaaaatgttgacagaaaaaaacccaccaacctaagtttctgtacccactgaaaccacccttcaaaagtgaaggagaattaaggccttcctcagaaaaatamaaattcaagaaacttgttgccaggagacctgtcttgcaagaaatgttaaatgaaattctttagagggaaacaaaagatatataactgaaacctggatcaacatttttttaaaaagagcattaaagaattgtggtacaataaaaacctatgtatttattcttaattgatctgaccaagaagttcatagacaataacaaatacacacagatagattatgtatgcttatacacaattgaaatgagtga

SEQ ID NO: 114315 - DNA, 565 bp, Homo sapiens
caagaaatgttaaatgaaattctttagagggaaacaaaagatatataactgaaacctggatcaacatttttttaaaaagagcattaaagaattgtggtacaataaaaasctatgtatttattcttaattgatctgaccaagaagttcatagacaataacaaatacacacagatagattatgtatgcttatacacaattgaaatgagtgacactaatacaaggaatggaatggaaggatgggagggaggaattgtggtacaataaaaacatgtatttattcataattgatctgaccaataagtttgtagataataataaatacacacagatagattatgtgtgcttatacacaagtgaaataaggaacaataatacaaggaatggaatggaaggatgggagggaggaatcaggtgttttctttgttaagcaggtagtcacccatgaagtgggatagtgttatctgaaagtggacttgaattggttgtaaatgtatattgaggaattaggtgtgttctttgttaagcaggtagtcttatttgtgggatagtgggatagtgttatttg

SEQ ID NO: 114316 - DNA, 495 bp, Homo sapiens
tgaactaataatatctatgaagtgctttctaaagtataacacatgtaagttgtgttaaatgtaaactatcatgattatatcattactgtctgactgatacaactatatccacctcagttagccacataagatcaattttcctataccttagagaataccagtaacctccagttcagaaacagcataaatatttatccacagctgagcagacacatacagctagctaccagatgaaatgggctatatcttcaaatactattgttttcygttttttaattgtggcaaaacacactcaacaatttgcatcttaaccactgttaagtatacaattcggtgtcattaaatgtattcacaatgttgtgcaagcatcaccaccacccatctccataattctttttgtcttgtaaaattgaaaccctgtacccattaaaagtgactccccattccccacccccccagggcaactacagctttgctttctgtcttgatgaatca

SEQ ID NO: 114317 - DNA, 495 bp, Homo sapiens
tgaactaataatatctatgaagtgctttctaaagtataacacatgtaagttgtgttaaatgtaaactatcatgattatatcattactgtctgactgatacaactatatccacctcagttagccacataagatcaattttcctataccttagagaataccagtaacctccagttcagaaacagcataaatatttatccacagctgagcagacacatacagctagctaccagatgaaatgggctatatcttcaaatactattgttttctgttttttaaytgtggcaaaacacactcaacaatttgcatcttaaccactgttaagtatacaattcggtgtcattaaatgtattcacaatgttgtgcaagcatcaccaccacccatctccataattctttttgtcttgtaaaattgaaaccctgtacccattaaaagtgactccccattccccacccccccagggcaactacagctttgctttctgtcttgatgaatca

SEQ ID NO: 114318 - DNA, 495 bp, Homo sapiens
tgaactaataatatctatgaagtgctttctaaagtataacacatgtaagttgtgttaaatgtaaactatcatgattatatcattactgtctgactgatacaactatatccacctcagttagccacataagatcaattttcctataccttagagaataccagtaacctccagttcagaaacagcataaatatttatccacagctgagcagacacatacagctagctaccagatgaaatgggctatatcttcaaatactattgttttctgttttttaattgtggcaaaacacactcaacaatttgcatcttaaccactgttaagtatacaattcggtgtcattaaatgtattcacaatgttgtgcaagcatcaccaccacccatctccataattctttttgtcttgtaaaattgaaaycctgtacccattaaaagtgactccccattccccacccccccagggcaactacagctttgctttctgtcttgatgaatca

SEQ ID NO: 114319 - DNA, 644 bp, Homo sapiens
aactacagctttgctttctgtcttgatgaatcatacaatatcaaatgtaatttttaagatatttaaaatcttttgtctggaagyaaagtggaagttaatatcaatggctatgccttcagtgagttctcagaccacattacaacgtagttaactatttatcttttattacgttctagacctattatttctttctggcacaaaaatatcttctttgtagattatggcatttacctctatctccacaccattttggtctctcatccacagatcatcagcctcttgcttagtcttccatttaatgacaatttctatttagtatacaacagtccttccccctgcaatgcaatttcttcactctttaaagctctgagtctggctactggtctctgttatgtactcatccctagagccaagtcttcaaatatttctcagaacttcttcacatctaaaaatctaggattaatgtattgctctctgattatattcttctggtatttcaagtatcctgtataacttcttcatctgcccttgcttttcttctacatcaagatgtcaagttcatggacttcccaattaatcattttaaaaatgtatttcaagcctttatgagtcactaaaatatacatatgttctcaggaattatg

SEQ ID NO: 114320 - DNA, 644 bp, Homo sapiens
aactacagctttgctttctgtcttgatgaatcatacaatatcaaatgtaatttttaagatatttaaaatcttttgtctggaagcaaagtggaagttaatatcaatggctatgccttcagtgagttctcagaccacattacaacgtagttaactatttatyttttattacgttctagacctattatttctttctggcacaaaaatatcttctttgtagattatggcatttacctctatctccacaccattttggtctctcatccacagatcatcagcctcttgcttagtcttccatttaatgacaatttctatttagtatacaacagtccttccccctgcaatgcaatttcttcactctttaaagctctgagtctggctactggtctctgttatgtactcatccctagagccaagtcttcaaatatttctcagaacttcttcacatctaaaaatctaggattaatgtattgctctctgattatattcttctggtatttcaagtatcctgtataacttcttcatctgcccttgcttttcttctacatcaagatgtcaagttcatggacttcccaattaatcattttaaaaatgtatttcaagcctttatgagtcactaaaatatacatatgttctcaggaattatg

SEQ ID NO: 114321 - DNA, 593 bp, Homo sapiens
tagacctattatttctttctggcacaaaaatatcttctttgtagattatggcatttacctctatctccacaccattttggtctctcatccacagatcatcagcctcttgcttagtcttccatttaatgacaatttctatttagtatacaacagtccttccccctgcaatgcaatttcttcactctttaaagctctgagtctggctactggtctctgttatgtactcatccctagagccaagtcttcaaatatttctcagaacttcttcacatctaaaaatctaggattaatktattgctctctgattatattcttctggtatttcaagtatcctgtataacttcttcatctgcccttgcttttcttctacatcaagatgtcaagttcatggacttcccaattaatcattttaaaaatgtatttcaagcctttatgagtcactaaaatatacatatgttctcaggaattatggccctacaatttgtatgtgagaatagttcctgtgtcaggcattatggacataagaggaaataaattctagcccctgcctacaaggagctaattcccagcctaagacagattgcaagccaata

SEQ ID NO: 114322 - DNA, 448 bp, Homo sapiens
ggtggccacacctgtaatcccagcactttgggaggccaaggcakgaagatcatgaggtcaggagttaaagaccagtctggccaacaagtttcttatataggtaaacgtgttccatgatggtttgctgcacctatcaatccatcacctagatattaagccctgtgggcattagttattgatcttgatgctctccctcctgaccccaacaggccccagtgtttgttgttcccctccccgagtccatgtgctcttatcgttcagctcccacttataagtgagaagatgcagtgtttggttttttcttcctgcattagtttgctgaagatatcagctttgggttcatccatatccctgcaaagagcatgatctcattcatttttatggctccatagtattccatggtgtatatataccacattttctttatcccattatcactgataatgtc

SEQ ID NO: 114323 - DNA, 556 bp, Homo sapiens
acagtaacatgctgcacaggtttgtagcctaggaggaataggctataccacctaacctagatatgtaatcagctatagcatctaggtttgtgtaagtaaactctgtgatgttcatacaataataaaattgtccagcaatgcatttctcagacacacccctgtcattaagtgacacatgactgtattagttaacacyatgggaacttcatgggaaatggacactctagctccaccataaatagaaactgtttatgtcaaaaaacacataaaagcatagttgcaagattacatttccttccagatatttcatttagtatctccacagatcactaacttcctgaatagcattcttgtgtctccactgcctcacatttgatttcaggtcattccatcaattgtcaaagacgcatccaacattaactttccaactactggtttggattgtgtcaacattgtcattctgggccacaacaacacaaaaggctaactcagtgaggtaacatagacactgatcagtgagattttgctgatggatggtaccattttttaccaagat

SEQ ID NO: 114324 - DNA, 556 bp, Homo sapiens
acagtaacatgctgcacaggtttgtagcctaggaggaataggctataccacctaacctagatatgtaatcagctatagcatctaggtttgtgtaagtaaactctgtgatgttcatacaataataaaattgtccagcaatgcatttctcagacacacccctgtcattaagtgacacatgactgtattagttaacaccatgggarcttcatgggaaatggacactctagctccaccataaatagaaactgtttatgtcaaaaaacacataaaagcatagttgcaagattacatttccttccagatatttcatttagtatctccacagatcactaacttcctgaatagcattcttgtgtctccactgcctcacatttgatttcaggtcattccatcaattgtcaaagacgcatccaacattaactttccaactactggtttggattgtgtcaacattgtcattctgggccacaacaacacaaaaggctaactcagtgaggtaacatagacactgatcagtgagattttgctgatggatggtaccattttttaccaagat

SEQ ID NO: 114325 - DNA, 556 bp, Homo sapiens
acagtaacatgctgcacaggtttgtagcctaggaggaataggctataccacctaacctagatatgtaatcagctatagcatctaggtttgtgtaagtaaactctgtgatgttcatacaataataaaattgtccagcaatgcatttctcagacacacccctgtcattaagtgacacatgactgtattagttaacaccatgggaacttcatgggaaatggacactctagctccaccataaatagaaactktttatgtcaaaaaacacataaaagcatagttgcaagattacatttccttccagatatttcatttagtatctccacagatcactaacttcctgaatagcattcttgtgtctccactgcctcacatttgatttcaggtcattccatcaattgtcaaagacgcatccaacattaactttccaactactggtttggattgtgtcaacattgtcattctgggccacaacaacacaaaaggctaactcagtgaggtaacatagacactgatcagtgagattttgctgatggatggtaccattttttaccaagat

SEQ ID NO: 114326 - DNA, 448 bp, Homo sapiens
ggtggccacacctgtaatcccagcactttgggaggccaaggcatgaagatcatgaggtcaggagttaaagaccagtctggccaacaagtttcttatataggtaaacgtgttccatgatggtttgctgcacctatcaatccatcacctagatattaagccctgtgggcattagttattgatcttgatgctctccctcctgaccccaacaggccccagtgtttgttgttcccctccccgagtccatgtgctcttatcgttcarctcccacttataagtgagaagatgcagtgtttggttttttcttcctgcattagtttgctgaagatatcagctttgggttcatccatatccctgcaaagagcatgatctcattcatttttatggctccatagtattccatggtgtatatataccacattttctttatcccattatcactgataatgtc

SEQ ID NO: 114327 - DNA, 557 bp, Homo sapiens
ttgtataaacttgcttgatgagcaactgttgtccactggtaccttcactgtacaatccacacacaacaaaacttcacaactggacacctaaatttgcactttgtttggtaaagttgaatgaaaaatgttgtcttttaagcttatgctctcttatgaaagctgttattagattaattttactccaggatatgccagttaggaaataacttccaatttaatttcaccagctccctgtgggtagactaattactcacacatcacacttactctggtggtgaaatgcctcaaaagaaggtctccagagtgttgctctacctagaaggacaagaatgaagagacataaaaatcattcattaagaaggaagaagattttccttgcctagatttkcacttgtaggatccaattaattttatcacttaatattttgtcctggtgggcattcactttacaaatttgtaaggtcagtagaaatggaaacttttggaaatcaaactgtaaatgttctgtagacgttgacagaaatagctatttggagctgtgcttttgccaactagac

SEQ ID NO: 114328 - DNA, 533 bp, Homo sapiens
gaaataacttccaatttaatttcaccagctccctgtgggtagactaattactcacacatcacacttactctggtggtgaaatgcctcaaaagaaggtctccagagtgttgctctacctagaaggacaagaatgaagagacataaaaatcattcattaagaaggaagaagattttccttgcctagattttcacttgtaggatccaattaattttatcacttaatattttgtcctggtgggcattcactttacaaatttgtaaggtcagtagaaatggaaacttttrgaaatcaaactgtaaatgttctgtagacgttgacagaaatagctatttggagctgtgcttttgccaactagacactctgagaaaatctgtgagaggatattttcaggaagtcattgaaccccctaaaaatcaagtttattgcttttaccataaatataaataatttatttattatcaaccactttcaatattccaataagtaactttattgtttatttcattgacatgatctacatagacatgcaatt

SEQ ID NO: 114329 - DNA, 526 bp, Homo sapiens
gtcctaattgagatgtgttgtgttawatatactggattttgtcattggagtgggaagaacagcgtagaatatctgcttgataattttttatattgattacatgttaaaattattactatgattactatttgggacatactgagttaagtatatttaaaattaatttcaccttttaatggggcttactagtacatttaaaattacatatgtggctcacatatttattggacagcacggctctagaagtttaggaagaaataagaaaaatattgagaataggtagcaacagtaggaagtttgacctcctgtaagactgattccaataaaactaataggtgatagttttaattggctttttcctactagaaaaagtaagtgtactttacatgtctctttgttctccctctttccccttcaatttagtggttagcgtgtatttactatatcaggcttaatattcactaagcagtgttaagaagacttaggtaaatgattccctgatgaacacacttgatttccaaagcac

SEQ ID NO: 114330 - DNA, 526 bp, Homo sapiens
gtcctaattgagatgtgttgtgttaaatatactggattttgtcattggagtgggaagaacagcgtagaatatctgcttgataattttttatattgattacatgttaaaattattactatgattactatttgggacatactgagttaagtatatttaaaattaatttcaccttttaatggggyttactagtacatttaaaattacatatgtggctcacatatttattggacagcacggctctagaagtttaggaagaaataagaaaaatattgagaataggtagcaacagtaggaagtttgacctcctgtaagactgattccaataaaactaataggtgatagttttaattggctttttcctactagaaaaagtaagtgtactttacatgtctctttgttctccctctttccccttcaatttagtggttagcgtgtatttactatatcaggcttaatattcactaagcagtgttaagaagacttaggtaaatgattccctgatgaacacacttgatttccaaagcac

SEQ ID NO: 114331 - DNA, 526 bp, Homo sapiens
gtcctaattgagatgtgttgtgttaaatatactggattttgtcattggagtgggaagaacagcgtagaatatctgcttgataattttttatattgattacatgttaaaattattactatgattactatttgggacatactgagttaagtatatttaaaattaatttcaccttttaatggggcttactagtacatttaaaattacatatgtggctcacatatttattggacagcacggctctagaagtttaggaagaaataagaaaaatattgagaataggtagcracagtaggaagtttgacctcctgtaagactgattccaataaaactaataggtgatagttttaattggctttttcctactagaaaaagtaagtgtactttacatgtctctttgttctccctctttccccttcaatttagtggttagcgtgtatttactatatcaggcttaatattcactaagcagtgttaagaagacttaggtaaatgattccctgatgaacacacttgatttccaaagcac

SEQ ID NO: 114332 - DNA, 526 bp, Homo sapiens
gtcctaattgagatgtgttgtgttaaatatactggattttgtcattggagtgggaagaacagcgtagaatatctgcttgataattttttatattgattacatgttaaaattattactatgattactatttgggacatactgagttaagtatatttaaaattaatttcaccttttaatggggcttactagtacatttaaaattacatatgtggctcacatatttattggacagcacggctctagaagtttaggaagaaataagaaaaatattgagaataggtagcaacagtaggaagtttgacctcctgtaagactgattccaataaaactaataggtgatagttttaattggctttttcctactagaaaaagtaagtgtactttacrtgtctctttgttctccctctttccccttcaatttagtggttagcgtgtatttactatatcaggcttaatattcactaagcagtgttaagaagacttaggtaaatgattccctgatgaacacacttgatttccaaagcac

SEQ ID NO: 114333 - DNA, 578 bp, Homo sapiens
ccatggcagttgaatgtagtcatttaagatgttctttgtccttttgtttttcttttgcttctttatcattgtaaagaatgatgtattctgatgagatatgatttacatacttagaaaacatgatttgtatagatatgtggcacataatagaaagggttgaggaaaaggacaccacgccgtactacacagcacaacctggagcatcttgctctgtgaggtgggtccagatagactctttagcaatggaagrggacaagtgcaaagtgttgtgctttataaaactggaatcacaaagtctttcatacttacattcggttggaaataagaccaggcatgaatgctattaggtaaatacataagttcctcactgatcctcttcctttgagggatgaggttgacaacagcctgtattatgatggcatgactcacctacaactagattctgtcatgagagatgacaagggagttttgctttatgcgaggtgaaaaaaattttttctcctactagggagatgggcaaacattagaacattctggtagtaaaagggcattgatagtttcctttctatatatttttt

SEQ ID NO: 114334 - DNA, 578 bp, Homo sapiens
ccatggcagttgaatgtagtcatttaagatgttctttgtccttttgtttttcttttgcttctttatcattgtaaagaatgatgtattctgatgagatatgatttacatacttagaaaacatgatttgtatagatatgtggcacataatagaaagggttgaggaaaaggacaccacgccgtactacacagcacaacctggagcatcttgctctgtgaggtgggtccagatagactctttagcaatggaagaggacaagtgcaaagkgttgtgctttataaaactggaatcacaaagtctttcatacttacattcggttggaaataagaccaggcatgaatgctattaggtaaatacataagttcctcactgatcctcttcctttgagggatgaggttgacaacagcctgtattatgatggcatgactcacctacaactagattctgtcatgagagatgacaagggagttttgctttatgcgaggtgaaaaaaattttttctcctactagggagatgggcaaacattagaacattctggtagtaaaagggcattgatagtttcctttctatatatttttt

SEQ ID NO: 114335 - DNA, 578 bp, Homo sapiens
ccatggcagttgaatgtagtcatttaagatgttctttgtccttttgtttttcttttgcttctttatcattgtaaagaatgatgtattctgatgagatatgatttacatacttagaaaacatgatttgtatagatatgtggcacataatagaaagggttgaggaaaaggacaccacgccgtactacacagcacaacctggagcatcttgctctgtgaggtgggtccagatagactctttagcaatggaagaggacaagtgcaaagtgttgtgctttataaaactggaatcacaaagtctttcatacttacmttcggttggaaataagaccaggcatgaatgctattaggtaaatacataagttcctcactgatcctcttcctttgagggatgaggttgacaacagcctgtattatgatggcatgactcacctacaactagattctgtcatgagagatgacaagggagttttgctttatgcgaggtgaaaaaaattttttctcctactagggagatgggcaaacattagaacattctggtagtaaaagggcattgatagtttcctttctatatatttttt

SEQ ID NO: 114336 - DNA, 578 bp, Homo sapiens
ccatggcagttgaatgtagtcatttaagatgttctttgtccttttgtttttcttttgcttctttatcattgtaaagaatgatgtattctgatgagatatgatttacatacttagaaaacatgatttgtatagatatgtggcacataatagaaagggttgaggaaaaggacaccacgccgtactacacagcacaacctggagcatcttgctctgtgaggtgggtccagatagactctttagcaatggaagaggacaagtgcaaagtgttgtgctttataaaactggaatcacaaagtctttcatacttacattcggttggaaataagaccaggcatgaatgctattaggtaaatacataagttcctcactgatcctcttcctttgagggatgaggttgacaacagcctgtattatgatgrcatgactcacctacaactagattctgtcatgagagatgacaagggagttttgctttatgcgaggtgaaaaaaattttttctcctactagggagatgggcaaacattagaacattctggtagtaaaagggcattgatagtttcctttctatatatttttt

SEQ ID NO: 114337 - DNA, 579 bp, Homo sapiens
tccttttgtttttcttttgcttctttatcattgtaaagaatgatgtattctgatgagatatgatttacatacttagaaaacatgatttgtatagatatgtggcacataatagaaagggttgaggaaaaggacaccacgccgtactacacagcacaacctggagcatcttgctctgtgaggtgggtccagatagactctttagcaatggaagaggacaagtgcaaagtgttgtgctttataaaactggaatcacaaagtctttcatacttacattcggttggaaataagaccaggcatgaatgctattaggtaaatacataagttcctcactgatcctcttcctttgagggatgaggttgacaacagcctgtattatgatggcatgrctcacctacaactagattctgtcatgagagatgacaagggagttttgctttatgcgaggtgaaaaaaattttttctcctactagggagatgggcaaacattagaacattctggtagtaaaagggcattgatagtttcctttctatatattttttcacatcagataatattgcccggcagcctgccatacctcc

SEQ ID NO: 114338 - DNA, 538 bp, Homo sapiens
acacaagtgtgcacaatttttttatgaaggtagagtcttactatgtttcccaagctggtctcaaacttctgggctcctcaagtgatcctcctgcctcatcctcccaagtagttwggattagaggcatgcatcactgtgcattcttatgattttaatattctgtacatttattattgatttaaaatgcattttacctttttctttaatagatgttggaatttctgatgaatctgcagtcaggtaagatttcatagatttaaaaaattatgttaactaagaaaatatagatggaagaaactaatatctgttgagtgttgtattctgggctagacatcctaatatgttctatgcatttatcatctcataaagccatcataacatctgtgttcctataacctactgttaaataaacaactatggattagagctgattaattgcctcatgatcccatagttaacaaagtagctggcctacagtttgaccatcagcctgcctgccttccaaatcctttctcttgctcctcagcatagattgata

SEQ ID NO: 114339 - DNA, 538 bp, Homo sapiens
acacaagtgtgcacaatttttttatgaaggtagagtcttactatgtttcccaagctggtctcaaacttctgggctcctcaagtgatcctcctgcctcatcctcccaagtagtttggattagaggcatgcatcactgtgcattcttatgattttaatattctgtacatttattattgatttaaaatgcattttacctttttctttaatagatgttggaattyctgatgaatctgcagtcaggtaagatttcatagatttaaaaaattatgttaactaagaaaatatagatggaagaaactaatatctgttgagtgttgtattctgggctagacatcctaatatgttctatgcatttatcatctcataaagccatcataacatctgtgttcctataacctactgttaaataaacaactatggattagagctgattaattgcctcatgatcccatagttaacaaagtagctggcctacagtttgaccatcagcctgcctgccttccaaatcctttctcttgctcctcagcatagattgata

SEQ ID NO: 114340 - DNA, 538 bp, Homo sapiens
acacaagtgtgcacaatttttttatgaaggtagagtcttactatgtttcccaagctggtctcaaacttctgggctcctcaagtgatcctcctgcctcatcctcccaagtagtttggattagaggcatgcatcactgtgcattcttatgattttaatattctgtacatttattattgatttaaaatgcattttacctttttctttaatagatgttggaatttctgatgaatctgcagtcaggtaagatttcatagatttaaaaaattatgttaactaagaaaatatagatggaagaaactaatatctgttgagtgttgtattctgggctagacatcctaatatgttctatgcatttatcatctcataaagccatcataacatctgtgttcctataacctactgttaaataaacaactatggattagagctgattaattgcctcatgatcccatagttaacaaagtagctggcctacagtttgaccatcagcctrcctgccttccaaatcctttctcttgctcctcagcatagattgata

SEQ ID NO: 114341 - DNA, 478 bp, Homo sapiens
attaatttgattaacttctaaattaatgagagtttaaataccttgaactctcatttaagtttattgttagaatgtggttagtcctaataaatttgacgatttcagtggtaaccagtatcttatttttaccttcaaaggctctagggcagatctgacttagctttggccataggactgtaagttttaccaaagcaagtttaggcaagtcttagagacaaattatttgacttcmcagtttggttttccatttaggcaagtatttctgcttacttccataatacattttttagtcttgttgctttttccatgacttttatataatcttgtcctcattttttaaaactttcttctctgtttttcttggtgtttcttttgttctattattttttcaaactctgctgcctatgtattccaagtttttctatagacagaatcaagaggacatagaattacagaattttaaggaatcttggaatga

SEQ ID NO: 114342 - DNA, 588 bp, Homo sapiens
tagatatctgtgcagcccttggatcaaagtataggtctgaatcagatcaatcagattcattaatttgattaacttctaaattaatgagagtttaaataccttgaactctcatttaagtttattgttagaatgtggttagtcctaataaatttgacgatttcagtggtaaccagtatcttatttttaccttcaaaggctctagggcagatctgacttagctttggccataggactgtaagttttaccaaagcaagtttaggcaagtcttagagacaaattatttgacttcacagtttggttttccatttaggcaagtatttctgcttacttccataatacattttttagtcttgttgctttttccatgacttttatataatcttgtcytcattttttaaaactttcttctctgtttttcttggtgtttcttttgttctattattttttcaaactctgctgcctatgtattccaagtttttctatagacagaatcaagaggacatagaattacagaattttaaggaatcttggaatgaattaaaataccttctagtatttttctctgcgttgaacattctggtcaagtga

SEQ ID NO: 114343 - DNA, 445 bp, Homo sapiens
gtactaaggggatggaaattgctgaactacatagatgtgtggcacaggrcaggtgtctcctcacctctgcctcttttcacagttcactgatgtccttcccatgtccatgtgggctgggtcaggggcatgattagctggaaaatcagtcatggagttcagttgggtagttggtagtgtgtatagctggtggcaggtgatggagactccagttagcttgtttttcaggagcagggatatagagagctcctactcctggtcatttgaggccattctttcaggaatctgtgctttcatacactgaagatttaaagattggagacttctgtggaaccctgcagaagtagaatctggaagtgggtgtccataggaagaaatatacttagatagtacttagggaaatagaggtacaactatcatgactctgtttcttttctggcagtctctc

SEQ ID NO: 114344 - DNA, 445 bp, Homo sapiens
gtactaaggggatggaaattgctgaactacatagatgtgtggcacagggcaggtgtctcctcacctctgcctcttttcacagttcactgatgtccttcccatgtccatgtgggctgggtcaggggcatgattagctggmaaatcagtcatggagttcagttgggtagttggtagtgtgtatagctggtggcaggtgatggagactccagttagcttgtttttcaggagcagggatatagagagctcctactcctggtcatttgaggccattctttcaggaatctgtgctttcatacactgaagatttaaagattggagacttctgtggaaccctgcagaagtagaatctggaagtgggtgtccataggaagaaatatacttagatagtacttagggaaatagaggtacaactatcatgactctgtttcttttctggcagtctctc

SEQ ID NO: 114345 - DNA, 445 bp, Homo sapiens
gtactaaggggatggaaattgctgaactacatagatgtgtggcacagggcaggtgtctcctcacctctgcctcttttcacagttcactgatgtccttcccatgtccatgtgggctgggtcaggggcatgattagctggaaaatcagtcatggagttcagttgggtagttggtagtgtgtatagctggtggcaggtgatggagactccagttagcttgtttttcaggagcagggatatagagagctcctactcctggtcatttgaggccattctttcaggaatctgtgctttyatacactgaagatttaaagattggagacttctgtggaaccctgcagaagtagaatctggaagtgggtgtccataggaagaaatatacttagatagtacttagggaaatagaggtacaactatcatgactctgtttcttttctggcagtctctc

SEQ ID NO: 114346 - DNA, 445 bp, Homo sapiens
gtactaaggggatggaaattgctgaactacatagatgtgtggcacagggcaggtgtctcctcacctctgcctcttttcacagttcactgatgtccttcccatgtccatgtgggctgggtcaggggcatgattagctggaaaatcagtcatggagttcagttgggtagttggtagtgtgtatagctggtggcaggtgatggagactccagttagcttgtttttcaggagcagggatatagagagctcctactcctggtcatttgaggccattctttcaggaatctgtgctttcatacactgaagatttraagattggagacttctgtggaaccctgcagaagtagaatctggaagtgggtgtccataggaagaaatatacttagatagtacttagggaaatagaggtacaactatcatgactctgtttcttttctggcagtctctc

SEQ ID NO: 114347 - DNA, 444 bp, Homo sapiens
ctccacttcatagtactaattttctgcatgatcataaagaaaagaggtttaattggctcacggtccagcaggctgtaaaggaagcacagtggcttctgcttctgggaggatcagatcaggaagccttccaatcataccagaaggccaaggggcaatgagatgtttcaaatggcaggggtagaagaaagactgagagaggaaagaggtgccaccccctgttatataaccagatctcatgagaacacactatcatgaagacagcatcaagaagatgttgcctaaccattggtgaaggatytgcctcccacccccacctcccactgtttccaggcagaagcctgctgcagatgaagctttcttgggaaacctctactagggcagtgcagaaggaaaatatggacttggagcccccatgcagggggccaccaccctccagaccccaga

SEQ ID NO: 114348 - DNA, 444 bp, Homo sapiens
ctccacttcatagtactaattttctgcatgatcataaagaaaagaggtttaattggctcacggtccagcaggctgtaaaggaagcacagtggcttctgcttctgggaggatcagatcaggaagccttccaatcataccagaaggccaaggggcaatgagatgtttcaaatggcaggggtagaagaaagactgagagaggaaagaggtgccaccccctgttatataaccagatctcatgagaacacactatcatgaagacagcatcaagaagatgttgcctaaccattggtgaaggatttgyctcccacccccacctcccactgtttccaggcagaagcctgctgcagatgaagctttcttgggaaacctctactagggcagtgcagaaggaaaatatggacttggagcccccatgcagggggccaccaccctccagaccccaga

SEQ ID NO: 114349 - DNA, 444 bp, Homo sapiens
ctccacttcatagtactaattttctgcatgatcataaagaaaagaggtttaattggctcacggtccagcaggctgtaaaggaagcacagtggcttctgcttctgggaggatcagatcaggaagccttccaatcataccagaaggccaaggggcaatgagatgtttcaaatggcaggggtagaagaaagactgagagaggaaagaggtgccaccccctgttatataaccagatctcatgagaacacactatcatgaagacagcatcaagaagatgttgcctaaccattggtgaaggatttgcctcccacccccacctcccactgtttccaggcagaagcctgctgcagatgaagckttcttgggaaacctctactagggcagtgcagaaggaaaatatggacttggagcccccatgcagggggccaccaccctccagaccccaga

SEQ ID NO: 114350 - DNA, 583 bp, Homo sapiens
ataatatttttaattgaaattactggcaacttttgaaaaaatgtaatgaaataatgtgctttgctattggttaaaatrtttttgggcagggtcagtggcttacacctgtaatcccagcactttggtaggctgaggtgggcagatcacttgaggtcaggagtttgagaccagcctggcaaacagtgtgaaaccccatctctactaaaaatacaaaaattatctgagtgtggtggcatgtgcctgtaatcccagctactagggaggctgaggtgtgagaattgcttgaactaggcaagcagaggttgcagtgagccaagatcatgccattgcactccagcctgggcaacagagtaaggttctgtcaaaaataaaaaagaaagaaagaaaagaaaaaaaaagtttttagcttcaagtaacagaatagtctactaattgaagaaaaaaacaaggagcaactttgaccaaatcgcacaacaaatagatggtatcaatgcttagttaattcaacatgatccacttctttgtgattctcttatctttctacctatgttttcaagatggctatggcattcccagccttaca

SEQ ID NO: 114351 - DNA, 583 bp, Homo sapiens
ataatatttttaattgaaattactggcaacttttgaaaaaatgtaatgaaataatgtgctttgctattggttaaaatatttttgggcagggtcagtggcttacacctgtaatcccagcactttggtaggctgaggtgggcagatcacttgaggtcaggagtttgagaccagcctggcaaacagkgtgaaaccccatctctactaaaaatacaaaaattatctgagtgtggtggcatgtgcctgtaatcccagctactagggaggctgaggtgtgagaattgcttgaactaggcaagcagaggttgcagtgagccaagatcatgccattgcactccagcctgggcaacagagtaaggttctgtcaaaaataaaaaagaaagaaagaaaagaaaaaaaaagtttttagcttcaagtaacagaatagtctactaattgaagaaaaaaacaaggagcaactttgaccaaatcgcacaacaaatagatggtatcaatgcttagttaattcaacatgatccacttctttgtgattctcttatctttctacctatgttttcaagatggctatggcattcccagccttaca

SEQ ID NO: 114352 - DNA, 583 bp, Homo sapiens
ataatatttttaattgaaattactggcaacttttgaaaaaatgtaatgaaataatgtgctttgctattggttaaaatatttttgggcagggtcagtggcttacacctgtaatcccagcactttggtaggctgaggtgggcagatcacttgaggtcaggagtttgagaccagcctggcaaacagtgtgaaaccccatctctactaaaaatacaaaaattatctgagtgtggtggcatgtgcctgtaatcccagctactagggaggctgaggtgtgagaattgcttgaactaggcaagcagaggttgcagtgagccaagwtcatgccattgcactccagcctgggcaacagagtaaggttctgtcaaaaataaaaaagaaagaaagaaaagaaaaaaaaagtttttagcttcaagtaacagaatagtctactaattgaagaaaaaaacaaggagcaactttgaccaaatcgcacaacaaatagatggtatcaatgcttagttaattcaacatgatccacttctttgtgattctcttatctttctacctatgttttcaagatggctatggcattcccagccttaca

SEQ ID NO: 114353 - DNA, 583 bp, Homo sapiens
ataatatttttaattgaaattactggcaacttttgaaaaaatgtaatgaaataatgtgctttgctattggttaaaatatttttgggcagggtcagtggcttacacctgtaatcccagcactttggtaggctgaggtgggcagatcacttgaggtcaggagtttgagaccagcctggcaaacagtgtgaaaccccatctctactaaaaatacaaaaattatctgagtgtggtggcatgtgcctgtaatcccagctactagggaggctgaggtgtgagaattgcttgaactaggcaagcagaggttgcagtgagccaagatcatgccattgcactccagcctgggcaacagagtaaggttctgtcaaaaataaaaaagaaagaaagaaaagaaaaaaaaagtttttagcttcaagtaacagaatagtcwactaattgaagaaaaaaacaaggagcaactttgaccaaatcgcacaacaaatagatggtatcaatgcttagttaattcaacatgatccacttctttgtgattctcttatctttctacctatgttttcaagatggctatggcattcccagccttaca

SEQ ID NO: 114354 - DNA, 601 bp, Homo sapiens
aactgctatgtatatgagaaaagacggtagattttttcatttagatactcatttcagagtctcaataggaaaaatagaacacacacaaactaagataatttaacatgggtttatttccaaagagactacttacgaaaatgtcaggggagaagggtgaaggaatcacagaaatcacaccccacaataactctgggttagtagcagcaggcaaagttctggggagtaractgccctgatcacacaaggaaacactaattttcttatgaaaaaattggtcaaggagacctagcagagagggagttaggcaataacccccaatctcatttcctccttccctttaatctcatgaacatgcatagaaggcaatgagcaagggaaccgatggagatattcaatatggaccattccacttggacaaaagccagtaaataggggagtataacaggggacaagggccaaacagaaagtatctattacatttaccaatgcagatcaatcatgtcaacaatagaaatggcagttttggcatttggttattcaatgaaactatatttgtagctttttatttacaatgtttcaaggtatgggcgaagatatgaaa

SEQ ID NO: 114355 - DNA, 601 bp, Homo sapiens
aactgctatgtatatgagaaaagacggtagattttttcatttagatactcatttcagagtctcaataggaaaaatagaacacacacaaactaagataatttaacatgggtttatttccaaagagactacttacgaaaatgtcaggggagaagggtgaaggaatcacagaaatcacaccccacaataactctgggttagtagcagcaggcaaagttctggggagtagactgccctgatcacacaaggaaacactaattttcttatgaaaaaattggtcaaggagacctagcagagagggagttaggcaataacccccaatcycatttcctccttccctttaatctcatgaacatgcatagaaggcaatgagcaagggaaccgatggagatattcaatatggaccattccacttggacaaaagccagtaaataggggagtataacaggggacaagggccaaacagaaagtatctattacatttaccaatgcagatcaatcatgtcaacaatagaaatggcagttttggcatttggttattcaatgaaactatatttgtagctttttatttacaatgtttcaaggtatgggcgaagatatgaaa

SEQ ID NO: 114356 - DNA, 606 bp, Homo sapiens
tcttaaaataatcccacaattacccattttgggtcacctttgagggtcttatccttaatatcagagatctgttctatacatttgagtcttagaaataattactagcttctctctgaatttaactgaagttccttacttttattcagcctgttacccaaattacataatgtattgaaagctaaaaactgtccaaatttctgattacctttagttaaaaatgggaatatgactttttctttttctaacttggcaaagattatgtttttttcatgaagaagtactgacatatttaaacactcaggatctgagaatttgaaatacatgaaacttagcaagtggtctttaagtagttttcatttctaaattatagtacatagcattgaatgctacagaagaaaagacaatgagggattactcataaacattgcctttatgatatccttccaaagaaaaccaagtgtccctgtgcttggactcataaagcagaaatgcttamcttgcttttatgtcactaacaaacaattttgcctagtcattgaattctaatgcatttaagccatcttgagagtagagcccctagggaaaactacaaatggaaaattcatt

SEQ ID NO: 114357 - DNA, 606 bp, Homo sapiens
tcttaaaataatcccacaattacccattttgggtcacctttgagggtcttatccttaatatcagagatctgttctatacatttgagtcttagaaataattactagcttctctctgaatttaactgaagttccttacttttattcagcctgttacccaaattacataatgtattgaaagctaaaaactgtccaaatttctgattacctttagttaaaaatgggaatatgactttttctttttctaacttggcaaagattatgtttttttcatgaagaagtactgacatatttaaacactcaggatctgagaatttgaaatacatgaaacttagcaagtggtctttaagtagttttcatttctaaattatagtacatagcattgaatgctacagaagaaaagacaatgagggattactcataaacattgcctttatgatatccttccaaagaaaaccaagtgtccctgtgcttggactcataaagcagaaatgcttaccttgcttttatgtcactaacaaacaattttgcctagtcattgaattctaatrcatttaagccatcttgagagtagagcccctagggaaaactacaaatggaaaattcatt

SEQ ID NO: 114358 - DNA, 310 bp, Homo sapiens
gtccctgtgcttggactcataaagcagaaatgcttaccttgcttttatgtcactaacaaacaattttgcctagtcattgaattctaatgcatttaagccatcttgagagtagagcccctagggaaaactacaaatggaaaattcattgatttttgattttgctttcctatggattaaatttaayactttcttgtaaatctctccctttgcagatcatatgtgataaatagttatccaactttctagatatccacccagagctgcttccatatgaagaggtggaaacggattctgtgcatgatactggtta

SEQ ID NO: 114359 - DNA, 555 bp, Homo sapiens
agactgcacttatgcaccataaattcatcatgttccaaagcttaaacagttcccaagaagtctgtgcatctcttcttcactggttctacastttcttaagttttgccatcctcatggaactgtcagccagcacactgaaacgattctcagaaaacaaaagcatcatcaagttctcagggtttcggtagagattgaaggccaacagacctaagactcattcagaaatacttagctgagcaataacccttcataagcagtcacttgacaggtgacattttaaatctcctctaatttactgtgtcattggcttacacttgttctcaggaaaagttccaaatttttcaccatgaaataaaaacacccatgtcaatgtaattcttgccaagttactcagccttgtttctcaccacttactgcactctgccctttgctctagcaccaaactggatggagtggaactctgcagggctcttcctcacctcaggctctttgcctttgcctctttcctctatctgggaagctttttcttgtccttcaggtatcaacctatgttat

SEQ ID NO: 114360 - DNA, 555 bp, Homo sapiens
agactgcacttatgcaccataaattcatcatgttccaaagcttaaacagttcccaagaagtctgtgcatctcttcttcactggttctacactttcttaagttttgccatcctcatggaactgtcagccagcacactgaaacgattctcagaaaacaaaagcatcatcaagttctcagggtttcggtagagattgaaggccaacagacctaagactcattcagaaatacttagctgagcaataacccttcataagcagtcacttgacaggtgacattttaaatctcctctaatttactgtgtcattrgcttacacttgttctcaggaaaagttccaaatttttcaccatgaaataaaaacacccatgtcaatgtaattcttgccaagttactcagccttgtttctcaccacttactgcactctgccctttgctctagcaccaaactggatggagtggaactctgcagggctcttcctcacctcaggctctttgcctttgcctctttcctctatctgggaagctttttcttgtccttcaggtatcaacctatgttat

SEQ ID NO: 114361 - DNA, 619 bp, Homo sapiens
  misc_feature (1)...(619): n = A,T,C or G
agtgggacctgctcttttctcttcctcctggcttgggaaaagtcactatcaggtgggtggttttggcctctgggcagctactgagggtaatccctgaacactcaccagctgcctgttatgtgctgacagtcatctcattcatcctcgcagcaattccattctgcatcttttctgatcacctccgtgaccacacaggacaaccccatcagggccctgtcaccaggcccagtctagctccatgataaccaagacacaggtccagagacaatcgtcctacattgtgcctgcatctgaccccccttggtaggtagtgaccagcacaacatggaagaagccagggcagcatgcagccagctgctctgcagccccaaatggctcctgggccttgsaagtcattcataaagggaaagctggtcactttgaggtctctgaagggaagggtgaacgtgcatcccaacagccctggcagccagcagcatgccatatatcttctcacccaacctgtgtgacagaggtcccctcctggggcacaagtcccatacntaaagcatcctgtcccagtcggacctcatcntgagccctgggaggggaggggtaccatgggcccccctgcagcagc

SEQ ID NO: 114362 - DNA, 619 bp, Homo sapiens
  misc_feature (1)...(619): n = A,T,C or G
agtgggacctgctcttttctcttcctcctggcttgggaaaagtcactatcaggtgggtggttttggcctctgggcagctactgagggtaatccctgaacactcaccagctgcctgttatgtgctgacagtcatctcattcatcctcgcagcaattccattctgcatcttttctgatcacctccgtgaccacacaggacaaccccatcagggccctgtcaccaggcccagtctagctccatgataaccaagacacaggtccagagacaatcgtcctacattgtgcctgcatctgaccccccttggtaggtagtgaccagcacaacatggaagaagccagggcagcatgcagccagctgctctgcagccccaaatggctcctgggccttgcaagtcattcataaagggaaagctggtcactttgaggtctctgaagggaagggtgaacgtgcatcccaacagccctggcagccagcagcatgccatatatcttctcacccaacctgtgtgacagaggtcccctcctggggcacaagtcccatacntaaagcatcctgtcccagtcggacctcatcntgagccctgggaggggaggggyaccatgggcccccctgcagcagc

SEQ ID NO: 114363 - DNA, 551 bp, Homo sapiens
aaaattttgttcacagacaacaggatgtaatgggtaaaaatcctgaaattcccaaaatattggtaaaataatgaaattcaacaaagtttcaggatacagtaacacacacaagtcagttgcatttccataaactaacaatgaacaatctgcaaataaaattttaaaaagagaggccaggtgcagtggctcacacttataatctcagcactttgggaggccaaggcgggtagaccacctgaggtcaggagttcgtgaccagctgggccaaacccatctctaaaataaatagtaaaactctgtctctattaaaaatacaaaaattagctggacgtagtggcagacacctgtagtcccagctacatgggaggctgargcaggagaattgcttgaacttggaaggtggaggttgcagtcagctgagattgtgccactgcgctccagcttaggaaactgagacgccatctcaaagaaaagaaagaaaggaaagaaagagagagaaagaaaaaaaagaaagataaaacaaaagaaaagaaatttttaaaaagaatgac

SEQ ID NO: 114364 - DNA, 551 bp, Homo sapiens
aaaattttgttcacagacaacaggatgtaatgggtaaaaatcctgaaattcccaaaatattggtaaaataatgaaattcaacaaagtttcaggatacagtaacacacacaagtcagttgcatttccataaactaacaatgaacaatctgcaaataaaattttaaaaagagaggccaggtgcagtggctcacacttataatctcagcactttgggaggccaaggcgggtagaccacctgaggtcaggagttcgtgaccagctgggccaaacccatctctaaaataaatagtaaaactctgtctctattaaaaatacaaaaattagctggacgtagtggcagacacctgtagtcccagctacatgggaggctgaagcaggagaattgcttgaacttggaaggtggaggttgcagtcagctgagattgtgccactgcgctccagcttaggaaactgagacgccatctcaaagaaaagaaagaaaggaaagaaagagagagaaagaaaaaaawgaaagataaaacaaaagaaaagaaatttttaaaaagaatgac

SEQ ID NO: 114365 - DNA, 538 bp, Homo sapiens
agttaattaaaccttggcatgaccagaagatcagagtttcctaaaggagtggaaattyattgatttgaagaggatttattgattactgatttgaagaggaagaaaaaccatgaatggtctgaagcaaaagcctagtgtctgaagaagtcagtagggtgaaaacaagagctggccagaatatccacagatggtgacaagttggcaaagcctttactagactactcgtgaggctaactagaggccaaggagccaacactgctcctgtccttacagagagaccctacacaggattcccagatatacatggaaggacaacatcttatcaggtcctctctgtgcagatgtggttatcattccaaataatgagctccagccccaagactgttccatcctcaattgctttgagtgggcaatgtaggctctccacacacgagctacgtgtaggttccttgggtacccagatgggagccatgaaacacaaaccctccatggtcaggtctgtatttgtttcctgcctttttcccagcaatccccaggc

SEQ ID NO: 114366 - DNA, 538 bp, Homo sapiens
agttaattaaaccttggcatgaccagaagatcagagtttcctaaaggagtggaaatttattgatttgaagaggatttattgattactgatttgaagaggaagaaaaaccatgaatggtctgaagcaaaagcctagtgtctgaagaagtcagtagggtgaaaacaagagctggccagaatatccacagatggtgacaagttggcaaagcctttactagactactcgtgaggctaactagaggccaaggagccaacactgctcctgtccttacagagagaccctacacaggattcccagatatacatggaaggacaacatcttatcaggtcctctctgtgcagatgtggttatcattccaaataatgagctccagcmccaagactgttccatcctcaattgctttgagtgggcaatgtaggctctccacacacgagctacgtgtaggttccttgggtacccagatgggagccatgaaacacaaaccctccatggtcaggtctgtatttgtttcctgcctttttcccagcaatccccaggc

SEQ ID NO: 114367 - DNA, 561 bp, Homo sapiens
gccaacactgctcctgtccttacagagagaccctacacaggattcccagatatacatggaaggacaacatcttatcaggtcctctctgtgcagatgtggttatcattccaaataatgagctccagccccaagactgttccatcctcaattgctttgagtgggcaatgtaggctctccacacacgagctacrtgtaggttccttgggtacccagatgggagccatgaaacacaaaccctccatggtcaggtctgtatttgtttcctgcctttttcccagcaatccccaggccccagcagtggtggtctacctctgctgattctcattcagaatctaaacttagaaacaattataacctagaccccaattctacctgaaagtaacagaataacataatctataccctgcagcatgactgtttgcccaacgtaatgaggatgaactgagagataatgaaccatcatgaccctggcccaagtaatgagaatgaactgtgagataaatgaatgatcatgacaaaaaccccgctacaacccaacaacaaaataaaatgattaaaaaa

SEQ ID NO: 114368 - DNA, 586 bp, Homo sapiens
catcatcctctcccccactagatattataaacaatatcacaagggggtgtacacttcctgcgataaaaggagaaatataattctttcccccagagatattatgaacaatatcgcagggaattgttctcccatgctatatggggagtaacatcttcatcttccccctggatattacgaaaaataatgcaggggaatgtaaatcccctgcgatatggggagtaaaatcattctctctggccaggagcggtggctcacacctgtaatcccagcactttgggaagccgaggcgggcggatcacgaggtcaggagatcgagaccatcctggctaacatggtgaaaccccgtctctactaaaaatacaaaaaattagccgggcgtggtggcgggcgcctgtagtcccagctactatggaggctgaagcacgagaatggtgtgaacctgggaggcggcgcttgcagtgtgccaagatcacgcyactgcactccaacccgggcgacagagcaaggctctgtctcaaaaaaaaaaatcaagtcattctctccctccctggatattatggacaatatgacagggcgagtgtacaat

SEQ ID NO: 114369 - DNA, 586 bp, Homo sapiens
catcatcctctcccccactagatattataaacaatatcacaagggggtgtacacttcctgcgataaaaggagaaatataattctttcccccagagatattatgaacaatatcgcagggaattgttctcccatgctatatggggagtaacatcttcatcttccccctggatattacgaaaaataatgcaggggaatgtaaatcccctgcgatatggggagtaaaatcattctctctggccaggagcggtggctcacacctgtaatcccagcactttgggaagccgaggcgggcggatcacgaggtcaggagatcgagaccatcctggctaacatggtgaaaccccgtctctactaaaaatacaaaaaattagccgggcgtggtggcgggcgcctgtagtcccagctactatggaggctgaagcacgagaatggtgtgaacctgggaggcggcgcttgcagtgtgccaagatcacgccactgcactccaacccgggcgacagagcaaggctctgtctmaaaaaaaaaaatcaagtcattctctccctccctggatattatggacaatatgacagggcgagtgtacaat

SEQ ID NO: 114370 - DNA, 578 bp, Homo sapiens
aagaactgtcagtgaggtcataataggaactgttacagtgaactaaatatggcctgggaaggactctgtacttctagatttgagtccctgtggacaaactgcaacctaacttaataggtagaaagactgaaaacctaacttaggagtatgtgcctaaaacagtagctgagtcstggccaatcccaacagccaaacttctgccactcacacactgctgagtgttcagctgtgttcaaataaggcaaatgctgagcactgtaaccagtccagttgtttctggacctcactgctgagaactgtaatggacccagttgcttctagacctcactcctcacttcagatttttgtacatcatgttccctttattgtctataaatcttccaccatgtgtctgtgctggagtctcaccaaatctgctgtgattctgggggctgcctgattcgtgaatcattcattgctcaattaagttcctttaaatttaattcagctgaagattttcttttaatagatggtgtcagaagtgggatctgtgggagcaggactgctagggcctctggagctatactgtggtgagcagt

SEQ ID NO: 114371 - DNA, 482 bp, Homo sapiens
tcaccttctacttgtccacatacctcatttttcctggactcaggacaagaactcgggacctgccaactagcagggctgaaagaggtgtaacataaacagggctgaaacgcgctccttgcttgccaaattgcaggcaagaagaagagaagagagaaggagagaagagctgtgtcccttcagggaacacagacctaggagctccyccagccagggctgtgacaccttctttggggctttgcaggtcctgcatctccaagcttctgggtgccactgcattccctgatacccacagtggaagctgtttgcagtcggcctggtccagctgcagcctcacagggagctggcatctgtgcctggagctgcccaccccactgcagctggcatgcttggctgtgtgcagtggccagatcccatgctcgcttgctcacacacccctcactgctctgtacccagctcgcccttggcaggtgtgggatccagac

SEQ ID NO: 114372 - DNA, 482 bp, Homo sapiens
tcaccttctacttgtccacatacctcatttttcctggactcaggacaagaactcgggacctgccaactagcagggctgaaagaggtgtaacataaacagggctgaaacgcgctccttgcttgccaaattgcaggcaagaagaagagaagagagaaggagagaagagctgtgtcccttcagggaacacagacctaggagctcccccarccagggctgtgacaccttctttggggctttgcaggtcctgcatctccaagcttctgggtgccactgcattccctgatacccacagtggaagctgtttgcagtcggcctggtccagctgcagcctcacagggagctggcatctgtgcctggagctgcccaccccactgcagctggcatgcttggctgtgtgcagtggccagatcccatgctcgcttgctcacacacccctcactgctctgtacccagctcgcccttggcaggtgtgggatccagac

SEQ ID NO: 114373 - DNA, 482 bp, Homo sapiens
tcaccttctacttgtccacatacctcatttttcctggactcaggacaagaactcgggacctgccaactagcagggctgaaagaggtgtaacataaacagggctgaaacgcgctccttgcttgccaaattgcaggcaagaagaagagaagagagaaggagagaagagctgtgtcccttcagggaacacagacctaggagctcccccagccagggctgtgacaccttctttggggctytgcaggtcctgcatctccaagcttctgggtgccactgcattccctgatacccacagtggaagctgtttgcagtcggcctggtccagctgcagcctcacagggagctggcatctgtgcctggagctgcccaccccactgcagctggcatgcttggctgtgtgcagtggccagatcccatgctcgcttgctcacacacccctcactgctctgtacccagctcgcccttggcaggtgtgggatccagac

SEQ ID NO: 114374 - DNA, 482 bp, Homo sapiens
tcaccttctacttgtccacatacctcatttttcctggactcaggacaagaactcgggacctgccaactagcagggctgaaagaggtgtaacataaacagggctgaaacgcgctccttgcttgccaaattgcaggcaagaagaagagaagagagaaggagagaagagctgtgtcccttcagggaacacagacctaggagctcccccagccagggctgtgacaccttctttggggctttgcaggtcctgcatctccaagcttctgggtgccactgcattccctgatacccacagtggaagctgtttgcagtcggcctggtccagctgcagcctcacagggagctggcayctgtgcctggagctgcccaccccactgcagctggcatgcttggctgtgtgcagtggccagatcccatgctcgcttgctcacacacccctcactgctctgtacccagctcgcccttggcaggtgtgggatccagac

SEQ ID NO: 114375 - DNA, 591 bp, Homo sapiens
cttaatggaggcatgtggttaattggaattttcagtaccaaaagtcttcttcttactagtttatcagggtaccctataatagtatccataactcattgcccacttgtctgttttgatttcttttttaaaaatacaattttaaacttagaggttttgtacctcaagtcacatatgtggcacatttataaaataatcatgcctttgcatatttttcctttgatatcttagctgtatatacaagccacttatgttttttaattgccacaaatattgcactgaaatagagcactagttgcaaaaatgcctggtataacatttcttcttgttcttgaaagtaattttaataccccatgtttaagatattcctagacaactataagtaactataattatttctgctaggtagaagcatctttgtggtcaacatttgtgaagtgccttgtaaataaaaatatgcttgagtagaaatagtattttgcaaatatagccctaaatagagctactgattttaccaaaaattaargactccaaactctgtctttgtctttcaaatttggtttataggaacatctcattacaatgagcaaaaag

SEQ ID NO: 114376 - DNA, 478 bp, Homo sapiens
gttcgcgtgtccaaaatctgtggtagttgctgtctgatttttatcactgatggtgatacagatatttatcatcaactcacaacttcccaaatctttgaaaagtcttactattgatggttcaactagtagaaacatgatgtaaaatatctgaaaataaagtttttatttattagaatgtaaataataatacaaattgtaataaggtgtaaaagttctttcttcactgaagcagtaccatgttgtcctctaccccacaaatgcagtactcccccrtggtttaatgtattttaaaagtcttgtaattgctattaactcagaaaagtttacttaacttgttgtaagcttttggtatttactacagtttactttcaatcactcaaccatgtctgttatatatgttgttttccatgagaaatttgtttattagtaattaagattcttcaggtataagaaaatatttcaataactaagtttgtgc

SEQ ID NO: 114377 - DNA, 599 bp, Homo sapiens
gtactttatttccagtattccattaaatgtacctgctctcaatgtctgtacatactttctttgtactgctcctttmacagcaggatcttccacttcagtgctaggctgaatgggttttaaaagataacgattcataaatcatatatattttatacaacatggagttagtgattcaaaaatatacataattaattaccttcaaggaaggatgttttgcaggaggccctacaaagcaaaggggatatgtcatcaattatatgtaagtatgacaaggccaaccaaacattcatgcagtgttactgtcgagctgaattctcaggcctggctataaaaataattacttaaggttttgagggttcttcttggcttcttcttttcattgcctaggacagcaacatgacagaaacacaatgaggaaaataggaatataggattcccaaaatgcacagtttatatttcagtagtgagattatgtttcaaatgcctatacttaaaatagaaaagcattgatataaccgtgaacatgtggactgatgaggagaaaagggaccattaaacagaggggcaaatcaaacctgagagaatcaatgtcaaagctg

SEQ ID NO: 114378 - DNA, 599 bp, Homo sapiens
gtactttatttccagtattccattaaatgtacctgctctcaatgtctgtacatactttctttgtactgctcctttcacagcaggatcttccacttcagtgctaggctgaatgggttttaaaagataacgattcataaatcatatatattttatacaacatggagttagtgattcaaaaatatacataattaattaccttcaaggaaggatgttttgcaggaggccctacaaagmaaaggggatatgtcatcaattatatgtaagtatgacaaggccaaccaaacattcatgcagtgttactgtcgagctgaattctcaggcctggctataaaaataattacttaaggttttgagggttcttcttggcttcttcttttcattgcctaggacagcaacatgacagaaacacaatgaggaaaataggaatataggattcccaaaatgcacagtttatatttcagtagtgagattatgtttcaaatgcctatacttaaaatagaaaagcattgatataaccgtgaacatgtggactgatgaggagaaaagggaccattaaacagaggggcaaatcaaacctgagagaatcaatgtcaaagctg

SEQ ID NO: 114379 - DNA, 599 bp, Homo sapiens
gtactttatttccagtattccattaaatgtacctgctctcaatgtctgtacatactttctttgtactgctcctttcacagcaggatcttccacttcagtgctaggctgaatgggttttaaaagataacgattcataaatcatatatattttatacaacatggagttagtgattcaaaaatatacataattaattaccttcaaggaaggatgttttgcaggaggccctacaaagcaaaggggatatgtcatcaattatatgtaagtatgacaaggccaaccaaacattcatgcagtgttactgtcgagctgaattctcaggcctggctataaaaataattacttaaggttttgagggttcttcttggcttcttcttttcattgcctaggacagcaacatgacagaaacacaatgagkaaaataggaatataggattcccaaaatgcacagtttatatttcagtagtgagattatgtttcaaatgcctatacttaaaatagaaaagcattgatataaccgtgaacatgtggactgatgaggagaaaagggaccattaaacagaggggcaaatcaaacctgagagaatcaatgtcaaagctg

SEQ ID NO: 114380 - DNA, 551 bp, Homo sapiens
gatctggggggtgtattcaaacagggaactgccaagcctctaaatcccacttttgtctagcttgctgtattcctgcctgaatagaackaagaacagtcgctcaaggcgctgctcagtcaccagggcaactacttttcacccagtgtcctccagaaaagaaagatctggagggtcgttttcttcaaaatagtaatgagggtgtgcagaaggatagggatgaacctctccctccttttctgctttagctttaggtgacaaataaacctggtctgtaacctctactgttactttgttatactctccttcctcctcatcatcagtgtgaaaaagttccaaggtagaacgaaccacagcccacacttgtcctattgctaccctgatgcttccgagctccccttcttactcaccacggggattgctttaagagtactcgggtgtcctccagctagttccacattctccaatcgttgctccagcgatcctttgacctgtatttgagcccccattaatgggcaccacttgctgagaccaggtcggttggagagacccta

SEQ ID NO: 114381 - DNA, 551 bp, Homo sapiens
gatctggggggtgtattcaaacagggaactgccaagcctctaaatcccacttttgtctagcttgctgtattcctgcctgaatagaacgaagarcagtcgctcaaggcgctgctcagtcaccagggcaactacttttcacccagtgtcctccagaaaagaaagatctggagggtcgttttcttcaaaatagtaatgagggtgtgcagaaggatagggatgaacctctccctccttttctgctttagctttaggtgacaaataaacctggtctgtaacctctactgttactttgttatactctccttcctcctcatcatcagtgtgaaaaagttccaaggtagaacgaaccacagcccacacttgtcctattgctaccctgatgcttccgagctccccttcttactcaccacggggattgctttaagagtactcgggtgtcctccagctagttccacattctccaatcgttgctccagcgatcctttgacctgtatttgagcccccattaatgggcaccacttgctgagaccaggtcggttggagagacccta

SEQ ID NO: 114382 - DNA, 578 bp, Homo sapiens
tacattgggacttttctgttgattgatggtagtagttttcgtcttttgaattcctttctacatttctttcttgtgtccaatttgcccacaattaaggcaagagcctgagaaatgaagcatattttttcttactcttaatctagccacagcctgagctaaaagaataaccttatgtaagttatctccaatgccatcgcaagccttaatatatttagttaaatgggccctctctgtctgggatctaatagcagtttgacactctgcattagcattattgtatgcaagaagctgtattacaacatcctgagctgttttgatcatttamggctttatacacagcctcttggagctgagcaataaaattaatatatggttctttaggtccttgtcagacagaactgaaataaggatacttttcccctgtaacatttatccttttctatgcatgtaagcacatgaagcacagctgaacaatggcaacatcttccattagtgcttgattctctaatcaaccccagttagggccaactcacattaactgatcaaagaaaacaggcacaggtggctgcacttgtgtg

SEQ ID NO: 114383 - DNA, 568 bp, Homo sapiens
tagctatattctgtcctacttgctggattatcgtaacgggaaattgccatgcttcaaggtctcccttggctttagctttttgaatagaattttgtctaccaccaccaattgmtccaggttttaatgttgtaactacaggagcagtaagtttttcagctaatttattttctcacccatttagaggagagagaggaggtggccattcacttaattcagcaggtggagccaacgggctagtaaaacatactttttaaagtttttctttcttttctttaatctcctctggtagctgctccccacactcagaatttgaagttagttttttacactcatcctcctcttcctcatctgagtctgcctcatcatctgtttgaaatggctcaagggctgcctttattagtgcccacactgaccatacagaaactagaatttctgctccatctttatatgccttttaaaaaatctcttccaattctctcccattcatccaacttcatagtcctttgttctggaaaccatgggcaaaactgctttactgtactaaagagtgataacaaattctaagtac

SEQ ID NO: 114384 - DNA, 568 bp, Homo sapiens
tagctatattctgtcctacttgctggattatcgtaacgggaaattgccatgcttcaaggtctcccttggctttagctttttgaatagaattttgtctaccaccaccaattgatccaggttttaatgttgtaactacaggagcagtaagtttttcagctaatttattttctcacccatttagaggagagagaggaggtggccattcacttaattcagcaggtggagccaacggrctagtaaaacatactttttaaagtttttctttcttttctttaatctcctctggtagctgctccccacactcagaatttgaagttagttttttacactcatcctcctcttcctcatctgagtctgcctcatcatctgtttgaaatggctcaagggctgcctttattagtgcccacactgaccatacagaaactagaatttctgctccatctttatatgccttttaaaaaatctcttccaattctctcccattcatccaacttcatagtcctttgttctggaaaccatgggcaaaactgctttactgtactaaagagtgataacaaattctaagtac

SEQ ID NO: 114385 - DNA, 568 bp, Homo sapiens
tagctatattctgtcctacttgctggattatcgtaacgggaaattgccatgcttcaaggtctcccttggctttagctttttgaatagaattttgtctaccaccaccaattgatccaggttttaatgttgtaactacaggagcagtaagtttttcagctaatttattttctcacccatttagaggagagagaggaggtggccattcacttaattcagcaggtggagccaacgggctagtaaaacataytttttaaagtttttctttcttttctttaatctcctctggtagctgctccccacactcagaatttgaagttagttttttacactcatcctcctcttcctcatctgagtctgcctcatcatctgtttgaaatggctcaagggctgcctttattagtgcccacactgaccatacagaaactagaatttctgctccatctttatatgccttttaaaaaatctcttccaattctctcccattcatccaacttcatagtcctttgttctggaaaccatgggcaaaactgctttactgtactaaagagtgataacaaattctaagtac

SEQ ID NO: 114386 - DNA, 568 bp, Homo sapiens
tagctatattctgtcctacttgctggattatcgtaacgggaaattgccatgcttcaaggtctcccttggctttagctttttgaatagaattttgtctaccaccaccaattgatccaggttttaatgttgtaactacaggagcagtaagtttttcagctaatttattttctcacccatttagaggagagagaggaggtggccattcacttaattcagcaggtggagccaacgggctagtaaaacatactttttaaagtttttctttcttttctttaatctcctctggtagctgctccccacactcagaatttgaagttagttttttacactcatcctcctcttcctcatctgagtctgcctcatcatctgtttgaaatggctcaagggctgcctttattagtgcccacactgaccatacagaaactagaatttytgctccatctttatatgccttttaaaaaatctcttccaattctctcccattcatccaacttcatagtcctttgttctggaaaccatgggcaaaactgctttactgtactaaagagtgataacaaattctaagtac

SEQ ID NO: 114387 - DNA, 558 bp, Homo sapiens
tgcacattacactgtggaagaaaaaaccaagctcaagaaaccccaacttgtattatgggaagttcacttggctgtacccttcccaagagggagaaattatctgcattatactagacagtaaataaacttttcctttgttccagaaggaggtactggttttctattccaaggctgttttctatacaaacatgcttgaaaacaatcatttggaacaagaaagtcagcgtccatacttgcaaaatgtgcagaaattaaagagacaaaaaaactgtttctctaccaatttctatttttttaaaatcacattttccccatataatatgcttttaatatgtgataatattctgaaattgtcttagcatttacccccatttctgagtccagaaggatacaataaatttaatttaatttagtaacacytcaaatagtagtgattgtaatagcagagctagtttgtagcataaagaaaaaataataatattattaggtgacacaaataatgctagccaccatttctaagtgtcatggtaagtacagtgattattttctttttttctg

SEQ ID NO: 114388 - DNA, 558 bp, Homo sapiens
tgcacattacactgtggaagaaaaaaccaagctcaagaaaccccaacttgtattatgggaagttcacttggctgtacccttcccaagagggagaaattatctgcattatactagacagtaaataaacttttcctttgttccagaaggaggtactggttttctattccaaggctgttttctatacaaacatgcttgaaaacaatcatttggaacaagaaagtcagcgtccatacttgcaaaatgtgcagaaattaaagagacaaaaaaactgtttctctaccaatttctatttttttaaaatcacattttccccatataatatgcttttaatatgtgataatattctgaaattgtcttagcatttacccccatttctgagtccagaaggatacaataaatttaatttaatttagtaacacttcaaatagtagtgattgtaatagcagagctagtttgtagcataaagaaaaaataataataytattaggtgacacaaataatgctagccaccatttctaagtgtcatggtaagtacagtgattattttctttttttctg

SEQ ID NO: 114389 - DNA, 357 bp, Homo sapiens
aggccttgaagagagggttctcatgcttctaggcctgatacaaactgtcacaaaataccrcaaaatccacaaccttgcacaaaggccatagcaaccttacacaaaatacacttctgtgaggacatctatccagcaaccacttgctcaaacttcaactgacatcgaccttgttgttgatctttatagtcaaagataactataacaaaacaattatataagcctgttcatttttcctttatttatttttttctactcccccataattccaggttgatcgcttttcttttaaagaccttgtcttcctttaccatttgaatctacacagtttgctttgtcatgcatattcccattgcagtg

SEQ ID NO: 114390 - DNA, 574 bp, Homo sapiens
tttaattttttttttgaaattagggatcatgatataaaagttatcagaatcaaaactgtcggtaatctttaaaaagaaaagaaaaaacctgaacaaatagattcagagaaggccttgaagagagggttctcatgcttctaggcctgatacaaactgtcacaaaataccgcaaaatccacaaccttgcacaaaggccatagcaaccttacacaaaatacacttctgtgaggacatctatccagcaaccacttgctcaaacttcaactgacatcgaccttgttgttgatctttatagtcaaagataactataacaaaasaattatataagcctgttcatttttcctttatttatttttttctactcccccataattccaggttgatcgcttttcttttaaagaccttgtcttcctttaccatttgaatctacacagtttgctttgtcatgcatattcccattgcagtgccctcctccctaagatgtgtctttttcctttagagaacctttctctgtttgttatttaggtttacaatgagaaagcgtgtaaagtaattttactgtcttcctaggaaa

SEQ ID NO: 114391 - DNA, 574 bp, Homo sapiens
tttaattttttttttgaaattagggatcatgatataaaagttatcagaatcaaaactgtcggtaatctttaaaaagaaaagaaaaaacctgaacaaatagattcagagaaggccttgaagagagggttctcatgcttctaggcctgatacaaactgtcacaaaataccgcaaaatccacaaccttgcacaaaggccatagcaaccttacacaaaatacacttctgtgaggacatctatccagcaaccacttgctcaaacttcaactgacatcgaccttgttgttgatctttatagtcaaagataactataacaaaacaattatataagcctgttcatttttcctttatttatttttttctactcccccatarttccaggttgatcgcttttcttttaaagaccttgtcttcctttaccatttgaatctacacagtttgctttgtcatgcatattcccattgcagtgccctcctccctaagatgtgtctttttcctttagagaacctttctctgtttgttatttaggtttacaatgagaaagcgtgtaaagtaattttactgtcttcctaggaaa

SEQ ID NO: 114392 - DNA, 574 bp, Homo sapiens
tttaattttttttttgaaattagggatcatgatataaaagttatcagaatcaaaactgtcggtaatctttaaaaagaaaagaaaaaacctgaacaaatagattcagagaaggccttgaagagagggttctcatgcttctaggcctgatacaaactgtcacaaaataccgcaaaatccacaaccttgcacaaaggccatagcaaccttacacaaaatacacttctgtgaggacatctatccagcaaccacttgctcaaacttcaactgacatcgaccttgttgttgatctttatagtcaaagataactataacaaaacaattatataagcctgttcatttttcctttatttatttttttctactcccccataattccaggttgatcgcttttcttttaaagaccttgtcttcctttaccatttgaatctacacagtttgctttgtcatgcatattcccattgcagtgycctcctccctaagatgtgtctttttcctttagagaacctttctctgtttgttatttaggtttacaatgagaaagcgtgtaaagtaattttactgtcttcctaggaaa

SEQ ID NO: 114393 - DNA, 609 bp, Homo sapiens
caaaggttgccaatttcttgtagatccttctagagttaaacttcatttaagtattcattaaaagctgcatttattccctcacttgaacttttgatttcacactattaggactaatcctctaagtctttgctaagttatgttccttcttttcttgtggcttgactctgatgctctctatatgcaacatcaattgatgtaaagtacattcagggcaatagagtttctttaaatattactttgttattcaaaataatcacaaagcactcatcgtaggaaaacttggaggactcaaatatagggaaatactttttctttctaaggcacaattctctaaagaagttcaccttaayttgaatatacatgggaaaatatccttgttcactaatagtctatattcactctgttttcttccctcatagaccagccggttcactattattctccaaatgatgtgtgcctctctagagtccaggctatctgcatatctaatttttcccacaaattactgttttgaattgcactgaattcaattcaaggggatgtcatttataaacagtgcaaatatatactgcacgagggatcttagaaatcatacacatggtttgatcc

SEQ ID NO: 114394 - DNA, 536 bp, Homo sapiens
tatgcaacatcaattgatgtaaagtacattcagggcaatagagtttctttaaatattactttgttattcaaaataatcacaaagcactcatcgtaggaaaacttggaggactcaaatatagggaaatactttttctttctaaggcacaattctctaaagaagttcaccttaacttgaatatacatgggaaaatatccttgttcactaatagtctatattcactctgttttcttccctcatagaccagccggttcactattattytccaaatgatgtgtgcctctctagagtccaggctatctgcatatctaatttttcccacaaattactgttttgaattgcactgaattcaattcaaggggatgtcatttataaacagtgcaaatatatactgcacgagggatcttagaaatcatacacatggtttgatccataagctcatatgagcatgcaatgtcaacttttttcatgtttttttaagtccacttaaattctattttaagccaccatctgcctgtgctgttagggcagttagc

SEQ ID NO: 114395 - DNA, 536 bp, Homo sapiens
tatgcaacatcaattgatgtaaagtacattcagggcaatagagtttctttaaatattactttgttattcaaaataatcacaaagcactcatcgtaggaaaacttggaggactcaaatatagggaaatactttttctttctaaggcacaattctctaaagaagttcaccttaacttgaatatacatgggaaaatatccttgttcactaatagtctatattcactctgttttcttccctcatagaccagccggttcactattattctccaaatgatgtgtgcctctctagagtccaggctatctgcatatctaatttttcccacaaattactgttttgaattgcactgaattcaattcaaggggatgtcatttataaacagtgcaaatatatactgcacgagggatcttagaamtcatacacatggtttgatccataagctcatatgagcatgcaatgtcaacttttttcatgtttttttaagtccacttaaattctattttaagccaccatctgcctgtgctgttagggcagttagc

SEQ ID NO: 114396 - DNA, 536 bp, Homo sapiens
tatgcaacatcaattgatgtaaagtacattcagggcaatagagtttctttaaatattactttgttattcaaaataatcacaaagcactcatcgtaggaaaacttggaggactcaaatatagggaaatactttttctttctaaggcacaattctctaaagaagttcaccttaacttgaatatacatgggaaaatatccttgttcactaatagtctatattcactctgttttcttccctcatagaccagccggttcactattattctccaaatgatgtgtgcctctctagagtccaggctatctgcatatctaatttttcccacaaattactgttttgaattgcactgaattcaattcaaggggatgtcatttataaacagtgcaaatatatactgcacgagggatcttagaaatcatacacatggtttgatccataagctcatatgagcrtgcaatgtcaacttttttcatgtttttttaagtccacttaaattctattttaagccaccatctgcctgtgctgttagggcagttagc

SEQ ID NO: 114397 - DNA, 539 bp, Homo sapiens
tagtataatggcctttctgtacaagttaacctagaatctgtgaaataaatagacacagattctgtgtccactcacaaaagtgaagaaataagacaattttctggaacattccatgaaacattcttctctgatttaatctggcctgcctcatcagagcaatacaaaaattacttaaaaatactsttttaacaggacaaaagtcagttttctatgaggaatgatatataattctcaacttttccaagggtacgtattgtaagagaaaaggtatgcaatggtttttcaaaatggtagaatgaaagtcacaatataaaaaaataagtacattatagagatagtaaagtggaaataattcattgtaatgaaaataaaaaatcaagcttctgccataattagtatcctaaaacatgttatgtaattcaactagctacagaataacagttgacatgctaagttccatacatacttgactttccacttgaaataatttcttctttgggacctgtgtctcatccaaattaatgtgataatgtgatata

SEQ ID NO: 114398 - DNA, 604 bp, Homo sapiens
ccgcttcttgttgaagttgtctcacaaccacctgagaaaatatttttgttactgattttataaattgccttattaaattatgttaataatatttaactctaacrtacgtactttgaaaattatcaccacacatatcaattcaccttcttttaatcacatgtacacatttttatttattactgaattcagtgagggatgcacaatatgttctcttcctgccaaattggtattctcttacttacataacagattcatcccaccattcaatcatcttagaagctcaactcaacctcaaagttcctcacatattcaatcacctgttcaaatccttccaacagattcctatctcagaataaaagtaaaattccaatggcctttgaggtcctaggtaaacaggtctctacctccctctctgacttcaaagctcctacaactccctcctgtaattactccattcccactgtacgtgaagcctgccacccctctgtctgaaaatagggatctaatgccttactcataaatcacaggcagctacaagtatctttgtactgaacaaaattatattccaatgatagtcattaagccttgaaataaaaattaggag

SEQ ID NO: 114399 - DNA, 604 bp, Homo sapiens
ccgcttcttgttgaagttgtctcacaaccacctgagaaaatatttttgttactgattttataaattgccttattaaattatgttaataatatttaactctaacatacgtactttgaaaattatcaccacacatatcrattcaccttcttttaatcacatgtacacatttttatttattactgaattcagtgagggatgcacaatatgttctcttcctgccaaattggtattctcttacttacataacagattcatcccaccattcaatcatcttagaagctcaactcaacctcaaagttcctcacatattcaatcacctgttcaaatccttccaacagattcctatctcagaataaaagtaaaattccaatggcctttgaggtcctaggtaaacaggtctctacctccctctctgacttcaaagctcctacaactccctcctgtaattactccattcccactgtacgtgaagcctgccacccctctgtctgaaaatagggatctaatgccttactcataaatcacaggcagctacaagtatctttgtactgaacaaaattatattccaatgatagtcattaagccttgaaataaaaattaggag

SEQ ID NO: 114400 - DNA, 551 bp, Homo sapiens
gtggtgagtggagtgcgaataaatatcaaatgtctcctctttagcactaaatgtaaaatgttccaaatcatcttatccaactctagatgttaacttaaatgtaaatgcacatattgaatgcaatagtggaatagcaaacagaattcataacagaacaagtaatatgattggggatgytgttttgctgtattttttaatgccaagaaatagcaaattggtctttaagaacatataccgtagggtacttggggtgctagaaaagatagagctgcactatcgctaacctcgatttcttttaaatttcaatattgtaacacaggagggtaaggtaagaactttacctaggcaactactaaaacagaatctaacacaccagatcaaaatagttaatatatctatgtgcttcagagcatactttcaagtctatctacctacttgctaaaatgtccctactgagagaagttaactttcttgatttggagacaaacactgattaataccacggagtgagtcctgttatgccttaggagattcagtgttctacaaaacaa

SEQ ID NO: 114401 - DNA, 550 bp, Homo sapiens
aaatatttcagcatcaggtcaaaataatggtcagaaccagaggcaaaaatttagagaagctagctaaaaagctgaaggcgagagttttatctcaggcccttttaaagggagacaaagttgaaaacagcaaggcacrataaaagttgaatttctaacatatgagtctgataactttttaaaagaaatagtttatagaattaaaatcaaaacctcttatgattgtattaagagtaaatcaataccttaagaaaacattatttgaacataggggactaaactttagaagactattttaaataattcccttttcattataactaacttaatcacgttcaaaactccttttataaactcctcttcatgaaagttattccagcttatacagattatttatgacacaattggactttctaacttgtcctatacttcccttattcctaaataattatttttcttgaggacaaaattcaccacataatacactttcctatataaaattatacttttttctttataaccctccttaccaaaaatacataatcatattcat

SEQ ID NO: 114402 - DNA, 469 bp, Homo sapiens
ccacccataacaactcctcctccttttactggtctcatggtctttctyctcctgtgttgaaacatgcccttacctatggatctgaaattaacaccaatttcattaattaaaacatggcatttccttatttacatgttttgtaacaatttaaattaacaacttttagatataaataaaaatatgagagacatattttgacgcataaacctaatactttttccctgatactacagtaacaagtatttatcttccatatattgatataaagcattaaatgtatcaatactttatctggagaaggttcatcctagatttaaaatacattcattttgaaacaatcccctattacacattcttaataaaaactgtccatgtttgcttggtttataactttgtgttccctctctcatacaacttttggaagcactattacaaccaatattcaatatctctcatggctgttcccatc

SEQ ID NO: 114403 - DNA, 547 bp, Homo sapiens
gagaaataagctatgaatttctgtcttgatgtgtgttttcatatctatgatggtaagaagtgtgtatatgatgaaagagtgatcattcttaatgacctctaaatgagatacttgttatgtctgctcatactatttagtcaaagtcagtcatgaccttatctaatttgaaggatgtaggacaatgaaattcaactatgtgtctgaaaactggaaagttgaaatatttgtgaaaagcccaatgctactaacttgggataagttaaaaagaaacaaatgaacatacactagttttctcaattctcaattctcatgccttcttcagtgaaaaagaaaatcaaaatgaaggaatacagcagctgctactggcaaggcctctctccatggccaagtgcccctggaaccaagtggtatcasagatttcagaacagagtctttacacgtaatgcacttgtgtttacatgactgcatagttgctgagaagacaaagtcatatccaagctctcaggttttcatagacatttacagaacattccaacctgaaacaaca

SEQ ID NO: 114404 - DNA, 553 bp, Homo sapiens
acgttagacagaaaaaaagaaggaaacaatccaaaagtgtgagcagttctttatcagctcctagaaagcaacttgttcttgggagttggaatttcttttgttttatctctgtaataaggctttcgtttgaattatattttatttataataaaacytccttctatgtgtgatgttacaaaatgttaaatataaatatgactaatacattaacagtgtagtcaacaccaacaatgtcagtttcacataatttgacttctatgatatatttcctttacattcagtttaaaatccaagcccaagaaacatgtattgtgtgtacaatttacgctaaactttatgttgaattctgaagacaaaacgatacatatggcaagactcctgctctcaaagcatctcacttctagttgggaggaagaaagttggcagtaaatacactggatggtaagcaggaagcgcctcacacagggagaaacattgtgctataattgagaaaaatgggatgtttaattatattataataacattatttttattatatgaacaatgtttcaaa

SEQ ID NO: 114405 - DNA, 643 bp, Homo sapiens
tcacctaaccctcattagaatagctgttatcaaaaagacaaaaatgtgacaaatgctgatgaggatgtggagaaaagggacttttatacactgttggtgggaatgtaaattagtacaaccattgtggaaaccagtgtagtttcttcaaaaaawtaaaaatagaactaccatatgatccagcaatcccataactgggtatctatccaaaagaaaagcaataagtagcaaagacatgtgcatgcccatgtttattgcagagctggtcacaaaagccaaggtacagaatcaacctaaatgcccatccaatgaagaatgggtaaagaaaatatggctatatacataatggaatactatgtagccataaaacagaataaaattctatcatttgtagcaacatgaatgaacctggagaacgttatgttaagtgaaataagccagacacaaaaagaaaaataccatatgatctcattcatacgtgaaatctaaaaaaagtttatttcatggaagtagagtgtgtagaatattggttaccagagactggggatatgagggagaataaggggaatgggagaagttggtcaatgggtacaaagttgcagatagtaggaatacgctttagtgttctttacacactaggatgact

SEQ ID NO: 114406 - DNA, 545 bp, Homo sapiens
aaaacaaacaatacggtaatttattcaaaagatagcagtaggggtaattattaaagcatctatttcatcaaggatagaaatttgaattggagaaatgtacgtgtttgggtgtgtgggaaggggatgaattactaaatcctatcttagtaggtttatttctgtgtgtggttttttttttttggaaagtaattgacatcaaacattctcccatctgtatagcaaaacatactattacctcatttcttatttgaatgtaataattgataaagattatttgcttcatatttgttcatgttctctcatatggacttataactgatgagacactaatctctagctgcttttcacagtattgccattcatattttgcagttttcttacaaaatttgtgtataatttacagtttttaaakaattgttttcacagtggataatggggtaaaatattttatttggaaatttgtagatatgcttcatttttttattcattcacttactgcatcactgaagcaaagttctaggtattagagatacttaacaaagcag

SEQ ID NO: 114407 - DNA, 588 bp, Homo sapiens
cattctggtcattcaagattccagcctttgaaggaatttcttacaaacatgtagcctgttttaaagaatgatcgcttgaaccactctgtgtgagtttgggaatgaagactaggctatcttggataatcttcagacatcaaaaaacaaaatcaaagcaactatatttgattatcttgtcactcaagagttctcattcagacattccctttgaaccactttctcttcatcacaaatctgagttgggatcctgcccatctatagattctgatcatccttgtcatctgatattactgattactttgctttctgtagtaattttctcccagatttcttcccatttgatgtctgcacccacccaatctttatctcctcagccacagccagatctgtgcctctggctacctycttattgagctttcccaattctcaaacagaatagactgggaatccacacattctgtttgaaaaaaaaagaccatagtacctgatcagatctagaaagtagtaagagttaagtatagaatcacataattctacgtccctaacagcaaaaatgtgggcttcactgaccctgggtgtgaggtctaa

SEQ ID NO: 114408 - DNA, 570 bp, Homo sapiens
tgctcttactattgttatctctatttcacttttgaagaaactgaggcacaaagcgagtcagcagttagtctaaggttacacccctgatatagcatggttagaacacaaacccatgccatctgggtctgatgcccgtggtattcactatacttggtgcctttctataaaaaaatacgatggcataagtgatatgatcaatggcgaccgatactcagcctcagtattcaagagacaatagggaatgatggagatcccaaccaattattgttttcagaaatgatagctagataatcctcttgttttcctagaggagccagaaatcaagcttctctcacccccattaaatatctacatttttaaatgttgaaaaataactttaaaattaaatcctgtgtggatcaaacaaaacatgataataaactgcctatggcacacaagccaccaggtgatgcctctggattaggcagaggaagaaggcagggaggataattatatgcaaagggggcaagtaatgcaaaggccygggagggatgatgagcagtatggagtgactagaacaccaagaattaa

SEQ ID NO: 114409 - DNA, 623 bp, Homo sapiens
gctctatgagtaagtattcttatccccatttttcagatcaggagatatcccaatataattaataatatcccacaaatgaaactctcatatttgctttacaattgacaaagaactccaaaggtatggaatgtgcatcaggctattagaagtgtatagtcactgatttaatagccctttattaatacacatgcatacatgttttctagatatgaagccttttagaattatattatctaataatatccgtaagggagaggaccttctagtcttgtttacttatcaacgatgaataaaaatagatgtctatgtatgtaatagatagtatatatatatatttgctgatagaattaatttataaaaaggagcataataatgttcacctgaagagttgtaagaattgaatgagaaaatgcagcgaagcagcagacctcatgcagacactccataaatgctcattcccttctcttcactgtaaacctccctcctgaatgagctcctgctctttatgtctccattcttgatacccatcagtgactgscatttgctttcagatgaaatctccttcagtggccactcttgttatgcctggattgggccatcctattccaggcatggaagtatcc

SEQ ID NO: 114410 - DNA, 634 bp, Homo sapiens
catgcacacacacacacagtttaaacaaacatttctgtaaatttccaagacagtattttcccatactgcaaatgaggcactctgattatttttattctattcaatyatatttttaattgtttcttgtgcactatacacaatagcaaagacatggtatcaacccaggtgcccatccatggtggactggataaagaaaatatggtacatatatattatggaatgctacacacccataaaaaatgaaatcatgtatcttgcagtaacatggatgcagctgaaggccattatcctaagtgaattaactcagaaacagaaaaaccaaatacctcatgttctcacttataagtgggagttaaacgctgagtacacacggacacaaagatgggaacaatactaaggattccaaaagtgggtaggagggcaaaggttgaaaaactacctactgggtactatgttcactacctgggtgacaggaccattagaagcccaaacctcaacatcacacaatatacccatgtaacagacctgcatatgtactccctgaatctaaaataataaaaaaaagctgcttgtgaccaacaaaaaattaatttcatgacccactaatagagcgtaacctgtagtttgaaataca

SEQ ID NO: 114411 - DNA, 634 bp, Homo sapiens
catgcacacacacacacagtttaaacaaacatttctgtaaatttccaagacagtattttcccatactgcaaatgaggcactctgattatttttattctattcaattatatttttaattgtttcttgtgcactatacacaatagcaaagacatggtatcaacccaggtgcccatccatggtggactggataaagaaaatatggtacatatatattatggaatgctacacacccataaaaaatgaaatcatgtatcttgyagtaacatggatgcagctgaaggccattatcctaagtgaattaactcagaaacagaaaaaccaaatacctcatgttctcacttataagtgggagttaaacgctgagtacacacggacacaaagatgggaacaatactaaggattccaaaagtgggtaggagggcaaaggttgaaaaactacctactgggtactatgttcactacctgggtgacaggaccattagaagcccaaacctcaacatcacacaatatacccatgtaacagacctgcatatgtactccctgaatctaaaataataaaaaaaagctgcttgtgaccaacaaaaaattaatttcatgacccactaatagagcgtaacctgtagtttgaaataca

SEQ ID NO: 114412 - DNA, 634 bp, Homo sapiens
catgcacacacacacacagtttaaacaaacatttctgtaaatttccaagacagtattttcccatactgcaaatgaggcactctgattatttttattctattcaattatatttttaattgtttcttgtgcactatacacaatagcaaagacatggtatcaacccaggtgcccatccatggtggactggataaagaaaatatggtacatatatattatggaatgctacacacccataaaaaatgaaatcatgtatcttgcagyaacatggatgcagctgaaggccattatcctaagtgaattaactcagaaacagaaaaaccaaatacctcatgttctcacttataagtgggagttaaacgctgagtacacacggacacaaagatgggaacaatactaaggattccaaaagtgggtaggagggcaaaggttgaaaaactacctactgggtactatgttcactacctgggtgacaggaccattagaagcccaaacctcaacatcacacaatatacccatgtaacagacctgcatatgtactccctgaatctaaaataataaaaaaaagctgcttgtgaccaacaaaaaattaatttcatgacccactaatagagcgtaacctgtagtttgaaataca

SEQ ID NO: 114413 - DNA, 550 bp, Homo sapiens
tcaatagatgacaagcttttacaaatctccagcttcacttggtagaaccccaaaccagatacaattgcctcagacccctctgtaggcaatccaggattccctatcaggagggaagtgcagccagcaacaacttcctggtcagtagctaccactcctcccacacactcagtctcctttggacctgagatctcaagccttcaaagaagtgagatgttctccttctcccaaaatgccatctggcacacagcccctaagcctmtgctctctacttccttctgccaggcaatgccatcaacgcttttcttactgaaaggccatgtgttacacagtactacaataatcctcaagatactgaaagtaatgccaagtgaaagaccaagggggtgggtggagggctaatgggctggacgaaatagccacttgattgctagttcatacaagatgtggcagcaactccttttctggctggagatcttggatgtcacatcttagaatcaggtggcaaagcatctgtgaagggcaatgtggcatcccagacagtgggtggtga

SEQ ID NO: 114414 - DNA, 563 bp, Homo sapiens
aggggttgcagtgagctgagagcatgccactgcactccagcctgggtgacagagtgagactccatctcaaaaaataataataatraaaataattaatatctggaatttacaaggactcacacaattcaacagaaaaaaataacatcattaaaagtgggaaaaaatcatgaacagacatttttcaaaagaagacatatgaaagtccaacaatcataaaaaatgtcaccatcgctatcatcgaagaaatgtacattaaatcacaatgagataccaccttacatgagtcagaatggttattgttaaaaagtcaaaattaacagagatgttggtgaggatgaggagaaaagggaattctattctgttgatgggactgtaaattagtacaactcctatataaaactgtatggagatttctcaaataactaaaaataaactacaatttgacccatcaatcctaatgctgggtatctacttccctcaaaaaggaaattgttacattaaaaatatacctgcactcatatgtttactacagcactattcacaatagcaaagatatggaatca

SEQ ID NO: 114415 - DNA, 589 bp, Homo sapiens
ccagcagaagtgttctggaatcctaggtgtgggaaaaacattcagaacctagtagcagtgttctggaatcctatgtgagggacatacattcagaccacggtagcagtgttctggaatggtatgtgaaggacaaacattcagacccttgtagcagtgttccggaattctatgtgagggacaaacattcagaccacagcagcagtgttctggaatcctatatgatggaccaacatgcagacccttgcaacagtgttctggaatactaggtgagggaaaaatattcacacccttgtagcagtgttctggaattctatgtgactgacaaacattcagactccagcagcagtgttctgtaatcctatgtgagggacaaacattcagaccccaagagcagtgttctgaaatcctatgttaagggaaacattgagaccccagsatgaatgttctggaatcctatgtgagggacaaacattcagaccacagcaggagtgttctggaatcctataagaggtataaacattcagaccctcatagcagtgttctggaatcctatgtgagggagaagcattcagagcacagcaggagtgct

SEQ ID NO: 114416 - DNA, 602 bp, Homo sapiens
cagaacaactgtgcactctgattatatcgctactgctatttaaagttatccatttgcatgtctaaaaaatagattcatactgattgtcccattttgatctcaaaaaactcctgaatatgagagtcgtgatcaagggacgyttcatgaaatgttccaaagttaaagtgtgcaatgaaaccagatttatcatagccttatttaaaataattatttctaaaattgttattgtttaattataaacggtatcctttcaggatacttggaagatccatagcagtgtttttattttcacagaacaagcataaattatttatgaaataataactcagatacagagattacttcctattggccttacatatgaatataaataaatacatattatgaacatgagcatacttattttataattatgtaaacgcgtgtgtaatgttatatataagttcaataaagtcatgcttatacatggtttcaattcatgcttctaaaaaccactcaatgtagtcattatcatatgttaataaataatctctgaaaatgtgcttctagtagttgcacaatatcccatcataaagattgtcatgctgtttttaagtcatact

SEQ ID NO: 114417 - DNA, 602 bp, Homo sapiens
cagaacaactgtgcactctgattatatcgctactgctatttaaagttatccatttgcatgtctaaaaaatagattcatactgattgtcccattttgatctcaaaaaactcctgaatatgagagtcgtgatcaagggacgcttcatgaaatgttccaaagttaaagtgtgcaatgaaaccagatttatcatagccttatttaaaataattatttctaaaattgttattgtttaattataaacggtatcctttcaggatacttggaagatccatagcagtgtttttattttcacagaacaagcataaattatttatgaaataataactcagatacagagattacttcctattggccttacatatgaatataaataaatacatattatgaacatgagcatacttattttataattatgtaaacgygtgtgtaatgttatatataagttcaataaagtcatgcttatacatggtttcaattcatgcttctaaaaaccactcaatgtagtcattatcatatgttaataaataatctctgaaaatgtgcttctagtagttgcacaatatcccatcataaagattgtcatgctgtttttaagtcatact

SEQ ID NO: 114418 - DNA, 602 bp, Homo sapiens
cagaacaactgtgcactctgattatatcgctactgctatttaaagttatccatttgcatgtctaaaaaatagattcatactgattgtcccattttgatctcaaaaaactcctgaatatgagagtcgtgatcaagggacgcttcatgaaatgttccaaagttaaagtgtgcaatgaaaccagatttatcatagccttatttaaaataattatttctaaaattgttattgtttaattataaacggtatcctttcaggatacttggaagatccatagcagtgtttttattttcacagaacaagcataaattatttatgaaataataactcagatacagagattacttcctattggccttacatatgaatataaataaatacatattatgaacatgagcatacttattttataattatgtaaacgcgtgtgtaatgttatatwtaagttcaataaagtcatgcttatacatggtttcaattcatgcttctaaaaaccactcaatgtagtcattatcatatgttaataaataatctctgaaaatgtgcttctagtagttgcacaatatcccatcataaagattgtcatgctgtttttaagtcatact

SEQ ID NO: 114419 - DNA, 569 bp, Homo sapiens
aaccaggttcagaagtgagtaaaagacagaggtcagaagaattgggaaagcttagaagacagcaagatgaggaaaatattggaccactatagagaattgttaaatacttgtgattagaaggctgacaaaagtttaaacactgaagtccagacttaaaaggtctcagatgaaaatgaggaatttcctattaatagaagccaagattacatttgattggccttagcaaagaagctggctgcacggggaccctgccctggagatctgtgaaactaggaacttrggggtgatgatttaggatgtatttggtgaaatgaacatctaggcagcataacacaagaagtgacctgtccgcattgaacagcctgtgttcttaagggtgacctaagaaatgacttcaagttggaacttcaagtggagatctaaagtttggaaaatttggagcctggccaagtggtcaaaaagaaaagccgattttgagggggaaatttcaagaaggcttagggtatttgcataaaaaggaacccagtgcaaatagccaagacagtttgaaaccggccttgaaggtattt

SEQ ID NO: 114420 - DNA, 569 bp, Homo sapiens
aaccaggttcagaagtgagtaaaagacagaggtcagaagaattgggaaagcttagaagacagcaagatgaggaaaatattggaccactatagagaattgttaaatacttgtgattagaaggctgacaaaagtttaaacactgaagtccagacttaaaaggtctcagatgaaaatgaggaatttcctattaatagaagccaagattacatttgattggccttagcaaagaagctggctgcacggggaccctgccctggagatctgtgaaactaggaacttaggggtgatgatttaggatgtatttggtgaaatgaacatctaggcagcataacacaagargtgacctgtccgcattgaacagcctgtgttcttaagggtgacctaagaaatgacttcaagttggaacttcaagtggagatctaaagtttggaaaatttggagcctggccaagtggtcaaaaagaaaagccgattttgagggggaaatttcaagaaggcttagggtatttgcataaaaaggaacccagtgcaaatagccaagacagtttgaaaccggccttgaaggtattt

SEQ ID NO: 114421 - DNA, 569 bp, Homo sapiens
aaccaggttcagaagtgagtaaaagacagaggtcagaagaattgggaaagcttagaagacagcaagatgaggaaaatattggaccactatagagaattgttaaatacttgtgattagaaggctgacaaaagtttaaacactgaagtccagacttaaaaggtctcagatgaaaatgaggaatttcctattaatagaagccaagattacatttgattggccttagcaaagaagctggctgcacggggaccctgccctggagatctgtgaaactaggaacttaggggtgatgatttaggatgtatttggtgaaatgaacatctaggcagcataacacaagaagtgacctgtccgcattgaacagcctgtgttcttaagggtgacctaagaaatgacttcaagttggaacttcaagtggagatctaaagtttggaaaatttggagcctggccaagtrgtcaaaaagaaaagccgattttgagggggaaatttcaagaaggcttagggtatttgcataaaaaggaacccagtgcaaatagccaagacagtttgaaaccggccttgaaggtattt

SEQ ID NO: 114422 - DNA, 569 bp, Homo sapiens
aaccaggttcagaagtgagtaaaagacagaggtcagaagaattgggaaagcttagaagacagcaagatgaggaaaatattggaccactatagagaattgttaaatacttgtgattagaaggctgacaaaagtttaaacactgaagtccagacttaaaaggtctcagatgaaaatgaggaatttcctattaatagaagccaagattacatttgattggccttagcaaagaagctggctgcacggggaccctgccctggagatctgtgaaactaggaacttaggggtgatgatttaggatgtatttggtgaaatgaacatctaggcagcataacacaagaagtgacctgtccgcattgaacagcctgtgttcttaagggtgacctaagaaatgacttcaagttggaacttcaagtggagatctaaagtttggaaaatttggagcctggccaagtggtcaaaaagaaaagccgattttgagggggaaawttcaagaaggcttagggtatttgcataaaaaggaacccagtgcaaatagccaagacagtttgaaaccggccttgaaggtattt

SEQ ID NO: 114423 - DNA, 575 bp, Homo sapiens
ttatgaaatatattttttaagtgataagacttgaaagttgaaattattctttgatccaagggcaccagaatgaatgttggkttagtaggcatgaaaacaatattcagctctttatacatctctgtaaaagcccttgagtaccaggggcattgtcagtgagcggtaatactttgaaaggaatcttatttcttgagcagtaggtgtcaacagtgggcttaagatattcagtaaaccgtatttgtaaaccgatagtctgtcatccaggctttgttcccatttgtagagtacagacagagctgtgttttatcataattcttcagggcccttggattttcagaataataaatcatcattggtttcaagttaacatcaccaactgcattagcccttaacaaaagagtcagcatgtcctttgaagccttaaagccaggcatcaactcctctctagctgggaacatcctagatggcatctccttctagtagaaggctgttttgtctccattgcaaatctatttagtgtagccatcttaatcagttatcttctagatagctttctgcagcttttccatcagtac

SEQ ID NO: 114424 - DNA, 575 bp, Homo sapiens
ttatgaaatatattttttaagtgataagacttgaaagttgaaattattctttgatccaagggcaccagaatgaatgttggtttagtaggcatgaaaacaatattcagctctttrtacatctctgtaaaagcccttgagtaccaggggcattgtcagtgagcggtaatactttgaaaggaatcttatttcttgagcagtaggtgtcaacagtgggcttaagatattcagtaaaccgtatttgtaaaccgatagtctgtcatccaggctttgttcccatttgtagagtacagacagagctgtgttttatcataattcttcagggcccttggattttcagaataataaatcatcattggtttcaagttaacatcaccaactgcattagcccttaacaaaagagtcagcatgtcctttgaagccttaaagccaggcatcaactcctctctagctgggaacatcctagatggcatctccttctagtagaaggctgttttgtctccattgcaaatctatttagtgtagccatcttaatcagttatcttctagatagctttctgcagcttttccatcagtac

SEQ ID NO: 114425 - DNA, 575 bp, Homo sapiens
ttatgaaatatattttttaagtgataagacttgaaagttgaaattattctttgatccaagggcaccagaatgaatgttggtttagtaggcatgaaaacaatattcagctctttatacatctctgtaaaagcccttgagtaccaggggcattgtcagtgagcggtaatactttgaaaggaatcttatttcttgagcagtaggtgtcaacagtgggcttaagatattcagtaaaccrtatttgtaaaccgatagtctgtcatccaggctttgttcccatttgtagagtacagacagagctgtgttttatcataattcttcagggcccttggattttcagaataataaatcatcattggtttcaagttaacatcaccaactgcattagcccttaacaaaagagtcagcatgtcctttgaagccttaaagccaggcatcaactcctctctagctgggaacatcctagatggcatctccttctagtagaaggctgttttgtctccattgcaaatctatttagtgtagccatcttaatcagttatcttctagatagctttctgcagcttttccatcagtac

SEQ ID NO: 114426 - DNA, 575 bp, Homo sapiens
ttatgaaatatattttttaagtgataagacttgaaagttgaaattattctttgatccaagggcaccagaatgaatgttggtttagtaggcatgaaaacaatattcagctctttatacatctctgtaaaagcccttgagtaccaggggcattgtcagtgagcggtaatactttgaaaggaatcttatttcttgagcagtaggtgtcaacagtgggcttaagatattcagtaaaccgtatttgtaarccgatagtctgtcatccaggctttgttcccatttgtagagtacagacagagctgtgttttatcataattcttcagggcccttggattttcagaataataaatcatcattggtttcaagttaacatcaccaactgcattagcccttaacaaaagagtcagcatgtcctttgaagccttaaagccaggcatcaactcctctctagctgggaacatcctagatggcatctccttctagtagaaggctgttttgtctccattgcaaatctatttagtgtagccatcttaatcagttatcttctagatagctttctgcagcttttccatcagtac

SEQ ID NO: 114427 - DNA, 484 bp, Homo sapiens
agaggctattgtagggttattaattggccacattttaatattaataaaaagaagcctgagaaaaagagaaagagaaatggcccgttggttgggcagtcagaacaaacgcatwtgtcaattgtttgctgtcttatcctggtgtgatttgtggttcccaaaacaatgacaacagtagcattaaagatcactgattacagatcaccacaacagattcaataataagaatcttaaaatactgtgagaatgaccgaaatgtgacacagagacgtgaagtgagcacgtgctgtaggaacaatggtgccagtcagacctgcttattgcagggtggccacaaaccttcaatatgtaaaacacatggtcacaaaacacaataaagcaaagtgcagtgaaacaagatgtgtctgtcttttgacagactgtgacaatctctacctttgaattggtacattcataccattaacattcaaagtgattattgatatca

SEQ ID NO: 114428 - DNA, 484 bp, Homo sapiens
agaggctattgtagggttattaattggccacattttaatattaataaaaagaagcctgagaaaaagagaaagagaaatggcccgttggttgggcagtcagaacaaacgcatatgtcaattgtttgctgtcttatcctggtgtgatttgtggttcccaaaacaatgacaacagtagcattaaagatcactgattacagatcaccacaacagattcaataataaraatcttaaaatactgtgagaatgaccgaaatgtgacacagagacgtgaagtgagcacgtgctgtaggaacaatggtgccagtcagacctgcttattgcagggtggccacaaaccttcaatatgtaaaacacatggtcacaaaacacaataaagcaaagtgcagtgaaacaagatgtgtctgtcttttgacagactgtgacaatctctacctttgaattggtacattcataccattaacattcaaagtgattattgatatca

SEQ ID NO: 114429 - DNA, 484 bp, Homo sapiens
agaggctattgtagggttattaattggccacattttaatattaataaaaagaagcctgagaaaaagagaaagagaaatggcccgttggttgggcagtcagaacaaacgcatatgtcaattgtttgctgtcttatcctggtgtgatttgtggttcccaaaacaatgacaacagtagcattaaagatcactgattacagatcaccacaacagattcaataataagaatcttaaaatactgtgagaatgaccgaaatgtgacacagagacgtgaagtgagcacgtgctgtaggaacaatggtgccagtsagacctgcttattgcagggtggccacaaaccttcaatatgtaaaacacatggtcacaaaacacaataaagcaaagtgcagtgaaacaagatgtgtctgtcttttgacagactgtgacaatctctacctttgaattggtacattcataccattaacattcaaagtgattattgatatca

SEQ ID NO: 114430 - DNA, 484 bp, Homo sapiens
agaggctattgtagggttattaattggccacattttaatattaataaaaagaagcctgagaaaaagagaaagagaaatggcccgttggttgggcagtcagaacaaacgcatatgtcaattgtttgctgtcttatcctggtgtgatttgtggttcccaaaacaatgacaacagtagcattaaagatcactgattacagatcaccacaacagattcaataataagaatcttaaaatactgtgagaatgaccgaaatgtgacacagagacgtgaagtgagcacgtgctgtaggaacaatggtgccagtcagacctgcttattgcagggtggccacaaaccttcaataygtaaaacacatggtcacaaaacacaataaagcaaagtgcagtgaaacaagatgtgtctgtcttttgacagactgtgacaatctctacctttgaattggtacattcataccattaacattcaaagtgattattgatatca

SEQ ID NO: 114431 - DNA, 540 bp, Homo sapiens
tgataccaacctgggctatcttyattgcccaaaccaacaggataatttgctgaggttgtggagcttctcccctgcaaagagtccctgatctcccaaaatctggttgagatctaagtttgattttgctgtacaactccttttctgaagttttactcatttccaacaaggaaggcaagttttcctgcttctgtggtgatggagagcaggcacctcctttcctgagtttcagcttgcctctgacagggaaggtgagtgtaagttgtttccagcttctaagatggcagagaacgatccccagcctgagccttgtttccaggtaagtaggtgaattagagttttgtcttaaaatttttccttaatgactaaaatttaagattactcaccagctgcttttaatttctgcttttagtttctccttaccattagaacactcagtaatcatatgaattgtgcatttgttgttttgcttaactctttttgtttgtttatgcttggggctttattgttgttgtttcacttttctcccgtctcttcctgact

SEQ ID NO: 114432 - DNA, 540 bp, Homo sapiens
tgataccaacctgggctatctttattgcccaaaccaacaggataatttgctgaggttgtggagcttctcccctgcaaagagtccctgatctcccaaaatctggttgagatctaagtttgattttgctgtacaactccttttctgaagttttactcatttccaacaaggaaggcaagttttcctgcttctgtggtgatggagagcaggcacctcctttcctgagtttcagcttgcytctgacagggaaggtgagtgtaagttgtttccagcttctaagatggcagagaacgatccccagcctgagccttgtttccaggtaagtaggtgaattagagttttgtcttaaaatttttccttaatgactaaaatttaagattactcaccagctgcttttaatttctgcttttagtttctccttaccattagaacactcagtaatcatatgaattgtgcatttgttgttttgcttaactctttttgtttgtttatgcttggggctttattgttgttgtttcacttttctcccgtctcttcctgact

SEQ ID NO: 114433 - DNA, 540 bp, Homo sapiens
tgataccaacctgggctatctttattgcccaaaccaacaggataatttgctgaggttgtggagcttctcccctgcaaagagtccctgatctcccaaaatctggttgagatctaagtttgattttgctgtacaactccttttctgaagttttactcatttccaacaaggaaggcaagttttcctgcttctgtggtgatggagagcaggcacctcctttcctgagtttcagcttgcctctgacagggaaggtgagtgtaagttgtttccagcttctaagatggcagagaacgatccccagcctgagccttgtttccaggtaagtagstgaattagagttttgtcttaaaatttttccttaatgactaaaatttaagattactcaccagctgcttttaatttctgcttttagtttctccttaccattagaacactcagtaatcatatgaattgtgcatttgttgttttgcttaactctttttgtttgtttatgcttggggctttattgttgttgtttcacttttctcccgtctcttcctgact

SEQ ID NO: 114434 - DNA, 540 bp, Homo sapiens
tgataccaacctgggctatctttattgcccaaaccaacaggataatttgctgaggttgtggagcttctcccctgcaaagagtccctgatctcccaaaatctggttgagatctaagtttgattttgctgtacaactccttttctgaagttttactcatttccaacaaggaaggcaagttttcctgcttctgtggtgatggagagcaggcacctcctttcctgagtttcagcttgcctctgacagggaaggtgagtgtaagttgtttccagcttctaagatggcagagaacgatccccagcctgagccttgtttccaggtaagtaggtgaattagagttttgtcttaaaatttttccttaatgaytaaaatttaagattactcaccagctgcttttaatttctgcttttagtttctccttaccattagaacactcagtaatcatatgaattgtgcatttgttgttttgcttaactctttttgtttgtttatgcttggggctttattgttgttgtttcacttttctcccgtctcttcctgact

SEQ ID NO: 114435 - DNA, 561 bp, Homo sapiens
agtgtgtctcatctgccaaacgtccctcccttcctcacactctgacactcaggaatagggtagatggtgtgtccaggcagtgtcaggccacctcactttctcctttgagacgggcccagagggcctttggggtgagtgtggagctgggaacctggagcctgaggccaactgtctctccctgtgtcttggaggaaaggccatgtctcaaaaaaamccccagggcctgacctctgggtacacatgcagggagggagggtctatgagctgagggggacattgtaatgagactttgagccccgttgctcatgggcctggtcagtggaccatggtcagagatgacctggtcatcaggacctagtcatttgggacctgatcagcaggggcctggttagtggcggcctcctcagtaaagtcctcatcagtggggacctggtgacctaatcattggaagcctggtcagtggggggacctagtcagtggtggccttattagtggggcctgatcagttggaacataaacaatgaaaaactggttggtgaggcatatacagtataccagagg

SEQ ID NO: 114436 - DNA, 561 bp, Homo sapiens
agtgtgtctcatctgccaaacgtccctcccttcctcacactctgacactcaggaatagggtagatggtgtgtccaggcagtgtcaggccacctcactttctcctttgagacgggcccagagggcctttggggtgagtgtggagctgggaacctggagcctgaggccaactgtctctccctgtgtcttggaggaaaggccatgtctcaaaaaaaaccccagggcctgacctctgggtacacatgcagggagggagggtctatgagctgagggggacattgtaatgagactttgagccccgttgctcatgggcctggtcagyggaccatggtcagagatgacctggtcatcaggacctagtcatttgggacctgatcagcaggggcctggttagtggcggcctcctcagtaaagtcctcatcagtggggacctggtgacctaatcattggaagcctggtcagtggggggacctagtcagtggtggccttattagtggggcctgatcagttggaacataaacaatgaaaaactggttggtgaggcatatacagtataccagagg

SEQ ID NO: 114437 - DNA, 561 bp, Homo sapiens
agtgtgtctcatctgccaaacgtccctcccttcctcacactctgacactcaggaatagggtagatggtgtgtccaggcagtgtcaggccacctcactttctcctttgagacgggcccagagggcctttggggtgagtgtggagctgggaacctggagcctgaggccaactgtctctccctgtgtcttggaggaaaggccatgtctcaaaaaaaaccccagggcctgacctctgggtacacatgcagggagggagggtctatgagctgagggggacattgtaatgagactttgagccccgttgctcatgggcctggtcagtggaccatggtcagagatgacctggtcatcaggacctagtcatktgggacctgatcagcaggggcctggttagtggcggcctcctcagtaaagtcctcatcagtggggacctggtgacctaatcattggaagcctggtcagtggggggacctagtcagtggtggccttattagtggggcctgatcagttggaacataaacaatgaaaaactggttggtgaggcatatacagtataccagagg

SEQ ID NO: 114438 - DNA, 530 bp, Homo sapiens
tgtctcatctgccaaacgtccctcccttcctcacactctgacactcaggaatagggtagatggtgtgtccaggcagtgtcaggccacctcactttctcctttgagacgggcccagagggcctttggggtgagtgtggagctgggaacctggagcctgaggccaactgtctctccctgtgtcttggaggaaaggccatgtctcaaaaaaaaccccagggcctgacctctgggtacacatgcagggagggagggtctatgagctgagggggacattgtaatgagactttgagccccgttgctcatgggcctggtcagtggaccatggtcagagatgacctggtcatcaggacctagtcatttgggacctgatcagcargggcctggttagtggcggcctcctcagtaaagtcctcatcagtggggacctggtgacctaatcattggaagcctggtcagtggggggacctagtcagtggtggccttattagtggggcctgatcagttggaacataaacaatgaaaaactggtt

SEQ ID NO: 114439 - DNA, 513 bp, Homo sapiens
cagacactcacaacgactatagcgacagcagcagtgttcaggaatcctatgtgagggacaaacactcagaagccagctggagtgttctagaatcctatgtgagggccaaacattcagaccccagcagtagtgttgtggaatcctatgtgakggacaaactttcaaacccttgtagcagtgttctggaatgctatgtgagggacaaacattcagaccacgggagcagtgttctggaattctatgtgaaggacaaacattaagactctcatagcagtgtcctggaatcatatgtgagggacaaccattcagacaccagcagaagtgttctggaatcctaggtgtgggaaaaacattcagaacctagtagcagtgttctggaatcctatgtgagggacatacattcagaccacggtagcagtgttctggaatggtatgtgaaggacaaacattcagacccttgtagcagtgttccggaattctatgtgagggacaaacattcagaccacagcagca

SEQ ID NO: 114440 - DNA, 513 bp, Homo sapiens
cagacactcacaacgactatagcgacagcagcagtgttcaggaatcctatgtgagggacaaacactcagaagccagctggagtgttctagaatcctatgtgagggccaaacattcagaccccagcagtagtgttgtggaatcctatgtgagggacaaactttcaaacccttgtagcagtgttctggaatgctatgtgagggacaaacattcagaccacgggagcagtgttctggaattctatgtgaaggacaaacattaagactctcatagcagtgtcctggaatcatatgtgagggacaaccattcagacaccagcagaagtgttctggaatcctaggtgtgggaaaaacattcagaacctagtagcagtgttctggaatcctatgtgagggacatacattcagaccacggyagcagtgttctggaatggtatgtgaaggacaaacattcagacccttgtagcagtgttccggaattctatgtgagggacaaacattcagaccacagcagca

SEQ ID NO: 114441 - DNA, 495 bp, Homo sapiens
accttgtttcaaaacttatagcaaaagttatcaagaagacatagtttaaagatagacmaagtggtcactggaatagaacagagtccagaaatatacactgttggagcccagaaactgatactttaaaatatggcactttcacatgctgaactgaagaagtcttaaggcctccaagaactctcccctactcctgtctttcaatcctctatcattctgtaagcacaagatgaagttattctctaaagttccttatgtacataacatctagacccatcaaaaaagaaaacaattacctctggtctcttccctgagttttcgttaactgaatgaactcatagagcaggaagaaagactgaaatctgtcaacgcacatggacagacttttgtcacaaaccattctctgctctgtgggcccaacaggttttgtcccagcccactgtacattattcaagcccactgaatttacctaaaaattatttattaaccccttaaaat

SEQ ID NO: 114442 - DNA, 495 bp, Homo sapiens
accttgtttcaaaacttatagcaaaagttatcaagaagacatagtttaaagatagacaaagtggtcactggaatagaacagagtccagaaatatacactgttggagcccagaaactgatactttaaaatatggcactttcacatgctgaactgaagaagtcttaaggcctccaagaactctcccctactcctgtctttcaatcctctatcattctgtaagcacaagatgaagttattctctaaagttccttatgtacrtaacatctagacccatcaaaaaagaaaacaattacctctggtctcttccctgagttttcgttaactgaatgaactcatagagcaggaagaaagactgaaatctgtcaacgcacatggacagacttttgtcacaaaccattctctgctctgtgggcccaacaggttttgtcccagcccactgtacattattcaagcccactgaatttacctaaaaattatttattaaccccttaaaat

SEQ ID NO: 114443 - DNA, 495 bp, Homo sapiens
accttgtttcaaaacttatagcaaaagttatcaagaagacatagtttaaagatagacaaagtggtcactggaatagaacagagtccagaaatatacactgttggagcccagaaactgatactttaaaatatggcactttcacatgctgaactgaagaagtcttaaggcctccaagaactctcccctactcctgtctttcaatcctctatcattctgtaagcacaagatgaagttattctctaaagttccttatgtacataacatctagacccatcaaaaaagaaaacaattacctctggtctcttccctgagttttcgttaactgaatgaactcatagagcaggaagaaagactgaaatctgtcaacgcacatggacagacttttgtcacaaaccattctctgctctgtgggcccaacagrttttgtcccagcccactgtacattattcaagcccactgaatttacctaaaaattatttattaaccccttaaaat

SEQ ID NO: 114444 - DNA, 381 bp, Homo sapiens
tatcagatccaatttgacctttctagtaggaaagtatgatactttcaggacttgacaataatgccaaattctggaacttgaacacagatttcttagaatatcaactttgacaccataatatgtagcatatgacttgctcaataagaaagaaacaaccttatagatggactacagtttcagctgccaaagacaaagtgtgtcttgccctaccagcagccctgtatacctctattgacctacagtcctttgaagtcaacaatatatatgttatacgrcccacattttgttagaaaatcccaattacacatatcaaattgttaacataaatctatcaatttttatgtgctggagtgttaaatagaaaataaattttaattacat

SEQ ID NO: 114445 - DNA, 534 bp, Homo sapiens
catgtgcactaggggaatggggtggagccacaagaaattcacaccttatacaaatagggaatccagccccgttagcatatatattcatgctgctgataaagacatacccaagactgggaagcaaaataggtttaatggactcacagttccacatggctggggaggcctcacaatcatggcagaaggtgagaaagacactttttacatggcagcagcaagagagaatgacagwgaagtgaaaatggaaagtccttataaaaccatcagatcttgtgagacttattcactaccacgagaacagtaaggagggaacagccccatgattcaattatctcccactggattcttctcataacgtgtgggaattatgggagctacaattcaagatgagatttggaacgtggagccaaaccatatcaagaggctttgtattcaactgggagggggcaaccgacgacctgctttcagaacccctctctttgctgataactttccttttgcttaataaattatactccactcactcttcaactg

SEQ ID NO: 114446 - DNA, 624 bp, Homo sapiens
gttattaacatcttgactctaaattgtggctactacctgaatttaaatatatgttggtcttcctggaataatggttgagtgaggccattacagagccagaggatcttcctaagaatcacaatctaactaaagagaccattaacgcaaatgtctcacacaattacattttcttctggctctgtgtaccccactcctaagatgactggacaagccccaagaaaaatgggacaaaagcaaaaactgaataaaygctcaaacacaaacacacaatgtaatgaaggtacaaagttgccctgtttccggagcaacatgactccatgatgtcagtggggagaaatgtctcctgctttaaaacagaggcagtggcatgctgtaaacatgtgaaataaggaaagaaggaaagagcatcatcataagcatagctggtggcctattattagcactccccagaacaccagccaacgctagacattgctgcagtttgacatctcttgaccttggagggtgaccacagcttcggctgccataggaaatttcagccactggaagtgactcaataatggacccttgggccataggtaaagtccttgatgcattttgacagaccataagagacacagtttt

SEQ ID NO: 114447 - DNA, 624 bp, Homo sapiens
gttattaacatcttgactctaaattgtggctactacctgaatttaaatatatgttggtcttcctggaataatggttgagtgaggccattacagagccagaggatcttcctaagaatcacaatctaactaaagagaccattaacgcaaatgtctcacacaattacattttcttctggctctgtgtaccccactcctaagatgactggacaagccccaagaaaaatgggacaaaagcaaaaactgaataaacgctcaaacacaaacacacaatgtaatgaaggtacaaagttgccctgtttccggagcaacatgactccatgatgtcagtggggagaaatgtctcctgctttaaaacagaggcagtggcatgctgtaaacatgtgaaataaggaaagaaggaaagagcatcatcataagcatagctggtggcctattattagcactccccagaacaccagccaacgctagacattgctgcagtttgacatctcttgaccttggagggtgaccacagcttcrgctgccataggaaatttcagccactggaagtgactcaataatggacccttgggccataggtaaagtccttgatgcattttgacagaccataagagacacagtttt

SEQ ID NO: 114448 - DNA, 526 bp, Homo sapiens
gtaagttgtttccctaaatgcatattacaatgggaaaataataaaatttattggatgaagggctacttgtcttctttctcccatttttcttgtgtctacctctattttttttttayctcttgtccaatgggcttcctaagtctatttctctgaaatattaaatttaagagcatctttttatcttcacaattttggaactatctctaacttctggaactgtaaagctttatgattttgttgtcatttaatagagctctatagaccttttccaaaagcatcacttgattattctgtaaacaaaattaagcaaatgaacaaaacactaccatgaaggaacacacatttttaaaatccatgctcccttgagcaataaaaagcaatttggcatgtattgtgaacatgtatgtgtgaactcagtaaacttcagacaagtccctttagttttgtttctttggtccaaatagtatcctctactcatagccccattttaactatctctaccagaatcagggtgtccttatttctg

SEQ ID NO: 114449 - DNA, 526 bp, Homo sapiens
gtaagttgtttccctaaatgcatattacaatgggaaaataataaaatttattggatgaagggctacttgtcttctttctcccatttttcttgtgtctacctctattttttttttacctcttgtccaatgggcttcctaagtctatttctctgaaatattaaatttaagagcatctttttatcttcacaattttggaactatctctaacttctggaactgtaaagctttatgattttgttgtcatttaatagagctctatagaccttttccaaaagcatcacttgattattctgtaaacaaaattaagcaaatgaacaaaacactaccatgaaggaacacacatttttaaaatccatgctcccttgagcaataaaaagcaatttggcatgtattgtgaacatgtatgtgtgaactcagtaaacttcagacaagtccctttagttttgtttctttggtccaaatagtatcctctactcatagycccattttaactatctctaccagaatcagggtgtccttatttctg

SEQ ID NO: 114450 - DNA, 607 bp, Homo sapiens
cttactcaaaatataacagtaaaagcatttaatgttttaatgcaaaacctcaaatatgggtggccaaaagaaatcatggtaaggtgacttccctaaaataagacccaccaaatcgctaagatccaaaataaaaatgagagatttttattaatatatttaatcccatctaayatctttcccactcaactttgaaaacaacaggaagtagaagaaaatgccaagttattagttggtctaggacagtcttagaaacaattttaaatttataactccaaatctgaagactcaagtatttcttctaaaaatatttatttagaaataatttaataccataaagatatataaaacctttttttcaggtttacaatttagtgtagggtctgagattcaaatagttaaaaaaaggaaagaaaaaaaagaagtaggattttctctttcatatatttattctaataggtataattttattagcatctgtcttatccatgagactgtaaggcttattagacagaggttatgtctatttttcttcttgatttattcccagtaccaaaggcagtacctagaaaacatgcacattaaaccatcatttgttaactgtttatta

SEQ ID NO: 114451 - DNA, 607 bp, Homo sapiens
cttactcaaaatataacagtaaaagcatttaatgttttaatgcaaaacctcaaatatgggtggccaaaagaaatcatggtaaggtgacttccctaaaataagacccaccaaatcgctaagatccaaaataaaaatgagagatttttattaatatatttaatcccatctaatatctttcccactcaactttgaaaacaacaggaagtagaagaaaatgccaagttattagttggtctaggacagtcttagaaacaattttaaatttataactccaaatctgaagactcaagtatttcttctaaaaatatttatttagaaataatttaataccataaagatatataaaacctttttttcaggtttacaatttagtgtagggtctgagattcaaatagttaaaaaaaggaaagaaaaaaawgaagtaggattttctctttcatatatttattctaataggtataattttattagcatctgtcttatccatgagactgtaaggcttattagacagaggttatgtctatttttcttcttgatttattcccagtaccaaaggcagtacctagaaaacatgcacattaaaccatcatttgttaactgtttatta

SEQ ID NO: 114452 - DNA, 610 bp, Homo sapiens
cagtctgtctgttctcagagcttgaatgctgttctgagagaaccactgctctcttcagagctgtcagacagggacatttaagtctgcagaagcagtctgctgccttttgttcttctataccctgcccccagatgtgaaatctatggaggtagtaggtcttgctgagctgtggtggactccacccagttcatgcttcctagctgctttgtttacactgtaagctactcaagtctagcaatggcaggtgcccctccctcacgtcaagctgcagygttgcaggttgatctcagactgctgtgctagcagtgagcaaggctccatgggcatgatacctgctaagccaggcacaggaggatatctcttggtctgcccgttgctaagactgtgggaatagcacagtatttggtcaggggtgtactgtttctccaggtacagtctgtcatggcttcccttggctaggcaagggaaatcccccaaccccttgcgcttcctgggtgagacaatgccctaccctgcttcagcttgccctctgtgggctgcactcactctccaaccagtcccaatgagatgaaccaagtacctcagtttgaaatgcagaaatcacctgctt

SEQ ID NO: 114453 - DNA, 594 bp, Homo sapiens
gacagttttacaaaggggcatttccctgtacagactctcttgtctcttgctgtcaccatctaagaggtgactttcgccttctgccatgattgtgaggccccctcagccacatggaactatgagtccaataacctctttttttttttttwaattgcccagtctcagctatgtctttaccagcagcatgaaggtagactaatatggtatatgacaatttgtttagcattcacctgttgaaggacatttgggctatttctagctactgaatattaattaataaagctgctatcaacattcctgtacaagtttttgtgtgaaaatacattttgatttcattaggacaaaagtctaaggagggaaactgctagatcatgtggcaagagtatgcttagttttatatgaaattgccaagctattttctggaatggctgtgtaattaagcattcccattagcaatgaatgagtgattcagtttattttcaaactcagaaaaaaagatcgtggtgatttcactatttttaaaaaattataactgttgtgataagtgtagtaatatatcattattggtttaatttatatttcctagtgacaaac

SEQ ID NO: 114454 - DNA, 594 bp, Homo sapiens
gacagttttacaaaggggcatttccctgtacagactctcttgtctcttgctgtcaccatctaagaggtgactttcgccttctgccatgattgtgaggccccctcagccacatggaactatgagtccaataacctcttttttttttttttaattgcccagtctcagctatgtctttaccagcagcatgaaggtagactaatatggtatatgacaatttgtttagcattcacctgttgaaggacatttgggctrtttctagctactgaatattaattaataaagctgctatcaacattcctgtacaagtttttgtgtgaaaatacattttgatttcattaggacaaaagtctaaggagggaaactgctagatcatgtggcaagagtatgcttagttttatatgaaattgccaagctattttctggaatggctgtgtaattaagcattcccattagcaatgaatgagtgattcagtttattttcaaactcagaaaaaaagatcgtggtgatttcactatttttaaaaaattataactgttgtgataagtgtagtaatatatcattattggtttaatttatatttcctagtgacaaac

SEQ ID NO: 114455 - DNA, 594 bp, Homo sapiens
gacagttttacaaaggggcatttccctgtacagactctcttgtctcttgctgtcaccatctaagaggtgactttcgccttctgccatgattgtgaggccccctcagccacatggaactatgagtccaataacctcttttttttttttttaattgcccagtctcagctatgtctttaccagcagcatgaaggtagactaatatggtatatgacaatttgtttagcattcacctgttgaaggacatttgggctatttctagctactgratattaattaataaagctgctatcaacattcctgtacaagtttttgtgtgaaaatacattttgatttcattaggacaaaagtctaaggagggaaactgctagatcatgtggcaagagtatgcttagttttatatgaaattgccaagctattttctggaatggctgtgtaattaagcattcccattagcaatgaatgagtgattcagtttattttcaaactcagaaaaaaagatcgtggtgatttcactatttttaaaaaattataactgttgtgataagtgtagtaatatatcattattggtttaatttatatttcctagtgacaaac

SEQ ID NO: 114456 - DNA, 594 bp, Homo sapiens
gacagttttacaaaggggcatttccctgtacagactctcttgtctcttgctgtcaccatctaagaggtgactttcgccttctgccatgattgtgaggccccctcagccacatggaactatgagtccaataacctcttttttttttttttaattgcccagtctcagctatgtctttaccagcagcatgaaggtagactaatatggtatatgacaatttgtttagcattcacctgttgaaggacatttgggctatttctagctactgaatattaattaataaagctgctatcaacattcctgtacaagtttttgtgtgaaaatacattttgatttcattaggacaaaagtctaaggagggaaactgctagatcatgtggcaagagtatgcttagttttatatgaaattgccaagctattttctggaatggctgtgtaattaagcattcccattagcaatgaatgagtgattcagtttattttcaaactcagaaaaaaagatcgtggtgatttcactatttttwaaaaattataactgttgtgataagtgtagtaatatatcattattggtttaatttatatttcctagtgacaaac

SEQ ID NO: 114457 - DNA, 589 bp, Homo sapiens
tagattacatatatttttgaaaatagtataccaattataatcaatttgattttccttaataataatgtaatataatagatatactgaaataaacatgcagctgacaaacatttcaagtttaagctttgttaaaaatgtccttaatgccaatttgtttcagtgggaagagaaacatagcagtgtgtgaagagattgtaagaaattacattttctaaatgctgatctagcaatagtcactggcttccatctggagctgtctggtaactagaataatccaaaggagattgacactgaccatgtaatttgaccaaattgggcaacaaaacagtcttgatggtgtgcaaaatttttatattttgcttattgtattaattttatccaattagatgagcaatgtgtttactgcattgtcaaaatcaacaattaacaagtaattatccagaatattttttcaaatgaatgattacatcctccaggttagcaaatcactttagttaatttggttattyccactgttccactgtattttacattgcattgaccaagagtgaatgtttttatggctaggagaacatttaattacataacc

SEQ ID NO: 114458 - DNA, 621 bp, Homo sapiens
tacgatttatctcactggagaccgtgacctcatcttattttttatatcccccgtcgcactgtgtcttcgacataataggtgttaagtcaatatttgctaaagatatgttaagtgaataaatgaattagattccctgaaacaaccagggagattcacctggaggaagtctgaagtttgagagcttagaactctcagaatggacttgaacttggccaaggaaatctcaggggctatcaataataagcaataattataataaataagaaaatactagcatttattgtgtgtctgctgactgccagatgctgctctaaactattgacacggactattttctggaattttcacacctgtctggtgaggtttgttctacttttgtcatctcacaatcccagccraggatgctgcagtttaggggagtggagtaatgttcctaagacacagctggccagtggcagagtacggatttgaaccaggtaatttggttcccatggaagcaaatatttgagcgcatacacttaattagggaagtggccctagggagcactggtagggggatgaggaagtgaaacggagggaaggaagtagagtgagagtttgttcacaagcaggtcatctctg

SEQ ID NO: 114459 - DNA, 600 bp, Homo sapiens
cttttttcctatcatggttttccattttccactcttacccaaactggtaactgtttaactgtttttttggggaatcttcattttcctataaaggctgctgtgtcacataaaacttgtatgaaataaattacatgctcttcttctgttaacctttgtcaatttaattttcagatgaagccagggatccgactagggtcgagaaaaacatgttcctcccctacaagctcaacttttcccttccctcctttttgcagggtagattccccagaaagcacactctaagatggagattagtgagcaggaggtttattagggagttctcatggaatcaacatctggagaattgggaagggaaggaagtcaawttgggcagagggagaaactgagctacaatgtagtcatgaggaaggtctcagcccactcgacacggaattctttgctgggaatatctttctgagtcatccaagttgaggctgagaggctcgggactccacacccttttgtcaatcagtcattagatgcaggcttccatggaaggaggcgtgacagtggcaatgaggcagctctcttccaccaaggcaatcctctagggtgctgaca

SEQ ID NO: 114460 - DNA, 643 bp, Homo sapiens
aaaagtggtcccatgagattataatagatatttttacatacttttctacgtttaattatgtttagatacataacctcttaccactgtgttcttattgcctgcagtattcagtacagtaatgtagtrcacagatttgtagcctgggagaaagaggctataccatataacctaaacgtggtaggctgtacaatctaggtgtttgtaatactctctgtgatgtttgcaaaatggtaaaattgcctacgaatacatctgttaaaacgtatccctatcattcagtgatgtgtgactgtactaaaatgctcaatgtaagtttcaatgccctccataaaattgttgtactgtgaaatacaaatctctcacccatggcctgaatatgtttgcaaactaagcagatcatgggaaggagaatgtgctggcaccgctgggatgattttctcactctacatgaataatatctacagacttcgtgaatatgagccacttgcatagagttaaagtaggcatctctttgctgggaaaattatcaaatgggagtatgaagtgtttttacaagatactcgtttgtttgtagctggtaggcctacagtggctcttggtaatggttgaggttgctaagatttggtggaagaaggcaaaatga

SEQ ID NO: 114461 - DNA, 345 bp, Homo sapiens
tgtttagatacataacctcttaccactgtgttcttattgcctgcagtattcagtacagtaatgtagtgcacagatttgtagcctgggagaaagaggctataccatataacctaaacgtggtaggctgtacaatctaggtgtttgtaataytctctgtgatgtttgcaaaatggtaaaattgcctacgaatacatctgttaaaacgtatccctatcattcagtgatgtgtgactgtactaaaatgctcaatgtaagtttcaatgccctccataaaattgttgtactgtgaaatacaaatctctcacccatggcctgaatatgtttgcaaactaagcagatcatggg

SEQ ID NO: 114462 - DNA, 345 bp, Homo sapiens
tgtttagatacataacctcttaccactgtgttcttattgcctgcagtattcagtacagtaatgtagtgcacagatttgtagcctgggagaaagaggctataccatataacctaaacgtggtaggctgtacaatctaggtgtttgtaatactctctgtgatgtttgcaaaatggtaaaattgcctacgaatacatctgttaraacgtatccctatcattcagtgatgtgtgactgtactaaaatgctcaatgtaagtttcaatgccctccataaaattgttgtactgtgaaatacaaatctctcacccatggcctgaatatgtttgcaaactaagcagatcatggg

SEQ ID NO: 114463 - DNA, 611 bp, Homo sapiens
ttggaaaataatttgatggcttctaaatatatgaaacatagaattgtcatatgacccagaaatttattcctaggtatacacccagattattggaaagaggtgttcaaacacaaattgtacacaagtatttttagcaacagtacctaaaatagccaaaggctgaacacaactcaaatgtcaataaaaatattattggataaacaaaakgttatatccatgaaattgaatgttatacagttataaaaagaaataaagtaccaatacgtacatgaaccttgatagcattatgccaactgaacgaagccgggcagaaaaggccacctattgtacgattctatttagatgaaaacagaataggaaaatctatagagacagaaaacagatttgtggttgcttaggattgagtaggggatgggtgcataggaggttaacagctagggaaggtggggtttctttttgaagtgatgaaaatgctctaaaattcattgtgatggtggctccacttatctgtgcatatactaaaagccactgacttgtagacattaatgtgtgcactctacactatgtaaattatatctcaataaatcctttcaaaaatacacagaagagta

SEQ ID NO: 114464 - DNA, 515 bp, Homo sapiens
cctgctgccatccatgtaagatgtgacttgctcctctttgtcctccaccatgattgtgaggcctccccacccatgtggaactgtaagtccattaaacctctttcttttgtaaattgcccggtctcaggtatgtctttatcagcagcatgaaaacagatgaatacaacaatactgtaacaaatcgactcacatctgttctctttataagaattgcagtgctacaatattagtggctcttaattctaagagtgttaaaaaatattaatgcttgtctcacccctaaagtctagggtgtgacctgagtattaggttatttaaaacttttctcaggtaatagacatgtgcagccaaggttgagaaccactctatagggccaagatatgtaagaaaattcaagtcctttacctgggcrtggtggcacacagctgtagccccaggtactctggaagctgaggtgggaggattgcttgagcccaggagagagaggctgcattaagctatgatcacatcactgc

SEQ ID NO: 114465 - DNA, 577 bp, Homo sapiens
cctatgtggttcaccttagtttctattcaagtcagtaatatacttttgaaaaatgacatgtacattttatctggtatttgtagatttcatatagcaggatagtgattcagcaaatttagtctaccacaatgctgggaatagaattcccctaatttttgaaaacattatatyaaatcatgtttattgccattaatagtcttataaatgtgcttttaactaactgcattttgtcatagctcattgtgattgtatatttaactagttcacccctacctcatgttttttgggagtgaaggttgtactcaactcattatgttaagtaatactacagtaaacatcaatctatacatgcattaataatgatttccaagaaagtagtgacacatggtcataatcatctttgaggctgatggtacatattttcaaattgcatctcagaaataatataccaatctgtgctctaatcagccgcatatgaaagtgtcatctttctgttctccaaccaatacaactactactgtttttatacctgcaaatctgacaaagatgtgagaaggcatcttatagtttcaatttg

SEQ ID NO: 114466 - DNA, 514 bp, Homo sapiens
taggtgagtctcctgaaggcagcagatagttagttggtgagttcttatccattctgtggttctgtatcttgtaagtggagcatttaagccatttacaaccaacattagtattaaaaagtgaggtaccattgctttcatcatgctctttgttgcctctatactttgttttttttttgttgtttttgctttttaacttgtatttttgttttatagctcttgtgtgatttatgctttaatgaagttctgttttgatgtgtttccagaatttgtttcatgatttagagctccttttagcagttcttacagtgctggtttggtaayggcaaattctgtcggcatttgtttgtctgaatatgactgtatctttccttcatatatgatgtttagttttgctggatacaaaattcttggctgataattgttttgtttgaggaggctgaagaaagtgccccaatcccatctagcttgtaaagtttctgctgcaaaatctgctgttagtttgataggttttcct

SEQ ID NO: 114467 - DNA, 514 bp, Homo sapiens
taggtgagtctcctgaaggcagcagatagttagttggtgagttcttatccattctgtggttctgtatcttgtaagtggagcatttaagccatttacaaccaacattagtattaaaaagtgaggtaccattgctttcatcatgctctttgttgcctctatactttgttttttttttgttgtttttgctttttaacttgtatttttgttttatagctcttgtgtgatttatgctttaatgaagttctgttttgatgtgtttccagaatttgtttcatgatttagagctccttttagcagttcttacagtgctggtttggtaacggcaaattctgtcrgcatttgtttgtctgaatatgactgtatctttccttcatatatgatgtttagttttgctggatacaaaattcttggctgataattgttttgtttgaggaggctgaagaaagtgccccaatcccatctagcttgtaaagtttctgctgcaaaatctgctgttagtttgataggttttcct

SEQ ID NO: 114468 - DNA, 470 bp, Homo sapiens
taccattgctttcatcatgctctttgttgcctctatactttgttttttttttgttgtttttgctttttaacttgtatttttgttttatagctcttgtgtgatttatgctttaatgaagttctgttttgatgtgtttccagaatttgtttcatgatttagagctccttttagcagttcttacagtgctggtttggtaacggcaaattctgtcggcatttgtttgtctgaatatgactgtatctttccttcatatatgatgtttagttttgctggatacaaaattcttggctgataattgttttgtttgaggagrctgaagaaagtgccccaatcccatctagcttgtaaagtttctgctgcaaaatctgctgttagtttgataggttttcctttataggttacctagtgcttctgtctcacagcccttaagattatttcctttgtcttaactttggataacctaatgacaa

SEQ ID NO: 114469 - DNA, 514 bp, Homo sapiens
taggtgagtctcctgaaggcagcagatagttagttggtgagttcttatccattctgtggttctgtatcttgtaagtggagcatttaagccatttacaaccaacattagtattaaaaagtgaggtaccattgctttcatcatgctctttgttgcctctatactttgttttttttttgttgtttttgctttttaacttgtatttttgttttatagctcttgtgtgatttatgctttaatgaagttctgttttgatgtgtttccagaatttgtttcatgatttagagctccttttagcagttcttacagtgctggtttggtaacggcaaattctgtcggcatttgtttgtctgaatatgactgtatctttccttcatatatgatgtttagttttgctggatacaaaattcttggctgataattgttttgtttgaggaggctgaagaaagtgccccaatyccatctagcttgtaaagtttctgctgcaaaatctgctgttagtttgataggttttcct

SEQ ID NO: 114470 - DNA, 293 bp, Homo sapiens
aatgaccccttccaccacatgaggacatagcaagaaggtaccatcttaaagcagagagcaagccctcaccaagacactgaatmtgcagatgccttgatcttagacttcccagcctctgacactgcaaaaaataaataaataaataaacttctattgtttataaattacccaatctaaggtattttgttttagcggctcaaaggaactaagacaaaggtcatggagaccatagggtgagtctcaagacttcccccagctctacttggctggtctcctgctggtattttccatct

SEQ ID NO: 114471 - DNA, 571 bp, Homo sapiens
tgaatgggattaatgaccttataaaagaaatgaagatgaacaaatgaccccttccaccacatgaggacatagcaagaaggtaccatcttaaagcagagagcaagccctcaccaagacactgaatctgcagatgccttgatcttagacttcccagcctctgacactgcaaaaaataaataaataaataaacttctattgtttataaattacccaatctaaggtattttgttttagcggctcaaaggaactaagacaaaggtcatggagaccatagggtgagtctcaagacttcccccagctctacttggctggtctcctgctggtattttccrtctgtagagaggaaaaagaactcccattttaccttgcttacctgcacttatgaaaagtcaaactgagtcatgttgagagccagggaacataggagtcggttcttcagcaggagcactcagctagttgaaggcaatgtggagtgatgggaagagagcagtgatgcagtgattctggcaccaactcctttactatggcatccattgtaccagctgccatacacctggctacttctacacct

SEQ ID NO: 114472 - DNA, 571 bp, Homo sapiens
tgaatgggattaatgaccttataaaagaaatgaagatgaacaaatgaccccttccaccacatgaggacatagcaagaaggtaccatcttaaagcagagagcaagccctcaccaagacactgaatctgcagatgccttgatcttagacttcccagcctctgacactgcaaaaaataaataaataaataaacttctattgtttataaattacccaatctaaggtattttgttttagcggctcaaaggaactaagacaaaggtcatggagaccatagggtgagtctcaagacttcccccagctctacttggctggtctcctgctggtattttccatctgtagagaggaaaaagaactcccattttamcttgcttacctgcacttatgaaaagtcaaactgagtcatgttgagagccagggaacataggagtcggttcttcagcaggagcactcagctagttgaaggcaatgtggagtgatgggaagagagcagtgatgcagtgattctggcaccaactcctttactatggcatccattgtaccagctgccatacacctggctacttctacacct

SEQ ID NO: 114473 - DNA, 571 bp, Homo sapiens
tgaatgggattaatgaccttataaaagaaatgaagatgaacaaatgaccccttccaccacatgaggacatagcaagaaggtaccatcttaaagcagagagcaagccctcaccaagacactgaatctgcagatgccttgatcttagacttcccagcctctgacactgcaaaaaataaataaataaataaacttctattgtttataaattacccaatctaaggtattttgttttagcggctcaaaggaactaagacaaaggtcatggagaccatagggtgagtctcaagacttcccccagctctacttggctggtctcctgctggtattttccatctgtagagaggaaaaagaactcccattttaccttgcttacctgcacttatgaaaagtcaaactgagtcatgttgagagccagggaacataggagtcggttcttcagcaggagcactcagctagttgaaggcaatgtggagtgatgggaagagagcagtgatgcagtgatkctggcaccaactcctttactatggcatccattgtaccagctgccatacacctggctacttctacacct

SEQ ID NO: 114474 - DNA, 571 bp, Homo sapiens
tgaatgggattaatgaccttataaaagaaatgaagatgaacaaatgaccccttccaccacatgaggacatagcaagaaggtaccatcttaaagcagagagcaagccctcaccaagacactgaatctgcagatgccttgatcttagacttcccagcctctgacactgcaaaaaataaataaataaataaacttctattgtttataaattacccaatctaaggtattttgttttagcggctcaaaggaactaagacaaaggtcatggagaccatagggtgagtctcaagacttcccccagctctacttggctggtctcctgctggtattttccatctgtagagaggaaaaagaactcccattttaccttgcttacctgcacttatgaaaagtcaaactgagtcatgttgagagccagggaacataggagtcggttcttcagcaggagcactcagctagttgaaggcaatgtggagtgatgggaagagagcagtgatgcagtgattctggcaycaactcctttactatggcatccattgtaccagctgccatacacctggctacttctacacct

SEQ ID NO: 114475 - DNA, 457 bp, Homo sapiens
gcaagtagctcaagatcacacacrttatctgtgattaagcctcagttagaactggagtcttggatttccacatttatacccttttcatgaagctacctaactttgatcctcaagttttcccatctatagcatgggactgctggactagaaatctctaagtcccctttacctcttgaattctgtgtctctaaggatgagaataacaaaactcctttgcctctagcactttccaactcaaagccctatcactctcattacatctaatcactgcagccagaagcattaaataaaatggaaggactgacattgggagtgggcgaggcagagaagttgggggcgtggagaaacagctctttttacataatgattgctactatgatttggttataaataaccagtgaagacaatcaggcttttctggcagtccctaattgtagtgaatgttggaatacagtga

SEQ ID NO: 114476 - DNA, 480 bp, Homo sapiens
tttcatctagcccctgctgaatgccaagcactgggctggaactctggggactgtggaggtggaataggagaatatgggctttctgtgagcagtgattgcctaaaatatatacatcaaggttgtaggatcatgtgcaccactgcactctagccggggtgacagagtgagaccctgtctcagaaaaataaaaaaaaaattgtaggatcatggagaaagtgtcttaagtgtttggtgctgtggacaggcaacacaggcagaaactggtggctagggaatcagagaagttttcaggagggagcatttgacttgggcttgaactgagcatcatagggcaatatagaaacaagtttatggataattcactgaattggtggcagtttataacttgartcttccttcagatgattgaagttagtagcccagctatgaaagtctaggttacagatgtctcagccacagcttgcatatatatggatgagg

SEQ ID NO: 114477 - DNA, 549 bp, Homo sapiens
ctgaacctctctgagtcccagtttatttgtctataaaatagggatagtgatactggggttacaaggaaattgtgagaattaaaatagttcaggagaggttaagttgtcctggggccacctttgtcattgcagtgaccacactctgtagtgagggcacccttgagagcagacagcagagctgctatgtgattcatctctagaatccatgattcttggaacacttcctgagagctattaggcattcaagaaatgttaatggtagatcatagyataatggtagatcatagtattgtgatagatcatagtattgtattattgttcagcaaacatctgttttccctcctttcaatggaagtggtgtacctccccaccccactgacattgggcttagccatgtgacttgcttcagctaatggaatgtgggtgactcagtgaatgccacatccaagcagaggcgttaaatattcctgcatggcctctggtgatcctgtcctccagcatgagatgaacatgcttcagatagctgctgctactcccctggatcctctt

SEQ ID NO: 114478 - DNA, 588 bp, Homo sapiens
tatgtgattcatctctagaatccatgattcttggaacacttcctgagagctattaggcattcaagaaatgttaatggtagatcatagtataatggtagatcatagtattgtgatagatcatagtattgtattattgttcagcaaacatctgttttccctcctttcawtggaagtggtgtacctccccaccccactgacattgggcttagccatgtgacttgcttcagctaatggaatgtgggtgactcagtgaatgccacatccaagcagaggcgttaaatattcctgcatggcctctggtgatcctgtcctccagcatgagatgaacatgcttcagatagctgctgctactcccctggatcctcttctgagagccaagtgaagcaaataggaacccaattcaccacccagatccaggcccatctgaatctagccagcccagaagagccctgtagaaccacagctgacctatggaaatgagaagtaaatgtttgttgttgttagcattgagatttggggattactttttatgtggcatcatcacaacaaagcctgactaatatattgtataaagttaattgagtacta

SEQ ID NO: 114479 - DNA, 588 bp, Homo sapiens
tatgtgattcatctctagaatccatgattcttggaacacttcctgagagctattaggcattcaagaaatgttaatggtagatcatagtataatggtagatcatagtattgtgatagatcatagtattgtattattgttcagcaaacatctgttttccctcctttcaatggaagtggtgtacctccccaccccactgacattgggcttagccatgtgacttgcttcagctaatggaatgtgrgtgactcagtgaatgccacatccaagcagaggcgttaaatattcctgcatggcctctggtgatcctgtcctccagcatgagatgaacatgcttcagatagctgctgctactcccctggatcctcttctgagagccaagtgaagcaaataggaacccaattcaccacccagatccaggcccatctgaatctagccagcccagaagagccctgtagaaccacagctgacctatggaaatgagaagtaaatgtttgttgttgttagcattgagatttggggattactttttatgtggcatcatcacaacaaagcctgactaatatattgtataaagttaattgagtacta

SEQ ID NO: 114480 - DNA, 588 bp, Homo sapiens
tatgtgattcatctctagaatccatgattcttggaacacttcctgagagctattaggcattcaagaaatgttaatggtagatcatagtataatggtagatcatagtattgtgatagatcatagtattgtattattgttcagcaaacatctgttttccctcctttcaatggaagtggtgtacctccccaccccactgacattgggcttagccatgtgacttgcttcagctaatggaatgtgggtgactcagtgaatgccacatccaagcagaggcgttaaatattcctgcatggcctctggtgatcctgtcctccagcatgagatgaacatgcttcagatagctgctgctactcycctggatcctcttctgagagccaagtgaagcaaataggaacccaattcaccacccagatccaggcccatctgaatctagccagcccagaagagccctgtagaaccacagctgacctatggaaatgagaagtaaatgtttgttgttgttagcattgagatttggggattactttttatgtggcatcatcacaacaaagcctgactaatatattgtataaagttaattgagtacta

SEQ ID NO: 114481 - DNA, 588 bp, Homo sapiens
tatgtgattcatctctagaatccatgattcttggaacacttcctgagagctattaggcattcaagaaatgttaatggtagatcatagtataatggtagatcatagtattgtgatagatcatagtattgtattattgttcagcaaacatctgttttccctcctttcaatggaagtggtgtacctccccaccccactgacattgggcttagccatgtgacttgcttcagctaatggaatgtgggtgactcagtgaatgccacatccaagcagaggcgttaaatattcctgcatggcctctggtgatcctgtcctccagcatgagatgaacatgcttcagatagctgctgctactcccctggatcctcttctgagagccaagtgaagcaaataggaacccaattcaccacccagatccaggcccatctgaatctagccagcccagaagagccctgtagaaccacagctgacctatggaaatgagaagtaaatgtttgttgttgttagcattgagatttggggattactttttatgtgrcatcatcacaacaaagcctgactaatatattgtataaagttaattgagtacta

SEQ ID NO: 114482 - DNA, 609 bp, Homo sapiens
acctcctcacaaggctgctataaagaattaacgaggctgggcatggtggctcccacctgcaatcctagcacttgaggccgaggtgggtggatcacctgaagtcaggagttcgagaccagcctgaccaacatggtgaaaccccgtctctactaataatacaaaaaattagccgggcatggtggtgggcgcctgtaatcccagctactygggaggctgaggcaggagaatcgcttgaaaccaaaaccgggtggcagagagaggttgcagtgagccaagattgcaccactgcactccagcctgggtgacaagagtgaaattccatctcaaaaaaaaaaaaaaaggaattaatgagatcactccacacaaatcctaatgtggcatctgatacagggcgagttctagtaaatgagcattttttacactcaagatgtaagagtgatggtttcattattagagatgagagaaccaaattaataaacgtttaatcatgtacttaaaatcacacaactgggactcataaccaagcccttttcttcctggtctgatgttcattccttgttgtctgaaatgtcaaatcattttaccagaatagcaggggagagagggaca

SEQ ID NO: 114483 - DNA, 609 bp, Homo sapiens
acctcctcacaaggctgctataaagaattaacgaggctgggcatggtggctcccacctgcaatcctagcacttgaggccgaggtgggtggatcacctgaagtcaggagttcgagaccagcctgaccaacatggtgaaaccccgtctctactaataatacaaaaaattagccgggcatggtggtgggcgcctgtaatcccagctacttgggaggctgaggcaggagaatcgcttgaaaccaaaaccgggtggcagagagaggwtgcagtgagccaagattgcaccactgcactccagcctgggtgacaagagtgaaattccatctcaaaaaaaaaaaaaaaggaattaatgagatcactccacacaaatcctaatgtggcatctgatacagggcgagttctagtaaatgagcattttttacactcaagatgtaagagtgatggtttcattattagagatgagagaaccaaattaataaacgtttaatcatgtacttaaaatcacacaactgggactcataaccaagcccttttcttcctggtctgatgttcattccttgttgtctgaaatgtcaaatcattttaccagaatagcaggggagagagggaca

SEQ ID NO: 114484 - DNA, 609 bp, Homo sapiens
acctcctcacaaggctgctataaagaattaacgaggctgggcatggtggctcccacctgcaatcctagcacttgaggccgaggtgggtggatcacctgaagtcaggagttcgagaccagcctgaccaacatggtgaaaccccgtctctactaataatacaaaaaattagccgggcatggtggtgggcgcctgtaatcccagctacttgggaggctgaggcaggagaatcgcttgaaaccaaaaccgggtggcagagagaggttgcagtgagccaagattgcaccactgcactccagcctgggtgacaagagtgaaattccatctcaaaaaaaaaaaaaaaggaattaatgagatcactccacacaaatcctaatgtggcatctgatacagggygagttctagtaaatgagcattttttacactcaagatgtaagagtgatggtttcattattagagatgagagaaccaaattaataaacgtttaatcatgtacttaaaatcacacaactgggactcataaccaagcccttttcttcctggtctgatgttcattccttgttgtctgaaatgtcaaatcattttaccagaatagcaggggagagagggaca

SEQ ID NO: 114485 - DNA, 648 bp, Homo sapiens
tggtccattttttaaatcttcattccctttagctcttgttgaaaatggcttcctgccactttgcacagaaaaatctctttcatgaaataccaaaaccaaacaaaaaacaggccttcgaaatgctgttttgcctcctcctaagagctaacatttgccagttgtaaattaacattcctttcgcttctttcaacagaaaatcaatcagggccctaaaatccctgcacatctgtatttaatccacaaataattcaacaatgttctatcttaatggtgtattgtgagaaaagcataaatgtcatcaacttcttttacgtggaaagaacaataggkcatgaacttgttttgtgctcctgatgtcctttagaaatggattcctaaggaccaggagtgttctccccaccgacggtgcacagtgccacagcaaggacagtcaactgggagttgggagacctggacttcagttcacaccactttgctggggtacttgggcaagtccctcagggcctcaatttctgcatctgcacaatatggggagtggtcaacatgatttccaaagtctctagccagatttcaaatttgtttacagcacacagaaaattgctaaagagaaaaaactatagtggccatttctgttcaggctgcaaaatc

SEQ ID NO: 114486 - DNA, 616 bp, Homo sapiens
gaatcataagaaattgctgcttttcatcagttcagaaataatattggcaatttcatatggatcaacctaatatataaatataccaaactggtaacagggaaataaggaggacttgaggagttagtaatggtaaattctgatctacctataacgctttaatttttttaatagagaaaatgtattgatgtgttrtatgcatagcattaacaaaattagctttctaagattttagagaatcatcaaagatgattcacaaaagtagaatcatcatcaccagtaagaaactaagtgactactaaaagtaatcattaattcagtcataggactaatgatgcattgacaaggttattgagatatataattatggaaatggctaaaatagagataaagtatctatttctacctcccaaccactaacagaaaattcaacacattatacacactgagcagctcaaagaaattgtaaagatccattattatttttaaaaggaaatttaaccagtggatgctttcactgaaaatgataaacaatatattcccagtataaaccagaaacaaagtctgcagtagaaaactacaatgtccctagattcaagtgggggtggggagtcatatt

SEQ ID NO: 114487 - DNA, 616 bp, Homo sapiens
gaatcataagaaattgctgcttttcatcagttcagaaataatattggcaatttcatatggatcaacctaatatataaatataccaaactggtaacagggaaataaggaggacttgaggagttagtaatggtaaattctgatctacctataacgctttaatttttttaatagagaaaatgtattgatgtgttgtatgcatagcattaacaaaattagctttctaagattttagagaatcatcmaagatgattcacaaaagtagaatcatcatcaccagtaagaaactaagtgactactaaaagtaatcattaattcagtcataggactaatgatgcattgacaaggttattgagatatataattatggaaatggctaaaatagagataaagtatctatttctacctcccaaccactaacagaaaattcaacacattatacacactgagcagctcaaagaaattgtaaagatccattattatttttaaaaggaaatttaaccagtggatgctttcactgaaaatgataaacaatatattcccagtataaaccagaaacaaagtctgcagtagaaaactacaatgtccctagattcaagtgggggtggggagtcatatt

SEQ ID NO: 114488 - DNA, 616 bp, Homo sapiens
gaatcataagaaattgctgcttttcatcagttcagaaataatattggcaatttcatatggatcaacctaatatataaatataccaaactggtaacagggaaataaggaggacttgaggagttagtaatggtaaattctgatctacctataacgctttaatttttttaatagagaaaatgtattgatgtgttgtatgcatagcattaacaaaattagctttctaagattttagagaatcatcaaagatgattcacaaaagtagaatcatcatcaccagtaagaaactaagtgactactaaaagtaatcattaattcagtcataggactaatgatgcattgacaaggttattgagatatataattrtggaaatggctaaaatagagataaagtatctatttctacctcccaaccactaacagaaaattcaacacattatacacactgagcagctcaaagaaattgtaaagatccattattatttttaaaaggaaatttaaccagtggatgctttcactgaaaatgataaacaatatattcccagtataaaccagaaacaaagtctgcagtagaaaactacaatgtccctagattcaagtgggggtggggagtcatatt

SEQ ID NO: 114489 - DNA, 592 bp, Homo sapiens
tgatcaactccattcctttaatttgtcaagatagacaaaatgaacaaatttcttgaaaggtgcaaatttatgcaaggagagacagataacctaaataggtacctattaaagaaataaaatttgttgttaaaaactgtcccacaggctgggcaccagtggctcatcccataatcctagcactttgggagatggatcacctgaggtcaggagttcgagaccagcctggccaacatggcgaaaccccatctttacccaaaacacaaaaattagctaggcatgttggtgcatgccagtaatcccagctactcagaaggttgaggcaggagaattgcttgaacctgggaggtggaggctgtagtgagcagagatcacgccactgcactccagcctgggcatggtggctcatgcctgtaatcccaacactttgggaggccaaggcaggtggatcacatgaggtcaggagttcgagaccagcctggccaacatggtgaaaaactgtctttactaaaaatmcaaaaaaaaaaaaaaaaaaaaaaatagccaggcatggtggcaggcacatgtaatcccagctacccagggggctgaggca

SEQ ID NO: 114490 - DNA, 592 bp, Homo sapiens
tgatcaactccattcctttaatttgtcaagatagacaaaatgaacaaatttcttgaaaggtgcaaatttatgcaaggagagacagataacctaaataggtacctattaaagaaataaaatttgttgttaaaaactgtcccacaggctgggcaccagtggctcatcccataatcctagcactttgggagatggatcacctgaggtcaggagttcgagaccagcctggccaacatggcgaaaccccatctttacccaaaacacaaaaattagctaggcatgttggtgcatgccagtaatcccagctactcagaaggttgaggcaggagaattgcttgaacctgggaggtggaggctgtagtgagcagagatcacgccactgcactccagcctgggcatggtggctcatgcctgtaatcccaacactttgggaggccaaggcaggtggatcacatgaggtcaggagttcgagaccagcctggccaacatggtgaaaaactgtctttactaaaaatccaaaaaaaaaaaaaaaaaaaaaawtagccaggcatggtggcaggcacatgtaatcccagctacccagggggctgaggca

SEQ ID NO: 114491 - DNA, 595 bp, Homo sapiens
gaagttattacataaaatatttgctagtagttaacaaatatatttgtaatacacatataaataaagcctcrtaacatgatagtaagcaaatatcaatcttaaaattttttaaataaaagagcaactatattacatactgactttttagagagggttggcatagaaagataaggagtcaaagaggaaggtaagaaaagagaaaggatgagaaagtaaatatacaagaaaacgtaaccagaggctcaaaaaaaaaaaaaaaaagcaaagtaggacagtaaaataaacattttgacctatttatatgatttttaagttcaaaataacttgctatgagattttcatcattaactgacatttagattagagaaaatatacatgaagcaagcctcaccccaggcaatacaacagctccgattccacttttcagctttgacctgcctcggccacctcgccccgacagtcctgcacctcgaggtctccgctttcctggaaatccagacccatggccctatgtaacagattaggaaaagtcaacattctgtgacagcccaaaataatttttaaatccaaatgccactgagataaaacattttat

SEQ ID NO: 114492 - DNA, 652 bp, Homo sapiens
aacttcaaatataaacataaccaaactaaaataacaccttttttcttctatttactttatttcttgaactcagtgatgtaatatgtcttcatctgcctctgagaatacacttaaaactacagaagcaaattaacattttcccaattcacatgtagtgcartatttaagatttcatctaattgaacacgtgttggatcaaatttataatactaaaagcactcttctacatactgcaatgtctagatggaagacaagctagtcaggtggcagagtgaacatcattctggtaggccttttcaagctgtcacttgcaagatgtttggactgctgagaatgttagccataattaattgcagagataggaggctgcaaatgggtgaggtaatgttcaaatgcatggaatgatgactagtcatagtaaaagataatagatgtggccacattgctttgagaaaatttagagaatatttgggtcacaatgatacatttctgcattatttgtggaatgttttcaatgtaattacatcacacaggtagacttccagatcctgtgtctaacttactttccttggctctgtgggagaacacatattctaatgaagttcattttaaggcaaatatttcttgaaaatacaaaactgatagatatatg

SEQ ID NO: 114493 - DNA, 371 bp, Homo sapiens
acaacaaatttaggagatacctwtatgcactactaactagtgttcttttgtggtgctttagaaattctggcttacttgtatttttgctggccttctaatgatttcactcatcaatcagaagatatttgtgtccacctccctgcttcctctccggtgatcttgtctattcttggccattttagagttgacttagcagccttcacaaaactgattggaatttccactgggattaaattgataggtcatttttgggagaactttgcaatattgaactttccaatccatgaactttacttatctgcccatttattatgtttgtttttggtagattacaaaattatatgatcactccaaaaattaccttacccttt

SEQ ID NO: 114494 - DNA, 634 bp, Homo sapiens
taaacacaacatttttccactatttgcagtcaaaagtatcgttaacactctctttactctgctcaaagttacagagttcttttgtataaacattagaacacttatcacagcctgccwataatggagaataattccatgttgtatactatacaacactcttactaaagtccattagacagaaatatgtagcatttgagacatcttccaattataaaactctatgcaaacaaaaattaacaaagcagatctgagactattatattatcctgtgaaggagggtctgtctgtctgcacagttggtcctaggctggcttctgaggacttgaatttcaagagggttccataactggtaatcatggtttactgtatctagactatggaaataatgtggcttatcctgctattctttttgtgagtctggaaatttcacacatgctaggcagagtacacatatgtgacccagccgagataaaacctgtgtttcttgggaagtcacataggttgttgtattttcattaagggggaaagaaggtagtctgtgtgatcctcatggaaggcacagcacataaggaagccggtacatggatttttccagactctgtcagtgtcttttgccattgagatctttctacta

SEQ ID NO: 114495 - DNA, 634 bp, Homo sapiens
taaacacaacatttttccactatttgcagtcaaaagtatcgttaacactctctttactctgctcaaagttacagagttcttttgtataaacattagaacacttatcacagcctgcctataatggagaataattccatgttgtatactatacaacactcttactaaagtccattagacagaaatatgtagcatttgagacaycttccaattataaaactctatgcaaacaaaaattaacaaagcagatctgagactattatattatcctgtgaaggagggtctgtctgtctgcacagttggtcctaggctggcttctgaggacttgaatttcaagagggttccataactggtaatcatggtttactgtatctagactatggaaataatgtggcttatcctgctattctttttgtgagtctggaaatttcacacatgctaggcagagtacacatatgtgacccagccgagataaaacctgtgtttcttgggaagtcacataggttgttgtattttcattaagggggaaagaaggtagtctgtgtgatcctcatggaaggcacagcacataaggaagccggtacatggatttttccagactctgtcagtgtcttttgccattgagatctttctacta

SEQ ID NO: 114496 - DNA, 634 bp, Homo sapiens
taaacacaacatttttccactatttgcagtcaaaagtatcgttaacactctctttactctgctcaaagttacagagttcttttgtataaacattagaacacttatcacagcctgcctataatggagaataattccatgttgtatactatacaacactcttactaaagtccattagacagaaatatgtagcatttgagacatcttccaattataaaactctatgcaaacaaaaattaacaamgcagatctgagactattatattatcctgtgaaggagggtctgtctgtctgcacagttggtcctaggctggcttctgaggacttgaatttcaagagggttccataactggtaatcatggtttactgtatctagactatggaaataatgtggcttatcctgctattctttttgtgagtctggaaatttcacacatgctaggcagagtacacatatgtgacccagccgagataaaacctgtgtttcttgggaagtcacataggttgttgtattttcattaagggggaaagaaggtagtctgtgtgatcctcatggaaggcacagcacataaggaagccggtacatggatttttccagactctgtcagtgtcttttgccattgagatctttctacta

SEQ ID NO: 114497 - DNA, 634 bp, Homo sapiens
taaacacaacatttttccactatttgcagtcaaaagtatcgttaacactctctttactctgctcaaagttacagagttcttttgtataaacattagaacacttatcacagcctgcctataatggagaataattccatgttgtatactatacaacactcttactaaagtccattagacagaaatatgtagcatttgagacatcttccaattataaaactctatgcaaacaaaaattaacaaagcagatctgagactattatattatcctgtgaaggagggtctgtctgtctgcacagttggtcctaggctggcttctgaggacttgaatttcaagagggttccmtaactggtaatcatggtttactgtatctagactatggaaataatgtggcttatcctgctattctttttgtgagtctggaaatttcacacatgctaggcagagtacacatatgtgacccagccgagataaaacctgtgtttcttgggaagtcacataggttgttgtattttcattaagggggaaagaaggtagtctgtgtgatcctcatggaaggcacagcacataaggaagccggtacatggatttttccagactctgtcagtgtcttttgccattgagatctttctacta

SEQ ID NO: 114498 - DNA, 534 bp, Homo sapiens
tataaaatatttagatataaatactacaagtgcaaatgaatttttttttctacttctgcattcaacttttctcttctcccttyagggaaaacacttttgtgtaaaggcctccaaaatatatgtagaggtgtatgtatgttaaaaacatgtatacatataatgcataaccaaacaaatgaaatatcctaaacatatggacctgaaaattgcttataataaatttgaactgaacatataggcataaatgtggttcagaagtgtccagttgaagcaacttcactttgttaggtcaacaaaagttggggacaccaagatctactcctctgattttgttctagcattatcttaatggaaatgtttactgaaatggaaatacatgtagtggacatcgtggtggtgtctcaagcattcagtgttccctgctctcacacactcctaaccaaataatgaatttctcagcttcacaatgtttaagtgacatgagtcccatgcccaattcttggtcattgtaattggtgcatggaaggaacctgt

SEQ ID NO: 114499 - DNA, 534 bp, Homo sapiens
tataaaatatttagatataaatactacaagtgcaaatgaatttttttttctacttctgcattcaacttttctcttctcccttcagggaaaacacttttgtgtaaaggcctccaaaatatatgtagaggygtatgtatgttaaaaacatgtatacatataatgcataaccaaacaaatgaaatatcctaaacatatggacctgaaaattgcttataataaatttgaactgaacatataggcataaatgtggttcagaagtgtccagttgaagcaacttcactttgttaggtcaacaaaagttggggacaccaagatctactcctctgattttgttctagcattatcttaatggaaatgtttactgaaatggaaatacatgtagtggacatcgtggtggtgtctcaagcattcagtgttccctgctctcacacactcctaaccaaataatgaatttctcagcttcacaatgtttaagtgacatgagtcccatgcccaattcttggtcattgtaattggtgcatggaaggaacctgt

SEQ ID NO: 114500 - DNA, 534 bp, Homo sapiens
tataaaatatttagatataaatactacaagtgcaaatgaatttttttttctacttctgcattcaacttttctcttctcccttcagggaaaacacttttgtgtaaaggcctccaaaatatatgtagaggtgtatgtatgttaaaaacatgtatacatataatgcataaccaaacaaatgaaatatcctaaacatatggacctgaaaattgcttataataaatttgaactgaacatataggcataaatgtggttcagaagtgtccagttgaagcaacttcactttgttaggtcaacaaaagttggggacaccaagatctactcctctgattttgttctagcattatcttaatggaaatgtttactgaaatggaaatacatgtagtggacatcgtggtggtgtctcaagcattcagtgttccctgctctcacacactcctarccaaataatgaatttctcagcttcacaatgtttaagtgacatgagtcccatgcccaattcttggtcattgtaattggtgcatggaaggaacctgt

SEQ ID NO: 114501 - DNA, 577 bp, Homo sapiens
agaagtcctatcgagaaaacaggtgttgaacctgggtttgctgaacttatttcaccagagaccccatccattaacatctgcatcacaaagcacaattgggtaaacagtgatccagctgaagtccttccatttacagacacagacagaaaatgaggcccagaaaggttaattgactcactcaaggtcatgcgaccatctcctgaatcgtagagctgtgtgcttttcactgcccctaatgttgcctaatggttcacttagctatccattcacaggaggtcagaaactgaacacgggcctcagattccagtatcattttgactaaattwtatataaaaattgatgtaccgaataggatttgctttcaatctcactattccagaatagtcattcattcaacaaatatttattaagtacgatgtgccaggagctgcacattttgcagttggctgcacagaagactgacaataaaattagccttagagagatcaaaattgattgaactgtccttgataaaactgcttcaaagcagggacttgcaagaaattgcatattcacatttcatttgcttccattaata

SEQ ID NO: 114502 - DNA, 536 bp, Homo sapiens
atatattatgagctgatttttgacaagtccaataagatacaatagggaaaagatggtgtcttcaataagtagtggtaagaaaactagatatctatatgcaaaagaatgaaactggacctgatgcctatcttacacatcatacataaaaagcaactcaaatagattaaatacctaacacctgaaaccataaaactcctagaaggaaatataggagaaaaactccttaatatcctccttgacaatgattttttggatatcacaccaaaagctcaggyagcaaaagcaaaaataagcaagtgggactacatcaagcaaataagcttctgcatagcaataaaaaaaacatggggtaaaaaggtagcacagggattaggggaaaatattggcaaaccacacatctgataaggggttaaaatccaaaacatataaggaactcacacaactcagtagcaaaaaaaaatccccaaataactggattttaaaataggcaaggacctgaatagccatttttccaaagtcacacaaatggtcaaatg

SEQ ID NO: 114503 - DNA, 536 bp, Homo sapiens
atatattatgagctgatttttgacaagtccaataagatacaatagggaaaagatggtgtcttcaataagtagtggtaagaaaactagatatctatatgcaaaagaatgaaactggacctgatgcctatcttacacatcatacataaaaagcaactcaaatagattaaatacctaacacctgaaaccataaaactcctagaaggaaatataggagaaaaactccttaatatcctccttgacaatgattttttggatatcacaccaaaagctcaggcagcaaaagcaaaaataagcaagtgggactacatcaarcaaataagcttctgcatagcaataaaaaaaacatggggtaaaaaggtagcacagggattaggggaaaatattggcaaaccacacatctgataaggggttaaaatccaaaacatataaggaactcacacaactcagtagcaaaaaaaaatccccaaataactggattttaaaataggcaaggacctgaatagccatttttccaaagtcacacaaatggtcaaatg

SEQ ID NO: 114504 - DNA, 504 bp, Homo sapiens
ttgaccgatatatctaaaatattaccatttcaacatgtaatatgtaattatgtgctgtattttatgtttgcaggacatctcagttcagactaactacattgcagatcccaagtgtgtgtcattaaaatagtgatagatttgtggtgtacatacctataatattatcatttatagtttcttgattagaattctgcataatcaagtcttactaagacaggtttattatattttctcattacttcttggtccaaaggaattctacctctaaagagagaatgagttgaataataaaatgtcatgactccattttrctgtagtatcttagcattaatatttggaattgttattctagaccttagcaaaaatatatgttttgattatgaattttctgaagctttccagttaagtgtaaaacaagtgaaaaatataacttcgtattttgtgtattttgctttttataggtgtctactgcagatatttcatcaaataaggatgatgaagaaa

SEQ ID NO: 114505 - DNA, 625 bp, Homo sapiens
tggttgtgttgttttctagcagtgacaaattcactttgaatcaggtttgaacttgacaatttactgtcttcctcattgaattcctccttgcacatttctgctttatctcatatacacagaagtgatccaatatttagctatagagctatattagttaagaaggtatttttaaagtaaaatttgtaggtttttagcttagtctccatttaaaatatgttctgttttcttaacttcaggatayatgtgtagtttgtggcagttttggccaaggagcagaaggaagattacttgcctgttctcagtgtggtcagtgttaccatccatactgtgtcagtattaaggtaaacatccttaaactgagttaacaaatatgtattgaatttttatttggttttagtagtaacatgagctcccagttctcacaattaagtattatgattattaaacatatgtgacagtatttaagtactttaaatactgcttttaagggtttcctatctcaagaaatttgctcctctataaatcttatattgtactaatatcctgcttttgtcttgaaaaagtaaaacataaaaatatatgcatttaatttaaaagacaatttatactattcacaaagatttta

SEQ ID NO: 114506 - DNA, 620 bp, Homo sapiens
ttgctttttataggtgtctactgcagatatttcatcaaataaggatgatgaagaaaactctgtgctcgatatggttgtgttgttttctagcagtgacaaattcactttgaatcaggtttgaacttgacaatttactgtcttcctcattgaattcctccttgcacatttctgctttatctcatatacacagaagtgatccaatatttagctatagagctatattagttaagaaggtatttttaaagtaaaatttgtaggtttttagcttagtctccatttaaaatatgttctgttttcttaacttcaggatacatgtgtagtttgtggcagttttggccaaggagcagaaggaagattacttgcctgttctcagtgtggtcagtgttaccatmcatactgtgtcagtattaaggtaaacatccttaaactgagttaacaaatatgtattgaatttttatttggttttagtagtaacatgagctcccagttctcacaattaagtattatgattattaaacatatgtgacagtatttaagtactttaaatactgcttttaagggtttcctatctcaagaaatttgctcctctataaatcttatattgtactaatatcctgctt

SEQ ID NO: 114507 - DNA, 601 bp, Homo sapiens
gtcttcctcattgaattcctccttgcacatttctgctttatctcatatacacagaagtgatccaatatttagctatagagctatattagttaagaaggtatttttaaagtaaaatttgtaggtttttagcttagtctccatttaaaatatgttctgttttcttaacttcaggatacatgtgtagtttgtggcagttttggccaaggagcagaaggaagattacttgcctgttctcagtgtggtcagtgttaccatccatactgtgtcagtattaaggtaaacatccttaaactgagttaacaaatatgtattgaatttktatttggttttagtagtaacatgagctcccagttctcacaattaagtattatgattattaaacatatgtgacagtatttaagtactttaaatactgcttttaagggtttcctatctcaagaaatttgctcctctataaatcttatattgtactaatatcctgcttttgtcttgaaaaagtaaaacataaaaatatatgcatttaatttaaaagacaatttatactattcacaaagattttaggtttagctgattcattttgtctgttgacttataaagctga

SEQ ID NO: 114508 - DNA, 626 bp, Homo sapiens
aacctcagcgaggccattgattgtactctgctgaggttctccctccctgggcagcattctggaaaatgtttctaggcagaatatcataggactccctgagtgtttccttcctctcagagaccactgtctcctttactatgtgttgtccaatatctgaaaacagttgtttcatacactttgtccaattttctactatcttatgggaaaacaggctggtcccatatactccattatcgttgaagcatgtatccgtattagattataaaacatatctgtaacaactttggacatggtaccatggatggaatcctggatgacatcttatttgaaaaaacttttaaaactaaggctaaactggttcaatggaagaaaaaaatgatagtacaaccccagtacctaagttaaaaggaaatttcaaagayagagaaattgttgaagtgttgaagtactagaagtcaagaaacacaaacactaatgtttccattagatttgagaataagaaggtcttgacaagcctggcttaagcagttatgagtggatgtgggtgtagagaccagactgtagtgttttgaagagtgaatataagcggagaaacttgagagtttggttgtaaaagggaccacagg

SEQ ID NO: 114509 - DNA, 626 bp, Homo sapiens
aacctcagcgaggccattgattgtactctgctgaggttctccctccctgggcagcattctggaaaatgtttctaggcagaatatcataggactccctgagtgtttccttcctctcagagaccactgtctcctttactatgtgttgtccaatatctgaaaacagttgtttcatacactttgtccaattttctactatcttatgggaaaacaggctggtcccatatactccattatcgttgaagcatgtatccgtattagattataaaacatatctgtaacaactttggacatggtaccatggatggaatcctggatgacatcttatttgaaaaaacttttaaaactaaggctaaactggttcaatggaagaaaaaaatgatagtacaaccccagtacctaagttaaaaggaaatttcaaagacrgagaaattgttgaagtgttgaagtactagaagtcaagaaacacaaacactaatgtttccattagatttgagaataagaaggtcttgacaagcctggcttaagcagttatgagtggatgtgggtgtagagaccagactgtagtgttttgaagagtgaatataagcggagaaacttgagagtttggttgtaaaagggaccacagg

SEQ ID NO: 114510 - DNA, 626 bp, Homo sapiens
aacctcagcgaggccattgattgtactctgctgaggttctccctccctgggcagcattctggaaaatgtttctaggcagaatatcataggactccctgagtgtttccttcctctcagagaccactgtctcctttactatgtgttgtccaatatctgaaaacagttgtttcatacactttgtccaattttctactatcttatgggaaaacaggctggtcccatatactccattatcgttgaagcatgtatccgtattagattataaaacatatctgtaacaactttggacatggtaccatggatggaatcctggatgacatcttatttgaaaaaacttttaaaactaaggctaaactggttcaatggaagaaaaaaatgatagtacaaccccagtacctaagttaaaaggaaatttcaaagacagagaaattgttgaagtgttgaagtactagaagtcaagaaacacaaacactaatgtttccattagatttgagaataagaaggtcttgacaagcctggcttaagcagttatgagtggatgtgggtgtagagaccagactgtagtgttttgaagagtgaatataagcrgagaaacttgagagtttggttgtaaaagggaccacagg

SEQ ID NO: 114511 - DNA, 626 bp, Homo sapiens
aacctcagcgaggccattgattgtactctgctgaggttctccctccctgggcagcattctggaaaatgtttctaggcagaatatcataggactccctgagtgtttccttcctctcagagaccactgtctcctttactatgtgttgtccaatatctgaaaacagttgtttcatacactttgtccaattttctactatcttatgggaaaacaggctggtcccatatactccattatcgttgaagcatgtatccgtattagattataaaacatatctgtaacaactttggacatggtaccatggatggaatcctggatgacatcttatttgaaaaaacttttaaaactaaggctaaactggttcaatggaagaaaaaaatgatagtacaaccccagtacctaagttaaaaggaaatttcaaagacagagaaattgttgaagtgttgaagtactagaagtcaagaaacacaaacactaatgtttccattagatttgagaataagaaggtcttgacaagcctggcttaagcagttatgagtggatgtgggtgtagagaccagactgtagtgttttgaagagtgaatataagcggagaaacktgagagtttggttgtaaaagggaccacagg

SEQ ID NO: 114512 - DNA, 613 bp, Homo sapiens
tttgttgactttctgctgtgaataaataaattctgatttaggtcttaaaatacacctccttccttctcccaatatagttgtattactatgtttagttcaattaataaggtgttggttatgactcagtaaatgttcactgcagatctaaacagtatactatgagtttcttttgtctttcatggagtttttaataacaagaaagtaatagtgactctccattcgtwctttgtttttgcctactatagaactatcatataagattattttttaaagtactgtttttttctgggagaagtcctaccctctttctagacattcccttctcctgctctgatatgtgccagtggcttctgggtgtgttgttctcatccttaaacttccctggcctgatgtcctttgtcggatctgttgatttatagatcccaagtcttccttttctttgtaatacatcctcattctgttctgcatatctctaagtaactttattagaaggagaatgaaggagctgaattttgagtcttcctgtgtctacaacgtattctgtcttcacacatagttgcttgtgtagctaggttgagaattgtactttgaaaagtattttcctgtagaattg

SEQ ID NO: 114513 - DNA, 613 bp, Homo sapiens
tttgttgactttctgctgtgaataaataaattctgatttaggtcttaaaatacacctccttccttctcccaatatagttgtattactatgtttagttcaattaataaggtgttggttatgactcagtaaatgttcactgcagatctaaacagtatactatgagtttcttttgtctttcatggagtttttaataacaagaaagtaatagtgactctccattcgtactttgtttttgcctactatagaactatcatataagattattttttaaagtactgtttttttctgggagaagtcctaccctctttctagacattcccttctcctgctctgatatgtgccagtggcttctgggtgtgttgttctcatccttaaacttccctggcctgatgtcctttgtcrgatctgttgatttatagatcccaagtcttccttttctttgtaatacatcctcattctgttctgcatatctctaagtaactttattagaaggagaatgaaggagctgaattttgagtcttcctgtgtctacaacgtattctgtcttcacacatagttgcttgtgtagctaggttgagaattgtactttgaaaagtattttcctgtagaattg

SEQ ID NO: 114514 - DNA, 581 bp, Homo sapiens
tagttcaattaataaggtgttggttatgactcagtaaatgttcactgcagatctaaacagtatactatgagtttcttttgtctttcatggagtttttaataacaagaaagtaatagtgactctccattcgtactttgtttttgcctactatagaactatcatataagattattttttaaagtactgtttttttctgggagaagtcctaccctctttctagacattcccttctcctgctctgatatgtgccagtggcttctgggtgtgttgttctcatccttaaacttccctggcctgatgtcctttgtcggatctgttgatttatagatcccaagtcttccttttctttgtaatacatcctcattctgttcygcatatctctaagtaactttattagaaggagaatgaaggagctgaattttgagtcttcctgtgtctacaacgtattctgtcttcacacatagttgcttgtgtagctaggttgagaattgtactttgaaaagtattttcctgtagaattggaagattatactcttctagcatctggagttgggaagttttgtgccattctgatgggtgtt

SEQ ID NO: 114515 - DNA, 410 bp, Homo sapiens
aagcttacttgatttctttaaaatctggtcactatatctataaatacagtggacattaaatgtacagcataaggtaattatgtggactttaaaaaggcattaaaatatgtgccattttctattattctgctcagtagcctcctaaaagcrtgtatgaacatgcccaacccagtattgggcctccgtaggcgctcaataaatgttagttgattgcccctttctgcttctaggtacataagcaccatattaatttatatagtatatttgattatgttaggttaatgcataaatcacatggattggttgtttcttttacagatcactaaagtggttcttagcaaaggttggaggtgtcttgagtgcactgtgtgtgaggcctgtgggaaggcaactgacccaggaagattcct

SEQ ID NO: 114516 - DNA, 515 bp, Homo sapiens
aatagggatagttaggagaaaagggcaaggtaggaggagcatgtgaggcttagggcttttaagtttgatgactcagtgttacaggttttaaaaggtagcagttctcagtatattccattttttttaaaaaaatgtacaaatatggtctttttagatggatgcatgcagttcgtcagaacttaaatactgaggaagaagtggaaaatgtagcagacattggttttgattgtaacatgtgcagaccctatatgcctgcgtctaatggtaagagartaatttaaactgtgagtctgcactcttgtaccactcacttgcaccttactgtccataaccaatgaattagcttagctctactctattttgtctttgtgaaacttactttgacaagtattttatgaaaaatattattgttggttatacatgacttatcacaacttgttataaaacaatttacatgaaacaataaaaagcatatactttagatgtaaactataattttgcttccaaggaacatg

SEQ ID NO: 114517 - DNA, 515 bp, Homo sapiens
aatagggatagttaggagaaaagggcaaggtaggaggagcatgtgaggcttagggcttttaagtttgatgactcagtgttacaggttttaaaaggtagcagttctcagtatattccattttttttaaaaaaatgtacaaatatggtctttttagatggatgcatgcagttcgtcagaacttaaatactgaggaagaagtggaaaatgtagcagacattggttttgattgtaacatgtgcagaccctatatgcctgcgtctaatggtaagagaataatttaaactgtgagtctgcactcttgtaccactcacttgcaccttactgtccataaccaatgaattagcttagctcyactctattttgtctttgtgaaacttactttgacaagtattttatgaaaaatattattgttggttatacatgacttatcacaacttgttataaaacaatttacatgaaacaataaaaagcatatactttagatgtaaactataattttgcttccaaggaacatg

SEQ ID NO: 114518 - DNA, 515 bp, Homo sapiens
aatagggatagttaggagaaaagggcaaggtaggaggagcatgtgaggcttagggcttttaagtttgatgactcagtgttacaggttttaaaaggtagcagttctcagtatattccattttttttaaaaaaatgtacaaatatggtctttttagatggatgcatgcagttcgtcagaacttaaatactgaggaagaagtggaaaatgtagcagacattggttttgattgtaacatgtgcagaccctatatgcctgcgtctaatggtaagagaataatttaaactgtgagtctgcactcttgtaccactcacttgcaccttactgtccataaccaatgaattagcttagctctactctattttgtctttgtgaaacttactttgacaagtattttatgaaaaatattattgttggttatacatgacttatcacaacttgttataaaacaatttacatgaaacartaaaaagcatatactttagatgtaaactataattttgcttccaaggaacatg

SEQ ID NO: 114519 - DNA, 615 bp, Homo sapiens
aaatttaaaacatccatctctatcatagttacaagagacacarctaatatataaatttacagaaactttgaagttcaaacaatacagatactgtgtatatatgatatacatacaaacacactacatgaatataattttttaaaaagttgctatgtagaccaaatagaagttagaaacatttattaaaataagttagtgtaaccagtgtgataaaagttttaagttattaagaagatgtgatgacttcaatgtgtattagcctgatacatacatatatatatacacacaaaccacacactctctctcacacacacagacacacacgtatttagagagagagtcaaattatataaagcaaaaatatcagaaagtaagtagaaatggataagcccccaaatattatagacatttcaaacacacgtctttcagtaatagataaaagaaaaaattaaaagagtaagttttaaaagaagctagtggattttaaaacgggcaaatattatataaggaacttgaatattataattcatgttattttcatgttcatacagaatacttacaaaaattaacattttctagaccataccacaaattcaaacaattttcacggaaata

SEQ ID NO: 114520 - DNA, 615 bp, Homo sapiens
aaatttaaaacatccatctctatcatagttacaagagacacagctaatatataaatttacagaaactttgaagttcaaacaatacagatactgtgtatatatgatatacatacaaacayactacatgaatataattttttaaaaagttgctatgtagaccaaatagaagttagaaacatttattaaaataagttagtgtaaccagtgtgataaaagttttaagttattaagaagatgtgatgacttcaatgtgtattagcctgatacatacatatatatatacacacaaaccacacactctctctcacacacacagacacacacgtatttagagagagagtcaaattatataaagcaaaaatatcagaaagtaagtagaaatggataagcccccaaatattatagacatttcaaacacacgtctttcagtaatagataaaagaaaaaattaaaagagtaagttttaaaagaagctagtggattttaaaacgggcaaatattatataaggaacttgaatattataattcatgttattttcatgttcatacagaatacttacaaaaattaacattttctagaccataccacaaattcaaacaattttcacggaaata

SEQ ID NO: 114521 - DNA, 625 bp, Homo sapiens
atgcgaacgttacaaaacgtcagcagttgtagattttaaataagcaatgatttttgagttcaaccatgatggggtatattgaaaagaatctctcagaaaaaaagaaaaagaaaactgttataaagctatgtacaaaatgttaagcactattaaagtcttccaaatctaccagttacggagttattggtcttggactaacactcctgaaaagaaaaaaamcaaacaaaataagacaatacctaaaaacctggataaaatggcctaccgtgggcactggcaatgcatccaagcaggtaggacctgggtgctacattctctttgtcagaacacaaagcattcatacactcttctcaccctcactttcaccttttaatctttgatctactattaaatgtattcaacattactatcaatcctttgctcaaaatttctttactcacattttgcttgatgcacttggatagactgttcaagaaagtgtgagtagtgaattcctcaaactcttgcatattcaaaatcacatttttgaacctcgatgcttgaagtgtagcttgggtaacagatgggctttaagccaattttggcatgcaaggggttgagtttattaggcatcagcaccgctgaa

SEQ ID NO: 114522 - DNA, 406 bp, Homo sapiens
catttttgaacctcgatgcttgaagtgtagcttgggtaacagatgggctttaagccaattttggcatgcaaggggttgagtttattaggcatcagcaccgctgaaaatcgtggggatgcaggcttaatttcaacactattctaaatacttgaaagatattatataaktctttaataaactcctgtgtctacaaatggttcacattaactcaatatccatgatgaaacatctataaaatcaaggcactgttatttagtggagacttgctggctattctatgagaggaggtattgttattgtaatctcatcatctcataaaattgtatcatattactcataaccagcccttcatattctattcctattttggtattttaaaataagatatctttgaaattcttgaatt

SEQ ID NO: 114523 - DNA, 649 bp, Homo sapiens
gtgcatcagtgtaacatacatgtagtcaatatctcaaaaaggatgggtggggtaatcataggtgaataaggaatggtacactcattcctgagggcaccgaggagggaggatagctttagatttctaagggagagttttatccattcatgaaggtccaaccccatgaccaaacacctcccagtgagccccacctgcaacattggggatcaaattttaacatgagattggaaggggcaagcattcaaaccayagcaagagttaaatttcctttttaaaaaattcactgatatgattccatttcgccatagataaaaactagtatttcagcctaccattgagtgtgcttatagctcaccaaaagggcactcagtctcgggaatacagatttgcatagaggtatcctattgcagtcaaagaaagagcaatgagggatagaaaaggttagtgatggagacaccagcgctgcattttgcaacaaacaatgtaaaaactttatggattggttctgttaacttacttcagtttacattcctctcaggtgggagaattgttgcgttttttcttaagatagaaaagcaattcaggtaatctgaaatctccacaagaaggataagaagcacagcagaaactattctaggcaggaagtcaa

SEQ ID NO: 114524 - DNA, 608 bp, Homo sapiens
tctgctcttgtcagacaattaaggggtctttgaatacttcagccctaataatttgcttcctaacatacatattgcagtgcttayctaattttaaatattcttttgtttcaacacctaattttctattttgatctatctttatgtttacaatatattttgctctgtgttcattctttgatttcagaacttcaatctttctgaagcgtgttttcagagtttcctttgagtttctttagtggaattctgctggtggtgttttgttttttgtctctaaatatgtgatttagccataggttgatgaatatttttcttggttgagaatttcagaatggcattattattcttaacaaataatattgtttattttacctttcatgctttcagatttcaatatgattaaaggtaatttgatttttctagtgctaattgaaatatttttcccttcctgattgtttactatttctctaggagatatgtagatgtaggtttatctccatcgtagcttgcttagcatgcatagaagttttgaatatgtggattagtgtcttacaaaactctagagaactttcagccaaaataccatcacatattgtcccttccccgttccc

SEQ ID NO: 114525 - DNA, 569 bp, Homo sapiens
ttaaatgacttgtcactgttgggtgtggaagtgggatagctaagaagtatgaactataaaagaaggagaaagaaaggcagataggtatgttaacctatatcagaattaaattggggatatctgtcctatcttatataagtccagggtgacataaacctgtctctgagagtaccctaagtgggcatttagcttcacactttccctggggtcagtttgatgcctccagaactcttttttwaatctaattttggactttcaggcttggacaggaattaacctcagtttgggaagaagggaggcaatgtttccttttctggacctcctcttcaggacatctggtacattgttggggcttccacttaattgcctatatcactaccaggcccagagtagaaggaagattagaaatcagaagtccctgactcacagtcctgatctggactttatttatataagcacaaaggatgtaggctgcttttactttatcttcaaggtcattctctatgttcaaaacttggccatctcttaccagcatttccctcacatagttgctgcgtgccaccatttgc

SEQ ID NO: 114526 - DNA, 587 bp, Homo sapiens
aactaaaatatgaagaggttaaatgacttgtcactgttgggtgtggaagtgggatagctaagaagtatgaactataaaagaaggagaaagaaaggcagataggtatgttaacctatatcagaattaaattggggatatctgtcctatcttatataagtccagggtgacataaacctgtctctgagagtaccctaagtgggcatttagcttcacactttccctggggtcagtttgatgcctccagaactctttttttaatctaattttggactttcaggcttggacaggaattaacctcagtttgggaagaagggaggcaatgtttccttttctggacctcctcttcaggacatctggtacattgttggggcttccacttaattgcctatatcactaccaggcccagagtagaaggaagattagaaatcagaagtccctgactcacagtcctgatctggactttatttatataarcacaaaggatgtaggctgcttttactttatcttcaaggtcattctctatgttcaaaacttggccatctcttaccagcatttccctcacatagttgctgcgtgccaccatttgc

SEQ ID NO: 114527 - DNA, 551 bp, Homo sapiens
tattgaaggacagagagctttctgtatcttgggattcttgccttggtgtaccaggcacaagaactggatcacacgtgggcttggagaatgagtacaaggttttgttgagtggaagcagctctcagcagatgggggagctagaaggggatggagtgggaaagtggttttcccctggagcccggcactcagtggcccttctcctcccactgtcccactcaaactccacatcattctgcctgttgatggcctgccggcctcccagcatttcttggtgtgctcttccgtccttgtcctctcaacgtccagctgcttgtgtgttcttctgccaatgtgttcctctcaacgtccaatcgcttgtatgtctgcctactagggtctccgggtttttataggcacaggatcggggcatggcaggccagggtggtcttgagaaactcaacatttgggcaaaaaaacagaaatccctgtcctcacctaatcagtgggcacaagcccaagggtagagccctygccagggaccatgctttcctctacccagcatttccctgtcc

SEQ ID NO: 114528 - DNA, 596 bp, Homo sapiens
tggaagaggtgagtgcctgagattataagggctgattttgagagataacgtaagtttattttctctataaattagccattaatgtaaaaggcacactgatgcaagaaaagcatatagacacctgtccaagtaccagggtttcatgaaacactagctggctccttaataaaagttgtaaaggttataaaagacaggaaaattatatgttatggtcaagatgaccaaaatgttatagattgttgataaaattttgaaaaataaatttaattagcttcatgttgtttttattagggcttattgtttggaatattaagtctcttctctcaaagaatgaaggttttcacctgtttttgaaatccttgagttatcactayggttaaatgaatgacttattttgcaatgatctttgatcctattttgtgatatcaaatgttataaacccttgatatttgacaaactttccaaagtcaaatataaattatgtctttttctgacctgattaatcttttaagatattagattccctaaagtccaaaaatgacatttttttgttataaaaatcatacagggagtattgtcaaatatgaaatggtgtt

SEQ ID NO: 114529 - DNA, 457 bp, Homo sapiens
ccgacttttccatacatcctctgaaatttaggtggaggctcccaagcctcagctcttgcactctgtaaacccacaggcttaccatcatatggaagccacaagccaccaaggcttatggctttcaccctctgaagtagcagcytgagctgtacctgggcctcttttagccaggactggagcaggagtagttgggaagcagggagtagtgtcccaaggctgcacaggtcagtgggggcctgggcctggctcatgaaaccattctgtcctcctaggactttggggttgtgatgaaagggggatgctgcaaaggtctctgaaatgccttggaggcctttttcccattgtcttggctatcagcacttggctcctttttacttatgcaaaattttgcaacctgcttgaaacctcccccagaaaatgggcttttctttcctaccacatggccgggctgcaattt

SEQ ID NO: 114530 - DNA, 613 bp, Homo sapiens
aaggccttttctgcatctattgagataatcatgtggtttttttccttggttctgcctatgtgatggattacatttattgatttgtgtatgttgaaccagccttgcatcccagggatgaagccaacttgatcatggtggataagctttttgatgtgctgctggattccttttgccagtattttattgagcatttttgcattgatgttcatcakggataatggcctaaaattctcttttttgttttgtttctgccaggctttggtatcaggatgatgctggcctcataaaatgagttaggaaggattctctctttttctgttgtttggaatagtttcagaaagaatggtaccagcttctctttgtacctctggtagatttcggctgtgaatccatctggtcctggaattttttttatttgtaggctattaattattgcctcaatttcagaacctgttattggtctattcagagattcaacttcttcctggtttagtcttgggagggtatatgtgtgcaggaatttatccatttcttctagattttctagtttatttgcaaagaaatgtttatagtattctctgacggcagtttgtatttctgtggggtcagtggt

SEQ ID NO: 114531 - DNA, 691 bp, Homo sapiens
tcctgaggttggtgggagtgcaaattgatgtagtcatttgaaaggaccagccagtagtgctcggtggaactcagtacgcggataatgtacaatcgagaaatctcttcatctgtatacagaaaacctctcacacaggtctgtaaggataaatgtgcaaaaatggttattgcagtagtcacttttggtagcagagttggaggcaatccttcaattggtcatcctagcaaaatgratatataacatgtggcatatgcatacaatagaaaactaggcagcttcaaaaataattatatatgtaaatgtacagttgttcttcactatttatggattccatatttgtaaatttgtctacttgctaaaatttattagtattccccaaatcaatactcttggcactttcacagtcattatggacatgacatttgctgagaagggaaagctttgagttgttcaatgtggatattcccagctgaggtcgaacacggccacattctttgtgttttgtctgtcataagataaacaagtgtccttttcgtggcctattcagtgccacatttattgcatttctgttctttatgttgattttgctgtttatttttttaaattttttattatgctttaagtttagggtacatgtgcacaatgtgcaggtttgttacatatgtatacatgtaccatgttggtgtgctgc

SEQ ID NO: 114532 - DNA, 691 bp, Homo sapiens
tcctgaggttggtgggagtgcaaattgatgtagtcatttgaaaggaccagccagtagtgctcggtggaactcagtacgcggataatgtacaatcgagaaatctcttcatctgtatacagaaaacctctcacacaggtctgtaaggataaatgtgcaaaaatggttattgcagtagtcacttttggtagcagagttggaggcaatccttcaattggtcatcctagcaaaatgaatatataacatgtggcatatgcatacaatagaaaactaggcagcttcaaaaataattatatatgtaaatgtacagttgttcttcactatttatggattccatatttgtaaatttgtctacttgctaaaatttattagtattccccaaatcaatactcttggcactttcayagtcattatggacatgacatttgctgagaagggaaagctttgagttgttcaatgtggatattcccagctgaggtcgaacacggccacattctttgtgttttgtctgtcataagataaacaagtgtccttttcgtggcctattcagtgccacatttattgcatttctgttctttatgttgattttgctgtttatttttttaaattttttattatgctttaagtttagggtacatgtgcacaatgtgcaggtttgttacatatgtatacatgtaccatgttggtgtgctgc

SEQ ID NO: 114533 - DNA, 579 bp, Homo sapiens
caaagttttgcttttgtcgcctaagctggagtgcagtggtgggatctcggctcactgcaacctccgcctcccaggttcaagcgattctcctgcctcagcctcctgagtagctgggattacaggcacctgccaacatgcccggctaatttttgtctttttagtagagccagggttttgccaattggccaagctggtctcaaattcctgacaggtgatccacccgcctcagcctcccaaagwgctgggattacaggcgtgaaccaccgtgcccgacctcacattattttttaaggaaaaagaaaggaagtgacaaaatccaatggaaagaaaaaaactgttcaacatgcatctgatatctactatctcagacatgagctcaaacttttgtaggaattattcctgtagttcaaaaacaggaaaataaagaagtagtcattatctggtgataatctccttcccagtgatgatggtttgggtacgaggatgatgataataaaatcaacaattctaatgtcattgttcagtcatgaagactatgacaaggatccacatgaaggaaatgacagttttgagttactt

SEQ ID NO: 114534 - DNA, 572 bp, Homo sapiens
acttcttctgaaaactccagtctgtcaatattgtgctcccattcctacatgacaacagatagaactaaattgcagcggtcctttttaaatagggcatttgctttccacatagcaggtcccaagtgtccgtggccacgtattacggcatttgtgttgtttccttatagtaaagagggaaaataaatgtaccatatacgctttgtctattgaatgccaaagtgcaaaatgaccaagaaagcaagcaattcttgggcccaaccagtttcatttatttacttaacctgctgtttctgttttacattttataaactagaaaattaaaatgcccrtgaaagtgacataatctacataagttcacctttatatcattgcctacttcttaaagtgacatagctatcaggtatagcagccattcctccacattagttatactacccatacctctacatctctcaaaagctgctttttcacaaaacaatttctgatctcagagtgagacccccttcccctccaccctcagatctccttagcaatttaaatttataaatttcacagagaaaaagagagaggta

SEQ ID NO: 114535 - DNA, 549 bp, Homo sapiens
tgtatgtgtatgtgtgtgtgtgtatatatatgtgtgtgtgtatatatatatgtcatttgtatatatgtgcatatatgtgtgtgtgtgtatatatgtttaagtcatttgtatacatgtgtatatatgtgtgtgtatatatacacatatatatacataccatgttgtataccacatacaatttttacttgtcaatgaaaaaaataattaactaattaaatgaatgataatatgaccaaaatatytgtgcacacatatactggaagaaaagaacaaatgctacagtctccaaaacagggaagttctatggagtcttttttaggtgtttgactagaaatgagctacaaggagtaaaatacacaaaagggattttgtggaggcatcacctctgcatctgaaaagtttcaaggtgtagtgagggttgatattgttagatatctgttaagcatattgcatatcagtagtttttggaggatagaggaggagcagatgggaatataaataagagggatcacagatttggtcagtcagaaatttcacaaattcaagaga

SEQ ID NO: 114536 - DNA, 549 bp, Homo sapiens
tgtatgtgtatgtgtgtgtgtgtatatatatgtgtgtgtgtatatatatatgtcatttgtatatatgtgcatatatgtgtgtgtgtgtatatatgtttaagtcatttgtatacatgtgtatatatgtgtgtgtatatatacacatatatatacataccatgttgtataccacatacaatttttacttgtcaatgaaaaaaataattaactaattaaatgaatgataatatgaccaaaatatttgtgcacacatatactggaagaaaagaacaaatgctacagtctccaaaacagggaagttctatggagtcttttttaggtgtttgactagaaatgagctacraggagtaaaatacacaaaagggattttgtggaggcatcacctctgcatctgaaaagtttcaaggtgtagtgagggttgatattgttagatatctgttaagcatattgcatatcagtagtttttggaggatagaggaggagcagatgggaatataaataagagggatcacagatttggtcagtcagaaatttcacaaattcaagaga

SEQ ID NO: 114537 - DNA, 549 bp, Homo sapiens
tgtatgtgtatgtgtgtgtgtgtatatatatgtgtgtgtgtatatatatatgtcatttgtatatatgtgcatatatgtgtgtgtgtgtatatatgtttaagtcatttgtatacatgtgtatatatgtgtgtgtatatatacacatatatatacataccatgttgtataccacatacaatttttacttgtcaatgaaaaaaataattaactaattaaatgaatgataatatgaccaaaatatttgtgcacacatatactggaagaaaagaacaaatgctacagtctccaaaacagggaagttctatggagtcttttttaggtgtttgactagaaatgagctacaaggagtaaaatacacaaaagggattttgtggaggcatcacctctgcatctgaaaagtttcaaggtgtagtgagggttgatattgttagatatctgttaagcatattgcatatcagtagtttttggrggatagaggaggagcagatgggaatataaataagagggatcacagatttggtcagtcagaaatttcacaaattcaagaga

SEQ ID NO: 114538 - DNA, 509 bp, Homo sapiens
gttataatccaattagtggtcgatccaggaatgggattcttatgttctgcctctccaataaagcagacaaaaaagctcaaggtctgtaatggcatgataggggaaaagtgctctttaaggaattaaatctaggaaacacagagaaatacccaaacaaaacaaaactcgtcacacatcaaatgataagttagtgttattgtcacatgcctagttatatctttggagaaaagagatttatttctcttataatagttacaatttgagaaaaaagtgtgtgtgtgcgtgtgtgtgtgtgtataaagtatcaaactgcaaattggtcagatggaatttgtcacttttattactgccgttatccaatattatgaagaatcccatccatgtatgcaactctttatgataaaaaacaaatggatagtttccatttaactaatctaactgcccayttgttactagcagtcgactcccatattgacaaactccagcaatcacctgccttgattctctcc

SEQ ID NO: 114539 - DNA, 535 bp, Homo sapiens
ctgggcattgaagccacatacctcaaaataatcagagccatatatggcaagcacacagtgaacatcatactgaacaggcaaaaactggaaccattcccactgataactggaacaagagaaggatgccaactcttaccactcctgttaaacacagtactggaaattctagccagatcaattatgcaagagagagaaacataaggcatccagataggaagaggtcaaactatctgtttgtagatgatatgattctctatctaggaaaccttatagtttctgtccaaaagctcctacatctgataaaataacttaggaaagtttcagcatataaaatcaatgtacaaaaatcagtagcatttctrtacaccaaaaacatccaaactgagagccaaatcaatgccattcacaatagccacaataagaataaaatatctaggaatacagttaaccaaggtggtgatagatatgtacaatgagaattacaaagcactgctgaaagaaattagagatgacacaaacaaatggaaaaacattc

SEQ ID NO: 114540 - DNA, 592 bp, Homo sapiens
caaaacattatttattctcagctattgggatgagcaatatgctcatgtatttacattcagatactagagctattcaaactatccaactacctacagaataagcttttcaaaacttaagcacagtttccaaaaacatagaaacaaattttccaaagtccactctttccttttttacaatttttgctaaatctttttgaacatgtatctaataataattccttagatgtgtagagtaatagtcaacccttttcaaaccacataaaataactgatttgagccttacaacaattctacagggctagaaaagtgtgtgctctgaccccatttatatctgaggcatttctttgctcttacagaggcatgagcatgataagcagaacatcatagactcctctgcaaattatcgcaacacgcagtgaaagcttacatttgccaggcatgattaactcagtgattacattgaagaacacagagtggtaatatgcattgtagaggatgctataatatacatctttattaacacatattaataatgtattcatatctatttgtrattaatatattagctataatatatagtataatcaataat

SEQ ID NO: 114541 - DNA, 634 bp, Homo sapiens
catatgtacagcaactattaaataatgggtctgttttttattagacactggagaatggtttttcaatgtttcattaggacaacttacgcaggacttctttgttaaataaagcagaaaatttgaaagtaaagattacatttttaatgcctcagtgaaaagaaaacctataatattgagattatttaacttgttctcatttaaaaatactctctgaataatttttgttttggaatccaaagtattttaaaaattcagaatgaagaattaaggtcaaacaaaaatagattgccaggtagcaatctattctacctggcaatctrtttttttctcttttaagcattttcataatgcccaacatgcttttctttttctcctctgggaatttctgatttgccctgaagtattcagaaattgtcaactattggccaatttaatgaactacacaatatctgtctaattcaatggaaatatagtttgtattttttatgaagctgaacaaaatatcaatatatcattgttacagcatttatcagatattttccaatatgattctttgaaatacttgttttagggcttttgcttctgcaaatataattgttttcacctatttcattctccaaaataactgcacttc

SEQ ID NO: 114542 - DNA, 575 bp, Homo sapiens
gatatatacctcagcccaggtaaaagaggtagtattttaaaacacacatggaatattcacaggtattgtccattactcagatacagagaaagtcttagtaattttttaaaaaattaatataatacaggtcatgttcacctagcataatgcaatgttgtttctaaaataaagtaaatatttatacctgagaaattttcaaaactttttattgcagcattggtttgtaaaaaacaaaattagaaagcaacccaataaataaataaataaaagccacccctattcaaaatctgcatttgaaaactaaagaaaaaagtagaaatctgcatttgaaaactaaagaaaaaagtagaaatctgcctttgccatcaatcaatccccattctccatttctcaggtaactactattactgttatagtatctgtcattccagatttattccctatgtgcttacatgttttggctgattgattgataggtagataacagaatctagaaccatagcgcattgcttcrtgactatagtgtagatacagtcatactacagattagtttatgctgtatatattattctaca

SEQ ID NO: 114543 - DNA, 398 bp, Homo sapiens
ttaaaacagtgttgcctgcctctcagaactataatgaagaaaaaaaattatcaactatgaatggcccaaacatcaggtgctgataagaaaattgctgcaccgtcatttggtggcatttatttttatttcccttccagagatcctacaatcttagtgagatcctagttttaaatgtgattgggatctcaatgtaattaaattaaatgtgattggggtagaggggggaattgagtggttcacccagcagccctcctttttcttgacaccgtctctcctctttccctttcataatgtcatatgatataaaagggtatctaacctaatacagcagatactmtgatatccaacatgtgtttccttgcatagggtacacctggtatctaattaattagaggagc

SEQ ID NO: 114544 - DNA, 543 bp, Homo sapiens
taaataatgcttatttttgctaccaaagttaacattttcctacatacgtccttttctaatgatcccataatgttcttaagatgtgtttctagaagtgggattactggcttgaagatataaacatctctgaacctaattgtttcccccaaattttgctaaagtatactccttatagcagtgtgaattgctctttgtttattcatttcaggctcatcttgacagatttaggaattctctttcttaatgtctggccatttartttttttaaaatcggctttactgaggtataatatatccaataaaatgtactcatatacaattccgttaagcctgacaattacatatatccgtgtaactacaccacaatcaagctataaaacatttccattgctcccctagattttcctgtattccttagcagtcaatacactccctaccctggccccatgcaaaaactgatctgctttctgtaaattagtttttccagttttaccagaatttcatgtaaatggaatcatacaatctgtacttttttgtgtctgt

SEQ ID NO: 114545 - DNA, 543 bp, Homo sapiens
taaataatgcttatttttgctaccaaagttaacattttcctacatacgtccttttctaatgatcccataatgttcttaagatgtgtttctagaagtgggattactggcttgaagatataaacatctctgaacctaattgtttcccccaaattttgctaaagtatactccttatagcagtgtgaattgctctttgtttattcatttcaggctcatcttgacagatttaggaattctctttcttaatgtctggccatttagtttttttaaaatyggctttactgaggtataatatatccaataaaatgtactcatatacaattccgttaagcctgacaattacatatatccgtgtaactacaccacaatcaagctataaaacatttccattgctcccctagattttcctgtattccttagcagtcaatacactccctaccctggccccatgcaaaaactgatctgctttctgtaaattagtttttccagttttaccagaatttcatgtaaatggaatcatacaatctgtacttttttgtgtctgt

SEQ ID NO: 114546 - DNA, 622 bp, Homo sapiens
atgacaaaggattgatatcaatcaggatctatttataaaattaatctataaataaataacaaagaaaaaatctcaaaatatttgtaaattaaatattatcctaaataacacatgaataaaaaatatatataatagaaattataaaacatatttaaccaaatgataatgaaaatattgtttcagggcttttccttagttcagctaaagacagggtttttgcccatcccacagccacgaaaatttaggcttgcagatggtttaaagggtgartaaagcagggttctattgggtgaaaagggaaaaaaaggaggaaacagggattatcacaaggcctgagtctctccgctagagcacttcccgcccagctgattgaatcccaggttccacacaggaagaggaggggccaggctcctccccattgcaaacggtgtgaacttccctaggctccaccgcagtgggcaggctggttggagtttctccagggaccccctcccatctgccacctggctgtctcagtatgacatgtaaaaacatatagaattcaggtaattttttgttgagagaaaaagcttcagttacaaatgcataacttagaaaagaagaaagtcaactacttaagtat

SEQ ID NO: 114547 - DNA, 579 bp, Homo sapiens
ctcaagtctatagcatcttgttatggcagccaaagctgactatgccaatcatctctcatatgtttctaaatccctagtcatctgacacaatgcctggcccccaagaaatgcttaaaagttgtgttaaataaatgcacaacctatactacatactgtccagtaagtaaaaccgtgtttgatacataatattttcaaatcatctttgttattttgaactttaattgcaatatgcctaaatatggacataaaatacatatttayattgctcactgggccctttctgtcttttgttctgggaaatttcttttacttctccaagtatatgcttcattccatttctgattccactgaattctctctcactagcagggggaatgagtaaggaaagatggctctaaggtttttcatcccatctatccaaataggtcgataaactaaggcccacaaaaatcaaatgacttgtggaaggtatattatttttactaaaccttaaaggtatttgggaattggaaagcgttataagatgacagtgttaagtcaagggacttggaaacaatcaaatcctgtcttagaccaact

SEQ ID NO: 114548 - DNA, 541 bp, Homo sapiens
gaattttgagttctattaatgtatttcctattaaaatrttaaattaaaacaaacaaaaggaattgtgtgtgtgggttgcctttgctttcagctcccattcattcctcaacacactgaagctgacttgcctggcatgccatgaaaattgcttttgttaaggtcaccaggttgctatttccaatggtcacttttcaggtttcattctaccaaacttctgagtagcattagacccagtttactcttttacctcttgaaatattctctgttcttgggctccatgataacaccctctcttggttctcctcttacatctctgttccttctcattctctgttgaaaacattacaatcctctgacattggttacaggtactctctcctgtctacattctctccctaggtgagctcatctagtttcacggtttaaatatcatctgtacacagatagtcttgcttttacaataggttttttttttctagaagaaaaccaagcttgtgctgtaaaagcagggctatttgctttcttccatctcattaaattc

SEQ ID NO: 114549 - DNA, 461 bp, Homo sapiens
cttccatctcattaaattccccatctctttggtacttgagctgccagaatctaaacagtaatcattgtatctttcaactaccctcctccacacacctccctgaccacattgaatccattaacaagtcccattgtttctacttccaaaatacatctcaacttcatgcactctgycttcattgccaccatcatagtccagccaactattttttgaactattgcaaaactcttcccatatttatttctgctttagttcttgctgcctcacaccttgaacacctgtttcccatacagcagccagagtactttctctttcaaatacttagatcagatcatgttatacccttgtgcaatggctcgcacttcacttagcagtacaccttagcacagcctgccgcatgtatgaaccagaccttcctagctctttaacctcattttgtgtagttttccccccagctgatc

SEQ ID NO: 114550 - DNA, 575 bp, Homo sapiens
caagtgatatattgccccttcatatagtacaaaatcctcacaacagtatacttccatttcttttctcctggcctttagtcctcactgtcttctgttttcatccaaatcttcttcctgactgttgactctattgaacccagtggccccaagtctgtcaccacatgctgggctgtgagatgtcggtgccctgcagccaaaggcctccaagagctcacctgcacttaagtaagttgggtttctcrtttgtcaccgtgagggagtacacacacaccatggagaattgccaggtgtcccagtaaagggtgtcagaaagaacctattataggatgtgagctttgcttggtggttttgaaaggatttagtgaaatagggaattggtctctgttggctgcagtcaagaagggaaggtcattctatgattggtacctcaataaatcttacctatgggagggcattctagatgctaaagcagtaattaataataataaaaaaagcagccactcatattacctgaggaagagagatttttgtattttgcagctcggatgatatgcatgttttgtctctatttaggc

SEQ ID NO: 114551 - DNA, 537 bp, Homo sapiens
tactaaattctcatattacagtaattttccattgattcttgtgaatttttaaatataacattataatacctgcaataaatacagttttgattcttttattctcattcctgtttttaattactttcttttatctaattctacatatgtgtgtacatatgcccacatgcatatgtatatgtacatatatatgtcaacatttataccaattcctatttattctataaataaawtttttcagagttgaaaaatgtcaaatacattttctgcagctatgaagattatcacaggatttttccctttagccttgtttatataatggattctactaatggatttcttcctattgacccactctcacattcctgggatttatcacagttaattgtgacatatttttttctccagtgtactatgtaatataacttggctcatgcaatatattgaaggagaaaggtattccccctttctaatgactatatagaggtggcctgctactattcaacttgccatgcatagcaatattggaacaaatgcatc

SEQ ID NO: 114552 - DNA, 537 bp, Homo sapiens
tactaaattctcatattacagtaattttccattgattcttgtgaatttttaaatataacattataatacctgcaataaatacagttttgattcttttattctcattcctgtttttaattactttcttttatctaattctacatatgtgtgtacatatgcccacatgcatatgtatatgtacatatatatgtcaacatttataccaattcctatttattctataaataaattttttcagagttgaaaaatgtcaaatacattttctgcagctatgaagattatcacaggatttttccctttagccttgtttatataatggattctactaatggatttcttcctattgacccactctcacattcctgggatttatcacagttaattgtgacatatttttttctccagtgtactatktaatataacttggctcatgcaatatattgaaggagaaaggtattccccctttctaatgactatatagaggtggcctgctactattcaacttgccatgcatagcaatattggaacaaatgcatc

SEQ ID NO: 114553 - DNA, 494 bp, Homo sapiens
cacttgagggagaactctgcaattctataacaggagtatgaaatatatattttccctatcctttcaccaaagctcccctgacatttaccttagtaacggtacactggagtaaaaggtatatacatatttcaaggkctcttagacatataatctcaactgacatttaatgccaagggtgccaaaacaccattatctcctctttgttagagtagggatattcagtcagatgataaatggaatcctgaaccatatttatcttgcagtgaattcagtgggtccaccagacccatagctcacattgtggttaatttccatagttcctcagtgcatgattggtattgacgtaattggttgtagatagaactctcatattgtttccatgatatgttacagtcatgattttttttggtttgtttttattgagaccaggtcttgctctgtcacccaggctggagtgcagtggcaggatcactgctcgttgcagcctcaacatc

SEQ ID NO: 114554 - DNA, 569 bp, Homo sapiens
atgtatatgctaattatccttattctattaatacacattgtatagctgtataaaaaatcatactgtatcccataaatatgtacaattattacttgttaactagaaataaaagaaaataatgtcgataaactgaaaccagtagcttttaacaattctcaaataacaaatggatcaaagaagaaatcacgatgaaaattagaaaatacctacagatgaattaaaatgaaaacacaccataccaaaacttgtgatatgcagtgaaagcagtgctaaggaagaaaggtagagctataaatgcttacattaaaaagcaagaaatatttcaaatcaacagcttatctttgcaatttaagtactaaaaaaaactaaacccaaagacagcagaagaaggaaaacaataaagattagaatagagataattaaaatagactagaaaaacaayagagaaatcaatgaaaccaaaaattagttttttcaaaaataaacacaagtgacaaatctttcctagactgactaagaaaaaatgagaaaactcgaattactaatagcagcaatgatagtaagaacat

SEQ ID NO: 114555 - DNA, 569 bp, Homo sapiens
atgtatatgctaattatccttattctattaatacacattgtatagctgtataaaaaatcatactgtatcccataaatatgtacaattattacttgttaactagaaataaaagaaaataatgtcgataaactgaaaccagtagcttttaacaattctcaaataacaaatggatcaaagaagaaatcacgatgaaaattagaaaatacctacagatgaattaaaatgaaaacacaccataccaaaacttgtgatatgcagtgaaagcagtgctaaggaagaaaggtagagctataaatgcttacattaaaaagcaagaaatatttcaaatcaacagcttatctttgcaatttaagtactaaaaaaaactaaacccaaagacagcagaagaaggaaaacaataaagattagaatagagataattaaaatagactagaaaaacaacagagaaatcaatgaaaccaaarattagttttttcaaaaataaacacaagtgacaaatctttcctagactgactaagaaaaaatgagaaaactcgaattactaatagcagcaatgatagtaagaacat

SEQ ID NO: 114556 - DNA, 575 bp, Homo sapiens
attctttacagggtacaactcttgtatcacaaaataaacaaagatgartggatttgatatggaaatgtaataatgaataattggcaaaacatccaaatacaaatggaagtttagtatgttataaataatcaaagatattgtaaaaccactagaataaattatgagagatttattttataaaatcaaagtgtagatgtgcattctagaaattatttttaaaacatcagaaaattaaaactttgagacattcccttaagtattatgtatcacaaaataactataagcaacatcaaatacaaacaacaaccagagaaaaatactagcaattcacatctcagaaaactgtcaaattattcagacacataaagaatttgtccatgtcaattaaaaaatgcaccaacatgacagatatataaatatataatcagacattgagaaaataggaaatacaaaggtctcttaaaatatagaataatgggctgggcatggtggctcacacctgtaatcccagcactttgggaggccgaggtgtgagaatcacgaggtcaggagtttgagaccaggctggccaacat

SEQ ID NO: 114557 - DNA, 603 bp, Homo sapiens
ctcccactaaagtaattttattatttgggtttctagaacaataatggaaccaaattaacactggatgagtatagaaagaatgaataaatgccatctatgttaatctgattagcagaaagatagaggcatagataaagaggattatttaatatattgataatagttgaaatgacattctttatggggaaatgaagaattactttgattgtagtttagatagagaggacttattggacaactctccatttctaattccaggttccttttgatcttgttctcctcctcaatctcttttcacgttttaatcagtttatttttttctgtatgagctatttttttcctggaacattttactttttgtagacatttttctccttcaccttctctagaaaatgaatatggaaggttcttaaagcaccaaagaacatatrtataaaggaccttgagttgatgatgatgtttttaataatcattgcatctcaattatccaggcatggtccgggcaatgaaaattgtatattgaccatgaaagattaatattaagataacagaagaagggtaatgtcttagcttggtttctccagacagtagagactgaatcaa

SEQ ID NO: 114558 - DNA, 461 bp, Homo sapiens
ttgacatatgaaaaagtggttgaaaagtggttgaaagatgctcagtatgcttttttatattgatatttcagattgcagcctttttacttttgttaaaatcattatgacgtcaactggggggaatatttcatattggttgttttaaagggaacatgatacaatttaggattattataacaaatctcttaatatgctataatctcagtcaatccattaatttaacacatgaacaatttgatttcttttggccatttgagttgacaggctgtgcaaatttacaggttaaatgaaatcagttaatagcataaaaatttgtatttgaaaccaggattattggatttraggataataatcactcatttcttcttccccattttaagtttggcaccagagttagagaaatggaggtcaaagaatcaactcagctatgtggctgaaataaatgaccacaagcagaattc

SEQ ID NO: 114559 - DNA, 610 bp, Homo sapiens
tgcatcctagaacttaaaataaaataaaattaaaaaaagaatccttcattgtcccaaaataatttttattctcaagaagccaagcccaaaactagaagtttatagtcaagaaagttgcccatataatacctcatgttctggctcccttctatgcatcctcctctccaaatactcatgcctgcctcatcacctacctctcttcattccagccatatgtgagggtcrtagggaaagaaaaggaggtaggatgagacagaaggataataagacatttcaagacacactaaagtctccctggagaggttaaagcagtgcacatattcatataatacaagtgaaaacgcctaagagataaaagaaataatacgtaagtgtaaagataacacagtttcttcaagccaaaggctgataaatgtgggaactttgaaaaatgccactgagacacctgttagaagttttaatgtagagcatgataagctgagacacatttttagatacttttattcagagtcagagttaataagatacagagcaaaatagtcacaaaattattaggaatttcaccaaggggatgagaatcaatgatatggtttgactgtgtcctcaccaa

SEQ ID NO: 114560 - DNA, 542 bp, Homo sapiens
ggagaaatctttctgactccatactttaagcccaaatggttgctggacctagagaagctttggtggataacatccttagccataataaaagcttatggctttggttcttttccatgtactgttaaaacttcctggcacagttctactttcatataacatagctaaggatgaatgcccttggcttttgaggctgagtaatgctttcacaggttgaacatttcttactaaaaatgctagggacaagaagtgtttcaaatttcatattttcttagatttttgaatatttgcattgagcatccataatgtgagaatccgaaatccaaaatgctccagtgagcatttcctttgagcatcattccagaactcaaaaagttccaaattttagagcatttcagatttcagattttcatattaggagcgcttaacytgaagtacctcctgagtagataaggcaaaatggaatgtaattaagagatttggtgaggccaagagatttgtagtatcacttatattacactgtattttggagggacaaaaggttt

SEQ ID NO: 114561 - DNA, 542 bp, Homo sapiens
caaaatttctaaagggttataaaagctttttgcttctttaaaatttctgagtcattttggcaaaataaataacttatggtaacctggaattctatttcataacatcaagtgttttaaaccccgaacatatatagcagcctccmaaaatcaaacttcagtttcaaaattgtcttccctggcacctggctttttgaatatttcagagggcccctgaagtgtccagaaagagaagcaaacatgattatttgacgtgtttaggtacatgggattgccaaagtgatgttcaatcttctttaggttatactttggtaaataatgctaatatatgttccaaaattgtatgggatttctaaaactctaatgtctagcatatgctatcaatcataatgaaggttgttaagttattgtaaaccacagagataacaaacctgtcaattgtgtttctaagtgtaactaccctggacattttgttattcacagaccattgttgtcttgttttaatccttttttttttttcaaagatagtttataataagctatag

SEQ ID NO: 114562 - DNA, 578 bp, Homo sapiens
ttattgcatttcatgtcaatttaaccttgttcttcttcagagaagttaattcacccatattgttactattgttacgtaaatctttctttaaaagaccttcttgaatgacatatcactaattttccaatttgtgctagaaatccatcaaacttcataattgatagtttgggggwagagatactatgttttgaaatgagtggcctgtatgccacaataaacaaaaaaaaaacactttttatttttattactcaactcatataaaagtatacttcaaaggacagagggaaaatggttctcattggaaaaaacaagtttgatgtctgtcttagaagtcttgtcttgtatgcaagtaggtaggtcaggtgaataagaaagtgtaggtagggtaggttaaaattagctgccataggcaagataataccatcatctaggtctctttacattgagattagagtttatgctcaaatggcacaataaagacaatttatgattcccctttctctttcccaaatagtgtgattctttttctttgacttgtgccttgcatatacacggtcacttcatgacagaagggtcac

SEQ ID NO: 114563 - DNA, 561 bp, Homo sapiens
tacataatttcatgcggaatttaagatggtggtcagaaatctcagtggcaaagtttggcaaaagaaggcaaaaaagttgaaaaacaacaagtttccaacatttgggtttctgattttataaaggctgatgtggccggcttgccacatttgtgagcaaatcagttggtaattgctaacacttcaacaaattaaagaggggtgagcagtgcaatgggagttctgacataaaggcaggagcactgccatgcccactaactgaaaactcagaagtccaactcagtctacacacaatgagggcaatttactgggaaatttaggaaagagggcaattctatcagcccttctcaaatcaggaaataaacaagatgcttctatgaactctaggagcatgtttgttattttcttgttcaaggtccgatcaactctaccacttgaaaaggaagtttgaggagaggctagactgtcagwtgcctattagtttattaatactgaatgagtggagtctccatagtacagaagagaaaatacaataataaattcacagtagaaaaaaaatcttta

SEQ ID NO: 114564 - DNA, 541 bp, Homo sapiens
tatcccttaattgaatatttgtaactctctccaacatatgtatatattccattatcttatcaatcgcagtccaagcaaatgctctacttcttttctaccacactacattgatttcctcttgcttcctacattgatagtggccagctcaagactactaatcctgatgagtgattaactttaggataagattcagtcttcctagaccctcttgcttctgttataggaatcaggataaatagcactcatagtaagatctagcttctctatttttgctactgcccatggagaaggctcaagagggaggagtgattcttgttcacttgatatatgaccatacttccacagggtcttacttttcccagmgataaggcaagatagagttccaagcactgcagataaaactccccgcctttatttttcaggtctcgaagagtccattttcagggtctacagcatttcctagaccctctgtattggacccatcctcctatattcctgacattgagagccttgaaaccactgactgtcttgagtttaccag

SEQ ID NO: 114565 - DNA, 541 bp, Homo sapiens
tatcccttaattgaatatttgtaactctctccaacatatgtatatattccattatcttatcaatcgcagtccaagcaaatgctctacttcttttctaccacactacattgatttcctcttgcttcctacattgatagtggccagctcaagactactaatcctgatgagtgattaactttaggataagattcagtcttcctagaccctcttgcttctgttataggaatcaggataaatagcactcatagtaagatctagcttctctatttttgctactgcccatggagaaggctcaagagggaggagtgattcttgttcacttgatatatgaccatacttccacagggtcttacttttcccagcgataaggcaagatagagttccaagcactgcagataaaactccccrcctttatttttcaggtctcgaagagtccattttcagggtctacagcatttcctagaccctctgtattggacccatcctcctatattcctgacattgagagccttgaaaccactgactgtcttgagtttaccag

SEQ ID NO: 114566 - DNA, 581 bp, Homo sapiens
tgtaaattatactttaataactatataaaatatttgtacctgacattttggatatctttattgccatataattcacatattgtaatattcacatgtttaaattgtacaattcagtagtttttggtatgttggatttgcacaataactaaaatctaagcatagacaattttcatcattgttaaataaatgtcctaaaagaaacractttatgagtagttttttctctcatctttctccctatttcttgctcatcctctctttttctccatatgtagaataaacatatctacaatgcttctagcatctgcttctagattttttatttctccatatgtagaataaacatatgaatgacacaatgtagtttatatatacattagtttgtaaacatttacctaagtaactacaattatttgtaaagctaaacataaatccaaatattcaagtttatgaatatttaatttatgtaagcatttccccactattggaaatatagtttattttattgaaggcttttgaaaaaagtaaactatgagatatagaatatattaacagcttttttgtttgtttaaatgaaaaca

SEQ ID NO: 114567 - DNA, 413 bp, Homo sapiens
acagttatgttttttcaagtctctcatcaaagaaaaacctagggcctgatggcttcacctttgttttctgccaaatatttaaaaaaaattataccaattctactcaaactmttccaaaaaattaaagaggacagaatagttccaaagttatcctacaaggcctgataccaaaaccagacaaggacacagcaaaaaggaaaactacatgctaatatccctgatgaacatggaagccaaaattgtcaacaaaatactcacaaactgaattcaacggcaaattaaaaaaattattcaccatgatcaagtgagatttatcccagggatggaaggatggtacaacacacacacatcaataaatgtgatatatcaaattaacagaatgaaaatgaaaaagaaaaagtgtatgatcattt

SEQ ID NO: 114568 - DNA, 550 bp, Homo sapiens
actcactttttgccattggcctcaaggaactctcaagtgtccatttgcagaatgcacaaaaacagtgtttcaaaactgctgtatcaaaaaaagatttaaytttgtgaaatgaatgcacacatcacaaagcaatttctcagatagcttccttctagatttcatcctgggatagtctctttttcaccattagcttaatgacctttcaaatgtccatttgcagaaagtacaaaaatagtgttaccaaactgctgaatcaaaagcaatgttaaactccgtgagatgaatgagcatactgaaagtggcttctccagtagcttccttcttgattttttcctgggatatttgctttatcactgttggactcaatgagctcccaaatgaccgcacgcagaatggacaaaaacagtgtttccaaactgctgaatcaaaagaatggttcaactttttgagatgaatgcaaacatcacatctcagaaagttactttctagtctttttctgaagatattttctttttcaccataggccacaatgctctcccaaatacctctt

SEQ ID NO: 114569 - DNA, 550 bp, Homo sapiens
actcactttttgccattggcctcaaggaactctcaagtgtccatttgcagaatgcacaaaaacagtgtttcaaaactgctgtatcaaaaaaagatttaattttgtgaaatgaatgcacacatcacaaagcaatttctcagatagcttccttctagatttcatcctgggatagtctctttttcaccattagcttaatgacctttcaaatgtccatttgcagaaagtacaaaaatagtgttaccaaactgctgaatcaaaagcaatgttaaactccgtgagatgaatgagcatactgaaagtggcttctccagtagcttccttcttgattttttcctgggatatttgytttatcactgttggactcaatgagctcccaaatgaccgcacgcagaatggacaaaaacagtgtttccaaactgctgaatcaaaagaatggttcaactttttgagatgaatgcaaacatcacatctcagaaagttactttctagtctttttctgaagatattttctttttcaccataggccacaatgctctcccaaatacctctt

SEQ ID NO: 114570 - DNA, 550 bp, Homo sapiens
actcactttttgccattggcctcaaggaactctcaagtgtccatttgcagaatgcacaaaaacagtgtttcaaaactgctgtatcaaaaaaagatttaattttgtgaaatgaatgcacacatcacaaagcaatttctcagatagcttccttctagatttcatcctgggatagtctctttttcaccattagcttaatgacctttcaaatgtccatttgcagaaagtacaaaaatagtgttaccaaactgctgaatcaaaagcaatgttaaactccgtgagatgaatgagcatactgaaagtggcttctccagtagcttccttcttgattttttcctgggatatttgctttmtcactgttggactcaatgagctcccaaatgaccgcacgcagaatggacaaaaacagtgtttccaaactgctgaatcaaaagaatggttcaactttttgagatgaatgcaaacatcacatctcagaaagttactttctagtctttttctgaagatattttctttttcaccataggccacaatgctctcccaaatacctctt

SEQ ID NO: 114571 - DNA, 480 bp, Homo sapiens
cttaatatccagccaaactaaacttcatatgtgaaggagaagtaagatccttttcagacaaacaaatgctaacggaatctgttaccaccaaacatgccttacaagaggtccttaagggagtgctaagcgtggaagtgaaagactgytaatggccaccacaaaaatacatttaagtacatagaccattgacgttgtaaagtaactacacaatcaagtctccataataaccagctaacaacataatggcaggaccaaagctataaataccaatattaactgtgaatgtaaacagtataaatgccctgcttaaaactcacagaatggcaagttggataaagaagcaaagcccaactgtatctgttgtcaagagacccagctcatatgcaacaatacccattggcttgaagtaaaaggatggaaaaaaatctaccaagcaaatgcaaaacaaaaaagggtaagcattgttattctaattcagac

SEQ ID NO: 114572 - DNA, 480 bp, Homo sapiens
cttaatatccagccaaactaaacttcatatgtgaaggagaagtaagatccttttcagacaaacaaatgctaacggaatctgttaccaccaaacatgccttacaagaggtccttaagggagtgctaagcgtggaagtgaaagactgctaatggccaccacaaaaatacatttaagtacatagaccattgacgttgtaaagtaactacacaatcaagtctscataataaccagctaacaacataatggcaggaccaaagctataaataccaatattaactgtgaatgtaaacagtataaatgccctgcttaaaactcacagaatggcaagttggataaagaagcaaagcccaactgtatctgttgtcaagagacccagctcatatgcaacaatacccattggcttgaagtaaaaggatggaaaaaaatctaccaagcaaatgcaaaacaaaaaagggtaagcattgttattctaattcagac

SEQ ID NO: 114573 - DNA, 356 bp, Homo sapiens
gaattctatcaaactactaagggaggaaataataccaatgttacaaaarctttattcagcaaatagaggatgaaggaaacttcccaactaaccttatttcatttgatatcaatattaccctgatatcaaaacaagacaaagacattacaagcaaacacagctatataccaatatcccttgtgaacctagacataaaaattcttaaccaaatattagcaaatgtaattgagcaacatatgaaaaggattttataccataatcaaatgaagtttatctcaggaatgtgaggttgacttaacatccgaaaatcaatgtaataaactatattaacagaataaaggacaaaaccatatgat

SEQ ID NO: 114574 - DNA, 356 bp, Homo sapiens
gaattctatcaaactactaagggaggaaataataccaatgttacaaaaactttattcagcaaatagaggatgaaggaaacttcccaactaaccttatttcatttgatatcaatattaccctgatatcaaaacaagacaaagacattacaagcaaacacagctatataccaatatcccttgtgaacctagacataaaaattcttaaccaaatattagcaaatgtaattgagcaacatatgaaaaggattttataccataatcaaatgaagtttatctcaggaatgtgaggttgacttaacatccraaaatcaatgtaataaactatattaacagaataaaggacaaaaccatatgat

SEQ ID NO: 114575 - DNA, 604 bp, Homo sapiens
gaattcaaattaagttcttgccccaaggatgtgacttctactacacagtttcttttggcctgagggcaattcctagggcatgaacttagtcatatgccctcaacagacagcactctaaggaagctggggaatgagggtctccattctgcagggaggcctggactacgcaccacagaagacactactctgtccatccctcatgtcatttggatccatgacttcatataacttctytccatctaggaatagctcctccaggattttggttggtttcttttgctggggaaacgtgaaagtaacattcatggagggaaaaatagctccttggctcttcaactggtctttcaccctaaactgatcatctgcctttcctactatacaggtactatcaggtttacattcttaccctcagctagcacctccactggtctaggtcacttacctggtgataggagaaggggggtgtagtagtcatggctactagacttgtccttttaaattgagcaatcaaaatttagtaagggactacttaaacatcccttggctgccaaacacattcctgtctacttccgttgtgtaacagcattgaattgcagagataaga

SEQ ID NO: 114576 - DNA, 583 bp, Homo sapiens
atatgttttcatgctattgagttgtatgaatrctttatatattctggatattaatcctttatcagatgtatggcttgcaaatattttctccctttttgtaggctatctctttactctattgattgctccctttgcttgcacagctttttagtttgatataatcccgcttgtctatttttgcttttgttgcctgtgctttgggggtcatatccagaaaatcattgcccagaccagtctcatggagcttttcctgaatgttttcttctagtagatttatggtttcaggttttatatttaagtctttagtccatttgtgtttttttttttttttgtatatggtatgagataagggtctaatttcatttctctgcatgtggagttctcccaacaccatttattgaaaagattgtcctttccccattgtgtattcttggcatatttactgaaaatcaattggccttaaacgtggatgtattttgaggctctctattctattccattggtctaccagtctgttcgtatgccagtatcatgttatatttttgattactatagcatcatagtatattttgaaactggataa

SEQ ID NO: 114577 - DNA, 583 bp, Homo sapiens
atatgttttcatgctattgagttgtatgaatgctttatatattctggatattaatcctttatcagatgtatggcttgcaaatattttctccctttttgtaggctatctctttactctattgattgctccctttgcttgcacagctttttagtttgatataatcccrcttgtctatttttgcttttgttgcctgtgctttgggggtcatatccagaaaatcattgcccagaccagtctcatggagcttttcctgaatgttttcttctagtagatttatggtttcaggttttatatttaagtctttagtccatttgtgtttttttttttttttgtatatggtatgagataagggtctaatttcatttctctgcatgtggagttctcccaacaccatttattgaaaagattgtcctttccccattgtgtattcttggcatatttactgaaaatcaattggccttaaacgtggatgtattttgaggctctctattctattccattggtctaccagtctgttcgtatgccagtatcatgttatatttttgattactatagcatcatagtatattttgaaactggataa

SEQ ID NO: 114578 - DNA, 559 bp, Homo sapiens
attttgtcacagaataagtgatgtccttagggttctagccatgtttcgtatgagttccagattttgtctctaagttaactgaacagagatagaactacmtcatgcctgatgagaacatacccagttcatgcaaacatttgggatctcagaaggaggttgggaagccttccactaacaaccatcctggaactcaatcccattaaagtgaatcctgatatatatagcatatactactaggaaaaacaatttggaagtctactaggcctgcttccaaagaacccgtgttgaatactttaaagttactttttcctcaaaacaaaagaaaacatatattagattctcatttagctgcctatccggcttccctttctgaaaacgaatgcctcccagtactacttccccaattaaaaggtacaggaaaggccccctattggcctacattactctggctcttctccaggaatttggatgaagagatttcagtctcagtctgggtttaattttttttttaaacagaagatacataagaactttgatgtctcttccttgaggcataaac

SEQ ID NO: 114579 - DNA, 548 bp, Homo sapiens
aaataaatatttaactctgtggaatgaatgcacacatcagaaagcagtttatctgaaaacttcttctagtttttatctgaatttactttctttttcaccatagacttcaagacactccaaaatatcccttcacagattctacaaaagcagtgtttccatattgttgaatgaaaaaaagatttaattctggtagatgaatgcacactttgtaaagcagtttctcagataggttcttctaggttttttcctgggatattccttccagtttttatctgaagatattttctttttcaatgtaggcctcaatgcactcccaaatatmcctttgaagattctacaaaaacagtgcttccaaactgctgaatgaaaaggcaagtttaattctgcaagatgagtgcacacatcacaaagccgtgtttcagatagcttcatactagcttttataatgggatattcacttttctgcaattggcctcaatgagtttctaagtgtccacttgcagaatggacaaaaacagagtttccaaactactcaatcaaaagaaaag

SEQ ID NO: 114580 - DNA, 579 bp, Homo sapiens
ccaaatatccattcacagaaggaacaaaaacagtatttccaaactgctgaatcaaaagaaatttttatttctgagagttgaatgcacacatgacaaagcagtttctcagaaatcttctttattgtttttatgtgaagatattttatttttcaccataggactcaatgctctcccaaatagccctttgcagatccagaaaagcattgtttccaaattgttgaatgaaaataatggtttaattctgtgagatgaatgaaccaatcacaaagtggtttctcagatagcttccttctagttttcattctgggatgttcacttttttcaacgtaggcttcaatgcaaccccaaatatccctgtgcagattccaccattctcgtgcagaaaccatcattctcagccaactatcacaaggacagaaaaccaaacactgcatgttctcactcataggtgygaattgaaccatgagaacgcttggacacaggaaggggaacatcacacaccagggcctgtcatggggacggtggagggggcagggatagcattaggagatatacttaatataaatgatgatttaacgg

SEQ ID NO: 114581 - DNA, 643 bp, Homo sapiens
aaattgagggtccaattttgttttctttgaattgtttattttcatatattaatttttcatctacatgtagattctcaattttttactactcttgcttattcttaattaatacaattgtttttcttaattgatcaattccaatagttctatagtaggtgctgatatctggtgagaaaagttcctctcaatagtctttttttgggtaaaatgttctgactattcttctacatgaactttaagataatttaatccaattttaaaatgcttttgtgattctaatgtgaatttaattgaatttatatataattttaggagatttatgtttttacaagagttttgtttgtktttttgagacagggtctcactttgtcacccaggcaggagtgcagttgtggtatctcagctcactgaagccccaaactcccacctcagcctcccaagtacctggttctataagcatgcgccaagcccaaatagttttttgttttgttttgttttgtttagatatagcgtttcacaatttgccgaagctggtcttgaactcctgggctcaagcagtcctcctgcctcagcctcccaaagtgctgggattacaggtatgagccactgcacctagccccatgtgtttcttatttaatagctt

SEQ ID NO: 114582 - DNA, 530 bp, Homo sapiens
catcacgtatttacaccatctgccaatggcggtccaatgcctacgttcagcccatattcaaggggaggacactccccagcagttgatgggcagagggatgtcaagaaacgtgtggacttcttttaaaagcaccacacatggagaggagaagtagtggtgggtgccataggttcatcatttctggctgcgcttctgtttagtacaacccacacgggtcctgrtaattatttctgttgcccacacaacaggtgggttcgatagcttggcgagcgacaagccagtcaccacaaccaaggaggctttaacaaggggattgtatcacttgtaacaagtcaggagaacaccagggagagctcccaaaacagcgcctcccgaacacggtgacacagggcttctcctgggcttgtgagctgagtcaccacgtgcagaggtggagcggaggcaggggaggccatcaccgatcatgcctcttcatgcatcgaatgtgtagaacatggcagagaagctcttccctgggccaggtttttaga

SEQ ID NO: 114583 - DNA, 627 bp, Homo sapiens
ttgtacaacctcagctactacaattgcctataacaccccagcttctcaggaggccttgagcccattcacccacctagtacattacaattacagtagacctttgagaaagccatcattaagkctatttataactaaggaagtctcacagagtgacagactctatgccactctcctctaagggctggtgcttgcacctgccataggagtacaagagggcaggctagcctaatccagttctacccagctttgcccccatgtgcagttgaaagtggaaccagttctctgcagacaagtccgtggcctgaggcatcatagaactgcatgtaaactaagatcaaccatataccatactactaccaccttagtcaactcttacctgcagggaccacctactggcctggaggttgaaatgcacaacccaataaaaaatccgctgacacaaatgcacagtgcttaggagcaagataagtttcttaagaccaccacctccccatttctgtaggaggcggagagcctactcacacacccagaatgccactactacagttagcatttgagaaaaccacaaacttaggctatctataaccaagaaattcatacaaagttttggcttcctgaaagcaccca

SEQ ID NO: 114584 - DNA, 627 bp, Homo sapiens
ttgtacaacctcagctactacaattgcctataacaccccagcttctcaggaggccttgagcccattcacccacctagtacattacaattacagtagacctttgagaaagccatcattaaggctatttataactaaggaagtctcacagagtgacagactctatgccactctcctctaagggctggtgcttgcacctgccataggagtacaagagggcaggctagcctaatccagttctacccagctttgcccccatgtgcagttgaaagtggaaccagttctctgcagacaagtccgtggcctgaggcaycatagaactgcatgtaaactaagatcaaccatataccatactactaccaccttagtcaactcttacctgcagggaccacctactggcctggaggttgaaatgcacaacccaataaaaaatccgctgacacaaatgcacagtgcttaggagcaagataagtttcttaagaccaccacctccccatttctgtaggaggcggagagcctactcacacacccagaatgccactactacagttagcatttgagaaaaccacaaacttaggctatctataaccaagaaattcatacaaagttttggcttcctgaaagcaccca

SEQ ID NO: 114585 - DNA, 627 bp, Homo sapiens
ttgtacaacctcagctactacaattgcctataacaccccagcttctcaggaggccttgagcccattcacccacctagtacattacaattacagtagacctttgagaaagccatcattaaggctatttataactaaggaagtctcacagagtgacagactctatgccactctcctctaagggctggtgcttgcacctgccataggagtacaagagggcaggctagcctaatccagttctacccagctttgcccccatgtgcagttgaaagtggaaccagttctctgcagacaagtccgtggcctgaggcatcayagaactgcatgtaaactaagatcaaccatataccatactactaccaccttagtcaactcttacctgcagggaccacctactggcctggaggttgaaatgcacaacccaataaaaaatccgctgacacaaatgcacagtgcttaggagcaagataagtttcttaagaccaccacctccccatttctgtaggaggcggagagcctactcacacacccagaatgccactactacagttagcatttgagaaaaccacaaacttaggctatctataaccaagaaattcatacaaagttttggcttcctgaaagcaccca

SEQ ID NO: 114586 - DNA, 536 bp, Homo sapiens
tgcccaactgtgatggagtatggagaagtgccacagcctgagacaggcatggtgttcagatggagatctggatcactttacctcgttatccatctagacaaacagagatgctaacagaggatgtggggaatctagtattggtaggagagaaaggacatgaggaggagcagtgcagcccagagaccagctgctgcagctagggattcattccactccctggaggaactcttccccatgagtttaaatgaagcaagtggatcccaacagcccggcaggtggactatagcacatgcaagtgcacctcctycatcccctctccaagagagagatggtcaaggcctggcccccttgctcatttgtgccatgaagctccgaagtcctgtgtgggcctggataaggactctggggcaactacatctccattcaattcctccttctgacagaacctccctcccctactcccttacgggctattctgccacgagggctccccagtcaacttcttgtttgtcaatctccatctcaggattgaattc

SEQ ID NO: 114587 - DNA, 569 bp, Homo sapiens
tcagcttgagatcagactctctgaggaatgtttttttttcctgatgaatctgagccrttcaaggtccttataaataagtgagagcacctttgatttttgactttttatagttaacagtttcagtttgctaatacaaaagacctcatgccttttcatccagaaaacagagaacactttctattatgtaagagtattatgtttgaaggagtatgtttgcttcaactatgcgtgctatggtacagaaagaaaaaccacctccctgtaggtctaaatccaaggggttttcaatgtatttgggttaagttatgttgtaaggttatagctctctaagatttttacaagatgcattattaaacatgaatcttctgtaacgtgtacagcatatcttgtataaaacaatgcaatattttcttctaagtatgggatggctttggtcacccatgcttaaaaaaactttgaagagacaattcatctttttcctatgaagcaatttttattaattgacataattcttcagcagtcaagctattactgtcattaggtagtcctttcctttattcagaagccca

SEQ ID NO: 114588 - DNA, 569 bp, Homo sapiens
tcagcttgagatcagactctctgaggaatgtttttttttcctgatgaatctgagccattcaaggtccttataaataagtgagagcacctttgatttttgactttttatagttaacartttcagtttgctaatacaaaagacctcatgccttttcatccagaaaacagagaacactttctattatgtaagagtattatgtttgaaggagtatgtttgcttcaactatgcgtgctatggtacagaaagaaaaaccacctccctgtaggtctaaatccaaggggttttcaatgtatttgggttaagttatgttgtaaggttatagctctctaagatttttacaagatgcattattaaacatgaatcttctgtaacgtgtacagcatatcttgtataaaacaatgcaatattttcttctaagtatgggatggctttggtcacccatgcttaaaaaaactttgaagagacaattcatctttttcctatgaagcaatttttattaattgacataattcttcagcagtcaagctattactgtcattaggtagtcctttcctttattcagaagccca

SEQ ID NO: 114589 - DNA, 614 bp, Homo sapiens
cccctctgtctgctcactggcctttgcaagacatagcagttgcttgattttcctttggataagagtcttatcttcggcactcttgactctagccttaaatttagatttctattccagaatacctctcatatcaatcttaaaacctaagatgggtaaagaggtcataagatttttagtatgaaagagtttgcttagttaaattatatctcaggaaactcattcatctacmagttaaattgtaaaatattgtttgttgtatctgaaaaaatctttagaacaagaaatgtaactgggtagcctgttatatcaaagaaccctcgatttattaagcctcctcatagccatatccttatatagccctctctgacactgacttaatagacacttgacaaatgatagtaaatttaggcttgccaaattaaaatggcagcaatgccaaatgagaacctgatctactctaccagagagactaagtggaggagaacccagctgatagcaccagtgaagtgccagatatttgagtgatgtcactttggactatgtaggccttgtcagtcatataaggaaacctaggcaagactccgactattatcctcctgagcccaaccaaagtt

SEQ ID NO: 114590 - DNA, 614 bp, Homo sapiens
cccctctgtctgctcactggcctttgcaagacatagcagttgcttgattttcctttggataagagtcttatcttcggcactcttgactctagccttaaatttagatttctattccagaatacctctcatatcaatcttaaaacctaagatgggtaaagaggtcataagatttttagtatgaaagagtttgcttagttaaattatatctcaggaaactcattcatctacaagttaaattgtaaaatattgtttgttgtatctgaaaaaatctttagaacaagaaatgtaactgggtagcctgttatatcaaagaaccctcgatttattaagyctcctcatagccatatccttatatagccctctctgacactgacttaatagacacttgacaaatgatagtaaatttaggcttgccaaattaaaatggcagcaatgccaaatgagaacctgatctactctaccagagagactaagtggaggagaacccagctgatagcaccagtgaagtgccagatatttgagtgatgtcactttggactatgtaggccttgtcagtcatataaggaaacctaggcaagactccgactattatcctcctgagcccaaccaaagtt

SEQ ID NO: 114591 - DNA, 622 bp, Homo sapiens
tatgtttcagttatcccacaaaagcaggaaattactttcaacaatgcacctgaggtattttatagtaactctctggttatttccatgtrtcaggtggagaaatatggatcagacacaaagacaataagattcattgctctctagcggaatactttttcttaaatgggtttattagtaaattgagaacttgatttgatgtttactctgacgtgtgatgtaaagttcttcctaaagccccctttcttttcctttttaaaattattaacatagatgaatacagagaatgtgaacatattagctatacagatatcacaacaggagaacagtaaatgttatgttttagactatttcaaccctaaaatatggacacaggttggaatgaggatccaattcagcataatagcctctaatggagtaggaaacatataaaatcctgtgttgctttatgaaatgttgcttatttgctgcatggttttaaaaagtatcagttttatttaatagtgggatctttatgtcagtgattactgatgtttccagcaagctaattcataccagggagacaatgtaaacatttagaaaggggattatatttctgtactatctgcatatgtcagatgacaac

SEQ ID NO: 114592 - DNA, 622 bp, Homo sapiens
tatgtttcagttatcccacaaaagcaggaaattactttcaacaatgcacctgaggtattttatagtaactctctggttatttccatgtatcaggtggagaaatatggatcagacacaaagacaataagattcattgctctctagcggaatactttttcttaaatgggtttattagtaaattgagaacttgatttgatgtttactctgacgtgtgatgtaaagttcttcctaaagccccctttcttttcctttttaaaattattaacatagatgaatacagagaatgtgaacatattagctatacagatatcacaacaggagaacagtaaatgttatgttttagactatttcaaccctaaaatatggacacaggttggaatgaggatccaattcagcataatagcctctaatggartaggaaacatataaaatcctgtgttgctttatgaaatgttgcttatttgctgcatggttttaaaaagtatcagttttatttaatagtgggatctttatgtcagtgattactgatgtttccagcaagctaattcataccagggagacaatgtaaacatttagaaaggggattatatttctgtactatctgcatatgtcagatgacaac

SEQ ID NO: 114593 - DNA, 622 bp, Homo sapiens
tatgtttcagttatcccacaaaagcaggaaattactttcaacaatgcacctgaggtattttatagtaactctctggttatttccatgtatcaggtggagaaatatggatcagacacaaagacaataagattcattgctctctagcggaatactttttcttaaatgggtttattagtaaattgagaacttgatttgatgtttactctgacgtgtgatgtaaagttcttcctaaagccccctttcttttcctttttaaaattattaacatagatgaatacagagaatgtgaacatattagctatacagatatcacaacaggagaacagtaaatgttatgttttagactatttcaaccctaaaatatggacacaggttggaatgaggatccaattcagcataatagcctctaatggagtrggaaacatataaaatcctgtgttgctttatgaaatgttgcttatttgctgcatggttttaaaaagtatcagttttatttaatagtgggatctttatgtcagtgattactgatgtttccagcaagctaattcataccagggagacaatgtaaacatttagaaaggggattatatttctgtactatctgcatatgtcagatgacaac

SEQ ID NO: 114594 - DNA, 636 bp, Homo sapiens
gttcctactgcatatttctggtcacaatattatcactgtacttctaaatggagactaaaacacttataacattcaacactgaaataagtgtgaggtatacatacatttttaaaaagattrataaaaacaagtaagatgattatttacccaattattccagttcagagtctcgggtggcaagaacctattcttactcagcatgcaatgcaggaataaaccctgcacaggatgctattccatggcagggcacaaccacattcactcacattgggacacacagtggggaaatgccaattaaccagacatgcacatcttggggatgtgagaggaagcaggagttcctggagaaaacccatgcaggcatggggagaacatgcagaccctacacagatggtagccctgtccaggaatcaatatttattctcatctacattatagcaaaacaacattgaataaaacaactttatttgaggacctgttttacttgtacatctttgggaaaatctttcaacttttattactcataatgttctcaataaaagtgtgttaagaatacatatttcaggaggttttttgagacaatcaaatgtggcaatgcatgcagaattaatagcccataaggcattttatacagta

SEQ ID NO: 114595 - DNA, 660 bp, Homo sapiens
ttcttgtagttttgtactgactattggaaactcattcagttttgccttaaagcacccagtaacctatgaacaaaatgcataaaaactattacatgatgttcagcctttgtagactaaacacaacaggtatatgcaattgcatagtgctgatgaytcacaaaaacaaaacaaaacaaaacaaaacaaaacaaaaaactctgtcctcagactgatttgtgaaaataactatttaatctaaaaataaactaaagagtgaaaatgagaattagcaaatagagttgaaggtgtgtctcaaaatggattgtattttatatagccttttactataattattcttataacagggcttgttttcctctattagactgcaaatgtgttggttactgaggcggttgcacttgtttttgtatcacttatgaaacctagtatagtgctttgtattatagtaatcattcattagatattatgtgaatgatttgaattatatttcatagtagctcaaagttagtcttgatggataaatgaatgtaatacaaccatatacattattagtaaggaacttaataatatcatgaagtatctttaaccaaagtaataattaaaaagtaggagtaaaccatagtaagttcaaatttagaatttgatagataatggagatta

SEQ ID NO: 114596 - DNA, 660 bp, Homo sapiens
ttcttgtagttttgtactgactattggaaactcattcagttttgccttaaagcacccagtaacctatgaacaaaatgcataaaaactattacatgatgttcagcctttgtagactaaacacaacaggtatatgcaattgcatagtgctgatgactcacaaaaacaaaacaaaacaaaacaaaacaaaacaaaaaactctgtcctsagactgatttgtgaaaataactatttaatctaaaaataaactaaagagtgaaaatgagaattagcaaatagagttgaaggtgtgtctcaaaatggattgtattttatatagccttttactataattattcttataacagggcttgttttcctctattagactgcaaatgtgttggttactgaggcggttgcacttgtttttgtatcacttatgaaacctagtatagtgctttgtattatagtaatcattcattagatattatgtgaatgatttgaattatatttcatagtagctcaaagttagtcttgatggataaatgaatgtaatacaaccatatacattattagtaaggaacttaataatatcatgaagtatctttaaccaaagtaataattaaaaagtaggagtaaaccatagtaagttcaaatttagaatttgatagataatggagatta

SEQ ID NO: 114597 - DNA, 550 bp, Homo sapiens
atactttaataaactaaacacatttgtttctgcagtggatggaaatatgtttgtcacaggtaaaattgtcacttgggtaaattttatctcaagcaactcctttttagttttaatactttctatgttgcccaaatcaagtcttatttccatgaatcactgttttatgtaataattttcttggtgaggtcaatttacatagttttggtactttcatgtcagatttctaaggtagtataatttactttagaggaagaatttctacacagatcatgyaattgtctcttcattatatatcagggtaaaatctataaaaaacaaaattggtttgagaacaaagctgtcattacttgcaagatgaaaacagtaaaaattgcatgtgtttattaaaacacagaagtatattcctgtgcaaattaatgcagattctgaagcgaaagacaggacttttgagagattttgagtccaagggttcacctcttcaaacacaactgaaaaaactctattttttctatttttaaatctaatcagtttatatatgcccaggtccagc

SEQ ID NO: 114598 - DNA, 432 bp, Homo sapiens
ggtaacagagtgagattctgtctcaaaaaaaaaaaaaaaaattccaataagtcatagattttgttcctttacmtaatcctatatttctcaaaagtttggttcattatttttaaattctttttttatttttgtctgactgggttgattcaaaggtctggtctttgagctcttaaattatttcttctatttggtctagtctgttgctaaggctgtgaactgttttttgaaattcctatagtaaatttttcaatgcaagaagctctgcttggttctttctcaatatggctatgttgtcattcaaatccaggatcgttgttatggggttgttgctggatttcaactttctgttggcttttggtgattttttttgccacttatatcttgaatactatacctgtcatttcagacgttgcattctggttaggactcatt

SEQ ID NO: 114599 - DNA, 432 bp, Homo sapiens
ggtaacagagtgagattctgtctcaaaaaaaaaaaaaaaaattccaataagtcatagattttgttcctttacctaatcctayatttctcaaaagtttggttcattatttttaaattctttttttatttttgtctgactgggttgattcaaaggtctggtctttgagctcttaaattatttcttctatttggtctagtctgttgctaaggctgtgaactgttttttgaaattcctatagtaaatttttcaatgcaagaagctctgcttggttctttctcaatatggctatgttgtcattcaaatccaggatcgttgttatggggttgttgctggatttcaactttctgttggcttttggtgattttttttgccacttatatcttgaatactatacctgtcatttcagacgttgcattctggttaggactcatt

SEQ ID NO: 114600 - DNA, 519 bp, Homo sapiens
tatttggtctagtctgttgctaaggctgtgaactgttttttgaaattcctatagtaaatttttcaatgcaagaagctctgcttggttctttctcaatatggctatgttgtcattcaaatccaggatcgttgttatggggttgttgctggatttcaactttctgttggcttttggtgattttttttgccacttatatcttgartactatacctgtcatttcagacgttgcattctggttaggactcattgctagattgctggtgtaatcctttggaggtgatggaacattctggctttttgtattgccagagttcttgtgatggtttcttctcatctgagagacttgacgcttcctttgttgaatttgctatcatttggaaggagtttttttttaatttttcattctttctttctcttaagggtatgactgtggtgtatgttgtataggatcattttgcttcatttctgggtactttcagaggaccaaggctctgtacaagttccttggttgcagatagg

SEQ ID NO: 114601 - DNA, 519 bp, Homo sapiens
tatttggtctagtctgttgctaaggctgtgaactgttttttgaaattcctatagtaaatttttcaatgcaagaagctctgcttggttctttctcaatatggctatgttgtcattcaaatccaggatcgttgttatggggttgttgctggatttcaactttctgttggcttttggtgattttttttgccacttatatcttgaatactatacctgtcatttcagacgttgcattctggttaggackcattgctagattgctggtgtaatcctttggaggtgatggaacattctggctttttgtattgccagagttcttgtgatggtttcttctcatctgagagacttgacgcttcctttgttgaatttgctatcatttggaaggagtttttttttaatttttcattctttctttctcttaagggtatgactgtggtgtatgttgtataggatcattttgcttcatttctgggtactttcagaggaccaaggctctgtacaagttccttggttgcagatagg

SEQ ID NO: 114602 - DNA, 519 bp, Homo sapiens
tatttggtctagtctgttgctaaggctgtgaactgttttttgaaattcctatagtaaatttttcaatgcaagaagctctgcttggttctttctcaatatggctatgttgtcattcaaatccaggatcgttgttatggggttgttgctggatttcaactttctgttggcttttggtgattttttttgccacttatatcttgaatactatacctgtcatttcagacgttgcattctggttaggactcattgctagattgctggtgtaatcctttggaggtgatggaacattctggctttttgtattgccagagttcttgtgatggtttcttctcatctgagagacttgaygcttcctttgttgaatttgctatcatttggaaggagtttttttttaatttttcattctttctttctcttaagggtatgactgtggtgtatgttgtataggatcattttgcttcatttctgggtactttcagaggaccaaggctctgtacaagttccttggttgcagatagg

SEQ ID NO: 114603 - DNA, 507 bp, Homo sapiens
atggcagtcaccaggtagacatcaggcctcagatagacaccaaggtcccagatgtacagcaggccccaactgaaccccagactcatgtggacatcaggccacaggtagacaccaagccttaggtagatacctaacttcaggtagtcatcagacccaaggtggacacccagtccccaggtggacagtcaggccccaggcacacatcaggccttaagtggacacccaggccccaggttgatatccagttcccaggcgatcaccaagccccaggtagacaccaggccgtaggtgagcaacaggatgcagtaggtcatcaggccacagctggataccagtccccggtgatcacaaggccccagtgggacatagatctaaggcagacatcaggccccaggtggacatacagrtctgaggtggaattcaccctgagggggacattcggccccaggtacgcatcaggcctcagctgaataaccagtccccaggtggacattaacccacaggtca

SEQ ID NO: 114604 - DNA, 579 bp, Homo sapiens
agtgtcttatatttctatttgttttacagtgtttcctgaggaacatatgttttacattttgatgaactcaagttgtcaatttctactttgatgaaacggtgtttgtgtcatgtctaagtagtatttactagcctgaggtcaaatacttttctatattttctcctatacataatttttcttccttttttttcactttgtttttacattttacatttaggcatatgatctgtactaaattaatttttgtatcatgagttacrtgttaaagttctactttttgcatatgagtatctaattgttccagcagaatttgttgaagggctatcttttatttactgaattacctttgtatctttggagaacaccaatttaccaaaattctgtacatatatttctgaattttctattatcttccaatgacatttctgtctatctttatgccaatatcacactattttcattactgtagccttataagctttggtattagattgtgctaatccttcaaaaatattcttatttttaaggattattttggctattttagactctttgcatttctactgaagttttaaaatt

SEQ ID NO: 114605 - DNA, 652 bp, Homo sapiens
gtgttttacacttgtcatcaacttaatatttttattcaagtttagctcttctttaatcatgtttatatcatttgttagcctaagctgataaatattctactggattaccttctagaagtttttaagcatttattttctatctaattttttcagatatcaaataatccctcatatattatacatttcccatgaagtttttatttacaytggatgaatttgtagttctttaaccatgtgaaacatttcattatgaaatatttcaataaaaatatgatgtataacttttatcaatatgtttttgttcattcttgcatatattagtttttttggctattaaattttctaagtggaaactttttggtaagatttttctttctggtttaactggctatctgatcgaaaaacaaccaaaatatctccagatgggttaaagaattacacacaaaaatacaactttagtgaagtagatccatatgttatcaaatagcttaaaactaacttttgaaaaaaaaagtcaatgtgactacttaaaaattttgttcagataattgcagggataccagtttgaaataatctaacttaaaatcatacatttatgtacataaaaataaatttggtatcaatgaaaacactaaatctagaaaacaatcta

SEQ ID NO: 114606 - DNA, 652 bp, Homo sapiens
gtgttttacacttgtcatcaacttaatatttttattcaagtttagctcttctttaatcatgtttatatcatttgttagcctaagctgataaatattctactggattaccttctagaagtttttaagcatttattttctatctaattttttcagatatcaaataatccctcatatattatacatttcccatgaagtttttatttacactggatgaatttgtagttctttaaccatgtgaaacatttcattatgaaatatttcaataaaaatatgatgtataasttttatcaatatgtttttgttcattcttgcatatattagtttttttggctattaaattttctaagtggaaactttttggtaagatttttctttctggtttaactggctatctgatcgaaaaacaaccaaaatatctccagatgggttaaagaattacacacaaaaatacaactttagtgaagtagatccatatgttatcaaatagcttaaaactaacttttgaaaaaaaaagtcaatgtgactacttaaaaattttgttcagataattgcagggataccagtttgaaataatctaacttaaaatcatacatttatgtacataaaaataaatttggtatcaatgaaaacactaaatctagaaaacaatcta

SEQ ID NO: 114607 - DNA, 652 bp, Homo sapiens
gtgttttacacttgtcatcaacttaatatttttattcaagtttagctcttctttaatcatgtttatatcatttgttagcctaagctgataaatattctactggattaccttctagaagtttttaagcatttattttctatctaattttttcagatatcaaataatccctcatatattatacatttcccatgaagtttttatttacactggatgaatttgtagttctttaaccatgtgaaacatttcattatgaaatatttcaataaaaatatgatgtataacttttatcaatatgtttttgttcattcttgcatatattagtttttttggctattaaattttctaagtggaaactttttggtaagatttttctttctggtttaactggctatctgatcgaaaaacaaccaaaatatctccagatggrttaaagaattacacacaaaaatacaactttagtgaagtagatccatatgttatcaaatagcttaaaactaacttttgaaaaaaaaagtcaatgtgactacttaaaaattttgttcagataattgcagggataccagtttgaaataatctaacttaaaatcatacatttatgtacataaaaataaatttggtatcaatgaaaacactaaatctagaaaacaatcta

SEQ ID NO: 114608 - DNA, 652 bp, Homo sapiens
gtgttttacacttgtcatcaacttaatatttttattcaagtttagctcttctttaatcatgtttatatcatttgttagcctaagctgataaatattctactggattaccttctagaagtttttaagcatttattttctatctaattttttcagatatcaaataatccctcatatattatacatttcccatgaagtttttatttacactggatgaatttgtagttctttaaccatgtgaaacatttcattatgaaatatttcaataaaaatatgatgtataacttttatcaatatgtttttgttcattcttgcatatattagtttttttggctattaaattttctaagtggaaactttttggtaagatttttctttctggtttaactggctatctgatcgaaaaacaaccaaaatatctccagatgggttaaagaattacacacaaaaatacaactttagtgaagtakatccatatgttatcaaatagcttaaaactaacttttgaaaaaaaaagtcaatgtgactacttaaaaattttgttcagataattgcagggataccagtttgaaataatctaacttaaaatcatacatttatgtacataaaaataaatttggtatcaatgaaaacactaaatctagaaaacaatcta

SEQ ID NO: 114609 - DNA, 488 bp, Homo sapiens
atacctacctggtgcccaagtattctcatgtgcctaacatccactagttggcctggtgttcatctgagggcttggwgtcaaccagtggctttatgtacacctggattctagtgtcctcctggggccttatgcctaccaggagtctggtgtacccctggggtctagtatccacctggagtctgggcgtccacctggagcctaatgttgaggttagactgagtgtcagcctgaggcctgatgtctactagggcataggtattcacctggggcttgttgtttacctggggactaatgtcaaccttgagcctaggtatccacctggggaatagtgtccagttgcagccagatgtccacctatggcctgaagcatggttgttatcctaaggccttgtattagtccattttcacagttataaaaaactacctgatattaggcaacttatgaggaaaagaggtttaactgacccacagttcttcaggcttaatag

SEQ ID NO: 114610 - DNA, 469 bp, Homo sapiens
tgggtggagacatagagccaatatcaggcctgatgcccgcctggagtcatgtctacctgaggccttatgtagacatgaggcctgggcattcacctaggacctcatgttaagataggggctggagttcttttggtgcctagtgtatacctggggcccagatgtataactagarcctgatgtttcagatggaaacctgggccccaggtgctcatcagatcccaggtgaaaactcaggcttcaggtgcacatcagactccaagtggacacataggccctaggttgataccaagatttcaggtagactctgggtcccagaaaaacaccctgccctaggtggacagctgaacctgagtagacatcaggccccagatcgacatctggccccaggtagattccttggcccaaggtgaatactcagtctccagccctaggggaattcagtcttaggtgattaaggactggcgttcct

SEQ ID NO: 114611 - DNA, 469 bp, Homo sapiens
tgggtggagacatagagccaatatcaggcctgatgcccgcctggagtcatgtctacctgaggccttatgtagacatgaggcctgggcattcacctaggacctcatgttaagataggggctggagttcttttggtgcctagtgtatacctggggcccagatgtataactagagcctgatgtttcagatggaaacctgggccccaggtgctcatcagatcccasgtgaaaactcaggcttcaggtgcacatcagactccaagtggacacataggccctaggttgataccaagatttcaggtagactctgggtcccagaaaaacaccctgccctaggtggacagctgaacctgagtagacatcaggccccagatcgacatctggccccaggtagattccttggcccaaggtgaatactcagtctccagccctaggggaattcagtcttaggtgattaaggactggcgttcct

SEQ ID NO: 114612 - DNA, 469 bp, Homo sapiens
tgggtggagacatagagccaatatcaggcctgatgcccgcctggagtcatgtctacctgaggccttatgtagacatgaggcctgggcattcacctaggacctcatgttaagataggggctggagttcttttggtgcctagtgtatacctggggcccagatgtataactagagcctgatgtttcagatggaaacctgggccccaggtgctcatcagatcccaggtgaaaactcaggcttcaggtgcacatcagactccaagtggacacataggccctaggttgataccaagatttcaggtagactctgggtcccagaaaaacaccctgccctaggtggacagctgaacctgagtagacatcaggccccagatygacatctggccccaggtagattccttggcccaaggtgaatactcagtctccagccctaggggaattcagtcttaggtgattaaggactggcgttcct

SEQ ID NO: 114613 - DNA, 577 bp, Homo sapiens
tgtccctggttctctggtttttggccctagcgtgattaggacagaagcacagtggcctggagtgtgacagccctatagagtatttgtttgggaattggttagtttgtatttgtaaagcccatcttcatgcggagttcaggggagacttcgtagccagaagctgaggcarggtgactccagcatactatccatcttcaagaacaagatgtgtctgaattgctgtatgttataaagtttcgatgtctaatagagcaaatctttcatcctgttggttctctttgatttaatttgcttttttttctctctaagtactgttctcggaataagccaatctgatatgtgtgtcactattccaaggaatgagtagatcacactttatttttctgcttcttgtgaacattaattagttcagttttctgaaattttcaatgctattgtgattttttaaaattaacaatgctactttgcttattgtgtacttgtcaccagaaatgcaagagctaagatgtctctggaaatggaattcctgggtcacagggttggcacatgatcaacattattagataatgttaaattg

SEQ ID NO: 114614 - DNA, 598 bp, Homo sapiens
acatcaagttttgaattataccattttcaggtttaacctggtcatacagcagattttcttaatggttggtgaacacggaataatagtttaatcattcagataaactattttgcagaaacatttaaaatcagaaattgcagaactactatctgaactttaaagggacactcttaaccatattttgttttatttagtactcacgctgacaagttgatttaccacctcattttcccaacaagtgtcaagatttcaatatgcagttaatggtttctaaaaacagtgactatttaattacatccttatagtttccccaaattgcttatagtttgccckcatttagttaggtctataatatttctcaattagtgtaaaaatttctactcctttttaatcattgatgcatataatgatgtataaaaattattgtgtagatagcccctccatgaaaacttaaaatcaaaagcttttagcatcaaagtatcagaatacaaactaaagaaaacacaccaattcagaaagattttctttaaatatattaaagtgaataaaatgttcacagagaatcactcacatctaaggatatagactttttcctaaa

SEQ ID NO: 114615 - DNA, 598 bp, Homo sapiens
acatcaagttttgaattataccattttcaggtttaacctggtcatacagcagattttcttaatggttggtgaacacggaataatagtttaatcattcagataaactattttgcagaaacatttaaaatcagaaattgcagaactactatctgaactttaaagggacactcttaaccatattttgttttatttagtactcacgctgacaagttgatttaccacctcattttcccaacaagtgtcaagatttcaatatgcagttaatggtttctaaaaacagtgactatttaattacatccttatagtttccccaaattgcttatagtttgccctcatttagttaggtctataatatttctcaattagtgtaaaaatttctactcctttttaatcattgatgcatataatgatgtataaaaattattrtgtagatagcccctccatgaaaacttaaaatcaaaagcttttagcatcaaagtatcagaatacaaactaaagaaaacacaccaattcagaaagattttctttaaatatattaaagtgaataaaatgttcacagagaatcactcacatctaaggatatagactttttcctaaa

SEQ ID NO: 114616 - DNA, 554 bp, Homo sapiens
cctcatttagttaggtctataatatttctcaattagtgtaaaaatttctactcctttttaatcattgatgcatataatgatgtataaaaattattgtgtagatagcccctccatgaaaacttaaaatcaaaagcttttagcatcaaagtatcagaatacaaactaaagaaaacacaccaattcagaaagattttctttaaatatattaaagtgaataaaatgttcacagagaatcactcacatctaaggatatagactttttcctaaagtgaaactatttttggctcactcagactctgagtagtgtttcactgattttgaatttcactggtcagaaccagtgttggtagtaagaattattgtcccagaagagaatrgaaatgcttgccaactctactttcaacccttgctggaatccctatgttgtgggtagagatatgactaaattaagcagttttaagtctaagccagaaagatttaattattgatttattggttttacaattgttaaatattgcctttaaccgagtatatgttttatcatgtaataatca

SEQ ID NO: 114617 - DNA, 554 bp, Homo sapiens
cctcatttagttaggtctataatatttctcaattagtgtaaaaatttctactcctttttaatcattgatgcatataatgatgtataaaaattattgtgtagatagcccctccatgaaaacttaaaatcaaaagcttttagcatcaaagtatcagaatacaaactaaagaaaacacaccaattcagaaagattttctttaaatatattaaagtgaataaaatgttcacagagaatcactcacatctaaggatatagactttttcctaaagtgaaactatttttggctcactcagactctgagtagtgtttcactgattttgaatttcactggtcagaaccagtgttggtagtaagaattattgtcccagaagagaatagaaatgcttgccaactctactttcaacccttgctggaatccctatrttgtgggtagagatatgactaaattaagcagttttaagtctaagccagaaagatttaattattgatttattggttttacaattgttaaatattgcctttaaccgagtatatgttttatcatgtaataatca

SEQ ID NO: 114618 - DNA, 526 bp, Homo sapiens
ggaattcaagacaagactagagtatgttaagataccacaaaaagaaaaaaatatatatatagcaagagctttcttgagtaagcaaattttatacatataaaaataatttacatgcaaatgaccaagaggaaaggttaagtgactctggtgtaaataattagtttactgattctgccagagcatattaagaaaaattcactttggcaaaataatatggatttaaagaagtaacaagtgggtttctctaaagcacagtttggctttttactagaatatcaagtcacytttttgggtgaggagagtacaatgggagtgggcagctggtgcaaataaacatttaaaattacttaaaacttcaacaaatgggatctgtatttaaatctgttttggtctgtcttccctttgttttttctaatccattccaacaatgcaaacctcagccactgtcaagggcaatctcagactggaggttgctgcctagggtgaggttctagcaagactgacaagcagagctcagggaaaagtc

SEQ ID NO: 114619 - DNA, 604 bp, Homo sapiens
gagctaggcagatgccagaatcatgtttgtacagcctgcagctatacaaacctcttttcaaacctcttttctttataaattacccagtctcaggtatttctttatagcaatgtaagaatgrcctaatacagaaaattggtactgagacatggggcattgctataaaggtacttgaaaatgtggaagtgattttggaactaggtaatgggcaggagttggaagagtttggagggctcctaatacaggaagatgaaggaaagttctgaatttcttagaggctagttaaatggttgtgaccaaaatgctgatagtgatatggacggctgatgcggtctcagatgaaaatgaggaacttactgggacttggaataaaggtcatgcctgttatgcctttgcaaagaacttggctgcagtctgttcatgtactagggatctgaggaagtttgaacactcagatgcaggagcaaaaaaatgacttaaagttggaatttacaattcaatgggaagcagaccatacaagtatagaaaatttgcagcctgcccatttggcaaaggaagataaagcattttcaggggaagaatctaaacaggctgtggagcaacc

SEQ ID NO: 114620 - DNA, 605 bp, Homo sapiens
atgccatccattgtttagcaaaatgttatgaggtgcacaactgtacacatagacaattatttcaagggaggcagagacatgacacagagcatcagtttaaaccgtgggttctgatacacagtctaggccctaaagacagtgttcacattggtgaaaaataagattgggctcccttagtaagaagggatgtgtattaatatggaacattcttaggccacctgtggattgccagacaggtctactgctaatattygagggatctggggaaggatataaatgaatgctcaaggcctgtgcatacttccctgtatgggcacgccagcacaattgtaatggttgtggttcaggatcctacaggcagagactccaagtggccacatttccttggccctaaagacaccttgccatgtgagtgagtagagcttcacgcctgaggagagctgtagtggagccctacagcccagatctcatggcaggagccctggtcacctgggtctaagggaggtcctgctccaggctctggtaatttgtgtccatttcttcccctctgatgatagttgtgtatagtgtgcagtaggaaactcagggaagcatcttgttaccag

SEQ ID NO: 114621 - DNA, 614 bp, Homo sapiens
tttttctagtcttcctttgggcatataactgtgctatatggacctgaacagtaaagctcaayctatagtagataatagaatttaaaagacatacgcagttcctaataacctgtataatttactaggtatttttaatttccaaacaacttcatgactatctgtttttattaagcacatccatagaatgataaagacaaacaaaatagaaaaatatctaattttgaggaatgtattttaccaatggttttgaggcccagaaattggctgatttgcccaaagtcaaaaaatgaagttgaggcaaaactaccccaagacgatgtagcaactagaacacaattttttattttcagtccagtatgacattcacagaacccctttttatacaatttctttgaaattctaacaatgcctgtgaagtaatgaaaggtatatcaaggtcaaaataaccacaacttgagatgtccaaaaactttttctttctttcaatggtgtctcatcattttaagtggtgctgctttctacagataaccacagtcaaatttcatggtttaacttaacattttgagataaaagataaggggattagagtgtaaactagaaatgattttcaagtg

SEQ ID NO: 114622 - DNA, 614 bp, Homo sapiens
tttttctagtcttcctttgggcatataactgtgctatatggacctgaacagtaaagctcaatctatagtagataatagaatttaaaagacataygcagttcctaataacctgtataatttactaggtatttttaatttccaaacaacttcatgactatctgtttttattaagcacatccatagaatgataaagacaaacaaaatagaaaaatatctaattttgaggaatgtattttaccaatggttttgaggcccagaaattggctgatttgcccaaagtcaaaaaatgaagttgaggcaaaactaccccaagacgatgtagcaactagaacacaattttttattttcagtccagtatgacattcacagaacccctttttatacaatttctttgaaattctaacaatgcctgtgaagtaatgaaaggtatatcaaggtcaaaataaccacaacttgagatgtccaaaaactttttctttctttcaatggtgtctcatcattttaagtggtgctgctttctacagataaccacagtcaaatttcatggtttaacttaacattttgagataaaagataaggggattagagtgtaaactagaaatgattttcaagtg

SEQ ID NO: 114623 - DNA, 614 bp, Homo sapiens
tttttctagtcttcctttgggcatataactgtgctatatggacctgaacagtaaagctcaatctatagtagataatagaatttaaaagacatacgcagttcctaataacctgtataatttactaggtatttttaatttccaaacaacttcatgactatctgtttttattaagcacatccatagaatgataaagacaaacaaaatagaaaaatatctaattttgaggaatgtattttaccaatggttttgaggcccagaaattggctgatttgcccaaagtcaaaaaatgaagttgaggcaaaactaccccaagacgatgtagcaactagaacacaattttttattttcagtccagtatgacattcrcagaacccctttttatacaatttctttgaaattctaacaatgcctgtgaagtaatgaaaggtatatcaaggtcaaaataaccacaacttgagatgtccaaaaactttttctttctttcaatggtgtctcatcattttaagtggtgctgctttctacagataaccacagtcaaatttcatggtttaacttaacattttgagataaaagataaggggattagagtgtaaactagaaatgattttcaagtg

SEQ ID NO: 114624 - DNA, 696 bp, Homo sapiens
taactttaaagagagtaagtaaaataatttaagtgagctggttagaatagcaccaggaacaaaaaacaatgctcaataaatgtcaacccatattgttctaatcatgcaaagcacctagccctctacctgtctatcatttgttagtgctaaataagtttctgataatgattttggaagagatgccctatctattgtaatgttataatctaataattctttatctgccatgcagatgctgtttcttagayagtatatagaatattaccaatcagatatagggaaattctcttgtatgagatgtataaattcctgaatatgaagttgaatgtttacaaacttgatcctgtcttccattgagtcattcatttatttctataataaagtaaatgctgtgatgacctgctgtttttttctagtgcatgttaaagattcattgcaaaatgctatcctatgcttgtgaattatgcttgtaaatttggtctagaaaaattgtattcatactctcaaactgttttacaaagctgtactggtaggtctgatgggattgttttgctttggtagtatgtattttggttatttgattggttgattaaattttcttcttttaacatgagaattaacattatacttttacatacattgaaatccaaaaaccccatcagtgaaaatcttaaaatgactctacagactatcata

SEQ ID NO: 114625 - DNA, 696 bp, Homo sapiens
taactttaaagagagtaagtaaaataatttaagtgagctggttagaatagcaccaggaacaaaaaacaatgctcaataaatgtcaacccatattgttctaatcatgcaaagcacctagccctctacctgtctatcatttgttagtgctaaataagtttctgataatgattttggaagagatgccctatctattgtaatgttataatctaataattctttatctgccatgcagatgctgtttcttagacagtatatagaatattaccaatcagatatagggaaattctcttgtatgagatgtataaattcctgaatatgaagttgaatgtttacaaacttgatcctgtcttccattgagtcattcrtttatttctataataaagtaaatgctgtgatgacctgctgtttttttctagtgcatgttaaagattcattgcaaaatgctatcctatgcttgtgaattatgcttgtaaatttggtctagaaaaattgtattcatactctcaaactgttttacaaagctgtactggtaggtctgatgggattgttttgctttggtagtatgtattttggttatttgattggttgattaaattttcttcttttaacatgagaattaacattatacttttacatacattgaaatccaaaaaccccatcagtgaaaatcttaaaatgactctacagactatcata

SEQ ID NO: 114626 - DNA, 467 bp, Homo sapiens
ttaatcgttttaagtgtacagtagtgttcactatatgcaaattattgtgcaacagatctctagaactttttcatcttgtgaagctgaaactccctatttaataaattcctttttcctctcccctttaacccctagcagccactgttctattatgttctaagagtttgactgctttagatacctcatataagttgaatcatgaaacatttgtctttttgtgaatggtttatttcaggaagcataatatccttaaggtgaatgccttcgtgttcaacctgtgtgtttccttaatattcgaagttagtcttttgtagaaagcatatagttgtatcttgtttttatgttcattcagccactgacactgtgtcttttgattggggagtataattgacatttaaastaattactgatatggaaggactcactattgttatgttaattgtttattgtatgtcttgtagtttgtc

SEQ ID NO: 114627 - DNA, 353 bp, Homo sapiens
ctgacaaactcatgtgttcacctattctgtaatagtccctgggcctagagagactgaacagttttaatttctggccctgtgtctcatgaaaacagttcattttgattgtcaccttttccagggtctaaagatgagcttttgacttgtgtcaatgttcaatatttagcaagagtcagtgccgtttccagacccaggagtcaaagcccagtaacttaacagcacaaggattagttcataggacayttatattgcagaacttgctagtattttctctaacatgtcacaaattaaaacactgatttggtgtcaagtagtcactggctgcagcactttcaaacactgtattagttaaa

SEQ ID NO: 114628 - DNA, 588 bp, Homo sapiens
gggtgcttcctctctccatcagttggacttgatcaacttacaaacaaaaattccttaaaaatttcccaagttgagaggagctaatcctgttgtctggtacccacgaaagacattcacttgcctggacacacacacaacatttacacacaaacctccatgagtgtccaaatggaaacagtcagagtgcttctctctctcagtaattgggcttgtcaatttgcatacagaaattcctttaaaatttttccaaatttagaggagcagatcttgttrtcagggcccacaaaggacactcacctatctggatgcagatgtcaagtttcaaaggctgttcttcctaggcaattaggaacaaggttggggccagcagtggtggggttgcagagagagagagaccaagactcccctctggccaaaaaagggttgaacagctgctaaggagggcttctgaaactcttctggcccacagtagctgagacacaaggaaagactttcaggtcagggaaccaaaatctgttactgaaacaccagaggttcagtctgggtcctgtggtttgctgcacagaaagccaattgctgagataatat

SEQ ID NO: 114629 - DNA, 616 bp, Homo sapiens
actcaatttgtctcttctctctcctccattttttttcctgctattcacccaaagtagaaaacaaaaccctttcattatcttttaacattacataaaaatcatcttcaaaagagaaagccaaatgtcatgtttgcattagtgcatcttcaatgttaaagctagttttttaaaataaaattttatatctctatcggttttaattagtttgaccataaggtaagattttcataaactttttaaaaccccttacaatgttccatcaaaaagcagatcaattttctgagaaaacactgttattccgacacatgggctcagattctggccccacatcggtatgatttttaggtttttaaactacagaaaaaaatctaaataatttcttttaaatcttagccaccttgtttatacccaaataattttttataagattaaccctttacaaacccttttcactttgcttaaagcttcagtttcacctcattactcttttaggttaagacaatctttaaagaccctaaactagacaaaattacattccctttaacaaaagccayattcctatgccttcttataatcttttaccaaaaacacattccctacacaccttgtatgtaaa

SEQ ID NO: 114630 - DNA, 589 bp, Homo sapiens
tctcaacaagagcatgccatgttatcccatgaggatggtccaccaaaaccaccacaccttagacatcagcatctcagctcagggaggaacctctgctatacgtaaaaaaagaatgttgcttttatgtgaactagtcagaagtcatacaggwcagcattcaatggctacaagaaagaggtaaacatctacaggccaatttttggggacatgcaacatccttaattgattctggcctcctctgtgggcccactctccactgtgatccttctcctcttaggtccttgcctcatcaatttattaactaaattaattttctcccacattcaggctaccagtctgcaaatgatactacagcagggatgtcaatcaattatacctggaggccccaaaacctatgcacacaccttggtttggatgccaatgggcaaaagtttcaggaaacaatggaggaactccttccaagacaggaagacagtgagactctgatgtattcttcatcttatgtcagcaggaaataattatagaagacctacacatccttatatccaaagattttcagagtgtcaattgcttgaggggggaacattag

SEQ ID NO: 114631 - DNA, 589 bp, Homo sapiens
tctcaacaagagcatgccatgttatcccatgaggatggtccaccaaaaccaccacaccttagacatcagcatctcagctcagggaggaacctctgctatacgtaaaaaaagaatgttgcttttatgtgaactagtcagaagtcatacaggacagcattcaatggctacaagaaagaggtaaacatctacaggccaatttttggggacatgcaacatccttaattgattctggcctcctctgtgggcccactstccactgtgatccttctcctcttaggtccttgcctcatcaatttattaactaaattaattttctcccacattcaggctaccagtctgcaaatgatactacagcagggatgtcaatcaattatacctggaggccccaaaacctatgcacacaccttggtttggatgccaatgggcaaaagtttcaggaaacaatggaggaactccttccaagacaggaagacagtgagactctgatgtattcttcatcttatgtcagcaggaaataattatagaagacctacacatccttatatccaaagattttcagagtgtcaattgcttgaggggggaacattag

SEQ ID NO: 114632 - DNA, 609 bp, Homo sapiens
cagttttcttccaaacagactcagtccatctattatttttttctgttgtcaattccttaaagtgagggagcaggaactaagccaacgtacttgggttaaaatcttagctctgccacttaccagctgtgtgaccttgagaaagatactcaacctctctgttcatcggttttccatccataattttaggatgatagggttacaaggatttaagaaattaatacaggtaaagtgctttggacagcatctggcacataagtaggcattcatgaacgttagctgctattcttattctcttgtaaagtcaaagaactacaatctctttaaataaacaaactagtcctaattattgttattttaaagtcactttattaccaactttgaagtccaaacaagtttaataaaaattaacataaggattgacatgacccttttggggaaaaaaatcaacaaaatgtttttatagaatttaaaaactgcctacaatattaactgactactaacaataaaatcrtaagtcccccaactgactgaatggattccctccggaccaaaggtactccagagaaaccttaaaacctgaattcccagccataacaggatagaaggtca

SEQ ID NO: 114633 - DNA, 605 bp, Homo sapiens
ggtgtcatgcccttctcatgggaacttgtgaagcccaggtgagttgatgttaagttttgggtcccagaagtcagagttgggcacagaactcttaccacaatgaccagtagtacaaaccactagaacaagggctgagccagagttcttggaattatccaaagatcaaactgcagaactattatattagtgcaaaagtaattgcatttttcataattgtggtttttgcaattaaaagtaattgcaaaggctgcaattacttttgcaccaacctaatatctctacgggcaccctgaacaggagcatgtggggtcaggatctggacagaaatggaatgaaatggttgtaagtccagagcagagagaagaggcagcagaattagcatggcattgtgggatgaattatatcctccacaaagaagattttgaagtgctaacctccagtacctcagaatgtgacctaatttggaaatggaaycttcagagaagtagagttaaaatgaggtcatcagagtggtcccaatccaatatgactggtgtccttctaaaaaggggagatttggacacaagggacagacatacacacaagaacaatacatggacatgaaa

SEQ ID NO: 114634 - DNA, 570 bp, Homo sapiens
ttctcaggctttcagacttggactggaactctaccatcagctcgccttagtctctagttgccacctgcagatctcagacttctcagccttcataatcacatgagccaattccttactctctctctctctctctctctctctggtgtgtgtgtgtgtgtgtgtatgtgtgtgtgtgtgtgtgtgtgtgtgtgtgtatgtgtgtatgtgttctgtttctctggagaacccagaccaatatatgtagtttttcctatctcaacaaataatccccaggcatccagatgctcaggccaaaaatctaggagctatccttcagttctttcagttcagtgtgcctgagagtgccatcaacttgacctcagaaatatgctctgaaactctccacttttctctgctggtgccacacaattcaaggcacccagattacagcaatgggtaatccacagcttccactcctgcctcacccccattctccacacagcagccaaaatgaactcttacaaacaaaaccacagcatrccaccctccttttaaaaccttctaatgacttcacaacacacttagaataaa

SEQ ID NO: 114635 - DNA, 638 bp, Homo sapiens
ctatttggtttaaattcctttacatttaagaaacaaaagaggcaaatgcagaggaaagagagaaagaatgaggggttttcatcatctaaatactaayttacaatttcaaagtacaaaaatatccactctgagcctgacatggtgccaggtaccagccacaccctgaggacacagagatgaatcttagtctctcctcacagtttacacaccagtgagaaagaccgcatgccattaaaatatggtgggatagtgcatggttgtagttatactatctgtgtgttcagggcacatggagggtgggacccttcattctgaccagatgctatttccatattaaggtcactctgggcactaatagccaggtatgttggacacattttctctaatatttataacaactctgcatcatgggaaggattagcccattctacagataaggaacctcaaggtcagagaggttaagcacctggctcaaagtcacagtgcaagtaagcactgtatttgctggtagctcctagaggtctgtacagcacaagctccctcttctaattcctgcccagtgacccagttctgactttaatatcttgaattattctgcccgctcctcacccctggggttattgtttcctttctgtgta

SEQ ID NO: 114636 - DNA, 479 bp, Homo sapiens
gcatgaactagggctgattccctaaccatttctccatcgccagaccttaagcttcacgagggccaggctgagctctgttggctgacatatccctctggaaggagctcaatatgcagctgctgagtgaatgtgttcagtgagcatctttcccactrtgtgatctgatgagtgatgttttagacagaggaacctctaggcactgcccaccgcatcaccccacatagccaaacacttatcctgaaagcacagattgttttcggcacaggtactagttgttgttgaagaacacagcaaaggccctcaggaagttctggcattggttacaagtgcttagagaaagacatgcttgaattgagagtaaaaacaagagagaaaagagttaactcaatggaaaagatagaagaagaaagagacaggaaagcactcacaacttcttccccgccctctcacgtctgaaccatttcctgaccagaaaacta

SEQ ID NO: 114637 - DNA, 584 bp, Homo sapiens
tttatagagcaactacttggtggcattctagggactcaggggtgtttaaaaaaggtaatccttcaagagagatatgaatttcaattttttttttcttttaagcacatgacatttttattttggsctgtactttataaggtatgaaaagtaaatgggatttgcaatcaccatttctgcaatgtacctttgggctgctggtttatacaaacacctccatactaaaaaaaaaaatgcaaaattaattctgtagttgagtcatcttattaatcaaccaattaatcaatactgcataagcactcatgtgttgggataccgaggtttcaaaggcacgttttctgttcagaaggaaattgtgatccagctagagaagaaaaacataggaacaaacatgctatttaataacaagtaaagggcctggcgcggtggctcacacctgtaatcccagcactttgggaagccaaggttggtggatcacttgaggtcaggagttcaagaccagcctggccaatatggtgatggactgagactgactcaaaaaaaaaaaaaaaaaaaaagagataaataatatgaggattgccacttaa

SEQ ID NO: 114638 - DNA, 584 bp, Homo sapiens
tttatagagcaactacttggtggcattctagggactcaggggtgtttaaaaaaggtaatccttcaagagagatatgaatttcaattttttttttcttttaagcacatgacatttttattttgggctgtactttataaggtatgaaaagtaaatgggatttgcaatcaccatttctgcaatgtacctttgggctgctggtttatacaaacacctccatactaaaaaaaaaaatgcaaaattaattctgtagttgagtcatcttattaatcaaccaattaatcaatactgcataagcactcatgtgttgggatacygaggtttcaaaggcacgttttctgttcagaaggaaattgtgatccagctagagaagaaaaacataggaacaaacatgctatttaataacaagtaaagggcctggcgcggtggctcacacctgtaatcccagcactttgggaagccaaggttggtggatcacttgaggtcaggagttcaagaccagcctggccaatatggtgatggactgagactgactcaaaaaaaaaaaaaaaaaaaaagagataaataatatgaggattgccacttaa

SEQ ID NO: 114639 - DNA, 584 bp, Homo sapiens
tttatagagcaactacttggtggcattctagggactcaggggtgtttaaaaaaggtaatccttcaagagagatatgaatttcaattttttttttcttttaagcacatgacatttttattttgggctgtactttataaggtatgaaaagtaaatgggatttgcaatcaccatttctgcaatgtacctttgggctgctggtttatacaaacacctccatactaaaaaaaaaaatgcaaaattaattctgtagttgagtcatcttattaatcaaccaattaatcaatactgcataagcactcatgtgttgggataccgaggtttcaaaggcacgttttctgttcagaaggaaattgtgatccagctagagaagaaaaacataggaacaaacatgctatttaataacaagtaaagggcctggcgcggtggctcacacctgtaatcccagcactttgggaagccaaggttggtgkatcacttgaggtcaggagttcaagaccagcctggccaatatggtgatggactgagactgactcaaaaaaaaaaaaaaaaaaaaagagataaataatatgaggattgccacttaa

SEQ ID NO: 114640 - DNA, 612 bp, Homo sapiens
taatctccttcatgagggccccaccctcatgacctaatcaccttccagaggcccatcacccactgccatcaccttggggattwagatttcaacatgaattttgggaggacacaaacattcagaccataggctttggtcctgggtccccaaatttcatgttcttcttacatgcataatatactcattccaacccattagcctcaaaagtcttaatttattctgtcatcaactcaaaagtctgaagtccagagtcttttctaaatatcagctaaatcagatatgggtgaggcttaaggtgcaactcatcctggggcaaatttactctccagctgtaaacctatgaaatcaaacatgttatgtgttttcaaaatacagtggtaggataggcatagtatagacattcccattgtaaaagggagatacaggaaagaagaggggtaacaggtctcaggacccaggtctgaaacctaacctggccaacaatgttaaatcttaagactgagaataatctttggtttgccatccaacctgctggacatgctggggcagggattgggacctcaggctccagatggccctacttccgtggctttgctgggtacagcccatgct

SEQ ID NO: 114641 - DNA, 612 bp, Homo sapiens
taatctccttcatgagggccccaccctcatgacctaatcaccttccagaggcccatcacccactgccatcaccttggggattaagatttcaacatgaattttgggaggacacaaacattcagaccrtaggctttggtcctgggtccccaaatttcatgttcttcttacatgcataatatactcattccaacccattagcctcaaaagtcttaatttattctgtcatcaactcaaaagtctgaagtccagagtcttttctaaatatcagctaaatcagatatgggtgaggcttaaggtgcaactcatcctggggcaaatttactctccagctgtaaacctatgaaatcaaacatgttatgtgttttcaaaatacagtggtaggataggcatagtatagacattcccattgtaaaagggagatacaggaaagaagaggggtaacaggtctcaggacccaggtctgaaacctaacctggccaacaatgttaaatcttaagactgagaataatctttggtttgccatccaacctgctggacatgctggggcagggattgggacctcaggctccagatggccctacttccgtggctttgctgggtacagcccatgct

SEQ ID NO: 114642 - DNA, 567 bp, Homo sapiens
gagccttcaaaacacagcaatgtgtactttcatttggggactgcttcttaggtacttttaccaagtcctggcaaccctcattaattgatatttcctcaaagtgcatgttcttctccatttctactactcatagcttagttctggtctcacccttaggtctgattcacctggaacatggcaactgtttcctccctgcttcatcttctcctttgatgtcagagaaaatttgctaattagccatttttcagtagttgtccagcacctacaagatagtcaaaaccttgcacatgtgacctcttacaggtcacctgtggttttcctccatccccatgatatgccacttcctcttaaacaytgcaaccaaattgaacccctccccatgcccttaacccaaaatgccctttctcatgaaatgtctcttccttacttctattctctcaagcttatgtcctttttgcttaggattgctttggctattcagctgttttttggttctacatgaattttaggattgctttttctaattttgtgaaaaataacattgatattttgataggaattgcattg

SEQ ID NO: 114643 - DNA, 567 bp, Homo sapiens
gagccttcaaaacacagcaatgtgtactttcatttggggactgcttcttaggtacttttaccaagtcctggcaaccctcattaattgatatttcctcaaagtgcatgttcttctccatttctactactcatagcttagttctggtctcacccttaggtctgattcacctggaacatggcaactgtttcctccctgcttcatcttctcctttgatgtcagagaaaatttgctaattagccatttttcagtagttgtccagcacctacaagatagtcaaaaccttgcacatgtgacctcttacaggtcacctgtggttttcctccatccccatgatatgccacttcctcttaaacactgcaaccaaattgaacccctccccatgcccttaacccaaaatgccctttctcatgaaatgtctcytccttacttctattctctcaagcttatgtcctttttgcttaggattgctttggctattcagctgttttttggttctacatgaattttaggattgctttttctaattttgtgaaaaataacattgatattttgataggaattgcattg

SEQ ID NO: 114644 - DNA, 567 bp, Homo sapiens
gagccttcaaaacacagcaatgtgtactttcatttggggactgcttcttaggtacttttaccaagtcctggcaaccctcattaattgatatttcctcaaagtgcatgttcttctccatttctactactcatagcttagttctggtctcacccttaggtctgattcacctggaacatggcaactgtttcctccctgcttcatcttctcctttgatgtcagagaaaatttgctaattagccatttttcagtagttgtccagcacctacaagatagtcaaaaccttgcacatgtgacctcttacaggtcacctgtggttttcctccatccccatgatatgccacttcctcttaaacactgcaaccaaattgaacccctccccatgcccttaacccaaaatgccctttctcatgaaatgtctcttccttacttctattctctcaagcttatgtcctttttgcttaggattgctttggytattcagctgttttttggttctacatgaattttaggattgctttttctaattttgtgaaaaataacattgatattttgataggaattgcattg

SEQ ID NO: 114645 - DNA, 504 bp, Homo sapiens
ttgggttataccctttaaacgcttatttcttgttttcagaataggtgtttcaatatactatgccagcaatctgttatcctcttaaaattaactgcgaaatgggccaggcgcagtggttcaagcctgtaatcccagcactctgggaggccaagacaggcagatcatgaggtcaggagttcgaggccagcctggccaatatggtgaaaccctgtctctactaaaaatacaagttagccaggtgtggtggcacacatctgtagtcccacctactcgggaggtggaggcaggagaatcccttgaacccgggagacagaggttgcagtgagccgagatcgtgccactgcactccagcctgagcgacagagcaagacyctgtctcagggtaaaaaaaaaaaaaattaactgcaaaatgatattatccactctacatgaagtttcactggaaatttacctttttcagggcatactttgggtcttcaggaagaaccattattatcctgccat

SEQ ID NO: 114646 - DNA, 372 bp, Homo sapiens
ggagtttgagaccagcctggccaacatgagaaaccctgtgtctactaaaaacacaaaaattagctgggcatggtggcacgtgtctttaatcccagctaccagggaggctgaggcaggagaattgctggaaattgggaggcagaggctgcagtgagccgagatggcaccactgcgttccagcctgggcaataggcgagactccatctcaaaaaaaaaaaaaaaagaaatgtaataacaaatatcagctcatttgcttgcccttccactccagaggaagtcaggtataactaccctgggatctcataattgaatcatcataagagtatataagatcwtttttctcaaacctcttattttgcatttgaagattaa

SEQ ID NO: 114647 - DNA, 564 bp, Homo sapiens
cactctcagataatttttaaagtttttttttgtaggaatagggtctcggtatgttggcaagactggtctcgagatcctcgtctgaagctatcctctcacctcggctgctcaaagtcctgggattacaggcatgaaccatggtgcccctttcctccccttataaggaccatctgaatccaggatgactaatttcaactgatttttatctaattacatctgcaaaaatcctatttccaaatgttatcctatcctgaggttgcaggcraacataaatttttgggagacattcttcaactcactttgaatatatcaccaccttatcatatatcaaatttgaaatgtatttgtgtttaattataaactttctatatacttttcactagtcagcctgttttaatttaaaaagctttatattacaataatgcataaggcttacctgaaaaatatttgaatattcaacaggactatcctccatacattactctttttttctggggcttttgtattagcgttctttagaaggatggaactaatcaactcttttttttaaattttattattatc

SEQ ID NO: 114648 - DNA, 580 bp, Homo sapiens
attatctatgactggtttcacatggcagagttgagcagctgtgaaagagcctattcttaggcaaagcctgcaatatttgttatctgaacttttacaaaaaatgttctcaatccctgcccaggaagattgcctgagtctgtcatcttaccccagcagcatccatccctttgtaaataagacttttggtagaaatggaaacaattaaaaatatttatawgctttaaaataatacatttaataaaaggtatctaaatccttgcatatatgactgtaatactccagtgtgatattaattgctggttgtttaattccctcattttaaatgacagcacagagtttaatcatgggcatattctcaaaaagcattcagaaataaagtccttatgggtgttgcccctgactataccacaactctgaaagccacatggtggatttatttaacctccaatttttgggaacacttagtagcatacgtgggctaatatttgttatggctcaatttactttctctcttttatcctggggaaaggaatactttgctcccacactgtgaggtttctgagaaagggtgaaaaaacta

SEQ ID NO: 114649 - DNA, 566 bp, Homo sapiens
agtggaagaactactgggccaattgtttttccagaaataagaaaagcctggagggttgaggttttgttttaataargaaaatcccattttcttccagtgcctttccactgtctccttttagccatattctcctcactttgccaggctgtccaggtcctttatgttgtcctctggacatagagttgctacaaccttttctggattcttatacctgctatggctgggggcctttcccagacagcagtcacctaaacaggacatttacccttataggtgctgagtgtttatggctgaatggaccttgcttcataggagtaggtttcactccaaaacttgtggcttaatatagcaatcattttgttatctcccatgtttccatgggtttactgtgttcagctgggtattattctgttgctcttgcttgcggtttctcatgtggttgcagtcagacgatgactatttcctcatctgcaggctgctgttataatctggaggcctgtgtgagatattgggagggctgaacctccctccttctccatgtagtctcaggatttctctataatgac

SEQ ID NO: 114650 - DNA, 461 bp, Homo sapiens
gggtagaggaacatctttataaaaatttctaggtaagatatatatgattayaaaaataagttctttcattctgaagtcaatttctcatctcctctttctctctccctttcaactcctttggacaaagattttagaaaacagtgtgaattttgtaggctttgggccaaacaaattgaaagcagctaagacattttgcttaacaaaaatgtatgtaatctgagaagtttcatatgatgttttaccattgttgaagttgcacggttttgtcactatgtcactacaaagtttgggagtgaggaatctctttttcccccctaaatctagcctagccttgatactgactgaatattttgtattccatgttagtcatttaaaaaaggcatccaaacaaaaggaagaaaaatgattatagggattgaaaagtcattgaggaaaagtgaaattctgatgagaaaagctct

SEQ ID NO: 114651 - DNA, 566 bp, Homo sapiens
cttcatgtctgctcaaaccccatatataatgagcaactctggaagcatctccaatctactccagtgcctttgttttgcagactcctgggtttaactctttccttttactttcttattttgtgtgggggtgctggacaagatggccccaaacaatttggctcagactatacagtttatcttttgataatgtgtattctaatatggctttgtctctagtccaagcttctgcctcactattctacacaaatgtttaaagttaagttgtgacattataagaattataaaaaaaagatacagatattatattagactttgcaatatatttctcaggtcaaaaattctctcatgtctccataaaaacattatctcagaaatwccaatatctcaaatatgtaaaaagtgcactgtgggtaagaaccaagcctaatctagcctaattgattttctgccttggtgattaaatatgtttgattgccataaattaaagccacaccccaatgtttctatactccagttaaaaatctctaaaggtaatgatggctcaactatagactccccaactattt

SEQ ID NO: 114652 - DNA, 570 bp, Homo sapiens
aacaaaacattaaaaaatgagaacacagtagctacatatactcaaaaacagtgaatactcagatgtttgcttagyacaaatataaaataaaataaataaaataaaaaggactcaaaaggcttggggtgatattttcagtctcttaaaaaataaataccaaggaaagagaaccatgttcacctcaagcttcatgagagaccacaatctgttcctattgtttgctcacaatttaaccccctttgggacccagggtatttcaattaggaatatttttagaaagcacacattttattcatggcagggggtgaagagcagaattcaaaatcacatgtacgcacaaataaaaccaccttacatttctaaatagcctcatcttagctaacagaactttaagaatcaatctttcaaaatagctcaaatatgaaggtcaatgtaacataaaagctcctcatttttcaagcaactttatttggaccatggctgaaaacgaatccaacatacagccatttagcctttgtgtgactctgtgccagacaaaatatttttcataagcaatggaaaaaaaaggat

SEQ ID NO: 114653 - DNA, 652 bp, Homo sapiens
ctttttcaggaatttaagttcattgaaagtaaatataggtatgtgtaccagtaccaccagcagttctagtcaatgcggtttatgaaaaaaaaattwaaaaaaactctaaagttatcaagatgtaaccttttaatcaaagaactaaaaaattatgtatttatcataccagggtttcttctaacttcatactggcttgtttgtgaaagaaaagtctttgaaaaggctacctgcaggtgataaagatttttaaagtattcttttcttcctttttattagagaaaatccaaagggagttttaaaatttgtttctttatgtattgttttaatcgtggatcttattcaaacattttttaagcctttacatttgttgcttatctctgaggggcagcattgcaaagtgcttaagaacaaagattttaaaacttcatagactgggttaaatctaggctccaacatttatgtatctcagttttccccatttatacaatggagaaaataatataggctgttgtgaggagtaaataaatttatataataaaataaatttatttattataataaaaaataaatttatataaataaatttatatatgcaaagtttttaaaacatacttaaacatgataggtctaagaatataagaatcaactattc

SEQ ID NO: 114654 - DNA, 652 bp, Homo sapiens
ctttttcaggaatttaagttcattgaaagtaaatataggtatgtgtaccagtaccaccagcagttctagtcaatgcggtttatgaaaaaaaaattaaaaaaaactctaaagttatcaagatgtaaccttttaatcaaagaactaaaaaattatgtatttatcataccagggtttcttctaacttcatactggcttgtttgtgaaagaaaagtctttgaaaaggctacctgyaggtgataaagatttttaaagtattcttttcttcctttttattagagaaaatccaaagggagttttaaaatttgtttctttatgtattgttttaatcgtggatcttattcaaacattttttaagcctttacatttgttgcttatctctgaggggcagcattgcaaagtgcttaagaacaaagattttaaaacttcatagactgggttaaatctaggctccaacatttatgtatctcagttttccccatttatacaatggagaaaataatataggctgttgtgaggagtaaataaatttatataataaaataaatttatttattataataaaaaataaatttatataaataaatttatatatgcaaagtttttaaaacatacttaaacatgataggtctaagaatataagaatcaactattc

SEQ ID NO: 114655 - DNA, 652 bp, Homo sapiens
ctttttcaggaatttaagttcattgaaagtaaatataggtatgtgtaccagtaccaccagcagttctagtcaatgcggtttatgaaaaaaaaattaaaaaaaactctaaagttatcaagatgtaaccttttaatcaaagaactaaaaaattatgtatttatcataccagggtttcttctaacttcatactggcttgtttgtgaaagaaaagtctttgaaaaggctacctgcaggtgataaagatttttaaagtattcttttcttcctttttattagagaaaatccaaagggagttttaaaatttgtttctttatgtattgttttaatcgtggatcttattcaaacattttttaagcctttacatttgttgcttatctctgaggggcagcatkgcaaagtgcttaagaacaaagattttaaaacttcatagactgggttaaatctaggctccaacatttatgtatctcagttttccccatttatacaatggagaaaataatataggctgttgtgaggagtaaataaatttatataataaaataaatttatttattataataaaaaataaatttatataaataaatttatatatgcaaagtttttaaaacatacttaaacatgataggtctaagaatataagaatcaactattc

SEQ ID NO: 114656 - DNA, 548 bp, Homo sapiens
cctgggttcaagtaattctcctatctcagcctcccaagtggctgggactacagacgcatgccaccacgcccagccaatttttgtatttttaatagagacagggtttcaccatattggtcaggctgrtcttggactcctgacctcaggtgattcacctgccttggcctcctaaagtgctgggattacaggcgttagccacagcacccagcccagtgatggtagtattatactcacttgcacataagaaaatgaagtctctgtttatcaagcaaagcatggattaaagcccaagaatgtttgcattgaacccctgttccctttctcctgcaccatccagcctctcagccctgcattgcctgctgagatgggcctcaggagatccttctccacgtatctctcctaggaaggaagtattttccgaatgagatgtgaaccacgtatttcctaagaatgtggccattgtggacctggacctggacacaggctaggtcagctgagaagcatgttactcaaatggtggttgtgactgtcataaggcagaagaatag

SEQ ID NO: 114657 - DNA, 618 bp, Homo sapiens
ggcattccctgtatagtgctgagggctgggcattgggctgcgagttggcgatcaagatatctggctttaagaaaatcccaagagctttctcaatagcctttcacctacggcaagagtagctaagaagctccagaccattctattaacaggagcctccgctctccacagggcaaggtatgctttgctcactgccagtgccggatgccaaggggtggctcaagagggactttgggggtggtgatgggaaggggatgccctgtgtcatctgcatcaagcttccccacctcaagcaacccttggcaacataaaattgaagtgaaaagaaaatacttgctatgctgattcttcaaatgctaatccctcctgttcctgggagagtaatggggtagaatccattcaagtgtctgagcgaaaccaagagaaactgagagacactttagatcccagactggtcttctaaaaggtgtgggccccaagccatcccaacccctatggggatgccctggaccagcttctgccctctgcagtgattytaatactcagcacagtacccagcatgatagcagaagggtgagcactggtagatgaaaaaacaaactaaccaatgaatgaatgaag

SEQ ID NO: 114658 - DNA, 547 bp, Homo sapiens
aggatatttaaaatttatcagtgtgtaaaggtttgcttagaaaacttatattatatggacttgtgtattgggtaaaatgtaagaaaaagttgatgatcatagtgaagatgaaatcattcatcaaattattgtgcttagaagaactgaatgtccccaaaagaatcaagaataaaatgaaatcattatkgatctgaatttttgccttttcttcatgatagaacatttaattaggataaattctttgacatcattatcatcatttctataataattaattccagttattcagagataacattgctggagcaggtggggatttgggagttcatttgcaatgcaaatgtataataattgtgaatatttgataattcagtggtttcattttttttttctgttttttttttgttgttgttgttgttgttttgagacaggattttgctctgtagcccaagctggagtgcagtggagtgattctggctcactgcatcctcaacttcctatgcccaagtgttcctcccaccttagcctcccaagtacttgggaacac

SEQ ID NO: 114659 - DNA, 547 bp, Homo sapiens
aggatatttaaaatttatcagtgtgtaaaggtttgcttagaaaacttatattatatggacttgtgtattgggtaaaatgtaagaaaaagttgatgatcatagtgaagatgaaatcattcatcaaattattgtgcttagaagaactgaatgtccccaaaagaatcaagaataaaatgaaatcattatggatctgaatttttgccttttcttcatgatagaacatttaattaggataaattctttgrcatcattatcatcatttctataataattaattccagttattcagagataacattgctggagcaggtggggatttgggagttcatttgcaatgcaaatgtataataattgtgaatatttgataattcagtggtttcattttttttttctgttttttttttgttgttgttgttgttgttttgagacaggattttgctctgtagcccaagctggagtgcagtggagtgattctggctcactgcatcctcaacttcctatgcccaagtgttcctcccaccttagcctcccaagtacttgggaacac

SEQ ID NO: 114660 - DNA, 601 bp, Homo sapiens
ccagatgaaaggaggcaaaaaatcatgacaactaaatgtaatacagggttctaaactagatcctctgtcataaaggacattattaggacaattggcaaaaccgtgaatggggtcagaggatcagatgggagtaatataycaatgtcaatttcctgactttgatgattgtatcatggttgtgtagtagaatatcctttttgtagggaatacaaactaaagtgtattagaatggtgaagcattgtgtcagcaacttactctaaaaaggttcagggaaaaaaaaagttctttgattggtgcagattttattataagcttaaaattgttttaaaagatttttaaagtaaaagagaagagaaaggcgaaaatacaatatatgtagcttagagaaattccctttgcatagaaaaaggattggaagaaactacagcttgctgaagcatgtaggaatgcagcatgtatggccaaacacatgtatgtgatgagtcatctgtctcattgccctgtcaggatgaaagaacctcttgagaatattgccttacccaaacacacattttaaagaaaaagagatctgaggaacagaggaccaaaaaatagttgttc

SEQ ID NO: 114661 - DNA, 601 bp, Homo sapiens
ccagatgaaaggaggcaaaaaatcatgacaactaaatgtaatacagggttctaaactagatcctctgtcataaaggacattattaggacaattggcaaaaccgtgaatggggtcagaggatcagatgggagtaatataccaatgtcaattkcctgactttgatgattgtatcatggttgtgtagtagaatatcctttttgtagggaatacaaactaaagtgtattagaatggtgaagcattgtgtcagcaacttactctaaaaaggttcagggaaaaaaaaagttctttgattggtgcagattttattataagcttaaaattgttttaaaagatttttaaagtaaaagagaagagaaaggcgaaaatacaatatatgtagcttagagaaattccctttgcatagaaaaaggattggaagaaactacagcttgctgaagcatgtaggaatgcagcatgtatggccaaacacatgtatgtgatgagtcatctgtctcattgccctgtcaggatgaaagaacctcttgagaatattgccttacccaaacacacattttaaagaaaaagagatctgaggaacagaggaccaaaaaatagttgttc

SEQ ID NO: 114662 - DNA, 383 bp, Homo sapiens
gaattcaacaacacaataaacagataattgaccatgatcaagttggatttatcccagtgatgcaaagagggttcaacatacacagatcgctaaatgtgatacatacatcacattaacagaaccaagaacaaaaaacatatgatcattttgagcaatgcagaaaaatgatttgattagagtcaacattcttttctsatcaaaaccctaaacaaactgggtgttgaaagaacacgcttcaaaatactgaaggtcatatatgacaaaaccaaagtcaacaacaaatggcacagggtaaaattgccaaggatgcccactttcaccattttattcaacataatactggaaggcctggcgagaggaagtcaaattatccttgtttgcag

SEQ ID NO: 114663 - DNA, 567 bp, Homo sapiens
cgggtatttatcctgtgtgttataaataatccagttatactcttttagttatttttaaatgtataataaattattgttgatgttgactatagtcatgctgttgcactgtcaaataatagatcttattctttctatttttttatatccactaaccatcctcactccccaccccccacccactacccttcccagcctctgatagccatcattctatctctatcttcatgagtttgttttaatttttaccacaaataagtgagaacatgagaagtttttctttctgtgcttagcttatttcacttagcataatgacctccagtcctatccatgttgttgcaaatgactggatctcattatttttttatggctgaatagggtgtatgtaccacatttcctttatccmttcatctgactatggacacttagtttgcttccagatctttgaagctattggctattatgaatactgctgcaataaacatgagacttcagatatgtatttgatgtactgatttcctttctttggggcatatacccagtagcaggattactggatcatattgtagt

SEQ ID NO: 114664 - DNA, 540 bp, Homo sapiens
ataagaggaggagaaggaagagatgaagctcaagacgtgggcaggtgtggcaggcaggttaatgcctccttccccaaaatagatgtccacatcctcacatccttatctccagaacctgtaattatgtttctacatatggcacaagagattttgtaaacatggttaaattaaggagcatatggctgggcccaaagtaactacaaagattcttataagtaaaagaaggaggtagatgagatagacaggcagagagagaaacagagaaagagagagagactatactgtggatcaagggatgttggtagcctctagaagctgaacaaacttcaagcccactaattcttctctagagcctccagaaggaaagcagccctgcrgataccttgatttgagtcaagtagggcttatgccaaacttctaatctccagaattgcaagatttgaaacattgtttggttttaagccgctaactgtgtggttatttcttacaacagcaacaggaaactacttaacagcaggcgacagggtacacgtaaagccc

SEQ ID NO: 114665 - DNA, 540 bp, Homo sapiens
ataagaggaggagaaggaagagatgaagctcaagacgtgggcaggtgtggcaggcaggttaatgcctccttccccaaaatagatgtccacatcctcacatccttatctccagaacctgtaattatgtttctacatatggcacaagagattttgtaaacatggttaaattaaggagcatatggctgggcccaaagtaactacaaagattcttataagtaaaagaaggaggtagatgagatagacaggcagagagagaaacagagaaagagagagagactatactgtggatcaagggatgttggtagcctctagaagctgaacaaacttcaagcccactaattcttctctagagcctccagaaggaaagcagccctgcggataccttgatttgagtcaagtagggcttatgccaaacttctaatctccagaattgcaagatttgaaacattgtttggttttaagccrctaactgtgtggttatttcttacaacagcaacaggaaactacttaacagcaggcgacagggtacacgtaaagccc

SEQ ID NO: 114666 - DNA, 606 bp, Homo sapiens
agtccagaatgtcaaccaattatctgcagcaaccaatccagaaagccaaacaaccacccctgtaactatcagcctaaactggccaggttgtgataaataactgatagtttccccaacttccaacaactagagaaagcctaaattcactcctaagcaatcacatgggttgccctacttgtaattagcccaactccagcttccctgtgccttcartcagggaatacctaataccttaccttttttttccattatacagctttctactcctctgtatgacaaatgtaagtgatggtggctgactctttgttatagcaaactccgaataaatagcctttgttttttctcattgggtgatattctttctcatagtacagagacataaaacctagtgttttgtgtaagtaattagtagtagatacttattgtaggtggtgtgtttgtgtgtgtgtttctgtgaacgtatgcatgcatgaattgaagggagggcaatgcagatgaatttggagaaacaggcaagaacaaagccaaacagacttctgtacaatgtagtagctaacaatttctgtataataacattaccacaatcttagttgcttaaaacaatac

SEQ ID NO: 114667 - DNA, 606 bp, Homo sapiens
agtccagaatgtcaaccaattatctgcagcaaccaatccagaaagccaaacaaccacccctgtaactatcagcctaaactggccaggttgtgataaataactgatagtttccccaacttccaacaactagagaaagcctaaattcactcctaagcaatcacatgggttgccctacttgtaattagcccaactccagcttccctgtgccttcagtcagggaatacctaataccttaccttttttttccattatacagctttctactcctctgtatgacaaatgtaagtgatggtggctgactctttgttatagcaaactccgaataaatagcctttgttttttctcattgggtgatattctttctcatagtacagagrcataaaacctagtgttttgtgtaagtaattagtagtagatacttattgtaggtggtgtgtttgtgtgtgtgtttctgtgaacgtatgcatgcatgaattgaagggagggcaatgcagatgaatttggagaaacaggcaagaacaaagccaaacagacttctgtacaatgtagtagctaacaatttctgtataataacattaccacaatcttagttgcttaaaacaatac

SEQ ID NO: 114668 - DNA, 606 bp, Homo sapiens
agtccagaatgtcaaccaattatctgcagcaaccaatccagaaagccaaacaaccacccctgtaactatcagcctaaactggccaggttgtgataaataactgatagtttccccaacttccaacaactagagaaagcctaaattcactcctaagcaatcacatgggttgccctacttgtaattagcccaactccagcttccctgtgccttcagtcagggaatacctaataccttaccttttttttccattatacagctttctactcctctgtatgacaaatgtaagtgatggtggctgactctttgttatagcaaactccgaataaatagcctttgttttttctcattgggtgatattctttctcatagtacagagacataaaacctagtgttttgtgtaagtaattagtagtagatacttattgtaggtggtgtgtttgtgtgtgtgtttctgtgaacgtatgcatgcatgaattgaagggagggcaatgyagatgaatttggagaaacaggcaagaacaaagccaaacagacttctgtacaatgtagtagctaacaatttctgtataataacattaccacaatcttagttgcttaaaacaatac

SEQ ID NO: 114669 - DNA, 606 bp, Homo sapiens
agtccagaatgtcaaccaattatctgcagcaaccaatccagaaagccaaacaaccacccctgtaactatcagcctaaactggccaggttgtgataaataactgatagtttccccaacttccaacaactagagaaagcctaaattcactcctaagcaatcacatgggttgccctacttgtaattagcccaactccagcttccctgtgccttcagtcagggaatacctaataccttaccttttttttccattatacagctttctactcctctgtatgacaaatgtaagtgatggtggctgactctttgttatagcaaactccgaataaatagcctttgttttttctcattgggtgatattctttctcatagtacagagacataaaacctagtgttttgtgtaagtaattagtagtagatacttattgtaggtggtgtgtttgtgtgtgtgtttctgtgaacgtatgcatgcatgaattgaagggagggcaatgcagatgaatttggagaaamaggcaagaacaaagccaaacagacttctgtacaatgtagtagctaacaatttctgtataataacattaccacaatcttagttgcttaaaacaatac

SEQ ID NO: 114670 - DNA, 578 bp, Homo sapiens
tagttcagtcctttggagcacayttatatgtcctgtaaacacacaggaatctctctctttccaagagcagattcgtacgttgaaatcaatcaaatagaggaatattccaaaaccctacatttgaaacatccaagaatatgcaagaatcctttcttttgccttttcatcttgacttccattctaagattcatagttctaggtttcttcttaccgttcctcagaaaagtctttagagttatgagtggcccctttccagtgaggtcttcagagttacgagtggcccctttccagtgaggtctttagagttatgagtggcccctttccagtgaggtctttagagttacgagtggcccctttccagtgaagtccaagtactacacagtggctatgtgcacaggcttaggagccagaatgtctaggttcaggcctctattttaccacttataagctgtcccttcttggacaaggcacttgatctctctttgcctctgcttattcctccataagatgggacttattacaggacttttctcataaggttgttgcaaatcatcaaagtgaagtgcttagcacacccc

SEQ ID NO: 114671 - DNA, 578 bp, Homo sapiens
tagttcagtcctttggagcacacttatatgtcctgtaaacacacaggaatctctctctttccaagagcagattcgtacgttgaaatcaatcaaatagaggaatattccaaaaccctacatttgaaacatccaagaatatgcaagaatcctttcttttgccttttcatcttgacttccattctaagattcatagttctaggtttcttcttaccgttcctcagaaaagtctttagagttatgagtggcccctttccagtgaggtcttyagagttacgagtggcccctttccagtgaggtctttagagttatgagtggcccctttccagtgaggtctttagagttacgagtggcccctttccagtgaagtccaagtactacacagtggctatgtgcacaggcttaggagccagaatgtctaggttcaggcctctattttaccacttataagctgtcccttcttggacaaggcacttgatctctctttgcctctgcttattcctccataagatgggacttattacaggacttttctcataaggttgttgcaaatcatcaaagtgaagtgcttagcacacccc

SEQ ID NO: 114672 - DNA, 584 bp, Homo sapiens
ttaggaagcatttctgagtttgagtttctctgtagattcatgagttggctgagtaatcaaggaccaaggttttgtgttaagcaaagcagcatttgatctgaaaatgacagctaagtctagagcagaagagtctttggtctgatatgatcttgctttcatttctttccatctccttaatggttcctcagttggtggaatggaagacagcacattaagattttcttttcaatttgttctttcttttttttaatccctcaatgwgtgcccatcattttgttcttttacaaaaaattccactaaaatgttgttgaaaatgcatagcactttgtaaaaaatgaaaaatcaagcaatatgaagaaagtttaaatcccttcatgatccaaattccccctaagattggctcatatcagtcttccagaacttttaagcatatgcaaatatacaaaactacacatattttaatgttaatgaaaatattatatatatatttggttaggaggttattatatatatattatttcatttgaattatatatataaggttagaatatatatacattaggttagaagaatataaattttat

SEQ ID NO: 114673 - DNA, 572 bp, Homo sapiens
tgcaggatgcatgaaggcctcctcctatccctgaatgggggtcaccaagtcagatggccttgggaatgccacagagtctagaaccctcaaataggagaatataaagttgtcaccaggggcaacaggaatggcccctgaaaaaattaggccagaggagcagctttggagtttattttctccaaggttttctggcactatttttcgtgaacgttaaagaaatatgtacttatagtaaaagatttggaaagcttttatttaaaaaaaawttttggccaggtgaagtggctcacgcctgtgatcccaacactttgtggggctgaggtgggtgaattgcttgagcccaggagttcaagaccagcctgagcaacatggcaaaaccccgtttctacaaaaaaaatacaaaatttagcttggcatggtggtgcacgcctgtagtctatttgggaggctgaggtgggaggattacttgagcctgggaggtcaaggttgcagtgagccatgattgtgccactgtactccagcctaggtgacagagcgaggccctgtcttgaaaaaacaaaacaaaaaagtcc

SEQ ID NO: 114674 - DNA, 561 bp, Homo sapiens
ttctatttattctgcagagaaagagacaataaaacagactaaagaataatggcaggtcagcaatatctggggtggaaccaaaaaaaaaatcagcaatcaccascaataataaataaacaagtttgttttagaagacggaggtatctgctaattaattttgaaaggcaatataatggaattccctctggcttttccatgggaatacacatcacacaaaaatattgagacaactcttgaaatctatcaaagctaatcttacaatgttcaaacacatggtcaattatttttaggttaaatctacttactcagctgtggtaacataaaaggcatgaatttataaagttttgggtttcttatggatacaagtatattcgttttgcaacattcaagagacaaaagccctctcaccattttttgctatagattataatcataaaaattatgtgatatgctatcaatgattctttcatagttaccatcattaaaaaatctattcctgtgatttctataaaagcaataacaattaaatatatatatccatgggaataattttatagcagg

SEQ ID NO: 114675 - DNA, 585 bp, Homo sapiens
cattagggttgttaagagtgaacattttaaaaatacttaaaattgtgctatataagcactgcgtaatcaatgaattctgatatagaagtgataatctctcatctacatttttaagacttgagtcctggcaatttatacatgactatcatggcaactagcagtagctggagtgcttctgcatctaaatatccaggtgcttatctcagtaatagaaccagatatttccgtcctgtttggacaaaattccacattgctttaamgactccaaatagggaacctcattaagcagtcagctaaattctttactttcacagttattcatcttggtataaaattatttaagtttgtaatttagccaaaatgaaggctaaactatgatacttgaaatataaaatcaataatgtttttttctatagggttacaacaagcatgtaaaagttaggatttttttttaagatattagaatgagaatactactaagaaaatgtgtgtggctttttacaagttgtttttaataaattaagttaaaaaaaaaaggggaagataaaaatgttttctttgccccataagggagaaaaacaaatt

SEQ ID NO: 114676 - DNA, 585 bp, Homo sapiens
cattagggttgttaagagtgaacattttaaaaatacttaaaattgtgctatataagcactgcgtaatcaatgaattctgatatagaagtgataatctctcatctacatttttaagacttgagtcctggcaatttatacatgactatcatggcaactagcagtagctggagtgcttctgcatctaaatatccaggtgcttatctcagtaatagaaccagatatttccgtcctgtttggacaaaattccacattgctttaaagactccaaatagggaacctcattaagcagtcagctaaattctttactttcacagttattcatcttggtataaaattatttaagtttgtaatttagccaaaatgaaggctaaactatgatacttgaaatataaaatcaataatgtttttttctatagggttacaacaagcatgtaaaagttaggatttttttttaagatattagaatgagaatactactaagaaaatgtgtgtggctttttacaagttgtttttaataaattargttaaaaaaaaaaggggaagataaaaatgttttctttgccccataagggagaaaaacaaatt

SEQ ID NO: 114677 - DNA, 600 bp, Homo sapiens
gattggcacctacctgatgctgartttgggagggtgagatgcatggtgtcgagggaaagggaagaaagaccaggtataggaagaagggaaagagcacagccacagctgtccagctgtagggtgaagccagtgggcatagaaagtgagggacagagtcaagagaaaatgcagatgaatttgattgggccagaggcggcccagcagggaggctctcagacgcacatgaaagcctatggggctgtgggaagccacagccttctcttccctggcctggctgtccctgcccactgcacgcatcccccatccgaggtctgcttctcctccctcctagtacaaggagctacagcactctgctagcctgcacgggatgacctccacaccaccaagatggagatctctgagataaactggtaatgcagaggctgcactctgagattgataacttgtagaagcaggtagggctgagctcccaggtgtccttccatccatgctcctgcctccaggtggacttgtgcctgggcctcactcagcccctacagagagaagcctcccagatgagtggccttccaggaatataaatatgcattcacctagtgcaat

SEQ ID NO: 114678 - DNA, 574 bp, Homo sapiens
gaattcctctccctcacggccagatgggagaacagccggaatatccacaggtaggatcatgcagaggtcatcctggcgtctgcctgtgggccttctaagccattttacccttttctgggaagggaggaaagtggtgtcctggctgctcggatgtaacctgcatcacagacacagccctggtctgttcagtggaaactatcttactcatgacatsccggtcatatatctggttttacactctggaaaccctcctccaagagacatgccaatcaattgcactttgaacacacacaaagagagctggctgattagaagagccctctgctgagtcttccttcaaagagattaattctttgtcaagaatgagtcatgggccctaatttttcattcccctgcgtcggggctttcaaatatctacacctcttaaagcagagcaggaagaggtttctgttctccatttacactgagtcagtcactcctagcataatggctctcctgacctcattgtcattgtcaccatcctcatcatcagtgtgtgctgatttagtgcttacaggtcagctgggagccatgc

SEQ ID NO: 114679 - DNA, 604 bp, Homo sapiens
gtctgtctctatcccacccttccccctacccttcctgtcctctagtatcctctgtcctacttttcacttctctaagatcaagtttyttaagcttccacatatgagcaagaatgtgtggtgttaactttctgtccgtggcttacttcacttaagataatgtcttccagttccatccatgttgtcatgaatgacaagatttgactttttaatatggctggatagtattccatagtgtatatataccacattttctttatccattcatctgttgctggacacctaggttgattccacatcttggctattgtgaatagtgctgcaataaacatgaggttcagatatctattcgatatcatgatttcctttcctttggataaattctcagtggtgagattgctggatcatatagtagttctatttgtagttgttttgggaacctccatactattcttcatagttgttgtggtggtttatattctcaccagcaatgtaaaagagttttcttttctctgcctctttgtcagcttttgttattttttgtctttttgatgatagccatcctaactggggtgagatgatagctcattgtagttttgatttgcat

SEQ ID NO: 114680 - DNA, 604 bp, Homo sapiens
gtctgtctctatcccacccttccccctacccttcctgtcctctagtatcctctgtcctacttttcacttctctaagatcaagttttttaagcttccacatatgagcaagaatgtgtggtgttaactttctgtccgtggcttacttcacttaagataatgtcttccagttccatccatgttgtcatgaatgacaagatttgactttttaatatggctggatagtattccatagtgtatatataccamattttctttatccattcatctgttgctggacacctaggttgattccacatcttggctattgtgaatagtgctgcaataaacatgaggttcagatatctattcgatatcatgatttcctttcctttggataaattctcagtggtgagattgctggatcatatagtagttctatttgtagttgttttgggaacctccatactattcttcatagttgttgtggtggtttatattctcaccagcaatgtaaaagagttttcttttctctgcctctttgtcagcttttgttattttttgtctttttgatgatagccatcctaactggggtgagatgatagctcattgtagttttgatttgcat

SEQ ID NO: 114681 - DNA, 604 bp, Homo sapiens
gtctgtctctatcccacccttccccctacccttcctgtcctctagtatcctctgtcctacttttcacttctctaagatcaagttttttaagcttccacatatgagcaagaatgtgtggtgttaactttctgtccgtggcttacttcacttaagataatgtcttccagttccatccatgttgtcatgaatgacaagatttgactttttaatatggctggatagtattccatagtgtatatataccacattttctttatccattcatctgttgctggacacctaggttgattccacatcttggctattgtgaatagtgctgcaataaacatgaggttcagatatctattcgatatcatgatttcctttcctttggataaattctcagtggtgagattgctggatcatatagtagttctatttgtagttgttttgggaacctccatactattcttcatagttgttgtggtggtttatattctcaccagcaatgtaaaagagttttcttttctctgcctcyttgtcagcttttgttattttttgtctttttgatgatagccatcctaactggggtgagatgatagctcattgtagttttgatttgcat

SEQ ID NO: 114682 - DNA, 549 bp, Homo sapiens
atagaatggggtcttttgagtaggaaagtggaggatcaattggaagcatatattacacgctttgagtaatttaaggagtctttccttggttctaaataggaatggaatggaactgaagataaaaagaacctttgttttaattattaaaaagtgatgtgaggcaaactatacaaataatctttgaaagtaaatctcagtctgtgcacagaagggcaccacataaattgccaggtatagttgggctactctggtttggatctttcacaatttgctaatatgcaagcggtctttcttctagaagctrtacattttaaggccaactcattttcactagtaataacacaaataaataaaatacacattctcttctagtaaaacatgggtttacaaagacctaatgttgcttttaaatgtgattaattgtgaaatctcttttcttccattgcattcatttagcctactcctctacaatcccatgtgaccaacagagaaatcccagctgtactttgaaggggaaaagtcttactctctcactctaaagaagccagc

SEQ ID NO: 114683 - DNA, 549 bp, Homo sapiens
atagaatggggtcttttgagtaggaaagtggaggatcaattggaagcatatattacacgctttgagtaatttaaggagtctttccttggttctaaataggaatggaatggaactgaagataaaaagaacctttgttttaattattaaaaagtgatgtgaggcaaactatacaaataatctttgaaagtaaatctcagtctgtgcacagaagggcaccacataaattgccaggtatagttgggctactctggtttggatctttcacaatttgctaatatgcaagcggtctttcttctagaagctatacattttaaggccaactcattttcactagtaataacacaaataaataaaatacacattctcttctagtaaaacatgggtttacmaagacctaatgttgcttttaaatgtgattaattgtgaaatctcttttcttccattgcattcatttagcctactcctctacaatcccatgtgaccaacagagaaatcccagctgtactttgaaggggaaaagtcttactctctcactctaaagaagccagc

SEQ ID NO: 114684 - DNA, 549 bp, Homo sapiens
atagaatggggtcttttgagtaggaaagtggaggatcaattggaagcatatattacacgctttgagtaatttaaggagtctttccttggttctaaataggaatggaatggaactgaagataaaaagaacctttgttttaattattaaaaagtgatgtgaggcaaactatacaaataatctttgaaagtaaatctcagtctgtgcacagaagggcaccacataaattgccaggtatagttgggctactctggtttggatctttcacaatttgctaatatgcaagcggtctttcttctagaagctatacattttaaggccaactcattttcactagtaataacacaaataaataaaatacacattctcttctagtaaaacatgggtttacaaagacctaatgttgcttttaartgtgattaattgtgaaatctcttttcttccattgcattcatttagcctactcctctacaatcccatgtgaccaacagagaaatcccagctgtactttgaaggggaaaagtcttactctctcactctaaagaagccagc

SEQ ID NO: 114685 - DNA, 470 bp, Homo sapiens
agtgttgtgacctaggcctgtggtcactgcagctstttcagcactaggggataccctaagcccagggaaactataactcttgcaagctcctggatatgcagccttggtgaacttgggagcaataaaaaattccctgggttaccagtgaaggtctcttactctctttgctcttttcctccttccagaaagagtctctgtgtttggctgcctgaagatcgggtaggggtgacatgaataatcctatggccaccacagctagcactgcactgtgtctcacctcatgcctatgaccttccggaccagcataacagtggggcttgcctaagacctgtggccactactgcctggctgcctctgacatttattcaaggcccaaggtcacttaagtcagtctgtagtgaatcctacatggattgaccatcacatcacagaagtggattctttcatggcccaggttgggtataaaagca

SEQ ID NO: 114686 - DNA, 573 bp, Homo sapiens
tcactgcaacctctgcctcccaggttcaagtgatctcctgtctcaggctcctgagtggctgggattacaggagtgcatcatcacgcccagataatttttgtatttttcacagagatagggtttcactatgttgtcccagttggtctcgaacccctgacctcaagtgatctgcctgccttggcctcctaaaatgctggaattacaggcatgagccactgtgcccggcttaataattatttcttaaagacaagtttaaacaattgtgtatatgagtttctagttgtttaatttggtgttcctgaggggagataaccactggaggattctattctgcaatcttgttttgcctcatctcaataaacatttgaatctttattacgttatttattattactaaatctttaatgactattgaattatttgaatctttattaaaggttaaattacttgaatctttgttagatccaatgtggtaaccstggaagtcagatttccctcatttctccaggatttatttatttattttttctttttgtttttgtatattgtttttgtgagttttgattgttgtgg

SEQ ID NO: 114687 - DNA, 558 bp, Homo sapiens
cacaaactctgtgcttggccttgtaagtggagaatatgatacctttccactggtgctgtagtttctgtgctcaggctcacacatatagcacgagacctcccctgccccttcacaccctcactgtagacacaacwgccactgatgctgccaccagaagaaggggaagaagagctggagggctgcctgtctagatatgtgagtagcaactctacacccaatgatggtgtggcttctgtgcctgagctcacacacgaaggccaagatctctctctccctctctgcagtgctggggtgctcctgccacagagccagagagttgcatgcctggtgctgtcagtggtgttgccacaccacagccactgccactacctgtgcacaacacatgggactcagagggttttcccaccactgctactgccattgcctacatcattttggctttccagggctccgagaatattctcacccacctggaccactgctgccactactggcatcttagcaagtcacctcatggcccaagaattcggccttctggttctgctaacattggtgtca

SEQ ID NO: 114688 - DNA, 558 bp, Homo sapiens
cacaaactctgtgcttggccttgtaagtggagaatatgatacctttccactggtgctgtagtttctgtgctcaggctcacacatatagcacgagacctcccctgccccttcacaccctcactgtagacacaactgccactgatgctgccaccagargaaggggaagaagagctggagggctgcctgtctagatatgtgagtagcaactctacacccaatgatggtgtggcttctgtgcctgagctcacacacgaaggccaagatctctctctccctctctgcagtgctggggtgctcctgccacagagccagagagttgcatgcctggtgctgtcagtggtgttgccacaccacagccactgccactacctgtgcacaacacatgggactcagagggttttcccaccactgctactgccattgcctacatcattttggctttccagggctccgagaatattctcacccacctggaccactgctgccactactggcatcttagcaagtcacctcatggcccaagaattcggccttctggttctgctaacattggtgtca

SEQ ID NO: 114689 - DNA, 451 bp, Homo sapiens
gagaagcacttttcaaaaatattcaagatatacaaccttcagttttatggaaatatgtaaatagtaatctatggtgtggtccaaatgatttgctaacatggggaagaggatatgcttttgttcacaccccctcacatcctctttggattccagcactatgcatcaaaccataccatggcatggctargacccaacctggtaacagaaataaaggaaatgaccctgcgggacccatagccctggataatgtggcttccttggaagacacaggccccagatactacgctaaagaagactgctcaaaagactgagtgaacccttttccagacacagacaccattcacttcagataatttgtttcttgctatgctctctgttgtacattgcaactctcatagggtattaacctttcttattctctcactctgcctacaacccacacctgctactg

SEQ ID NO: 114690 - DNA, 575 bp, Homo sapiens
tgtgtttgttttcaaagttcatgctttttctctaccacaccaggctgtcttgcttatggtagttattctrctaggtcttacactatggatttttatgtagccatatctcctcaactaggttataagcttcataaaggtgggaattaaattttagcacttaatttttatatgaactcatgaggcgaatgttttggccacctcagttttttttttgttttttttgttttttttgttttttttttgagacggagtctcgctctgtcgcccaggctggagtgcagtggcgggatctcggctcactgcaagctccgcctcccgggttcacgccattctcctgcctcagcctcccaagtagctgggactacaggcgcccgccactacgcccggctaattttttgtatttttagtagagacggggtttcaccgttttagccgggatggtctcgatctcctgacctcgtgatcctcccgcctcggcctcccaaagtgctgggattacaggcgtgagccaccgcgcccggccggccacctcagttttaacagagtattcaatttttaaattcattagagtaaca

SEQ ID NO: 114691 - DNA, 575 bp, Homo sapiens
tgtgtttgttttcaaagttcatgctttttctctaccacaccaggctgtcttgcttatggtagttattctactaggtcttacactatggatttttatgtagccatatctcctcaactaggttataagcttcataaaggtgggaattaaattttagcacttaatttttatatgaactcatgaggcgaatgwtttggccacctcagttttttttttgttttttttgttttttttgttttttttttgagacggagtctcgctctgtcgcccaggctggagtgcagtggcgggatctcggctcactgcaagctccgcctcccgggttcacgccattctcctgcctcagcctcccaagtagctgggactacaggcgcccgccactacgcccggctaattttttgtatttttagtagagacggggtttcaccgttttagccgggatggtctcgatctcctgacctcgtgatcctcccgcctcggcctcccaaagtgctgggattacaggcgtgagccaccgcgcccggccggccacctcagttttaacagagtattcaatttttaaattcattagagtaaca

SEQ ID NO: 114692 - DNA, 407 bp, Homo sapiens
gtaatcccagctatttgggaggcagaggcaggagaatcgcttgatcctgggaggaggaggttgcagtgagctgagatcatgccactgcackccagcctgggcaacaagagcgaaattccatctaaaaaaaaatttttaacttgatgttgcagtttccaagaacctatcaacaatataatctgaagacttactgtacttttttacaacagccataggaagctattacaactctcaagtttgaattttgattcagaacatgtggtgtctgtattttagtgttccatatgatctagaataagtctgaggagataacttctagcacttttgcttccccttttctctccctgccaaactcttcctaaattcagttccggattaggaagatcacttctcactccacctggcag

SEQ ID NO: 114693 - DNA, 501 bp, Homo sapiens
ccctgtcagggttgcataaaaggcaaaatgaaatatcccatgaagtcccttgcatggtgcatgtgacacctagtaaaaatagcataaactttacatagctctgaatatgtgccaatccctattctctgtgctttgtgcatrttgactcattttatcctcaaaacaaacctctgaaggaggtataaaatatccccaaatgagggaagtgaagcaaaaagaggttaaatgacttgtctaaggtcacatgacttacaagtggcagagctagtatttgagcccagaccatctggttccagcgtccacacccttagcagctctgtagctctacccaggaaatgtgtaacgtctttctccttttttttctccttaccaatctcctacagaacttctcctcctcaacagtaatgtgacagctactgtagaatgctttattatagtttcatgcatttatcttatttacccaactgactgaaattcctccaaaatatttacattccaaca

SEQ ID NO: 114694 - DNA, 654 bp, Homo sapiens
atgttttctacttatattcttggagaactgctaaatagtcttcaaggtgttaattactacttcttctttacccatcttagctttgcatctctttctagcattgcaaatatctgggataatttatttctccctcacttaaagtccaccaaggtcaagggcctgttcgagtcatatttttattcttccarcataatatagagccaaccctatgattttgataggtgtttgataattgataaatgattgtagatctaaaatgcatttgtacttctttggcgagtacaatccctcagtggaaacttacaaggaagaaatggctttcatctctgctatccccaaatccatatgttctattatcatttagggtagaaataaaatgattccaacagaaatgcatgtgtgatgacttggtagctccccaattgggatgggaattttgccaaacttcatatactcagttgctgtcagagtggcagtaccacctcaatacagcgctgtctacctcttacacctcattcttaagagatatttttctcctctactgctgaatggtgtaaaaattttgtgtttgttacacttaggaaagaagagtgaaaaccagagctgccttactaatgccattacagtagattacaaggtgagagtgtttatgta

SEQ ID NO: 114695 - DNA, 654 bp, Homo sapiens
atgttttctacttatattcttggagaactgctaaatagtcttcaaggtgttaattactacttcttctttacccatcttagctttgcatctctttctagcattgcaaatatctgggataatttatttctccctcacttaaagtccaccaaggtcaagggcctgttcgagtcatatttttattcttccagcataatatagagccaaccctatgattttgataggtgtttgataattgataaatgattgtagatctaaaatgcatttgtacttctttggcgartacaatccctcagtggaaacttacaaggaagaaatggctttcatctctgctatccccaaatccatatgttctattatcatttagggtagaaataaaatgattccaacagaaatgcatgtgtgatgacttggtagctccccaattgggatgggaattttgccaaacttcatatactcagttgctgtcagagtggcagtaccacctcaatacagcgctgtctacctcttacacctcattcttaagagatatttttctcctctactgctgaatggtgtaaaaattttgtgtttgttacacttaggaaagaagagtgaaaaccagagctgccttactaatgccattacagtagattacaaggtgagagtgtttatgta

SEQ ID NO: 114696 - DNA, 654 bp, Homo sapiens
atgttttctacttatattcttggagaactgctaaatagtcttcaaggtgttaattactacttcttctttacccatcttagctttgcatctctttctagcattgcaaatatctgggataatttatttctccctcacttaaagtccaccaaggtcaagggcctgttcgagtcatatttttattcttccagcataatatagagccaaccctatgattttgataggtgtttgataattgataaatgattgtagatctaaaatgcatttgtacttctttggcgagtacaatccctcagtggaaacttacaaggaagaaatggctttcatctctgctatccccaaatccatatgttctattatcatttagggtagaaataaaatgattccaacagaaatgcatgtgtgatgacttggtagctccccaattgggatgggaattttgccaaacttcatatactcagttgctgtcagagtggcagtaccacctcaatacagcgctgtctacctcttacacctcattcttaagagatatttttctcctctactgctgaatggtrtaaaaattttgtgtttgttacacttaggaaagaagagtgaaaaccagagctgccttactaatgccattacagtagattacaaggtgagagtgtttatgta

SEQ ID NO: 114697 - DNA, 555 bp, Homo sapiens
tagttcacactgccagtggtgaacaaatgaacatggaaccaggaagctgccaactgctcccttatgcttaatagcttatttcctaggacctcagtactaatacctgatgtgcttgaatkacaagcagtatatatacacaccaccaattgtgtttcctaattgacctattgtgttatatcctatttaccttatgaaaagtcaaactgtgtaagagatgcctaaaataaggaaatgaattctgagctacaagagcacttagtgaaatattccgcatcaggttgtctcgtaggagtggaaggcccatggcagaggtggccacatgagctgtgtgtctgagggccacagggaagctcctgggtcacccgtctccctggactctagagcacttttcgcaatcaccattccttcccaatgagtgaaaatgcacggggcccagaatcatctacactcataatgtgggcagaagttttgaaaacaagttgttctcactcagattaggaattgggaaaacagagatccatgaccaaaccaaaagtacccaaggaaagtacccaa

SEQ ID NO: 114698 - DNA, 508 bp, Homo sapiens
acattgttaagagtaatctgctatgcctaaagtctaccgattgtaaatgttagtcatatgtaaaaaaaatacctttaaagtattatctaaacaggtgcttcaccaaacaactgggtatcatagcctagccaagttaacacataaagttaaccattacagccaataatagatcttctcttctacctctatagctctctataaagctctcttttcgttggttctgtttcctaagtttttcactttaacacacatttgatggtatttcttctgcttttaattgcaattattatctctagaaatctcttctattcacatgtgtcaagtataaccatgccaaaaagctcacacatctgtttcttcaactatgattagttctttatactctacataaacatrtgtttaactgagtactggaaagatcaatgtttatgtcccacagattattatgagttaaatagttctaagtgaggtactattttattattattcagcaatatcctactgtttt

SEQ ID NO: 114699 - DNA, 504 bp, Homo sapiens
gaatagtttgtatgaaattgatattacttctttcttaaatgtttggttgaatttactagtgaggccatctgggcctaaagttctctttgtgaaaaagttttctatctactgaagatatgttgtttcttactgggcccttggttccactatatttttaagtcttaagaggttttttttttcagtccaatggtcttcacagggcaattctccagctcagaaaatgttgagacatgggaatacattattaggaaccattttacagaaaataagaatcttagcagcaatatgtcagcacagtgtcactgtgaaacagctgaaaatgtgaggggtagtatataaaaaggaaagtacagaaagagcaggagcctgaccctatggagcatacaaagcaaaaaccttttcttatagtgccaccttgtaccacttctggaaacctactcagttttytggagtgaacgtggggtgaatatgaatgtggagtccatgacatcactagaattacac

SEQ ID NO: 114700 - DNA, 598 bp, Homo sapiens
aagttccagactagcctggccagcatggtgaaaacccatctctacaaaaaaaaaaaaaatttttagctgggcatggtggtgcccaattttagtcccagctacttgggaggctgaggtgagaggatggcttgagcccaggagccactgcactccagcctgggcaatagagccagaatttgtctctaataataataataataataataataataataataataaaatcttactgcatgartgcagagcggtgaagaggtgatcatactgagcatagttgttctgtgacaagaaatttggagacagagatatttttaaagagggggaggagaagagaagcagaaagatatgaatgtgaacactagtctattgtttaacacacgttgttcagtagagaaactaagtcaaataacggtcattgtcttacaagattccctcctttctagagaagtgaacttcagtggacaggataaaaacaataaaagctgacacttattgagtgtttattacctgacagactgttttctcagcatgaaatatctacctactcattaaatagcttttacacatgtaaaatattacaacagtcatgttatgaaat

SEQ ID NO: 114701 - DNA, 523 bp, Homo sapiens
taaatgcctcaaagaggtatttctaacagaatccagtaaagaaaaaactctctttgtgaggatcaattatttggggagctattttttctctggagaacttacagaaacctgtattaacagactgccagtttcctttcataaaatgctatgctaaataatccaacttctttgagatgtcatcttagtggcttttcatagtatctcatktcactaggtaattgttctctcaaattggtgagcactctgtgccactaatataatggtgacttgcattcttgaattacaatatattcaaaaattcattatacttattctaatatttttgatattaaattggtctgcttaaaataaacctaattttctatatttcttaagctgaaataacaagtacccattccttctttatggaaagttgctccttccattttatggaaaataactcattaataatcacttgattttctttagttagccacaagtaagataaacatgaacacaatcagaaaattatacatataagata

SEQ ID NO: 114702 - DNA, 523 bp, Homo sapiens
taaatgcctcaaagaggtatttctaacagaatccagtaaagaaaaaactctctttgtgaggatcaattatttggggagctattttttctctggagaacttacagaaacctgtattaacagactgccagtttcctttcataaaatgctatgctaaataatccaacttctttgagatgtcatcttagtggcttttcatagtatctcatttcaytaggtaattgttctctcaaattggtgagcactctgtgccactaatataatggtgacttgcattcttgaattacaatatattcaaaaattcattatacttattctaatatttttgatattaaattggtctgcttaaaataaacctaattttctatatttcttaagctgaaataacaagtacccattccttctttatggaaagttgctccttccattttatggaaaataactcattaataatcacttgattttctttagttagccacaagtaagataaacatgaacacaatcagaaaattatacatataagata

SEQ ID NO: 114703 - DNA, 589 bp, Homo sapiens
acccattccttctttatggaaagttgctccttccattttatggaaaataactcattaataatcacttgattttctttagttagccacaagtaagataaacatgaacacaatcagaaaattatacatataagatacacccagacacacacacacgtatgtattcatgtgtagttaaatacacaccacacacacatatatatagcatggaaatagaatgtaaagattatgcctttccatacagtttaaatgaaatttgtgcttttgtaaaaattttcactgttacagatttttcttcatctcttcttaaattaaacatgttactaactaaacatattacagagacataacgaaaccactgttttaraaaccaaactttttctaaaccacttacacccattaactgtttaaataaatgacaattttgttagccaaaagagaaaaaaacctcctctttggcacttccttgttccttaactcatcccatctcttttcagactgccaattctacctgattcatatccaaacgcttgtaatttcctgccttcagtagcctgctaatctattttcccacgtgtccctgtgctcctgc

SEQ ID NO: 114704 - DNA, 589 bp, Homo sapiens
acccattccttctttatggaaagttgctccttccattttatggaaaataactcattaataatcacttgattttctttagttagccacaagtaagataaacatgaacacaatcagaaaattatacatataagatacacccagacacacacacacgtatgtattcatgtgtagttaaatacacaccacacacacatatatatagcatggaaatagaatgtaaagattatgcctttccatacagtttaaatgaaatttgtgcttttgtaaaaattttcactgttacagatttttcttcatctcttcttaaattaaacatgttactaactaaacatattacagagacataacgaaaccactgttttaaaaaccaaactttttctaaaccacttacacccattaactgtttaaataaatgacaattttgttagccaaaagagaaaaaaacctcctctttggcacttccttgttccttaactcatcccatctyttttcagactgccaattctacctgattcatatccaaacgcttgtaatttcctgccttcagtagcctgctaatctattttcccacgtgtccctgtgctcctgc

SEQ ID NO: 114705 - DNA, 556 bp, Homo sapiens
atgagttctgtgagctgctctagcaaattaatcaattctgcagagggagagtccttcaaattcccaatatgtagccagtgaatcagaagtgtatgtgacaatctactgcttacaatcggtgtctggaattggtgggcatgctcatgtgactgagccctcaactcctgggatctgatcctatcttcagataggtagtgtcaggattaagttgaattatagracagtcaggtgatatgtgctagaggattggtttcttggtgtgtagagaaacacccccatacatctgatcagaagtgctctgtattttattgagtgtggaagtagaaaaaacagcttattttttctctctttcaagggaagaaattaaatatttggaaatctggccaaaattgctaaatttttaccaaagtcgatttctcttctcactggcaacttggctaaattatttttgttatatgcatgggccaaaatttgtccttgtgtattggcgtaaaatggcctctgtgctgtttacttctttgcagcaggctaggactattagtctgaagactactgc

SEQ ID NO: 114706 - DNA, 556 bp, Homo sapiens
atgagttctgtgagctgctctagcaaattaatcaattctgcagagggagagtccttcaaattcccaatatgtagccagtgaatcagaagtgtatgtgacaatctactgcttacaatcggtgtctggaattggtgggcatgctcatgtgactgagccctcaactcctgggatctgatcctatcttcagataggtagtgtcaggattaagttgaattatagaacagtcaggtgatatgtgctagaggattggtttcttggtgtgtagagaaacacccccatacatctgatcagaagtgctctgtattttattgagtgtggaagtagaaaaaacagcttattttttctctctttcaarggaagaaattaaatatttggaaatctggccaaaattgctaaatttttaccaaagtcgatttctcttctcactggcaacttggctaaattatttttgttatatgcatgggccaaaatttgtccttgtgtattggcgtaaaatggcctctgtgctgtttacttctttgcagcaggctaggactattagtctgaagactactgc

SEQ ID NO: 114707 - DNA, 556 bp, Homo sapiens
atgagttctgtgagctgctctagcaaattaatcaattctgcagagggagagtccttcaaattcccaatatgtagccagtgaatcagaagtgtatgtgacaatctactgcttacaatcggtgtctggaattggtgggcatgctcatgtgactgagccctcaactcctgggatctgatcctatcttcagataggtagtgtcaggattaagttgaattatagaacagtcaggtgatatgtgctagaggattggtttcttggtgtgtagagaaacacccccatacatctgatcagaagtgctctgtattttattgagtgtggaagtagaaaaaacagcttattttttctctctttcaagggaagaaattaaatatttggaaatctggccaaaattgctaaatttttaccaaagtcgatttctcttctcactggcaacttggctaaattatttttgttatatgcatgggccaaaatttgtccttgtgtattggcstaaaatggcctctgtgctgtttacttctttgcagcaggctaggactattagtctgaagactactgc

SEQ ID NO: 114708 - DNA, 414 bp, Homo sapiens
ctataaagttcactttctaattattacagtttcggtaataagcttggttgttcatttctcatggaaggaaagatggttaagttttggatctacatggactcatgggaagtggttaataggtgagcaaaatttggaaaagttcacagtgaatatttaaaaattggtggaaggagatctagaaaacaagtatataaatggtctccttagaataatgtgaatatatttgtataccaaatatatgctaaccaaaaatttatytacacagaaggaagctttcaataattagttgtataaaaacgctccatggcagacaaaacaacatggtgttttccttaacaggatctggctacaacagttgctgtgaaaattagagctcaatactgaactcctaagatagtaacaattcccagctag

SEQ ID NO: 114709 - DNA, 574 bp, Homo sapiens
gcgtttttgcttatactttgcacaaatccgtagacaaaacgatagtattattttcattgtaggttccatgaatgataatgtggaagaataacgtactataaattawtgataaacaatatgatagatcgtagattttcaaccaaattctcacactgttagccgtatttgctatttatatatttatttaaataatagcaacttttattgaacaattgacatttaacaggtactgttcttggtatattacagaaattaattcattaaatctgcacatgtggatattattattattttcattttacagatgaacattaacaaaatagagttgcaggttaaattacttgcccaagattactcagctggtaagtggcagtgcctggaatacaaagcttttacctaacatatggattatttgaaagggtcacccattctatgactcttgggttataagcatagctttcctccttcgcataggttggccctccatggatatatggtatagagtccttggggtagtgtctgtgtttatttaatctttgtgtcaccaaaggactaagcaagtttcttgtccaca

SEQ ID NO: 114710 - DNA, 603 bp, Homo sapiens
attattaatgaccaattctgaatcttgaattagccagaagacaaacggcagactggaattcatactactcagaattctagccagagctatttcactcacatttaacatcccagtttttctttcaaaaaawatatatataggcaggcatattagaggagaaattggaacattatcatattgtttgcctgtaccgatttttacacaggtgtcatagaaaatagaaatagtcatcattatctagttccacatcgaagcttaattcaaaacagagagagcacactgtagtgctcccaaaaaggcaacaaagcctaaggaattttttttcagcccactttggaatagatcaaaggtatacatcctaaaaaagaaacagcattgtgtctgtaaagtctgaactttgaagccacagtaggtcttggttagaaacttcactgactttttcctagtttcttggcctctagaaatcccttaaactttctgagactcagtttcctcatctagaaaaagagacacaatatttcctaccttacaagggttgctttgaggactgatgataatgcctgtatagcacccagtttttctgagtccagtgtattttcatcc

SEQ ID NO: 114711 - DNA, 574 bp, Homo sapiens
tttcttcattctccttaaatcatatttaaacagattttatgtttggttcccaatttttttttaaacttatatttgccccccatcaccctaacctgttcccagcagcatggaacatgggcttacatggtctctactggaattgtgcaaacaamtctcttggcctgaaaatacttatactctctgtgtgtctgtcagcattttaatttttttcaaggctctactcacataggacctcgtcagtgaaatccttttcaatgattctggggagaactgagtaattccttctctatgttttaatatcacttcatttatgtcttgttatatcacttaactattaattcttaatacaatcatgtgtgttccaccactagattaattctactaaccttcatagactgttgataatatgatgagaagtagaaatgcaattatgaaaacaaccaatcaataaaaattagggaaaaaagtcccaacatagagaaggcaaactaatccacattttctatacaacttaatccataaaggatcatgtctgattcatctttgcattatcagtactagcccagggcttgat

SEQ ID NO: 114712 - DNA, 636 bp, Homo sapiens
tcaacaaatttctcattctgtakattgagtgattggtctgctggtgactaatctcaccagaatgtatggactgggctcagaaaggacagttgaaatggactagggccttgctctctatgtggtctttgattccaggttttagggcagcacttccaaaagggcaagctacaaggtgcaagtattcccgcttctccttccatttaccagtgtcttcttcatcaaaacaagtcacatagacaaatccagcataagtggaggaagataatatataagaacttgaatcaagggccattacaggaatgatgtgctactgtaccaaatctccagtcaaggtttccaaactgtatgtggctgtttatctctttaaatcactgaattgagctgtgttttgtattactttaacattaaatctgtgtcttcaatccatgccactcttctctttcttatttcctactccacacagttcaccaaactttcctatggtagggtctttttgatgagtctacttagaatgccatttcctccatacttactcctcaccagcgctttgttcacttgactcaccctttttcattcttcaggtaagatgtcacctcaaggaagccttcctacactagttaggttttacatttttct

SEQ ID NO: 114713 - DNA, 531 bp, Homo sapiens
actgaggtttcagggccaatttattattactgcatagcctggctcacccttactgaaacagggcccaactgaaagtcactacctctgagtctgtccttgctgtgccacagaggtttcctccagcatcttgtctcgccttgattgtagaaattactccattgtttatacagaaactccttgagaacaggygctgtctttgattcatttttatgttctcagtgcacttgtccctagtgcatttctatttttccagctcagtgctgaacatgatgtaggacttgtgacattttgaaataagtagtgcactcagcataggggctgtgatgggtttgtgttggcttcttctaacaatcctttccaggctcaagcctctggagtggggaaatcattacttttatttttaaaatataagatttcttagatattaatatgttgaatagtataaaaaagaagcaataattgctcatcatcctactgcccagataatgcttgatgacattagaataaaaagtaattaaggcacatagctag

SEQ ID NO: 114714 - DNA, 583 bp, Homo sapiens
attgtctgtatattgtctttccttttaaggaaaggagaaagtcatgtaaaaaaccgtaagttgtcttaatgcttaaactgtaaattattttttaaaatgcctgttattagacaaagggtgctacaacataagagtcttgtggattatatggttgtcatagcataatgtgaagctgcggccatttctgtgacagactacagaagagttccaatacctgcagaaaaatagatacaatgacatctyggaattataggatagtggagcagaataggacaacaccttattttattattgtattgtcttggttttgaaagaatcatgtattttggttgtgaagtacctttttttccaattaaaggttcagagtttaaaggaatatctataaaaatatccacgaaaacctaggaataacattgcaacctctgtgtgacttagattctgtttataaggggttgatctggatagttcatggcagcaatcaaggtgtctgtgtttataattgttaactcttgactttgtttgaaatgatatagcagacatagcctatgataatttttttgacctgttttgttcctgaaagaat

SEQ ID NO: 114715 - DNA, 593 bp, Homo sapiens
aggcctacagggcgagtaggagtgaattatttggggtcacacataaaccagtggcaaaggaagcaattcctgtccmgggtcaggactgagattaccctattcttgggtgccctcctctctgaaggatcgggctttgagagagaaccaaagatgcttttgtgatgccacctctaagggctaatggaattgatcactcttagcccaggctcttaaaaacagaaagtggcctgttgagagagagcatgaaggcaggatcttctcattaattggggcattgccccttaggattcatgtggccagtgatcaacaggacgtttcggacccgtctgccccagctgcctgggacgtatgacccagctgcctgggtctctccaaggtgttcatttcaggagagtcactgacatggttcccaaagtcagtctgagcaaacagattacctgcacagcagctcctccctgtgatgagcatgcacatctctctgtggctccccctttgctcttgccttttgttcctgtcactcacaccacaggagcacctagcagaggcactaagcttgtcttggaagcttcgggagaagagcatgagtaggtcag

SEQ ID NO: 114716 - DNA, 593 bp, Homo sapiens
aggcctacagggcgagtaggagtgaattatttggggtcacacataaaccagtggcaaaggaagcaattcctgtcccgggtcaggactgagattaccctattcttgggtgccctcctctctgaaggatcgggctttgagagagaaccaaagatgcttttgtgatgccacctctaagggctaatggaattgatcactcttagcccaggctcttaaaaacagaaagtggcctgttgagagagagcatgaaggcaggatmttctcattaattggggcattgccccttaggattcatgtggccagtgatcaacaggacgtttcggacccgtctgccccagctgcctgggacgtatgacccagctgcctgggtctctccaaggtgttcatttcaggagagtcactgacatggttcccaaagtcagtctgagcaaacagattacctgcacagcagctcctccctgtgatgagcatgcacatctctctgtggctccccctttgctcttgccttttgttcctgtcactcacaccacaggagcacctagcagaggcactaagcttgtcttggaagcttcgggagaagagcatgagtaggtcag

SEQ ID NO: 114717 - DNA, 593 bp, Homo sapiens
aggcctacagggcgagtaggagtgaattatttggggtcacacataaaccagtggcaaaggaagcaattcctgtcccgggtcaggactgagattaccctattcttgggtgccctcctctctgaaggatcgggctttgagagagaaccaaagatgcttttgtgatgccacctctaagggctaatggaattgatcactcttagcccaggctcttaaaaacagaaagtggcctgttgagagagagcatgaaggcaggatcttctcattaattggggcattgccccttaggattcatgtggccagtgatcaacaggacgtttcggacccgtctgccccagctgcctgggacgtatgacccagctgcctgggtctctccaaggtgttcatttcagragagtcactgacatggttcccaaagtcagtctgagcaaacagattacctgcacagcagctcctccctgtgatgagcatgcacatctctctgtggctccccctttgctcttgccttttgttcctgtcactcacaccacaggagcacctagcagaggcactaagcttgtcttggaagcttcgggagaagagcatgagtaggtcag

SEQ ID NO: 114718 - DNA, 573 bp, Homo sapiens
ggatgcccagcgccttcctgccacccactcaccctggcttcgctcctgcggcgttgcgtccacagcctgccagccgtcgtagcccttgggcagatccggtcgcttcatccaggcatccgtccacacatggaaattcctgccgcaaattgggaacgggcccccacccccggaccacccccaaacctagttagagataaatacgccaaaattgccagagacatcttcatcaccggggacccactgaggttgttctcaggggtttgggaacctttgtcaacactggcaaggaaggggccaccggtgagtcccacctgcctctcagaaagcctcccagggcacagagttgtgtgcagggggcagggctgggggaacctcatgagaccgtcaccctgyctatggatttcaaagagcctgggagtcttcaccactagagatggtgaactcgaagcagaactaaatcttatctgtcttgacatctgcagtgtttgaagcataacagacacctaataaatttttcctggatgaatgggtgaaatgcactaggctgtgcagtcacagcctagtaaaagatta

SEQ ID NO: 114719 - DNA, 573 bp, Homo sapiens
ggatgcccagcgccttcctgccacccactcaccctggcttcgctcctgcggcgttgcgtccacagcctgccagccgtcgtagcccttgggcagatccggtcgcttcatccaggcatccgtccacacatggaaattcctgccgcaaattgggaacgggcccccacccccggaccacccccaaacctagttagagataaatacgccaaaattgccagagacatcttcatcaccggggacccactgaggttgttctcaggggtttgggaacctttgtcaacactggcaaggaaggggccaccggtgagtcccacctgcctctcagaaagcctcccagggcacagagttgtgtgcagggggcagggctgggggaacctcatgagaccgtcaccctgcctatggatttcaaagagcctgggagtcttcaccactagagatggtgaactcgargcagaactaaatcttatctgtcttgacatctgcagtgtttgaagcataacagacacctaataaatttttcctggatgaatgggtgaaatgcactaggctgtgcagtcacagcctagtaaaagatta

SEQ ID NO: 114720 - DNA, 562 bp, Homo sapiens
atcatgatactcgaatgtcccttaggaattcaaactcaaattcattatcatttccctctgaacatctctcttttattcatcaacccaccaggagttatcctagatttattctcctgtatgcaccactgtgtttgtgtctgttctctcattgctatcaagaaatacctaaagttgggtaatttataaagaaaagaggtttaattgtctcacagttctgcaggctgtacaggaagtgtggtgccagcatctgcttctggggaggcctcaggaagtttccagtcatggcagaaggcaaagggagagctggcacatcacattgcaagagcaggagcaagagggggtggggaaggtcccagaactcactgagcaagaacttactcatcaccaaggggatggtgttaaccattcatgagggatctgccccatgatccaatcacctcccaccaggccccacctccaacactgggcatcacatttcagcatgagatttggagaggacaaacattcaaaccatatcatccacrtttgcatctggcctccaaattgtctatatttctgtacc

SEQ ID NO: 114721 - DNA, 598 bp, Homo sapiens
cacgtggcggcagacaagagaagagaatgagagccaagtgaaaggggtttccacttataaaaccatcagatcttgtgagacttattcactaccatgagaacagtatgggggaaattgctcccatgattcatttatctcccattgggtccctcccacaacatgagggaattatgagagctacaattaaagatgagatttgggtggggacacagccaaaaaccatatcacctcgtcttgtaccttaacttctagaattctaaattgtttgcatttccccccaatattattatctgacgcatgcttctgtgccttcggtaataatggttccttgctagtccacccttgtgaacattacttatctttttatattaagccratagggttactttatctatgaaaacctttactttcccccattacatcagatagagctgagtacctcctcctttgtgtctacaatgcaccatttctatcatggcacttcttattgcacttatttgtccatgtgtaattccttctccaagactgcattcctagaaagcggggccattttaaatatttcacctcttaggacccagtacatgatacattgcaggca

SEQ ID NO: 114722 - DNA, 560 bp, Homo sapiens
ctgtaaactgacagtccaagacaagaaatgaaaaaaataattgaagttgacacgctgcgtcctgaaagctaacagaatgatgtggtatatttcctacgaccaagtcatttagaggaatgatacattcatctctctggctggataccttaggttaagaattggtttacataacaatcagaagatggatgggcaatgcattatgagaaacatmtttgtacaagatttcccactctatagttcctgtcttctgtgatggaaactggaaatcctatttgatttatatggttctctctttttagaaataaacagtgcaaaaatatgttaaagcataaaaaagaaaccataaatgttaatagatctgattatgaaagttaaaaatttttacatggcataagtctctgtaacccaatttttaagacactgaaagaaaatactatagaaaccataaatagttaatattctgaatattcaacatgaggttattaaaaaacaagtaacagataattacccttagaggaaaacaaccacataaatggactggtcatttgcaaaagaaaagc

SEQ ID NO: 114723 - DNA, 634 bp, Homo sapiens
gcctccaggtgagacagagtagtttgattaatatttacctgtttttgaaatttatgggttacattatataccatgtggttcaccactgaagctgtgtgaatagattttgttagaaaaagcagctgcagtagcagcagttgctaatataataatagctgagactaaaaaagcaattaaagtggccagaaatctttttttctgagtatgagacagtgcttttctaaacagctgcagggttgaatctccttcccagctccaggctaaatttacaggcagccaaaattctgcacgccattttaagatcatgacataggttatatttaactatgtaacatttcgatgagacaggcatgtagcatactaactactggaagagactttactactataaaaggattgattctgctctatattaggaacactttgcccaaacaaaagtatataagagtgcgtagtacaaatcacaactrtgtcagtaacattattatggaaacagagggtataattgccactgctagtaatatactcatcatgtgaaagaacccattcaaaaaaaggaagttctaatctccaaatttgggtatgagcagggcttaaagcttgtttcccttttagttgtaatattggtcctgaa

SEQ ID NO: 114724 - DNA, 499 bp, Homo sapiens
tagttctgttttaggcgaggtaaaggcaggttctctgagcagtttctctatggaaccaccaggtagatctaacaagcagctgcagttctttgaggataagatttgctttgctccctctgttactgggtacctatacagagaatgaaggctgttttattcaagggcactgacgagctggggagtgggaaatgagactaggataaattaaaatgtcacaaaaatctgtttccaacatttccttgtgttttcttgatcaagcatyccttggttgctgcaagttttcgttaattttcagagttgtgagaatgttgcttctgaaagttttttccagcttattaattgcttggtgttccccactgtgccattttcactgatgtcacctctaaccatgtcgttttagattactttcactgacataagtcttatatcttaggaatgagtcttttgggttcccacatgctcactgcattggaactctcctctaaccttctccatgagc

SEQ ID NO: 114725 - DNA, 499 bp, Homo sapiens
tagttctgttttaggcgaggtaaaggcaggttctctgagcagtttctctatggaaccaccaggtagatctaacaagcagctgcagttctttgaggataagatttgctttgctccctctgttactgggtacctatacagagaatgaaggctgttttattcaagggcactgacgagctggggagtgggaaatgagactaggataaattaaaatgtcacaaaaatctgtttccaacatttccttgtgttttcttgatcaagcatcccttggttgctgcaagttttcgttarttttcagagttgtgagaatgttgcttctgaaagttttttccagcttattaattgcttggtgttccccactgtgccattttcactgatgtcacctctaaccatgtcgttttagattactttcactgacataagtcttatatcttaggaatgagtcttttgggttcccacatgctcactgcattggaactctcctctaaccttctccatgagc

SEQ ID NO: 114726 - DNA, 499 bp, Homo sapiens
tagttctgttttaggcgaggtaaaggcaggttctctgagcagtttctctatggaaccaccaggtagatctaacaagcagctgcagttctttgaggataagatttgctttgctccctctgttactgggtacctatacagagaatgaaggctgttttattcaagggcactgacgagctggggagtgggaaatgagactaggataaattaaaatgtcacaaaaatctgtttccaacatttccttgtgttttcttgatcaagcatcccttggttgctgcaagttttcgttaattttcagagttgtgagaatgttgcttctgaaagttttttccagcttattaattgcttggtgttccccactgtgccattttcactgatgtcacctctaaccatgtcgttttagattactttcactgacataagtcttatatcttaggaatgagtctkttgggttcccacatgctcactgcattggaactctcctctaaccttctccatgagc

SEQ ID NO: 114727 - DNA, 499 bp, Homo sapiens
tagttctgttttaggcgaggtaaaggcaggttctctgagcagtttctctatggaaccaccaggtagatctaacaagcagctgcagttctttgaggataagatttgctttgctccctctgttactgggtacctatacagagaatgaaggctgttttattcaagggcactgacgagctggggagtgggaaatgagactaggataaattaaaatgtcacaaaaatctgtttccaacatttccttgtgttttcttgatcaagcatcccttggttgctgcaagttttcgttaattttcagagttgtgagaatgttgcttctgaaagttttttccagcttattaattgcttggtgttccccactgtgccattttcactgatgtcacctctaaccatgtcgttttagattactttcactgacataagtcttatatcttaggaatgagtcttttgggttcccayatgctcactgcattggaactctcctctaaccttctccatgagc

SEQ ID NO: 114728 - DNA, 584 bp, Homo sapiens
acaaaacagctttgcttaccgaccagtgtaataatgtgtcccttaaagcagatttgtttagtgttcagtacaataaatatagtatgttcctccagagcaggtctgtttgtggtcgggataacgaagaatgtgtctccctctcggacaaatattaatagtcccttcatacgattcaggattcctaagctcaggtttctcagctgtgggtcaaagcatcgtgtcacaggatcctcctaaacttctctgatcattcctgtgggacttagggtcaaggcgaactgatgtgaacacaaagctcatgctgtcttctgtgctgtgagyaataaagtcctttgcctttgatccagaatccagtgtgttctgccagtatccataaaactgtggcaggctaacttatttgtttgccagttggcaaaatatcagccccttcagagtttttgacaaacagttgggcactaaggctgcacctgtccagctggagatggaagggtgggaggtaggaggggccccagctgggcacagccacatgacagaagagggaccaaggctaggttgaacttttttgagggcagtgtaagccaagc

SEQ ID NO: 114729 - DNA, 607 bp, Homo sapiens
aaattacccaatctgtggtactttgttatgatagtcatagcaaacttatatgtaagggtcctcgttgttttttgtttttgttttttccatcagtaaaatgtattgagcacttacaatgcatccagtgctgtgttcaatgttttatatgcattgctttataactcttctstaagagatgttgttattaacaccaattttacgttgttagtttttaaggggctacctttaccaagctaaaactgcacgaacagggcaatgatatcacttcattttacagaattaggaaaatcattctttattgtgaatcagattcacacctcgaaatggactttctgagcccaggatatgcagtttctgattaactggagataaagaatagagaatacattactcagctgatggtaatattttctataattatatgtcctggttaagcacactcatggacttggcatatttttgtaaatcatcagctgtgtatgccccattaataaataagtgacatgcagagagatgacagtgatgcgaattagaaataggctgtctacaccctggagacagggaaggaatggaggcagaggatttgataagtcaaaccatggtagtg

SEQ ID NO: 114730 - DNA, 607 bp, Homo sapiens
aaattacccaatctgtggtactttgttatgatagtcatagcaaacttatatgtaagggtcctcgttgttttttgtttttgttttttccatcagtaaaatgtattgagcacttacaatgcatccagtgctgtgttcaatgttttatatgcattgctttataactcttctgtaagagrtgttgttattaacaccaattttacgttgttagtttttaaggggctacctttaccaagctaaaactgcacgaacagggcaatgatatcacttcattttacagaattaggaaaatcattctttattgtgaatcagattcacacctcgaaatggactttctgagcccaggatatgcagtttctgattaactggagataaagaatagagaatacattactcagctgatggtaatattttctataattatatgtcctggttaagcacactcatggacttggcatatttttgtaaatcatcagctgtgtatgccccattaataaataagtgacatgcagagagatgacagtgatgcgaattagaaataggctgtctacaccctggagacagggaaggaatggaggcagaggatttgataagtcaaaccatggtagtg

SEQ ID NO: 114731 - DNA, 555 bp, Homo sapiens
cagcagggttggtttctccagagcgtctggagaggcttgcaaatggctgccttcttgctctctccacatggcctttcctctgagagtttgcactcctggtgtctctctcttcttaaaaggacaccaatcctattggatttggactctgcccttatgatcttatttaaccctaagttcctccttaaaagccctatctccaattacaatcacattagggtttagagctttcatatatgaatttggggcataatttattccacaatacctggtgtggcaggcagcatatttaaatgtcccctaaatttccttccccctgatgaacatgcttcctcactttaaagatgatggwtttttttttttttttgacagagtctccctctgtcgcccaggctggagtgcagtggtgcgatcacagctcactgcaagctctgcctcctgggttcacgccattctcctgcctcagtctcccgtgtactgggactacaggtgcccaccaccatgcctggctaatttttttgtatttttggtagagacagggtttcaccatgttaccca

SEQ ID NO: 114732 - DNA, 629 bp, Homo sapiens
gcacatgcaatgggtaagcatacaatgcaacatacatcttaggttcaccttagggcagggttttagcattaaaatgaggtggaatgtgactctatatcaaaaggcgaactacaggacaccaagacagcttgtgcacagcctctataagctggccgaaactggcttaaggtctgcaattgcttatcagaaaagaatgttggcaaggccagtcatctgtccaatcagagttgttgttttctgggttgtgaatcagagttaggataatttgcctgatagctcctattgttagtgaaagtgtagtttttcttgtatgaatttaggaatttgccatgacagctgggcctggaaccctggacctatagacaactttttgtttctttaatcttaagrtcaatcttagttgtggaagcggtactattttggcctctcatatcacaaactaaaaaacttggccacaattttgtgccataatgtaggtggtcagaattaaaatattgtatgtagagtcttttattatttagatgtataagaatatgactttcttcatatttgatatgtgtacaattggaaatttctagggtcatcattgaaaaacagagtacataaaatcaacacttgtattaacagat

SEQ ID NO: 114733 - DNA, 629 bp, Homo sapiens
gcacatgcaatgggtaagcatacaatgcaacatacatcttaggttcaccttagggcagggttttagcattaaaatgaggtggaatgtgactctatatcaaaaggcgaactacaggacaccaagacagcttgtgcacagcctctataagctggccgaaactggcttaaggtctgcaattgcttatcagaaaagaatgttggcaaggccagtcatctgtccaatcagagttgttgttttctgggttgtgaatcagagttaggataatttgcctgatagctcctattgttagtgaaagtgtagtttttcttgtatgaatttaggaatttgccatgacagctgggcctggaaccctggacctatagacaactttttgtttctttaatcttaaggtcaatcttagttgtggaagcggtactattttggcctctcatatcacaaactaaaaaacttggccacaattktgtgccataatgtaggtggtcagaattaaaatattgtatgtagagtcttttattatttagatgtataagaatatgactttcttcatatttgatatgtgtacaattggaaatttctagggtcatcattgaaaaacagagtacataaaatcaacacttgtattaacagat

SEQ ID NO: 114734 - DNA, 573 bp, Homo sapiens
caacctcttctctttctcctcctcctcagcctgctcaatgaaaagacaataaggatgaacacctttatgatgatccacttccatttaataaacagtaaatatattttatcttccttataattttctaaatagtatttttccagcttactttattataaagatatagtatataatacatataacatgcaaaatatgtgttaatcaactgttgggtgttattgataaggtttctggtcagcactaggcaattagtarttacattttgggggagtcaaaagttatatgtggattttcaactgtacaggggtcagtgtcctttacccccaggttgttcaagggtcaacagtaaatgtgaacaaaaactaaaaaaaaaaaaagatatttatctaattacttaaatatttattttgcaataatctcatattttgtgttttctagggctcttataaaactaaggctagcttttaataatttgaatacaccttatctctagagaggtagtgatatgttcatggcaaggtagagatccaaaccagtagagaagatagaaaattattattatatattttccat

SEQ ID NO: 114735 - DNA, 521 bp, Homo sapiens
cacctacaaatatgtgactaatgcagaaatcccattacgtactctctctagtctacatgtttactaagctcttcagatacgattcttgaaacttcctttcagttaatttacttagcagattctttttaaagatggaaatccctgaatgcactgtaacattttattgctgtcctagtagacattccattcactcctagaaatgcaaacaggaatggtttccccttttgaagaaggaagagggatcactgaatgttaccttgtgctagccactttatgtaagacagcttcctagtttgatcttgatttcaattcttccttgttgctattattatgcccactctgaagacacaaaaactgagacttaaagtattaagtaaattgctaataatattgrcaaagatgataactatatttataataataataacagcaacacacaggcctaattctaccatggtaaagcctaacttatcaagctgtaaattattaaatttctaagtttgatgtttaagatatcatga

SEQ ID NO: 114736 - DNA, 628 bp, Homo sapiens
gaaggggaatttgaggtttgtcttaaatatgtatattgtgaagcagtgataatgtttccraggagaaattagaagaaattataactttgcatatatcagtgctaatagagtaaggaaatacatcaaaaagtatttggtaggaaggaatgaagatataggttggagccccgtagagagccttgtaaaaacccacaaaattgacacaatagctgtcacacatttaattctatggtatttcagatgatatattaaaaactttatagttgcatacagggggcatcattattctcaggatacagatgaggaaactgagccatagacaacttgtgatttgcccaagataaaaactcattaaaagcagtgtctacctgaatgtctgcctagttgcgtctgtctacaaagccctggtgcctttattcctctcagtttgtgcattagcttgcctaacacttaaagccagaaacagttacttttttctattaccttttaaatatttctgtggttgcttgtatgaaaatattttccacctttgctataacatttttttaaatgtaaacaattttcctggactcctttttctcttttaccaattattgccagagagcttagaaaacagagacacagagac

SEQ ID NO: 114737 - DNA, 551 bp, Homo sapiens
gcactgggaagtacacatttactgtactgcatgccgactgccttgaagaaactgtagctaaccaccttattagtattcttgcctccaccgtgtctcacttgcagcatcagagggctgagcaaatgcagtagaacagggacagacacagctctggcaatcatctcaatgcaggctgccgaatgttgggggtgggggatgcagcacttcgagattaataaccttgccataatccggggcacctgcaagcagacacctctgctgattgacctgctmctggcttgatgcatctgcctgggggagagggatccggaatctacctagtcctggggcccccctgattttggatgttcatttgatccttcacagatctgggaaggtaacagcgagccgtaccatctgcaacaaaatacaacttttgggaggtaattatggaaagtttcaataaaatgggttgggggaatgcgttttgttggggggtgttggtgagtgtgggtgcgtgttttgaatgaaagagaatgtgtgagtgtccgtgtgtgtgtatgtgttagtgt

SEQ ID NO: 114738 - DNA, 534 bp, Homo sapiens
ctcgtgacagtaatgagagcagcttctgtgcttcattattccagatttatttttatgttgggggaagggagagtctacgaaattttttttttttacatgatttttggaaggaaggagattttttttcaactttctatatagattattagttttaaaaacaaatcttcagagaaggcaaatcattaacagtcaagaacaactttgataatatatagagatgaataaatcagtatttttattttcttaaaataagtatataatttatcttggctggatctggtggctcatgcctgtaatcccagcactttgggaggctaggcaggtggatcctttgaggtcgggagttcaagaccagcctggccaacatggtgaaaccccatctctactaaaaatacaraaaattagccgggtttggtggcgggtgcctgtaatcccagctactctggaggctgaggcacaagaattatttgaacccgggaggcagaggttgtagtgagctgagatcgcaccactgtactccagcctggaacagtg

SEQ ID NO: 114739 - DNA, 580 bp, Homo sapiens
agtatatgggaccaggctgttttcccataagatagtagaaaattggacaaagtgtatgaaacaactgttttcagatattggacaacacatagtaaaggagacagtggtctctgagaggaaggaaacactcagggagtcctatgatattctgcctagaaacattttccagaatsctgcccagggagggagaaccgcagcagagtacaatcaatggcctcgctgaggttaggggaggcgaggcagtggaatttgcaggacacagtactcaaaatgaagaagcaataaggactaagagctccagaaatctacaaaggatcccctgaagtctttggtggaacaccaagccgtacttctagaagcccaaagacccacaaccaggggaaagtacatctactgggaatgtgtaagctgcacaattaccagagcttgcaaaaggctcaaagacaagtgaagcacaaccagtcagagtacaaagacactggtgaacagggggtagaattcagtagtgatcccagaaaggccaagtcttaagtatagggttaaactaatgctaggactgcagctaccaaaatgtggacta

SEQ ID NO: 114740 - DNA, 465 bp, Homo sapiens
tacacatatatcctgaagttaagaaaacagaacatattttaaatggagactaagctaaaaacctacaaattttactttaaaaataccttcttaactaatatagctctatagctaaatattggatcacttctgtgtatatgagataaagcagaaatgtgcaaggaggaattcaatgaggaagacagtaaattgtcaagttcaaacctgattcaaagtgaayttgtcactgctagaaaacaacacaaccatatcgagcacagagttttcttcatcatccttatttgatgaaatatctgcagtagacacctataaaaagcaaaatacacaaaatacgaagttatatttttcacttgttttacacttaactggaaagcttcagaaaattcataatcaaaacatatatttttgctaaggtctagaataacaattccaaatattaatgctaagatactacagcaaaatgga

SEQ ID NO: 114741 - DNA, 588 bp, Homo sapiens
gattcccctgcctcagccccctgggtagctgggattacatgtgcctgccaccatgcctggctaattttttttttttttgtatttttagtagagacagtttttcaccatgttggccaggctggtctcgaactcctgacctcatgtgatccacctgccttggcctcccaaagtgttgggattacaggcrtgagccaccatgcccaggctggagtgcagtggcgtgatctctgctcactacagcctccacctcccaggttcaagcaattctcctgcctcagccttctgagtagctgggattactggcatgtaccaacatgcctagctaatttttgtgttttgggtagagatggagtttcgccatgttggctaggctggtctcgaactcctgacctcaggtgatccatctcccaaagtgctaggattatgggatgagccactggtgcccagcctgtgggacagtttttaacaacaaattttatttctttaataggtacctatttaggttatctgtctctccttgcataaatttgcacctttcaagaaatttgttcattttgtctatcttgacaaattaaaggaatggagttg

SEQ ID NO: 114742 - DNA, 588 bp, Homo sapiens
gattcccctgcctcagccccctgggtagctgggattacatgtgcctgccaccatgcctggctaattttttttttttttgtatttttagtagagacagtttttcaccatgttggccaggctggtctcgaactcctgacctcatgtgatccacctgccttggcctcccaaagtgttgggattacaggcgtgagccaccatgcccaggctggagtgcagtggcgtgatctctgctcactacagcctccacctcccaggttcaagcaattctcctgcctcagccttctgagtagctgggattactggcatgyaccaacatgcctagctaatttttgtgttttgggtagagatggagtttcgccatgttggctaggctggtctcgaactcctgacctcaggtgatccatctcccaaagtgctaggattatgggatgagccactggtgcccagcctgtgggacagtttttaacaacaaattttatttctttaataggtacctatttaggttatctgtctctccttgcataaatttgcacctttcaagaaatttgttcattttgtctatcttgacaaattaaaggaatggagttg

SEQ ID NO: 114743 - DNA, 588 bp, Homo sapiens
gattcccctgcctcagccccctgggtagctgggattacatgtgcctgccaccatgcctggctaattttttttttttttgtatttttagtagagacagtttttcaccatgttggccaggctggtctcgaactcctgacctcatgtgatccacctgccttggcctcccaaagtgttgggattacaggcgtgagccaccatgcccaggctggagtgcagtggcgtgatctctgctcactacagcctccacctcccaggttcaagcaattctcctgcctcagccttctgagtagctgggattactggcatgtaccaacatgcctagctaatttttgtgttttgggtagagatggagtttcgccatgttggcyaggctggtctcgaactcctgacctcaggtgatccatctcccaaagtgctaggattatgggatgagccactggtgcccagcctgtgggacagtttttaacaacaaattttatttctttaataggtacctatttaggttatctgtctctccttgcataaatttgcacctttcaagaaatttgttcattttgtctatcttgacaaattaaaggaatggagttg

SEQ ID NO: 114744 - DNA, 689 bp, Homo sapiens
tatctcgtttatttagatcatctccaatttattttatcagagttttgcagttgtcctcataaagatactgttagatctacacttaaatatttcatttgtaaatgacattgcattttaacttcaaattccaattgttcattgctagattataaaaaaggaattttgatttgtatattaaccttatattttgcaagtttgttataattccttattagttccaggagaaataataagagattcagagaataagggaatatttttgttgattttctggaattacagacacatctgagaaggacaatacttttatttcctcccttctatataccttttattttattttctggtcttattgcctcagctaggacttctggtatcatgttgaataagagtagtgagtacggatctttcyttgttctaaatcataagaaaaaaccttctagtttctcacctttaatttgaggttagctgtatttttctgtctttttgtctttagagatttttttttgagttaaggaatttccatttatttctcagtttgctgaaagctctgatcataaatgggtattggattttatcaaatacttttctctgtgtatgttgatattttcctatgatttttcctctttagcattccttcattatctttttaatatgcatgagatcaatagtgaagtctcctttttgct

SEQ ID NO: 114745 - DNA, 565 bp, Homo sapiens
gatgaaatctttgataggcaataaacttatttattaatttattatttattaatatgtttagagagtcaggggatacatgtgcatgtttgttaaatggacatattttgtagtggtgagatttgggcttctagtgtacctatttcctgagtagtaaacattgtacccaacaggtaatttttcaaccctcacactcttatamcctcacatgtttggtgtccccagtgtctattactcccctctgtatgttggtgtgtacccattgtttaactcttacatataagtgagaacatgcagcatttgattttcccttttttatgagtcattttacttaggataatggcctccagcctcattcatgttgctgcaaaaaagactatttcattattttttatggctgcatagtattctgtggcatatatataccacattttctttatcagatcagctgttggtgtacacataggttgattgcatgactctgctcttatgaatactgctgcaataaacataccagtgcagatgtctttttgatataatgatttattttcctttggatacatacaca

SEQ ID NO: 114746 - DNA, 618 bp, Homo sapiens
aggtaatttttcaaccctcacactcttataccctcacatgtttggtgtccccagtgtctattactcccctctgtatgttggtgtgtacccattgtttaactcttacatataagtgagaacatgcagcatttgattttmccttttttatgagtcattttacttaggataatggcctccagcctcattcatgttgctgcaaaaaagactatttcattattttttatggctgcatagtattctgtggcatatatataccacattttctttatcagatcagctgttggtgtacacataggttgattgcatgactctgctcttatgaatactgctgcaataaacataccagtgcagatgtctttttgatataatgatttattttcctttggatacatacacagtagtgggactgtcagatcaaatagtagttctattttaagttctttgagaaatctccatactttttttcataagggttgttctaatttacatttccactaagagtgtaaaagtattctctcttctctacagcctcccccaacatctattattttttgtttttttaatagtagccattctgattgatgtgagatgttatctactttaggttgtaatttgcat

SEQ ID NO: 114747 - DNA, 565 bp, Homo sapiens
gatgaaatctttgataggcaataaacttatttattaatttattatttattaatatgtttagagagtcaggggatacatgtgcatgtttgttaaatggacatattttgtagtggtgagatttgggcttctagtgtacctatttcctgagtagtaaacattgtacccaacaggtaatttttcaaccctcacactcttataccctcacatgtttggtgtccccagtgtctattactcccctctgtatgttggtgtgtacccattgtttaactcttacatataagtgagaacatgcagcatttgattttcccttttttatgagtcattttacttaggataatggcctccagcctcattcatgttgctgcaaaaaagaytatttcattattttttatggctgcatagtattctgtggcatatatataccacattttctttatcagatcagctgttggtgtacacataggttgattgcatgactctgctcttatgaatactgctgcaataaacataccagtgcagatgtctttttgatataatgatttattttcctttggatacatacaca

SEQ ID NO: 114748 - DNA, 633 bp, Homo sapiens
cctttatattgctcaggatttataatcaaagaattacaagtacatgtataatatgctgatagtgaagtatttctgatttgttttataacccgtatgtggtgtcaatgctgaaaaccttccgatctcagttttccctaactttaattcaaggaatgactttccccagatctaaatgactgacacaaagggatgctttgctttagtattcaactgcttaagttttccttctctgtctttgatgttctaaaaataagcttctatacagaatatttcttcatttttgttaatttttacatcactatgtttaacaattactaggatttcaataaacacttctattagtaaaatattttaatgcataccaaaatgcattttggtgcattagtaaaatattttgcataccattttgcaaagcattttgcatactaatagcggtgtgtagtgaaaatatattcagctgaatattttacyaccatccatgtgttattttctttttcttttcgttggagggtaaaaaattgtaatttattgaaactcaactggaaaagtatcagatgcttcagtgtacaataaattgcacaaagcaccctcaggtgcatattcaagtcaagtaaaaaatccctccatgtccct

SEQ ID NO: 114749 - DNA, 597 bp, Homo sapiens
ggttcaaacccaggctctgtcaagaattagctgtgaaattcaagcagatcattttgcatctatttccccaagtgtgtttaagcttatcctgagaatagctgaggggccattggagggttttcagcagtggagaggtatgatcagatttgtctttttcggaagctatcttttgaaggtttcgtggagagcaacagagaaatatgagttggggaaatgaggatgctggttctcatgtgtgggcccttgggctggtgacagttcttggcagagttttcactgatgyattgctaaatgaggaaggtaaagactgtgtgtgtgtgacgcataacaccacatatatgagaataccaacagtcccagttgtactttcttgagaatgctttattatttggaaactaccgcttttctacttttttttggcactaaaattccttttgtttatgaaataatgttcacagtaggatagtaaatagtaggaatttttttatgtcattaccagacaaaattaaatgtatgtctgtgccttgattcatttgtttttaaacttattgtttcttagtccatgaaatccccaaacctgggaacttctgagctgca

SEQ ID NO: 114750 - DNA, 539 bp, Homo sapiens
gacttttagtttgggtcacaagtgccaataaactcaggacattccatttyatacccccttgcactgtgctccatggacatatttcagttaaaaaaaaattcttataaccgacaaatccagtctgagtgaaattccaagttaattcttctagacagagcgtgatatggtaggcagctgctaagacaggcatttgaacgaccttgcaaaagaatcatcaatctcttctgaactgttgggcagcagtgtttctaatgaggaccaatgcacacttctttttggcccagtgaccaaagtgcttacacggcagatgtacaaggaaggagacggcaatataactattagaaatgtcaggagcagacatagtgcatatccccagtgcacacatggcacgggtccagccgctctccacctctggaccatggaggattaataagtcattgcgttccttctctttgaacgctgagacctgtaccagccctccagatggctacttccaatcagctggtgttgatatctaagttgaaatctatccctgtctt

SEQ ID NO: 114751 - DNA, 539 bp, Homo sapiens
gacttttagtttgggtcacaagtgccaataaactcaggacattccattttataccsccttgcactgtgctccatggacatatttcagttaaaaaaaaattcttataaccgacaaatccagtctgagtgaaattccaagttaattcttctagacagagcgtgatatggtaggcagctgctaagacaggcatttgaacgaccttgcaaaagaatcatcaatctcttctgaactgttgggcagcagtgtttctaatgaggaccaatgcacacttctttttggcccagtgaccaaagtgcttacacggcagatgtacaaggaaggagacggcaatataactattagaaatgtcaggagcagacatagtgcatatccccagtgcacacatggcacgggtccagccgctctccacctctggaccatggaggattaataagtcattgcgttccttctctttgaacgctgagacctgtaccagccctccagatggctacttccaatcagctggtgttgatatctaagttgaaatctatccctgtctt

SEQ ID NO: 114752 - DNA, 488 bp, Homo sapiens
tatagttcttattataaaaatccattgttagtttttcacttaagaacaactattagatgcagtataggttacagctaagtagattccaggaactatgagttaatatgaartagaagttagatttacttccttcagctgattaaaaatcattttttttacattagtatctttgcttttgaggaattaaagtttgatgcgtgtatgttttcttttttattcttttctttttccttctttattttctctgggaaattactcattctacataaactgattccaagcatttttgcttacgtcgcataggttcactagatcagtacaaaatggtgccatttatatttgcatttggtaaggacctagacaagtagtaataaggggtgggtaactggtagaaatctgtaatggctgcttactagactcccacctaagaggaagtgagttcttcccatatctcgcagtgcacaaaacattcataaactacccaggga

SEQ ID NO: 114753 - DNA, 551 bp, Homo sapiens
cttcgtttctttataaattactcagtctcaataagttctttacagcagtggtgagaatgaactaataaaaaaaaattggtaccagagaagggcggtattgctatgaagatacgtgaaaatgtggaattgactttggaactgggtaatgggcagagggtggaacagtttggagggctcagaaggtagagaaagattagggaaagtttggaacttctagagacttgttgaatggttttgaccaaaatgctgatagtgatatggacaatgaagtccaggytgaggaggtctcagatggagatgaggaacttattggaaatttgtgtaaaggtcactcttgctgttctttagcaaaaagactggtggtactgtgcccctgctctagggatctgtggaactttgaacttgatagggataattgaaggtatctggtgcaacacattcaagatttggcctggctgcttctaaaagcctgactcatttacataaacaaattaactgaactagaacttaaatttaaaagggaagcagatcataaaagtttggaaaacttg

SEQ ID NO: 114754 - DNA, 466 bp, Homo sapiens
tgaggtgcaaaggggttaaataatgtgtccagggtcacatagctagtaaaaaatggcagagctggactgtaaattcatgtctgtctgaattcagaccaatgctctaaaaacataacttagtgtagaaaagagattagtgaatatttctgtaaatggccaaatagtaaatactttagcctttgccggtctgcaagctacctatgatctctcttgcattttcttcttctgtttttttttttttaaatgctttaaaaatktaaaaaccattctttgttcacaggccatataaaactaaccataggctgaatttggcttataccatcatagtttgcagattcctggtctagagtataccaggagtaccagtatacacagaggcctttcagaatctatcagtggtgaaaggatcatgtagggagtgctaaagggaaaggagaaaaatggagaaaatgcttagctctagatt

SEQ ID NO: 114755 - DNA, 620 bp, Homo sapiens
acagtctctccaataaagggtgctgggaaaactgaatatccatatgcaggcaaaaaaaaaaaaaactagaccactatctctcactgtataaaaaaatcaactctagactgagcgtggtggctcacacctataatcctagcactttrggaggccgagacagaaagatctcttgagtccaggagcttgagacaagccatggacaacatggcaaaactccacctttacaaaaaatacaaaaattagctgggcatggtggtgcatgtctgtagtcccagctacctggggggctgaggtgggaggatcacttgagtctgggaggtcaaggctgcagtgagctgagctcatgccactgtactacagcctgggcaacagagtgagacttagccaaataaataaataaaggaataaataaacaaactctaaatggattaaagatttaaacataagactccgaaccatggaagtacaagaaaaaaaacataataggaggaacagtttaggacactgatctggacaaaggtattatggagaacacttcaaagcacaagcacaaaaacaaaaatagacaaatggtattacattaaactaaaagccttctgtatagcaaaggaaacaaacag

SEQ ID NO: 114756 - DNA, 620 bp, Homo sapiens
acagtctctccaataaagggtgctgggaaaactgaatatccatatgcaggcaaaaaaaaaaaaaactagaccactatctctcactgtataaaaaaatcaactctagactgagcgtggtggctcacacctataatcctagcactttgggaggccgagacagaaagatctcttgagtccaggagcttgagacaagccatggacaacatggcaaaactccacctttacaaaaaatacaaaaattagctgggcatggtggtgcatgtctgtagtcccagctacctggggggctgaggtgggaggatcacttgagtctgggargtcaaggctgcagtgagctgagctcatgccactgtactacagcctgggcaacagagtgagacttagccaaataaataaataaaggaataaataaacaaactctaaatggattaaagatttaaacataagactccgaaccatggaagtacaagaaaaaaaacataataggaggaacagtttaggacactgatctggacaaaggtattatggagaacacttcaaagcacaagcacaaaaacaaaaatagacaaatggtattacattaaactaaaagccttctgtatagcaaaggaaacaaacag

SEQ ID NO: 114757 - DNA, 589 bp, Homo sapiens
gctggggtttaaactcaccaagttatacacataaatcactagataattatcttgggcaaggtgcttaatatttttgagcctcaggtttctcctgtacrgtaatgttatgggggctaaataagtttatatataaacacatgtatgtatgccttactcatcttacagttttatcgttgtttctgattttattacctaaacgatgcctggcataaaataaatactctataaatattagctactactgttactatttactctagttagtataacaatcctcagatagatgtaatcctcacttcacaggtgaggtaactggagccgaagaaggttatttaacctgctcaaggtcataagctggtgagtgtgcagagtgcaaggttcgcacccaggtttgtctgaccacaaaagcctcctgctcagccaccaaatctgccaagactgcttcaatatgacagcatagtgaaatagatgtggctggattgtccagaaaatcatgcttgcatccatctgtacaggttcatttcccagtttttcttttctgttagttataatttaactcgggattacaaatctatgccattagattaac

SEQ ID NO: 114758 - DNA, 589 bp, Homo sapiens
gctggggtttaaactcaccaagttatacacataaatcactagataattatcttgggcaaggtgcttaatatttttgagcctcaggtttctcctgtacggtaatgttatgggggctaaataagtttatatataaacacatgtatgtatgccttactcatcttacagttttatcgttgtttctgattttattacytaaacgatgcctggcataaaataaatactctataaatattagctactactgttactatttactctagttagtataacaatcctcagatagatgtaatcctcacttcacaggtgaggtaactggagccgaagaaggttatttaacctgctcaaggtcataagctggtgagtgtgcagagtgcaaggttcgcacccaggtttgtctgaccacaaaagcctcctgctcagccaccaaatctgccaagactgcttcaatatgacagcatagtgaaatagatgtggctggattgtccagaaaatcatgcttgcatccatctgtacaggttcatttcccagtttttcttttctgttagttataatttaactcgggattacaaatctatgccattagattaac

SEQ ID NO: 114759 - DNA, 625 bp, Homo sapiens
cagtgggctggggaaggcagacccacccttaatctgggtgggcaccaactaatcagctgccagcaaatataaagcaggcagaaaaacacgaaaacgctggactggcttagcctccccgcctacatcttcctcccatgctggatgcttcctgccctcaaacatcagactccaagttcttcagctttgaaacgtggactagcttccttgctcctcagcttgcagatggcctattgtaggaccttgtgatcatgtgaattaatactccttaataaactcctagataratagatagatagatagatagatagatagatagatagatattctgtattagtcagattaatactgactaatacagattttggtaccaggagtggttctacaggaacagaatattaaggatggagttctttagctgttttggggtttctggagttggctgcttaatatgattagacccaaaaatgctaaggactctacttctaatagtatggaaaacactgatagtccttggcatgaactgtttagagagttaggcaaaattaatgcattggacactcctgatttaccacttatgagaggtaaggagtttagtgactctatacataatacctttgaccatatg

SEQ ID NO: 114760 - DNA, 568 bp, Homo sapiens
ctccaacattaggaatcacattttagtacgagatttggaggaaacaaatacccaaaccatatcaacagtttatgttcttagccatagaggcactttacagaaagcataaggacttggattgtcccaaaacaggttatgggaacaggaaaaggaggcctgactggcaaaaggggacttgttatgtaaatgaagcctcacggtctcacagaaaaccgtaagaagtgccaataagagacatttccatggaaatagaagaaaaacagaggttaatgtctggtgtaatctatagattagtttttttttttaaatctctggagcatctttagattgcagtagcaatctgacaaattttcctagattagagtttgaattagatattcaagcaagccttctgagtagtctatacatcagctggcacaaaagctgtttacatgtaagttgctgtggtgatttcccccagcgtttatatcaagttgtctagtttcagttagcaggacttcaagaaaagcacagctttaatgtcyagtgattccaactatgaaaaatgggagaaaattttgaaaatatt

SEQ ID NO: 114761 - DNA, 600 bp, Homo sapiens
ggcataaaccatacaccataataattataatcattactgacaacatgtaccaaaacatatcagaattttaggaatttcatataattttgaaacacatattaataacacatttatacaaatataattcaaggaaagttaaacataatttcttatttgacaatgcttcccacatgattttaacataccaaataagcctaatatgtctcctttgaacttctaaggattatttttggaatgtgaaatttgaatttgggaagttattaaatagcaaacttttataatacttgatattaaaatrtgaaaacttttaaacacttgatcaaattagaatcatagcttcctctaaagtaatagtcatctctctattcaaagtgataattcaaagatgtcaagaagcaaaatctgatagagaggagacttagtttcccaaacaatcaacagacctaaaaaagagcatgaagtatattgattctgtatctcccttctcacctcttttatttatttatttattatatttattttgcagtttactaaaaatataaacaaaaatattttactatctctcattaatactacatgaaaatcttgttcaaaaaaaat

SEQ ID NO: 114762 - DNA, 553 bp, Homo sapiens
tatgatgcccaggctgaagtgcaatggctattcacaggcataatcttaatgctctgcagcctcaaacccctggcctcaagtgatcctyccaccttagcctcccaagtagctgggattacaagtgtgccaccttgcctggcaagaatagatattttaacgttcccaccacatacagaaatgataagttggtaagtgatggatatgttaattatctagatttaacctttctacaaggtatatatagacaaacatatcacattataccccatgaatatacattattacttgtcaattaaaaataaataaatgtatcccaaaagtctgatattggacaaatgtaatgtatatacaaaatatatttgtatgtatatctacatcctcatctatctctatatgtatacagagtgtaaatatccctgtaaatatccattccaacaattcatctcctcctgttatttatctcctcctgttatgaccctcttttcttatctgtgtatttacaaatgtgactacagctcctattgagagagggaaagtatttttttccttgatg

SEQ ID NO: 114763 - DNA, 557 bp, Homo sapiens
gtcgtcattgttctccagtccrtcatttgtgtcccatcctctcttattgagatttataggtcattctggagtcactggaatcactcattgatatgttttgcatatcgtgatagggcctcacaaatcccccaacttcacccctttatctcacgggacgtatatttatgaagcactctctatgtgttagcaaggttgaaggtatcaagatgaacaagaactagaaacccagcttgctaggaagccacatggaaaactgactgagagagtgattacaatataacaagtaacataagagaggtgtgtgaaaaatgtgatgaatgcacagaaaaccaaatgcttacatctgcttgagaagcagtagaaatgtaagattgcataggccataagaggtttccaagaggagaaaatattttatcctgcttaaattggaagagtaaaaaactctgaagatcaagaggtggggaaaagactttctaggaagtgggaattatgtgtataaaagcacttgcattcatgaatttgaatgcccaatgaataagtccaaaaatatacaatgt

SEQ ID NO: 114764 - DNA, 557 bp, Homo sapiens
gtcgtcattgttctccagtccgtcatttgtgtcccatcctctcttattgagatttataggtcattctggagtcactggaatcactcattgatatgttttgcatatcgtgatagggcctcacaaatcccccaacttcacccctttatctcacgggacgtatatttatgaagcactctctatgtgttagcaaggttgaaggtatcaagatgaacaagaactagaaacccagcttgctaggaagccacatggaaaactgactgagagagtgattacaatataacaagtaacataagagaggtgtgtgaaaaatgtgatgaatgcacagaaaaccaaatgcttacrtctgcttgagaagcagtagaaatgtaagattgcataggccataagaggtttccaagaggagaaaatattttatcctgcttaaattggaagagtaaaaaactctgaagatcaagaggtggggaaaagactttctaggaagtgggaattatgtgtataaaagcacttgcattcatgaatttgaatgcccaatgaataagtccaaaaatatacaatgt

SEQ ID NO: 114765 - DNA, 578 bp, Homo sapiens
ccttctaccgctgccatctgcactttgctaaacagaacctgcaagaagagcctcccaactgaccaggcttcagtccgttgtggagagggagggtgacaacacaggaggaaatgcttcacagggcatttcttccaactaccagcctgtcacatcagtgtcggctgatgtcactctgaacagaaagctttggggcccaagaaatgccaagaaaatggcagccagtgggcagggcagccaccggcctcttcttgctaatatatgcagcggatgtggcatttctgacaatattgcttctgcctcacttgccatttaatgttaagaggcttctagaatctcctgcatttaaagagtaatgactgttttcagggtaaatgctctgttaaataaccctggattattgtgtcgtgttattacatttataaaatggcatttcaaaaaataataattgtttyagagttaattgatgtttttaaccatcactgtgtggagaatttttattcagaagacagggagtgagcaagggagaaagagatttccatcgagagagtcggtactgaaaatagaaacctttcctgcat

SEQ ID NO: 114766 - DNA, 502 bp, Homo sapiens
gaattctattttaattccaaggtattaataaatctcagattttagtattcaactataagcataaattcaattatattatcaaaaccacaatattaagttcctctgacacagatccaaatcatgtaagatgtgtgatatatgcctccattctgaggctgagtcacgaattatcactttccaaacacaaacttgaaagaaggaacataaacagaaggtaaacagattcaaggcatccaagtaggctaaacagcatcaataaaagagcayggggttgtttctaccaaaaaaaaaaaaaaaaaaatttagcatggtggtgtgcacttgtagtcctagctctagggaggctgggagagaaggattaagcccagaagttgcagcaagctatgatcatgctactgcactccagcctgggagacagactgaaactctatcttaaaaaaaaaacagtggtggggcggcggggggaagaaaaaaagaaaaaaatgagaatgggttttggtgt

SEQ ID NO: 114767 - DNA, 617 bp, Homo sapiens
accagcttaccccaccaactagctcagaaccctaagattctgcaaagtatctgccccaccccaatcccaaagcaaaacaagtatcatatttccaagagtacctggctggcagagattgcctatcatatttcattctcctatttcaagatataacctggagcagctgcctagccagggaaacccattgcccactccatttgcagttaggtagaaacatataactcctttccactgtgaagtagaaggggggtaatttgtgccacttctagactgaggtttttaagaagcaggcatatctcccccatgctcttttttcttctaccagctgaatgccatgacaaccaggtgccaaggaacttcagaatctccaaatggaagtctccaaarcccctgattcaccagaaagagagaaaaccatccactggccaccacactgttatatgagcagaacacaaactcctgttgtgtttgagcctttaaacattctgggcagcagattatcctctttaacatacaaaatgatgcctcaaatatgcctacaaacaagtaaaatcagctatccagaaagctactctgtgccatagtttctttatttctatttctgcaacatgaggcac

SEQ ID NO: 114768 - DNA, 625 bp, Homo sapiens
ttactgtcttttaattaaatgtccttctacaacacttgygtgaagaatgctcacaaaggagagctcctgcttggccaggaatgtatattttcctggattatggagtcagggtccaagaaaagcaaaatgtaacatcattagacgaaagtaagaaataaagcagtgagaagcaataatgggctctttattgagctctttttatgattgataatattatatattattaagtgctttaaacatacattaattgtttcaacactcctctgaaataagtattactatctccattttaccgatggggtaactgagcctcagggaggttaaaaacctcactcaggattccagccagtgagtgacagaaccgggttgaaacccatgactttgtgacagtaatggccatagtcatatctgttatgatgtattgttgcaaagtaagagaagttcccacactccatgagtgtaccagttcaaaagatgtaacaaaaattgtcattctgtaataacattgacttacacttaaaaaaactattatggatttcaaaacttttcaaagttctggaagaaagacagtcaggaactttacaaattattggtttatagttcatacattcagtcttcacaaagt

SEQ ID NO: 114769 - DNA, 611 bp, Homo sapiens
caggctgaaatacctgctggtaggttggttgcaatggaccacatccatcttagaagaggcagtgctttgttctcactgaaagagacatttactctaaatatggatttgttttccttgccctcaaggcttttgtcaaaatcaccatctgtggacttacatagtatgattcacatcaaggtattcttataacactgcttctgaccaaggaacttacttaacagcaattgtggactcatgctgatggaatctactgatattaccatgttccctgttaccatgaagtagctggtctgatagaatgctgaaatagcctttcaaaaatttagtttccatacyggctgggaaggaacatctcacaggtttgaggtaaagtcttcaggatgtggcaaatactgtaaatcaatgaccaatatacaatgctctctttcacagaggtaggatccatggattcagcaaagctgtgtgagatgggagttattcctttcactattacccacagtgagccactatgtgtggaagttcagtgtggggtactaggcactcttgaagttcatgcctgttgtccctgatctgttgctcatcctgttagcacaaggcagcagccaagccca

SEQ ID NO: 114770 - DNA, 611 bp, Homo sapiens
caggctgaaatacctgctggtaggttggttgcaatggaccacatccatcttagaagaggcagtgctttgttctcactgaaagagacatttactctaaatatggatttgttttccttgccctcaaggcttttgtcaaaatcaccatctgtggacttacatagtatgattcacatcaaggtattcttataacactgcttctgaccaaggaacttacttaacagcaattgtggactcatgctgatggaatctactgatattaccatgttccctgttaccatgaagtagctggtctgatagaatgctgaaatagcctttcaaaaatttagtttccataccggctgggaaggaacatctcacaggtttgaggtaaagtcttcaggatgtggcaaatactgtaaatcartgaccaatatacaatgctctctttcacagaggtaggatccatggattcagcaaagctgtgtgagatgggagttattcctttcactattacccacagtgagccactatgtgtggaagttcagtgtggggtactaggcactcttgaagttcatgcctgttgtccctgatctgttgctcatcctgttagcacaaggcagcagccaagccca

SEQ ID NO: 114771 - DNA, 656 bp, Homo sapiens
tcaaccaatggtacatacaaaataaacttttggtgggtaagcttctgtcttactactactaataatgattttttgaaaagcccaagactatacaaaaatgtgtatgctagtcatttgtttagagttaggtaatagacctaataagcatttcaaaagaggttgttttcatttgcattttaaaatgtgtgtgctataggaatgtatcatactccaatgaaaacaattgatattgcctgaaagacactgcttattggtgtggccactttgggaatcagatttaaaaaactcaactttttactatataagaatttcaaacatataggagagtatacagagagagagaataatgttagtgtccattaaaataacctggaaggctcataaaaacagattgctgagatttattcccagagtttctgtcaagagatatgaagtggggcttgcaatttgcatttmtaacaagtttccaggtgatgctgatgctgctggtccaggagccacattttgagaaccacaattataatgaattcctgtttccatcctcagctaataatcaacacatgaccaacttggtttcattcatactctccactcacgttcccctcctttccaatgtaaggtttaggagcaaattccacacattttatactttcatc

SEQ ID NO: 114772 - DNA, 540 bp, Homo sapiens
cccagagggcacagtgaggggccagtagggagaggataggagaagaggaggaggaggagccgtgtccccggcagcaggattcccacttggagcacaaagtgaagcaagcacaggggagggggactagaatcagtcccccacagcaagcacagaaaggaggagctgcgcagaaggcagagccccccagmccctggggcctggctggggaaggtccgcacttggggagagctgggagctgttgaaggtttggggggaggggaaacgggttgtttcttcatttctttttttgtttttgactttgttggttcatccctgttttctagctttggatcatttttgtaccaaggcgagcaagcctttttgaaaaataacaaaagaggaaaaaaaaatccctcctggaaaaaaaaaaaaccctggaaaatagaaaaaaaaaaaaggacctcataaatgatgcaattacttttaattgcaggcaactctttacatttaagtgaagtgtcttaacattttatatggttttaaaaatgtatttacatatta

SEQ ID NO: 114773 - DNA, 540 bp, Homo sapiens
cccagagggcacagtgaggggccagtagggagaggataggagaagaggaggaggaggagccgtgtccccggcagcaggattcccacttggagcacaaagtgaagcaagcacaggggagggggactagaatcagtcccccacagcaagcacagaaaggaggagctgcgcagaaggcagagccccccagaccctggggcctggctggggaaggtccgcacttrgggagagctgggagctgttgaaggtttggggggaggggaaacgggttgtttcttcatttctttttttgtttttgactttgttggttcatccctgttttctagctttggatcatttttgtaccaaggcgagcaagcctttttgaaaaataacaaaagaggaaaaaaaaatccctcctggaaaaaaaaaaaaccctggaaaatagaaaaaaaaaaaaggacctcataaatgatgcaattacttttaattgcaggcaactctttacatttaagtgaagtgtcttaacattttatatggttttaaaaatgtatttacatatta

SEQ ID NO: 114774 - DNA, 540 bp, Homo sapiens
cccagagggcacagtgaggggccagtagggagaggataggagaagaggaggaggaggagccgtgtccccggcagcaggattcccacttggagcacaaagtgaagcaagcacaggggagggggactagaatcagtcccccacagcaagcacagaaaggaggagctgcgcagaaggcagagccccccagaccctggggcctggctggggaaggtccgcacttggggagagctgggagctgttgaaggtttggggggaggggaaacgggttgtttcttcatttctttttttgtttttgactttgttggttcatccytgttttctagctttggatcatttttgtaccaaggcgagcaagcctttttgaaaaataacaaaagaggaaaaaaaaatccctcctggaaaaaaaaaaaaccctggaaaatagaaaaaaaaaaaaggacctcataaatgatgcaattacttttaattgcaggcaactctttacatttaagtgaagtgtcttaacattttatatggttttaaaaatgtatttacatatta

SEQ ID NO: 114775 - DNA, 540 bp, Homo sapiens
cccagagggcacagtgaggggccagtagggagaggataggagaagaggaggaggaggagccgtgtccccggcagcaggattcccacttggagcacaaagtgaagcaagcacaggggagggggactagaatcagtcccccacagcaagcacagaaaggaggagctgcgcagaaggcagagccccccagaccctggggcctggctggggaaggtccgcacttggggagagctgggagctgttgaaggtttggggggaggggaaacgggttgtttcttcatttctttttttgtttttgactttgttggttcatccctrttttctagctttggatcatttttgtaccaaggcgagcaagcctttttgaaaaataacaaaagaggaaaaaaaaatccctcctggaaaaaaaaaaaaccctggaaaatagaaaaaaaaaaaaggacctcataaatgatgcaattacttttaattgcaggcaactctttacatttaagtgaagtgtcttaacattttatatggttttaaaaatgtatttacatatta

SEQ ID NO: 114776 - DNA, 551 bp, Homo sapiens
tatgtatgtgtctaagggcttatatctggcatgagtgagtcctagtacctgggcctatgctcctcacagctggcctcaattgctctcttaaccaactattggacagagctaaatgggcctagtgtggtttgcagaatccacttcctgccacgagaacctgtgtgattttgctgcatttacctaaaaatacggaaacatctaggcatcaggcagataaatttttggtgtatctgatatttaatgtattcatttgttccttcttatcatcccttttttgtctaaaatttcacttgtttacttgtaatacattttatgagttttaattgacagatgataaaattcacatatttaacctgcayaatagtaaactttgataaagaaaatctctattttcaagaaggtgacaagtcaactcacctcagaattcctcttgctcttttacagacataattttgtttttctcctcttttcttctaccatttctttataaaagtactgatgttttcatatttctttagactagtttttattctctagaatttataagaatg

SEQ ID NO: 114777 - DNA, 551 bp, Homo sapiens
tatgtatgtgtctaagggcttatatctggcatgagtgagtcctagtacctgggcctatgctcctcacagctggcctcaattgctctcttaaccaactattggacagagctaaatgggcctagtgtggtttgcagaatccacttcctgccacgagaacctgtgtgattttgctgcatttacctaaaaatacggaaacatctaggcatcaggcagataaatttttggtgtatctgatatttaatgtattcatttgttccttcttatcatcccttttttgtctaaaatttcacttgtttacttgtaatacattttatgagttttaattgacagatgataaaattcacatatttaacctgcataatagtaaactttgataaagaaaatctctattttcaagaaggtgacaagtcaactcacctcagaattcctcttgctcttttacagacatawttttgtttttctcctcttttcttctaccatttctttataaaagtactgatgttttcatatttctttagactagtttttattctctagaatttataagaatg

SEQ ID NO: 114778 - DNA, 547 bp, Homo sapiens
tttcatcctaactatctacctaaataatttctttctatctcctattacaccagctggactcttctctttagcttagtgattttggggtctcaagatttattttctcttcacaataggcaggtacaaaaggagacttcatatgtaattaagttgcttgtattagtccatgttcaggttgctataaggacatacatgaggctgggtaatttataaagaaaaataggtttaattaactcacagttcttcatggctggggaggccacaaaaaacttacaatcatgatgcaaagggtagcaaacacatgctatttcacatgactgcaggagagagaagtgttaagtgaagagggaagcccctcataaaattatcaaatcttgtgataactcactcactaacaggagaaaagcaggaagaaaacagcccrtatgattcaattatttccacctcattccacccttgcaatgtgtgaattattacaataaaaggtgagatttgggtagggacacagagccaaaccatatcattgattttattttctttagaattt

SEQ ID NO: 114779 - DNA, 566 bp, Homo sapiens
ctttttttgttttctattttttgtttgtacataggyaattttattcataaatggactttgctagaaattttttgtaaggagtcaaagggtagaatctttaaaatcttcaagcccagtcaatattttatctgtgccaccagatagctatgtgaattgggttactttctcttttttcaagtttccaagaaaacttgggagtcctgggtctgtcagaaattaaattgtttacttactacacttcagggccctgtaaaaaaaaaaaaaaaggtacatgccagttttcccaaggggctttatcagctctccaggttagattcattttataaagtaaatatgaaaatatataattcaagttaaagacttagtaaaatgaccattgtctccaattgtgccctgttatggaagaaagcagatttttattgaacctatgcaaataactattttgatataagaatactcacagtttccaaattttggagaaattatgtatataagaagatattatgtttttatttttttcttaataaagtataccatactcaattgttaacaactgtgaatagctt

SEQ ID NO: 114780 - DNA, 566 bp, Homo sapiens
ctttttttgttttctattttttgtttgtacataggcaattttattcataaatggactttgctagaaattttttgtaaggagtcaaagggtagaatctttaaaatcttcaagcccagtcaatattttatctgtgccaccagatagctatgtgaattgggttactttctcttttttcaagtttccaagaaaacttgggagtcctgggtctgtcagaaattaaattgtttacttactacasttcagggccctgtaaaaaaaaaaaaaaaggtacatgccagttttcccaaggggctttatcagctctccaggttagattcattttataaagtaaatatgaaaatatataattcaagttaaagacttagtaaaatgaccattgtctccaattgtgccctgttatggaagaaagcagatttttattgaacctatgcaaataactattttgatataagaatactcacagtttccaaattttggagaaattatgtatataagaagatattatgtttttatttttttcttaataaagtataccatactcaattgttaacaactgtgaatagctt

SEQ ID NO: 114781 - DNA, 566 bp, Homo sapiens
ctttttttgttttctattttttgtttgtacataggcaattttattcataaatggactttgctagaaattttttgtaaggagtcaaagggtagaatctttaaaatcttcaagcccagtcaatattttatctgtgccaccagatagctatgtgaattgggttactttctcttttttcaagtttccaagaaaacttgggagtcctgggtctgtcagaaattaaattgtttacttactacacttcagggccctgtaaaaaaaaaaaaaaaggtacatgccagttttcccaaggggctttatcagctctccaggttagattcattttataaagtaaatatgaaaatatataattcaasttaaagacttagtaaaatgaccattgtctccaattgtgccctgttatggaagaaagcagatttttattgaacctatgcaaataactattttgatataagaatactcacagtttccaaattttggagaaattatgtatataagaagatattatgtttttatttttttcttaataaagtataccatactcaattgttaacaactgtgaatagctt

SEQ ID NO: 114782 - DNA, 596 bp, Homo sapiens
tattgaacctatgcaaataactattttgatataagaatactcacagtttccaaattttggagaaattatgtatataagaagatattatgtttttatttttttcttaataaagtataccatactcaattgttaacaactgtgaatagcttaaaagacaaacttttcctgattctgaaaaaacagaacataagtaattagcaaatgctttaaagaataagccataaaaataatttcagtcttctgtcaattcagttcatgcaattaagtcctgtcctgcttaatattagattaacaatcatcakaaatcaatcaggtatcaatgagagtcttggaagttttaatctctataccaatggcacaatttataaaattgtcacaatcgtatatttaagagtactcctcaaaattctatagattattataagccacttgataaagaatcaaagtaaaacaccaactgtggatgactgaagttttagaatagccatggttaaaggcagaattgaggggaaaatttggttacttctgcaataaacagaaattttacataataatcataaacactaccgataaaatatactaagacatatcaaatc

SEQ ID NO: 114783 - DNA, 639 bp, Homo sapiens
gataaaaagttgcaatacaagattctttctcatataaaattatttttatttttttattttaacctttcacaccaaaagtactcctctatgtctaaaaatttcttttttttttttttgagacagaatcttgctctttcacccaggctggagtgcagtggcatctctcttatttactggttatgtttaggatgttttataagtaacctctgaattaaataaaatctttttgtaagaacaaatattttacaaaaatattttcttwtagtatacattcttaaaatgattagcaatgacctaaacatttagtcaatatctattatttaattaaactttagatttttaaattgtagaacaagtttatttaaaaggtttattgtgttacattaacttaatttattttttaaatagcttacctagatcatttatgaaaactataatactcatcctttaaagctttttccctgttatccatattataacccatgaatttcaggtgtttacctaagtaaaattcttattaaataaatgattgtatttccaataactatttacctgttttttattaaaacaataatattaaacatcttatttgtcaaattacaaagatcattctggttttaactaggttaataattttat

SEQ ID NO: 114784 - DNA, 639 bp, Homo sapiens
gataaaaagttgcaatacaagattctttctcatataaaattatttttatttttttattttaacctttcacaccaaaagtactcctctatgtctaaaaatttcttttttttttttttgagacagaatcttgctctttcacccaggctggagtgcagtggcatctctcttatttactggttatgtttaggatgttttataagtaacctctgaattaaataaaatctttttgtaagaacaaatattttacaaaaatattttcttatagtatacattyttaaaatgattagcaatgacctaaacatttagtcaatatctattatttaattaaactttagatttttaaattgtagaacaagtttatttaaaaggtttattgtgttacattaacttaatttattttttaaatagcttacctagatcatttatgaaaactataatactcatcctttaaagctttttccctgttatccatattataacccatgaatttcaggtgtttacctaagtaaaattcttattaaataaatgattgtatttccaataactatttacctgttttttattaaaacaataatattaaacatcttatttgtcaaattacaaagatcattctggttttaactaggttaataattttat

SEQ ID NO: 114785 - DNA, 639 bp, Homo sapiens
gataaaaagttgcaatacaagattctttctcatataaaattatttttatttttttattttaacctttcacaccaaaagtactcctctatgtctaaaaatttcttttttttttttttgagacagaatcttgctctttcacccaggctggagtgcagtggcatctctcttatttactggttatgtttaggatgttttataagtaacctctgaattaaataaaatctttttgtaagaacaaatattttacaaaaatattttcttatagtatacattcttaaaaygattagcaatgacctaaacatttagtcaatatctattatttaattaaactttagatttttaaattgtagaacaagtttatttaaaaggtttattgtgttacattaacttaatttattttttaaatagcttacctagatcatttatgaaaactataatactcatcctttaaagctttttccctgttatccatattataacccatgaatttcaggtgtttacctaagtaaaattcttattaaataaatgattgtatttccaataactatttacctgttttttattaaaacaataatattaaacatcttatttgtcaaattacaaagatcattctggttttaactaggttaataattttat

SEQ ID NO: 114786 - DNA, 639 bp, Homo sapiens
gataaaaagttgcaatacaagattctttctcatataaaattatttttatttttttattttaacctttcacaccaaaagtactcctctatgtctaaaaatttcttttttttttttttgagacagaatcttgctctttcacccaggctggagtgcagtggcatctctcttatttactggttatgtttaggatgttttataagtaacctctgaattaaataaaatctttttgtaagaacaaatattttacaaaaatattttcttatagtatacattcttaaaatgattagcaatgacctaaacatttagtcaatatctattatttaattaaactttagatttttaaattgtagaacaagtttatttaaaaggtttattktgttacattaacttaatttattttttaaatagcttacctagatcatttatgaaaactataatactcatcctttaaagctttttccctgttatccatattataacccatgaatttcaggtgtttacctaagtaaaattcttattaaataaatgattgtatttccaataactatttacctgttttttattaaaacaataatattaaacatcttatttgtcaaattacaaagatcattctggttttaactaggttaataattttat

SEQ ID NO: 114787 - DNA, 585 bp, Homo sapiens
ggcctagtgtgaagtgtctgagtcacgggagcaaatcccgtataaatgtcttggtgctgccctcacaatactgatgagttctcactcttagtctgcacaasatctggttgtttaaaagattttggcacttcttccctccttttttcttgcctccttttttcaccataatggtgatatgcaggctttcctttgccttctgctatgattataaacttcatgagacttttaccagaagcagatgccagtaccatccttcatgtacaacctacagaacgatgagccaaaaaaacctcttctctttataagctatgcagcctcaggtatctctttatagcaacacaaaaagggactcacaaaaataattcttataaaaattatctgattatttatttaatgctgtattctatactactatatcataacttagtaaagaacaagatcacacttgtgtagttcactcctgtgtacccagtgcctaactagtgcttagcatttattcctcattcaccatatatttatttatagtccctctttcaaaatcatcaggtacaaataatattttctcaacaaatgttgataaaatta

SEQ ID NO: 114788 - DNA, 628 bp, Homo sapiens
atgttgttaatagggaagtgatcccaggaagcagatgtgaagaactaagacagaagcaatcaatatcctctatgtgttcatgaaaaactgctgcttggtaagctagagctcacttccatgaaggaacttttaaaatacttttaaaataatgaaaagagtggagatgcctataccgaaaatgactgagaattatcaactcaggattgccagatttagcaagtgtagaggatgcccggttaaatttgaattgatggtaaatayttacactaaaaaaaagtgttgtttatctaaaattcaaatttaactgggtgctctgtagttaatggacaattgtaaaccagaggaaatggagatgaggcattcacccactgattcgcgttcgccattagttgagaattgcactccaccatgcttcagcaatcccacacttgtgaactaagtgagcagctgagcaagctcccatgatgccagataaagtccttagtcagaaaagaagagattcgaacacaggcatccgggaagaaagcctggaatggtgccagaaatgctcacaggtgcaggtgaactcaggtagacccagggaatgaagaaatgggacatcaattatgtctgctacagaaatactgtt

SEQ ID NO: 114789 - DNA, 628 bp, Homo sapiens
atgttgttaatagggaagtgatcccaggaagcagatgtgaagaactaagacagaagcaatcaatatcctctatgtgttcatgaaaaactgctgcttggtaagctagagctcacttccatgaaggaacttttaaaatacttttaaaataatgaaaagagtggagatgcctataccgaaaatgactgagaattatcaactcaggattgccagatttagcaagtgtagaggatgcccggttaaatttgaattgatggtaaatacttacactaaaaaaaagtgttgtttatctaaaattcaaatttaactgggtgctctgtagttaatggacaattgtaaaccagaggaaatggagatgaggcattcacccactgattcgcgttcgccattagttgagaattgcactccaccatgcttcagcaatcccacacttgtgaactaagtgagcagctgagcaagctcccatgatgccagataaagtccttagtcagaaaagaagagattcgracacaggcatccgggaagaaagcctggaatggtgccagaaatgctcacaggtgcaggtgaactcaggtagacccagggaatgaagaaatgggacatcaattatgtctgctacagaaatactgtt

SEQ ID NO: 114790 - DNA, 317 bp, Homo sapiens
cattcctcactgagggccctggtgcctttggataattttagccctaagtatttaacctgctgtgagcagagctgagcctttggtttggaaaccttgtagcatcaggtggcaaggaaatttaagagcacttgggtrgcttgaatgggcggcttaaagtaaatcatcaatgtaccaaaagacaagagtgtccaggtatgagaactggctcaagtcttgggccaatgcctggccaaatagatgggggctatccctaaacccttggggtaaaacagtccaggtgagttgagagtcaggatgtacagggacatggaaaaagg

SEQ ID NO: 114791 - DNA, 618 bp, Homo sapiens
catctacttgggcaaggattgaagagggctactctgcaccatgatatattcccaggaaggatggggcagctcaggctgctaaacctggtcaggtgctacaaatgtctggagatctgcctgggcatggaacagagagggcccagctgcacgaggacctctgcacaggagtgatggggtgacttaagctactaatccataagagtgggtgctcccaatgcctggaatcttcctggatatggaccagagaggaccccacttcaccacaatctatacacaggaaaggtggcatggcttaagctgctgatctggatgagtgggtgctctgatttcctggagatccacctgagcatagrgcagagagggccccactgtaccatggtctctgcacagggagggtgggtgacagagcctgttgaaccaagcaagtgggtgttctaaatgcctgaagatctgccttggtgtgaagcagagagggcctcattgcacaatgatctgtgctcaggaaggatggggtgtctcaggctgctgaaccatgcaatcaggtggtcttaatgcttagagatctgcctgggcatgaagtagagagggccctactgtaccatggtctatgtgcaggaa

SEQ ID NO: 114792 - DNA, 546 bp, Homo sapiens
ttctaaaagaattcaagtttttgcctatattgtcaaattttcaattcacctaatattgacattgtgcatatcaatttatgtgatatgtgaatgatatgtgaaatttccaactgatgktgtttcctaaataggatatcaattgttcaaggataattgatattatcaattaaatcaattagatatcaactctatcaattggatgattatccctttccctattgatctgcattgccacctctgccacatgccaagttccatttgttttttaatctatttctgagattactatcctgttccattggcctatatacctatacctatgctaacaactcactattttaattagtacagtatataaatattgtttcctatctttatttaaataaaggacaagtccttttcacatcagatacaccttggggttttgacctttttctttttcgaacaaaatttacaatcagttttcaagttccacagaaaactgttttgggatagattaaggttattttatttatatttaagaaaatcatattagaaataaaattc

SEQ ID NO: 114793 - DNA, 395 bp, Homo sapiens
caatcacagaatattatgctagaagagacctttgaaagcatttagtccaactcaccttatttgacagatatgagtaaatgttttttgcagatgaattagttatctggttagaactggaaataaatcccaatttgtaatgattctaaccctcaagttctaacattytgagctccagtcccttcacaacctcctaggcctttaaattctcttgggacaacctgttgtcattatgtatagcctctggttacttttcattttctatactggccatgcccaattaactgtataatcattctctgcaccaaggatcttgaagacataacctctgagcctcttgaaccatctggaatgtcaatttcctgtagggtttttttttttttggatcttgaacaata

SEQ ID NO: 114794 - DNA, 563 bp, Homo sapiens
acagctaaagctttatcatcctatgtaatggggaggcacctatggatgcaagtagagattacccccttatatcaaccacattaaatccataaagtttccccaaagcctttcctgcctcagcatctaacttccttcttctgagtctctggagtcccagygcggcaggaaaatggaaatcataatatagcgttcatagatacagaatggcagcgtcaggagcaactacagttcttagtaagagcatcacagaccctctcagccatgaattaacttgctctttttctacctccctttgtaactatagctacccttcttagggcctcccatcttttttctgaggccctagtttggtttctggctgaaactacatgggagttgcaggcacttctctcaccaccagatggtgataaagagcctatcaggataatgaattctgagatttcccaactccggcatagttaacatttagagccagataatttattgtgggaaactctctgtgcgttataagatgtctagtagcacctctggcctctatccattaaatgtgagtagcactattc

SEQ ID NO: 114795 - DNA, 640 bp, Homo sapiens
tgccaggcactttgctagacaatagggttgaagagagaaataagaaaatgcatgggagagtctttgagcctaaaatccagcagcctagagaaaaagctaagagtgacaaaaagatttacatcaaagcatgttaagggtcctctcccctttgatggcctcacttcctaattctagagaagccatctggtcaggcctttctcacattcaaacgtttcaccttcaaatttaagactacagtggccacccttgtgtttttttttttctgatccccaaggaagaagtgtccctaatctctgtgcaatactaattccgtccttgaaatcctgctcctacttatctcccctagggtcttgctttctatctcttgagtctaagatatctccagcatcttactttcttggttgcttcactctggacaagaaaacatactcgaggcttcccatactacttaaatgcaaattggttcctgcctattctataagtttttactttctttatattttcattatttctagatttctcaaaaaagtatttcaattmggcatatctggctcaataaatgtttgttgatgaaatgaattgatgaattcgttccacctacttctcatcatttagtctcacttcatctttttcttaaaaa

SEQ ID NO: 114796 - DNA, 593 bp, Homo sapiens
agtctagctttcttcccatgacactatgtggtctaacagagaagaaaccatggttgcctctgcaactgcccatctaaacgaaagctctcatttttcttatctctgatggacagagatgcctgcaaaacagctcccttatttgcctttcacctctgaggataatagycctttatactgaattaacatttcatagtttcttaattaaatggggtgaatagtgattaggcccagacgcacgataaactcagagctttacagaaaaaagaggaaacactcaatttcagtgattcttttatcaaaattcccatctgttcctgccctgacagtgagaaaaatgaagcccactaaggtaacatgtgacttctgtgtgtgagcaattttttttgcaacatctgaggctctttttctacatccctccagtgatttaaatttctaaaactcaagttctttattaaacacaagcactaagagagtaacagtcatttatttgttctttgcattttaagaagaaaggtcaaaaacacacttctgatttgatattttgagtatcacacccatttagacacagatatatcaattataaatttaagata

SEQ ID NO: 114797 - DNA, 641 bp, Homo sapiens
accttcacctcctattttcttcattttattaataattgcattttaggaactataaagtatctccatgtcaaaaaccaacaaacaaaaacaaacaagcaaagacacttgttagagtgtttcatatggctgatgtttagaaagaaaaaaaagagcaagtacaatgcaaatacaagcaaactactaccagttggggcattagacaagaagtctatataaccttttaataaggtcagttggtctaaatttgtgcaaatctcaagacatctccccctttgatgtctgggttttacttacaccacccacttgaaactttcctttctctggttcttttcctttccctgatccaatataaacttcgaaggttaggggtcatgtcccaaggtgggaacccatttaactaaatacctwcctgggaaaataaagattaaattttaaatagagtgaagagtaattttagatagtgtaaatcatgccctataaattacttcatggagagaagatttaaagagcatttgacaaatccagttacattccttcacttttctattaaatgctatactctgcactgtattggttttaccattagtatttgattcataacatgaatcttttgactctcaggagaaggaattttggaagct

SEQ ID NO: 114798 - DNA, 616 bp, Homo sapiens
cagtgtttccaaactgtggagtgaagtcatagagatgaattcacacatcacaaaacggtttctcaggtagcttccttttagtttttttcctgggatattcrtttttttgccattggcatcaatgagctcccaaatgtccatttgcagaatggggaaacagtgtttgcaaacttctgagtctacagaaaggcttaactctgtgcgatgaatggacagatgactaagcactttctcagaaagcttatttctagtttttatctgaagatatttccattttaaccatagtcctcaataccctcccaaatatcacttcacaaatccttccaaaatagtgattccagactgctgaatgaaaagaaatgtttattgctgtgaggtgaatgcacatatcacaaagcagtttctcagatatttttcttccagtttttatcctgggatacttggttttttgccattgccttcaatgagctcccaaacgtcaatttgcagaatggacaaaaacagtgtttgcaagctgctgaatctgcagaaagtttaactccatgagatgaatgcacacatgaaaaagcagtttctcatttgctgaatggacatttgctgaaaagcatttgctgaa

SEQ ID NO: 114799 - DNA, 574 bp, Homo sapiens
attagctcccaaaagtccattcacagaatggccagaaacagtgtttccaaactcccgtatcctaagaattgtttaactctgtgagatgaatgaacacatcacaaagcagtttctcagaaagattcttactagtttttatcttaagaggtatttttttgaccataggcatcaatgtgctgccaaatgatcttacacagtttctacaaaaaaattgtttccaaaccactgaattaaaagaaatgttcaactctgctagatgaatgcacacatcacaaagcggtttctcagatagcttccttctagttttratcctgggatattcactttatcgccattgacctcaaagaactctgaaacgtccattcccagaatggacccaaacattgtttccaaactactgaatccaaagaaaagtttaagtctctgagatgaatgcatacatcatgaatcggtttctcatataatttccttctagtttttatcctgggatattttctcttgccccattggcctcaatgagctcccaaatgtccattcatagaatcaacagaaacagtgtttccaaagtgctgaa

SEQ ID NO: 114800 - DNA, 248 bp, Homo sapiens
cgtatctgacaaactgccttgtgaggtctaccttcatctatcagagttaaacctttattttcattcagcagtttcraaacactgttttggtataacctgtgctcccaaatatatgggagtaccttgagtcctatgatgaaaaaggaaatatcttcagataaaagctagacaaaagctttctgaaaaactgctttgtaatatgtgcattcttctcacacggttaaaactttccttgcgttcagcagttt

SEQ ID NO: 114801 - DNA, 248 bp, Homo sapiens
cgtatctgacaaactgccttgtgaggtctaccttcatctatcagagttaaacctttattttcattcagcagtttcaaaacactgttttggtataacctgtgctcccaaatatatgggagyaccttgagtcctatgatgaaaaaggaaatatcttcagataaaagctagacaaaagctttctgaaaaactgctttgtaatatgtgcattcttctcacacggttaaaactttccttgcgttcagcagttt

SEQ ID NO: 114802 - DNA, 591 bp, Homo sapiens
gagaaacttctttatgatgtttgcattcatctcacagcgtcaaaccatccttttcattgagcagtttagaaacagtttttttttagaaactgcaaarggaggcttgcttgtgagggctttgtgtcctatggtgaaaatggaaatatcttcccataaagactccaaagaagctttctgagaaagtgctctgtcatttgtgcattcatctcacagaggtaaaagtttcttctcattcaacactttggaaactctgttcttctagaatcttcaaagggatattagtgagtgctttgaggcctatgttgaaaaaggaaatatctagacaatctttctgagaaacttctttgtgatgtgtgcattcatctcaaagagctgaaaaatttttttgattgagcagtttggaaaatgcctttttgtggaatttgcaaatgtatatttgtgagcattttgaggcctaaggtgtaaaaggaaatatcttcacataaaaattagatggaagttttctgagaaacttgtttgtgatgtgtgcattcatgtcatagagttcaaccattcttttgattgagcagtttggaaacagtgttttgttag

SEQ ID NO: 114803 - DNA, 573 bp, Homo sapiens
aatgtaaatgacgagttaatgggtgcarcacatcaacatgccacatgtatacatatgtaacaaaccttcaagttgtgcacatataccctaaaacttaaagtataataataataaaaagaaaaactaaaagaagctatctgaaaaacgctgtgtgatgcatgcattcacctcgcagagttaaaactctcttttcattcagcagtctgtaaacattgttttggcaaaatccgtgtgtcgatgttttggagtgcattgattcctatggtgaaaaaggaaatatcttctgataaaaactagaagaaatctttctgagaaacttctttgtggtgtgtacattcatctcacagggttaaaactttctttggattcaggagtttggaaacactgttgcagaatctgcgaagggatatttcagtgctcattgaggccaatgatgaaaacacgaatatcccagaataaaaaccagaaggaacctatttgagaaactacttggttatgtgtgcattcatcctacagaattaaacttctcttttcattcagcagtatggaaacacttttttcatagaatatgtg

SEQ ID NO: 114804 - DNA, 573 bp, Homo sapiens
aatgtaaatgacgagttaatgggtgcagcacatcaacawgccacatgtatacatatgtaacaaaccttcaagttgtgcacatataccctaaaacttaaagtataataataataaaaagaaaaactaaaagaagctatctgaaaaacgctgtgtgatgcatgcattcacctcgcagagttaaaactctcttttcattcagcagtctgtaaacattgttttggcaaaatccgtgtgtcgatgttttggagtgcattgattcctatggtgaaaaaggaaatatcttctgataaaaactagaagaaatctttctgagaaacttctttgtggtgtgtacattcatctcacagggttaaaactttctttggattcaggagtttggaaacactgttgcagaatctgcgaagggatatttcagtgctcattgaggccaatgatgaaaacacgaatatcccagaataaaaaccagaaggaacctatttgagaaactacttggttatgtgtgcattcatcctacagaattaaacttctcttttcattcagcagtatggaaacacttttttcatagaatatgtg

SEQ ID NO: 114805 - DNA, 573 bp, Homo sapiens
aatgtaaatgacgagttaatgggtgcagcacatcaacatgccacatgtatacatatgtaacaaaccttcaagttgtgcacatataccctaaaacttaaagtataataataataaaaagaaaaactaaaagaagctatctgaaaaacgctgtgtgatgcatgcattcacctcgcagagttaaaactctcttttcattcagcagtctgtaaacattgttttggcaaaatccgtgtgtcgatgttttggagtgcattgaytcctatggtgaaaaaggaaatatcttctgataaaaactagaagaaatctttctgagaaacttctttgtggtgtgtacattcatctcacagggttaaaactttctttggattcaggagtttggaaacactgttgcagaatctgcgaagggatatttcagtgctcattgaggccaatgatgaaaacacgaatatcccagaataaaaaccagaaggaacctatttgagaaactacttggttatgtgtgcattcatcctacagaattaaacttctcttttcattcagcagtatggaaacacttttttcatagaatatgtg

SEQ ID NO: 114806 - DNA, 591 bp, Homo sapiens
gagaaacttctttatgatgtttgcattcatctcacagcgtcaaaccatccttttcattgagcagtttagaaacagtttttttttagaaactgcaaaaggaggcttgcttgtgagggctttgtgtcctatggtgaaaatggaaatatcttcccataaagactccaaagaagctttctgagaaagtgctctgtcatttgtgcattcatctcacagaggtaaaagtttcttctcattcaacactttggaaactctgttcttctagaatcttcaaagggatattagtgagtgctttgaggcctatgttgaaaaaggaaatatctagacaatctttctgagaaacttctttgtgatgtgtgcattcatctcaaagagctgaaaaatttttttgattgagcagtttggaaaatgcctttttgtggaatttgcaaatgtatatttgtgagcattttgaggcctawggtgtaaaaggaaatatcttcacataaaaattagatggaagttttctgagaaacttgtttgtgatgtgtgcattcatgtcatagagttcaaccattcttttgattgagcagtttggaaacagtgttttgttag

SEQ ID NO: 114807 - DNA, 506 bp, Homo sapiens
tttttagaaactgggaagggatatttgggagcttaatgaggcaaatgcaaaaaacggatatcccaggataaaaactagaaggaagctctttgagaaaactctttctgatgtgtgcattactcttgcagatttaaacctttctttccattcagcaatttggaaacactgttttcatagtatctgcaaagtgatatcttggagtactttgagatctatggtgaaaaaggaaatgcattcartttaaaactagaaagaagctgtatgagaaactgctcggtgttttgagcattcatctcacagagttaaacctttctgtggattcagcagtctgtaaacactgcttttgtttattccatgaatgcagatttgctgctagttggggccaaaggagaaaaagtgaatatcccaggataataactagaaggaagatatctgagaaaccactttgtgatgtgtgcattcatctcacagagttaaacctttcttttcattcagcagtttggaat

SEQ ID NO: 114808 - DNA, 517 bp, Homo sapiens
agaaactgctcggtgttttgagcattcatctcacagagttaaacctttctgtggattcagcagtctgtaaacactgcttttgtttattccatgaatgcagatttgctgctagttggggccaaaggagaaaaagtgaatatcccaggataataactagaaggaagatatctgagaaaccactttgtgatgtgtgcattcatctcacagagttaaayctttcttttcattcagcagtttggaatcactgttacatataatctgtgaatggatatctgggagcgcattgtggtctactgtaaaaaaaaaaaccttcaggtaaaaactagaaagaagttttctgaaagactgctttgtgatgtgtgcattcatctcacagattgataccttctgtggattcagcagtttgcaaacactgtttttgtccattctgccaatggacatttgggagccctttgtggccaatggaaaaaaagtgaatatcccaggataaaaactagaaggaagctatatgagaaat

SEQ ID NO: 114809 - DNA, 517 bp, Homo sapiens
agaaactgctcggtgttttgagcattcatctcacagagttaaacctttctgtggattcagcagtctgtaaacactgcttttgtttattccatgaatgcagatttgctgctagttggggccaaaggagaaaaagtgaatatcccaggataataactagaaggaagatatctgagaaaccactttgtgatgtgtgcattcatctcacagagttaaacctttcttttcattcagcagtttggaatcactgttacatataatctgtgaatggatatctgggagcgcattgtggtctactgtraaaaaaaaaaccttcaggtaaaaactagaaagaagttttctgaaagactgctttgtgatgtgtgcattcatctcacagattgataccttctgtggattcagcagtttgcaaacactgtttttgtccattctgccaatggacatttgggagccctttgtggccaatggaaaaaaagtgaatatcccaggataaaaactagaaggaagctatatgagaaat

SEQ ID NO: 114810 - DNA, 603 bp, Homo sapiens
tgaaattaagtgtatctatattagatacccacatgctgggatatgtatacttcttttaactggaaagtgttcacagtgttagatttgggaaacacagctgtgactgtaggtggacatggagacagaagttttcacttttccttttgatcttttctatactgcttgacttttcaaccagaaacatgtactacttttaccaggaagatgtaattctagcaacaggaattacccaaactgtgaataataggcatattctgtctttctaagccttttagttgtgttaagagttttaaaagaaatgtaaatatttggtaagtttttttaaaatttcatgttattctgaccctcaaattatccccatataaataattttcagtcagatgttgaaatctggcaggaggcagggcaaattaggtttataacatctaaattttgataacttttttgttatcaaacrtttgataatgttatcaaatatttgataaattttataacacctaaattttgaactagttgccaatttttttttttttgagacagagcctcgtactgtcacacaggccggagtgcaatggtgcaatgtcagctcccttcaacttctac

SEQ ID NO: 114811 - DNA, 603 bp, Homo sapiens
tgaaattaagtgtatctatattagatacccacatgctgggatatgtatacttcttttaactggaaagtgttcacagtgttagatttgggaaacacagctgtgactgtaggtggacatggagacagaagttttcacttttccttttgatcttttctatactgcttgacttttcaaccagaaacatgtactacttttaccaggaagatgtaattctagcaacaggaattacccaaactgtgaataataggcatattctgtctttctaagccttttagttgtgttaagagttttaaaagaaatgtaaatatttggtaagtttttttaaaatttcatgttattctgaccctcaaattatccccatataaataattttcagtcagatgttgaaatctggcaggaggcagggcaaattaggtttataacatctaaattttgataacttttttgttatcaaacatttgataatgttatcaaatatttgataaattttataacacctaaattttgaactagttgccaatttttttttttttgagacagagcctcgtactgtcacacaggccrgagtgcaatggtgcaatgtcagctcccttcaacttctac

SEQ ID NO: 114812 - DNA, 542 bp, Homo sapiens
catgtgccaccatgcctagcttgatcagttgttttttaaagtcaattaaggggccaggcacagtggctcacacctgtaatcacagcactttgggaggctgaggcaggccaatcacttgagatcaggagtttgagaacagcctggccaacatagtgaaatcccatctctactaaaaatacaaaaattaggcaggcgtggttagccactcaggaggctgaggcaggagaatttgcttgaacctgggaggtggaggctgcagtgaaccaagatcacaccactgcactccagtctgagcaacagagtgagactctgtctaaaaaaaaaaaaaaaaaaccagaaaaaaaaaaaatcarttaagaaacatctgttcatcagggaagtactggcaatgatggcaactaacattttggtaattttcattcctgtctcttttttccctatttaatcattacatgtatcattcctggaaaaacattaaccaactatcatataaaagaagtgaatgtcttgtgttctgattgaaagagaagcaattctggaga

SEQ ID NO: 114813 - DNA, 652 bp, Homo sapiens
tttattagtattttcattgtaagagcaaattaaaaaagaagcattctattagttttgaaacataaaactattagagcagttatttaaaaataaacgtttctcacttcagtgctcggttcgaaatcagggtgtgtgaagggtccagatcgctcgaggaacttctttacatggttccagcgaccttcccagtctccagtgtccccacacccaccatcaacagccattctgcacagaacacagtaaattcagctgcaaagatcagtatgaaaaaaaccacacctacaactaytatggtatccccaaatgaaaaggtaaccacaccagacctgctcaaataaaaaggaaaatattcaatgtgattatgtttatgctttgaaattttttcttgcctattatacaattcatttaaagttaagaactgcacgtttctatttttatttcacccaatggatgaaataaatcagtctacatgtttttggtttcctaaagcaatccaaggttcaacttaggatattggtctattatgtgagaaattgacttctctacatttggtatttacaaaaaaaacactgcaagcttcctcaatctgttgtttcatcacacttgcattaggaaatatgagatacaacagagaaaaaaagtcacactttca

SEQ ID NO: 114814 - DNA, 488 bp, Homo sapiens
gtaaacttctgcatcattttctctgcttagcactctattttctcaccaaactgatgccctgtcaggagttccagttcatttggctagagtgagaacatctgtttaagttatctgttgttgcctaacaaatgtcaaagaaaaaaattattcgtgacactcggtraagcacagtaaggcagacatttttcagaacatcttggtaggtgaagggatggcacagtggggtcctgcagtaggggagagagattgtgctcaacctcaaacaacaaaaaggtggacatttctatctagaagaagcagggtgggctcagtgggtggaaaattactaactggaaacatcaggggtaagggaagattctggctgaactgacctaacaggattcttgctaaaggcaggcagtgctgatcagacatcacctgggtgccggtggagggggcggaaaatgatcaggtatcgaaggtgatcagatactgaggatggggaattc

SEQ ID NO: 114815 - DNA, 493 bp, Homo sapiens
ttgaattccctccaaacccatgtgagtaaacttctgcatcattttctctgcttagcactctattttctcaccaaactgatgccctgtcaggagttccagttcatttggctagagtgagaacatctgtttaagttatctgttgttgcctaacaaatgtcaaagaaaaaaattattcgtgacactcggtgaagcacagtaaggcagacatttttcagaacatcttggtaggtgaagggatggcacagtggggtcctgcagtaggggagagagattgtgctcaacctcaaacaacaaaaaggtggacatttctatctagaagaagcagggtgggctcagtgggtggaaaattactaactggaaacatcaggggtaagggaagattctggctgaactgacctaacaggattcttgctaaaggcaggcagtgctgatcagacatcacctgggtgccggtggagggggmggaaaatgatcaggtatcgaaggtgatcag

SEQ ID NO: 114816 - DNA, 520 bp, Homo sapiens
gcaaacattcttaaactaccattatatcaaaattataactctctaaatgagtgtagaagcctccatgtgacctgtcccaaagcactcccttgtactgccctaaaacgataatgactatcttgactgctatgatagtaactttccagcattcctttatagtttcatcacttaagtttctctttttagctacaagtttcctgcatatctgcctggttttatcctcatgaaatttatttgttgaagaaccacagtcatagaacatgtggaggatttcatggtccarattttgctttttgagttcctgtggtgtagctaagcatgttcctttgtctcatggtatagcttgatatattagaaattggatctgaaacttggattgcttcaggcttgatcacttttgcaagtctttagtattgttctttcattaaaaggcacataatgtctctctttatggtactagccttcagtgccttatgctggctctgttaattcattagggattgcaaagtggtcacattct

SEQ ID NO: 114817 - DNA, 530 bp, Homo sapiens
  misc_feature (1)...(530): n = A,T,C or G
ggatgatagaatatcatatatccatttgccttctcccaaagtgtgtgcatgagaattgctatactgcaccacgcacatgattatgagaaataaagaattttttgcatatccttctttcattctcttcacccattttattttttttactaattctgtatctatattgtcagaacagagtattgcatactgtactttctgccttatcaaccttatttcatgtttttatgtgaagaaatatgcatttatttatcaccagtctttatgtcgttatctcccagttatcttggttattttagtcttgttctacaagagaattccttcaattctgatgtgtttgtcagtttgttttgtcaccttttacttgaaagtgaagttggctctatgtaaaattcttgtctcttttatttttactttttctttcttttcttcttttttttnttttnntgagacggagtttygctcttgttgcccaggctggagtgcaatggtgcagtcttggctcactgcaacctccaactcctgggttcaag

SEQ ID NO: 114818 - DNA, 655 bp, Homo sapiens
caggacattaatttggacaaagattttttgtgtaagacctcaaaagcacagacaacaaaagcaaaaagagataaatgggattacatcaagctraaatgcttctgaacagctaaggaaaccatcaacaaagtaaaaagacacagaataggagcaatatttgcaaatatccatctgacaagggattaataaccaggatacataaggagctcaaacaattcaatagcaaaaagcccagataatccaattaaaaataggcaaaggatctggataggcatttctccaaagaagacatacaaatggtcaaatgtatataaaaaatgctcaacatcactaatcatcagggaaatgcaaaacaaaactacaatgagatgtcatctcactccagttagagtagcttttcatcaaaaaaagacagggaatagaagatgctgttgaggatgtagataaaggggacgccttgtacactgttggtgggaatataaattagtatagctactatggagaatgatatgtaggtttttcaaaaaactgaaaatagaattactatatgattcatcaattccactcctgggtatatacccaatataaaggaaatcaatatattaaagaggtatctgtacttatatgtttattgcaaaaaaactcaaaataggca

SEQ ID NO: 114819 - DNA, 598 bp, Homo sapiens
cctgccacatgtgattcacaatttttcctactgctttcttaatttcatccttagagaatacaattagaaataagctgctactactgctaaccaaagatctcctccaatgttttattaattttacacatgaactaggagatattccattaaagcctttgttaggaaatctgtttaaacaacagaataaaagggatgactttgagatagaattttagtgacatctccagtttctggttacatgatattggttaagcttctgaaaaatcaagtaaatccacaaactttcctgatatgaatctaatctcattaattttccttttcatttaatcaacraatatcagccagtctgtaaaagcccactgaaaggtctcttaattcagtagtagtcttacctcaggtatgctccatacatgaagaacaatcccatcattagtccatttaaaataaagattacaccaacataaaagcaagcaggatctcccaatcctttgaaaagatacagataatcagtgtttaatgaatatatgactctaaggcaattgggcataattatctcagtgctttgcaatcaagagctcatgaatttgctgaaagcatt

SEQ ID NO: 114820 - DNA, 598 bp, Homo sapiens
cctgccacatgtgattcacaatttttcctactgctttcttaatttcatccttagagaatacaattagaaataagctgctactactgctaaccaaagatctcctccaatgttttattaattttacacatgaactaggagatattccattaaagcctttgttaggaaatctgtttaaacaacagaataaaagggatgactttgagatagaattttagtgacatctccagtttctggttacatgatattggttaagcttctgaaaaatcaagtaaatccacaaactttcctgatatgaatctaatctcattaattttccttttcatttaatcaacaaatatcagccagtctgtaaaagcccactgaaaggtcycttaattcagtagtagtcttacctcaggtatgctccatacatgaagaacaatcccatcattagtccatttaaaataaagattacaccaacataaaagcaagcaggatctcccaatcctttgaaaagatacagataatcagtgtttaatgaatatatgactctaaggcaattgggcataattatctcagtgctttgcaatcaagagctcatgaatttgctgaaagcatt

SEQ ID NO: 114821 - DNA, 568 bp, Homo sapiens
gtagtctctgatgatcctttaatttctgcaatattggttataatgtctccttttattacctctgattttatttatttgggccttctgtctttttttcttagtccggctaaaggtttgttaattttatcttttcagaaaaccagttgatcttttatactgttttcttcattgcaatttcatttatttctgctctgatctttattatttyatttctcttactaactttgggttttgtttgcccttttctagttttttaagaagcatcattgagttgttaatttgaggtttttcttcttttttgatgtgggcacttacagctatagacttccctcttaatactgcttttgctgtatcccataggttttgatgtgttgtgttttcattatcgtttgtttcaagaacattttcaatttccttcttgatttctttattaacctaccagtcattcaggagcatattctttaatttgtatgtttgtagagtttccaaaattccttttgctactgatttctagtttttttttccattgtggtcagagaagatacattatattgtctcaatttttaaa

SEQ ID NO: 114822 - DNA, 535 bp, Homo sapiens
ttaaaactttaaatctaataaattatttgaatcaattaaaacaaagtcattattatttggaaaactaaatcttggccatgatgaatatcttaattattttgacatatgaaatatgcagtgtaatttttatgtggggttacatttggaattttcctacatttcatatttagtaaatggatttattataagaacagtgattttttttaaagaatgaatttaataagtaacttttgaaattttgatttacagatcattattgccatctgctggttacrtagtttaattgcattttttaaaattcccaattgttttactaaagacaaaggaaaaaactgaggcaagttttagatatccataaccggattagagatctctatgtaagacagataatttgcagccaggtgcagtggctcatacctgtaatcccaatactttgggaggcagaggcggcaggagtgcttgagtctaggagttttagaccagcctgggcaacatagtgataccccatctctacagaaataaacaaattagctgt

SEQ ID NO: 114823 - DNA, 458 bp, Homo sapiens
tatacattctgaaatttttagttgccttcctccctttttaatttattgtggtaaaatacatataacataaaacttaaccattttaatcctgtacacatttcaatagcattcagtgtattcacaatgtagtgcaaaaccaccaccattatctagtttgagaatgttcctagcaccccaaaaggaaaccccatacccactaagcagacactccccattctccctctccccggcccctggcaaccaccaatctgccttggagatagctttttgtgtctggcttctttctcttaacacgatgttgtctargttcattcatgtggagtaccccactgtatggatagaccgtgtttatttattcattagtccattgatggatatttgggttgtctccacattctggttcttctgaacactcctgctgccgacttttttgtatttagttgctgtgccttaggcat

SEQ ID NO: 114824 - DNA, 566 bp, Homo sapiens
tgaactggtattgggtaagtgcgggaatcataaaggggctgtctcgttttttgttacaaacaattacatctgtatactcatctctctttggccaaaaaggagatgtgacttttcagttatcctttcctgatctacaccagcagaacgtggtctatgacaagtttacttcaaattgtctctgcctcctcctacatttatkgggtgtaccttgtcttcactccaggttctgaatttcctgtggaacgaatttaacctcaaagtgggtcagaactatggttctccccaccctatatccatgaccctgtatttgcacaaaaagttactattgtgagatacctaggtcattccccataggatagtgctgtacctggaatagctctaactcttctttgacatatgtatccacgatgcttaatatcattctaaggacatcgtagaggccattatttctttgagaaactaagtacttttgggtaagagaaaccagccatccatctggtggcctccaagaacatctaatatatgcacatgatttaacacaaagtgcagaatctgtaaaagggaag

SEQ ID NO: 114825 - DNA, 592 bp, Homo sapiens
aatggcatgcatatttcacagggtaatttatttctcaaaatacaaatgaacaatataagttgttatgtgtgccattagctcagtgtgtgatgccactacaacatatatgctaaatcatgtgcgagctttgtaacaccttctctcctggtttcagcaccgtgggtttggacagctccctttggctaggcaggtttggcctttctaagccacaagttcaatgagattcaacaaataacctttgtacatgctaagataatttaaacatgagacaatgtgaccgaaaaaccacaacccgaagtcttttcctacagggtgaagcaaaatgtgcagcagctttgaaaatgaccttcttaatgaagacataggttggactggtagcgaagttttattcaagtgcstttcagattcatacctgttttcaatctagttaaatcgccccccgccccaccctgacccctgccaaaagggaaagaaacaagtttgacctatcttgagccaaagtcacactgttctggctgttaagaatatgattagcttctgagagtgactgacgccctgggttttcaattatgttagaattctggaataatgg

SEQ ID NO: 114826 - DNA, 533 bp, Homo sapiens
taaatcaagctacgtaacgtatccatgacgtcacctccctatgggtttttttgtgtgtgctgagaatgtttaaaatctrtttttaaaacaattttgaaatatacgatgcagtattttaaactatgctgtgcactagatcactaaaactcattcctcctgtctaagtgaaactttgtacactttgaccaacatttcctctttccccatccctcctcgcaccacccctggtaaccaccatactactctatttcgatgagatgggtttttttcaattccacatataaatcagatcatgaagcatttgtctttctatacctagcttcttttactaagcacactgtccttcaggttcatctatgttgtcataaatgagagaattttcttctttgtaaagggtgtatactattccattgtgtatgtaccacattttcttatccattaatccactgatggacacagtttgcttccatacattggctattgtgaataatgctgcaatgaacatgagagtgcagatatcccttcaacagaat

SEQ ID NO: 114827 - DNA, 533 bp, Homo sapiens
taaatcaagctacgtaacgtatccatgacgtcacctccctatgggtttttttgtgtgtgctgagaatgtttaaaatctgtttttaaaacaattttgaaatatacgatgcagtattttaaactatgctgtgcactagatcactaaaactcattcctcctgtctaagtgaaactttgtacactttgaccaacatttcctctttccccatccctcctcgcaccacccctggtaaccaccatactactctatttcgatgagatgggtttttttcaattccacatataaatcagatcatgaagcatttgtctttctatacctagcttcttttactaagcacactgtccttcaggttcatctatgttgtcataaatgagagaaytttcttctttgtaaagggtgtatactattccattgtgtatgtaccacattttcttatccattaatccactgatggacacagtttgcttccatacattggctattgtgaataatgctgcaatgaacatgagagtgcagatatcccttcaacagaat

SEQ ID NO: 114828 - DNA, 549 bp, Homo sapiens
aaactttctgcatatagtaacccttgttctcttcctttttctgatgaacttcgccacatttggaagccgtgtgtgtgtgtgtgtgtatgtgtgtattttgaactacaaattttttttagcatcttcaaaaatgaagtaggcatttaaatttctctttttgttgttttgaaatgatatctaaaggaagaatgaagtaaaatatgtttactgttgtaaaactgaaagtctggagttttttaaaaaaacatgtcttccttgctaatttctccatgagctcaacggtaatatctgttttgttcaagcctgtatcctaggcatatgactcaccataggggttgaataaatacttgttgattgaatgcaaggatgagttaataaaacataatctaattttgaggaagaagtaatgtagaatggattgaggaggctatgcacacataggttgattctggtgagctctggatgggatagtctgtttttcycattagtttctgctttaggctacaataaacatgtttcctttgtaataagaggaaaatactttaatga

SEQ ID NO: 114829 - DNA, 423 bp, Homo sapiens
ttcagaggatggaagccccaagccttggcagcttcgacatggtgttgagyctgtgagtgcacagaagtcaagagttgaggtttgggaacctctgcctagatttcagaagatgtacagaagcacctggatacccaggcagaagtttgctgcaggggcagggcctacatggagaatctctgctaaggcagtgcagaggggaaatgtggggttggagcccccacacagagtccctagtggggcactgcctagtggagccgcgagaagaaggccaccatcctccagaccccagaatggtagaccactgacagcttgcactgtgcatctggaaaagctgcagacactcaatgccagcccatgaaagcagctggggggcgggggggctatacctacaaagccacagggatggagttgcccaaggccatg

SEQ ID NO: 114830 - DNA, 522 bp, Homo sapiens
ccctgtgcagaggcctctggtgacactcccggaaaaatgccactggaggagagacttgaasggtggtggcacaggctgaattctgtccctccctcaccccatattcatatgttgaagccctaaccccagaacctcagaatgtcactgtgtttggagataggatcttcaaagaggtgattaagttaaaatgatgctgttcgggtaagccctaatctaatgtgtctggtgtttttatataagaagagaaaatttggacacacagagagacaccgggggacatgcacgcacagaaggaagaccatgtgaggacacagcaagaagtgtctgtccgcaagccaagggcagagacctcaccagaaaccaagcctgctgacaccctgctcctgcactcccagcctccagcactgggaaaagatacatttctatcaatcaagccacccagttggtggtattttggaaggggatatctaagttccaggcaaaaagagctaggtaggaaggccctgaagaaaggaagtactt

SEQ ID NO: 114831 - DNA, 599 bp, Homo sapiens
cccaatatctcttgtctatttctttgtgttacttcctggaacattggatctgttggccgccatcttggaacatacagacaatgcagcccccacgaccccaatgatggtggagcagtgattgggaaggaaactgggtccctggggactttgtgctgctgagcagccacaccaggcccggacggctgacttcccggcttttatgtaaaagagagataaagtatgaccttgttgaagtcttgttattttaggtctctgtttctcacagccaaatccaatcctcatggacactgtcctttgcttgtttttcttttggacacaggtcccttgggtggagacacagactcttctgtggggatggggggctcagggcctagcccacttgacactytccactcaagaggctatcgaggcccttctgcatgatgcacagcgtggagaccaccactctgtgccattggtgttatgactgtttggttttatgggagtcaatggaccacagtgccttagagaatctgagaggtgatgtgtcgtcacctggggaaattgaggcctcaagagaggaatagacccagcattttagaactggaactagaagccca

SEQ ID NO: 114832 - DNA, 599 bp, Homo sapiens
cccaatatctcttgtctatttctttgtgttacttcctggaacattggatctgttggccgccatcttggaacatacagacaatgcagcccccacgaccccaatgatggtggagcagtgattgggaaggaaactgggtccctggggactttgtgctgctgagcagccacaccaggcccggacggctgacttcccggcttttatgtaaaagagagataaagtatgaccttgttgaagtcttgttattttaggtctctgtttctcacagccaaatccaatcctcatggacactgtcctttgcttgtttttcttttggacacaggtcccttgggtggagacacagactcttctgtggggatggggggctcagggcctagcccacttgacactctccactcaagaggctatcgaggcccttctgcatgatgcacagmgtggagaccaccactctgtgccattggtgttatgactgtttggttttatgggagtcaatggaccacagtgccttagagaatctgagaggtgatgtgtcgtcacctggggaaattgaggcctcaagagaggaatagacccagcattttagaactggaactagaagccca

SEQ ID NO: 114833 - DNA, 551 bp, Homo sapiens
tacttatcttcttttggggattaaaattaatactatttttactgcacttacgtgagtgygtattgcataatcactgacttcactaacatggccactaacttcaccacctgggggctaggaaacaggacctgcgtaagggtgggtggaggtaggacttggggtcgttggagagaagttgtttccagccagggaagaggccaccagcctcctttttcattggctcccacagccagagaaggagcagactgaacccctttctgagcagtgtggatggagcacctactgtatataaggcaccacgtatgggaaggtgggcagggaggccatgggactgcatatgatgtggattctttcctccaggggctttcaggcaaaagggggaggcagacacgtgaacaacagtgtcccctgcacaggagacagtggttagcgctaacataaccagcaacccaggcaagggtctggggagccctggaggcccaggctggggcccagagcatggaccacccgctcactgttggctctaccactgtgattctgggaccagcatc

SEQ ID NO: 114834 - DNA, 551 bp, Homo sapiens
tacttatcttcttttggggattaaaattaatactatttttactgcacttacgtgagtgtgtattgcataatcactgacttcactaacatggccactaacttcaccacctgggggctaggaaacaggacctgcgtaagggtgggtggaggtaggacttggggtcgttggagagaagttgtttccagccagggaagaggccaccagcctcctttttcattggctcccacagccagagaaggagcagactgaacccctttctgagcagtgtggatggagcacctactgtatataaggcaccacgtatgggaakgtgggcagggaggccatgggactgcatatgatgtggattctttcctccaggggctttcaggcaaaagggggaggcagacacgtgaacaacagtgtcccctgcacaggagacagtggttagcgctaacataaccagcaacccaggcaagggtctggggagccctggaggcccaggctggggcccagagcatggaccacccgctcactgttggctctaccactgtgattctgggaccagcatc

SEQ ID NO: 114835 - DNA, 606 bp, Homo sapiens
tcaaactaatacaaatgaagagaaggaacacatgtctactttctattccattggaaatctcattcaagcactcttcaaaacccaattttgctaaaaggagtgaatcacagggaagcactctgggaacatcacaaaagcaaatggaagaatgaatgatagcatcatttcccctcgagttccttccaccttcatatactggactgaaagtttccactgcatgccttcaagtgggatatggaattccccactgtgccccacctctaaatccttccttgcaaaagctcaattttctatttccaattttgtattggcatattacggagccaaaagaaagtaggttttttccttttccctcccatttggaactatcgtttattaccctggctttatatcctattatttaataacttttaaagggytgtaaaatctgaaaatgtacctcacaatgaaactgatataatcagagaggaagacagtgctgcagagtataggggaaggatagttcagggacaagggaagaggacagggacctgccagcatcaccagtcgccactcctttcctccttctaaatgcatcttcatgagcagggctcattgcttctacag

SEQ ID NO: 114836 - DNA, 510 bp, Homo sapiens
acattgtccagaagccttgtgaaatgatcttaaatttaggcaaaaagatgttttgatgattaattttatgtgtcagtttgagccatgrgatgccaagacattatgctgagtgtgttggtgagggtgtttcaggaagagattaacttttgaacgggtggactgagtaaagccgattgggcaatgtgggtggccctcatccaattagttgaaggcctgagtagaacaaaaagcctgagtaagacgaaattttctcctgcctgaatcccttgagtttggacattggtcttttccaggctttggacatgcactggagcatgggttcttcctgggtctccagcctgctagctttcagactagaactgcatcatcagctttcctgggcctccagcttaccagctgcagaccttggacttgtcagtctccataattgtgtgggccaattctttataacaaatacacacacacacacacacacacacacacacatatatatatatcccattagttatg

SEQ ID NO: 114837 - DNA, 579 bp, Homo sapiens
gaaaaaactcttattggtaacatggtcactaactgggtgatgggatcatttgtagcccaaacctcagtgtcatgcaatatacccatctaataaacctgcaaatgtactatttaatctataataagtgttgaaatgataaaaaaagaatgagactccagcaatattactagtgtatttggggtcccagaacaacctccaactctcaaaaccaaggaaaacacaggcaatgcttgagtgggtagagtgaatataattaaagtgtgttttatttgcaggacggcctgataccttctaggagaaatagataatatatccatttaaacttacacgtwggcttctgggttgctaaggaatgactgccactcattagccttccaggccatgttctaaacaaaaaaggaagttgttctgatgggatagtcaaagtatccaggattggtgctaggtgacaaagcaaatagataacttttaaggtagcatactagagttcattcccatctgtcctctggcataaatcatcacacacttttaccaaattcccaactcaagggaaggaagaaatataatgagctgaaaaag

SEQ ID NO: 114838 - DNA, 645 bp, Homo sapiens
ctagagtgaggaaatatgaaccacatggctggagcatatttaaagaagataggcaaactatgtttgcacataatttttttttattatttcaaatacctggtccacagcgtacagttttcttaatgagattgctttaggaatccctctttatgtagaaagagtgtttttcatcttcctgatctagcccctctcatctgaattatccactgaactatccactttttcatcttcctgatctagcccctctcgtctgaattatccactgaattatccactttttcgtcttcctgatccagcccctctcatctgaattatcctgtagactgtggcacactaaggaataatggagaatgtaggaataagagaataactccaccaacagccattatctacctggagaaattccaggcagggcatttcaggaagtacctctggtatttcaacaggtgaacatctttctgtgtaatttatttttgtgttggaacacgagcttatggattgctggatcccatcccagaagtgsctacccctccactgcagataagaataagagctccgagggtgggactgtcagcccatattgttgaggttttgatttattacccaagagttgtgttctaaagattccctcatttaaagtacatg

SEQ ID NO: 114839 - DNA, 581 bp, Homo sapiens
atgctagttcaagaataaaaagaaaataaagagcgcccatcttccattggaaccaaaagcctcacatctgtctgttgtacaagtaagaccacagaggattcgactgaattatagtggggtgatttataggcctgtctgaatacagatcgcacacagtattgaaatactggaagattcaaacactgtctatgactcaaatagcacaagcagtgatagtaaattagctaagtgctcatctctccagacaagagtttccttaggaaaataatatctatttttggtatttcagtagctctagaaagagatgaatactactaaaagagatgaatatgtcaatgctaagtcatgaatgttttaaaaagccacatttctacacaaatggaaggaaaattttgcttttttttttttttttttttaraaaacttatttttattctattatattgaacacattgtatcacccccactcatagctgcattccaaaacagttcttctgggaagcagggttttagttttactgaacatgaataaaaaatccaggcagaattcaaaaccaggggaaagagtcaaggaagcaaatt

SEQ ID NO: 114840 - DNA, 563 bp, Homo sapiens
ttcaaaggaaggactgtgaacaggtgctggtctacaaattgactgttaccagttcataaagagataagtatggagataatgagtaaacatttagaaacttttatggctatttgacatgactacaacattcaagcacaggattagtggatttgtcttgctgaacatggtagagatgaaaaatactggtctgcaacagcttggaaatgaaaacaatgacaaacaaaacagcaaactkatccttcaaccacagctagttgcaatagcagtactgtagacagcatgaggtagaattggattttgatggtttattctcagcatgctttgagtgccagccattttcctgcagctggggaaggagggctgagtatcattcctaaggagttcacagttcacctgggaagacagacaggccaaccaattcatgtaacccagtcagatagaggctaggatagagcttactctaggtgctccccacaacatccaaagcaaggctgctcttccttgtccatttgggatgcctggtgataatgatgatagcatccatttatcaagcatttacatca

SEQ ID NO: 114841 - DNA, 592 bp, Homo sapiens
ctaaacctgagctttacatattgtatgaaatagctgacttggtgttgcaggcctggccaggtaagatgcaaatctatcacaaacagtttccaggacgaagaagatgaaattagtgtattacaacaagagagaagggatagraaagaaaggaaaaaaatttttgaaaagaggagaatctataaataagaaagaaaatgggaacatgagacagactgcaggatccgggaggaccaggtgacatatgttaaaatatttaaaagatttaaatcaaaataataaattgtaaataaaatttgttctagcctcctgttttgacaagtattccttcataacaacctggaaggccagaccaaattagaagttttgtgcctcttggagtctgcaatgagatttgcccctgtgggagagcctgggagcctgcatccctccacctctctcttctcactctgtcttcatcccaagtgcaaggggcctcctgcatgtgcctgtggatatctcagaccaaatagtccatatccctgcaaacagtcaccactcagccatcctgagggtataggttacatttatccttgggagcatggtttcaatgaag

SEQ ID NO: 114842 - DNA, 436 bp, Homo sapiens
aaaaggcaacacaccgaatccaagtctgtactttaacttttttaataacgatttttttttttctgggctggaagctcgcactgaatcctggaggaattgctaaatcggattaaggttatattttgcaacagactggatggagcaataaaggagagcgcgcggaaatgggacttcacccatcaattagatctctattagcagccaatgcaggcttcaccacaggaaatgtcacgtcccagccctagcggaccctttcgttccccacccccagctctcacctcccctgtccctggagttaaacaactcttctggcgcacacattggaactaaacaaacccttttgtgtggaatacggtttttgtgttttgttttttgtttttyttattgaacttgttttggaaccctgtaccacctgccttccccaaccccagcgcag

SEQ ID NO: 114843 - DNA, 571 bp, Homo sapiens
ttttttttttttttgcgacggagtctcgctctgtcgccaggctggagtgcagcrgcacgatctcagctcactgcaacctccgcctcctgggttcaagcaattctcctgcctcagcctcccgagtagctgggactacaggcacatgccaccacacccagctaatttttttgtatgttttcctttcttttgggaatatacctagcagtgggattgctggtagttctatttttggttttttgagggtcctccaaattgttcttcatagtagctgcactaatttacattcccaccaacaatgtacaagggttcccttttctccacatgttcactagcatttgttattgcctgtcttttggataaaagccttttgaactggagtgagatgatatcttattatagttttgatttgcacttctctgatgatcaatgatgttaagcactttttcatacacctttttttgccacttgcatgtcttcttttgaaaacgtctcttgagatattttgtccacattttaatcagattattagatttttcccccatagagttatttaagcttcttatatattctg

SEQ ID NO: 114844 - DNA, 571 bp, Homo sapiens
ttttttttttttttgcgacggagtctcgctctgtcgccaggctggagtgcagcagcacgatctcagctcactgcaacctccgcctcctgggttcaagcaattctcctgcctcagcctcccgagtagctgggactacaggcrcatgccaccacacccagctaatttttttgtatgttttcctttcttttgggaatatacctagcagtgggattgctggtagttctatttttggttttttgagggtcctccaaattgttcttcatagtagctgcactaatttacattcccaccaacaatgtacaagggttcccttttctccacatgttcactagcatttgttattgcctgtcttttggataaaagccttttgaactggagtgagatgatatcttattatagttttgatttgcacttctctgatgatcaatgatgttaagcactttttcatacacctttttttgccacttgcatgtcttcttttgaaaacgtctcttgagatattttgtccacattttaatcagattattagatttttcccccatagagttatttaagcttcttatatattctg

SEQ ID NO: 114845 - DNA, 571 bp, Homo sapiens
ttttttttttttttgcgacggagtctcgctctgtcgccaggctggagtgcagcagcacgatctcagctcactgcaacctccgcctcctgggttcaagcaattctcctgcctcagcctcccgagtagctgggactacaggcacatgccaccacacccagctaatttttttgtatgttttcctttcttttgggaatatacctagcagtgggattgctggtagttctatttttggttttttgagggtcctccaaattgttcttcatagtagctgyactaatttacattcccaccaacaatgtacaagggttcccttttctccacatgttcactagcatttgttattgcctgtcttttggataaaagccttttgaactggagtgagatgatatcttattatagttttgatttgcacttctctgatgatcaatgatgttaagcactttttcatacacctttttttgccacttgcatgtcttcttttgaaaacgtctcttgagatattttgtccacattttaatcagattattagatttttcccccatagagttatttaagcttcttatatattctg

SEQ ID NO: 114846 - DNA, 571 bp, Homo sapiens
ttttttttttttttgcgacggagtctcgctctgtcgccaggctggagtgcagcagcacgatctcagctcactgcaacctccgcctcctgggttcaagcaattctcctgcctcagcctcccgagtagctgggactacaggcacatgccaccacacccagctaatttttttgtatgttttcctttcttttgggaatatacctagcagtgggattgctggtagttctatttttggttttttgagggtcctccaaattgttcttcatagtagctgcactaatttacattcccaccaacaatgtacaagggttcccttttctccacatgttcactagcatttgttattgcctgtcttttggmtaaaagccttttgaactggagtgagatgatatcttattatagttttgatttgcacttctctgatgatcaatgatgttaagcactttttcatacacctttttttgccacttgcatgtcttcttttgaaaacgtctcttgagatattttgtccacattttaatcagattattagatttttcccccatagagttatttaagcttcttatatattctg

SEQ ID NO: 114847 - DNA, 590 bp, Homo sapiens
acaacaattaggctgatagtattctgatttttctctttgtcagcttttaagttgggttgtttcgtgttttggtttttaaatctgtggtgtctctacaaagtgtcaggggtagatttctttttatttatcctgcttggtactcaaaacatatttctgatctgagaaktcctgtttttctcaaattctgaaaaattctcatctctctttatatattgattcctcaccatttctctacctattaaatgtaggctagagctgcaagttcttaaatgctttcaatttttggaatatctttttgccttcctatgtgccttcagactgaatttgaatttactaactctcctactgacaatgactatttagtctactacatttttactttagtggctacactttcatttctaagatttctaattgtctccttttcctaattatttgctctggttttatttctgcaagtttgtgtttcaaaattccctgtcatttttaatgaatatgagtccttcatttaaccttttgagaacattaaacttattttaaagcaattgaagctgttattttagcttcaactggaattaattcacatttat

SEQ ID NO: 114848 - DNA, 257 bp, Homo sapiens
gatacttttacctgagttctgtagcctcatgagggaaggggagaccctggtcctacctaaggtgaatgaaaatcatgctcctgggaaaacaaccaagaaacaaaaaaaggttttgaaattaaaaaggggactgggattttttaaaataaagcaaatatattagaastaatggtttacttactaaaggaaaacaaaaatatggcatgatcaatgatataatcactagttatccaaactaagaaccaatgagaaataat

SEQ ID NO: 114849 - DNA, 589 bp, Homo sapiens
gagttaactgttggatcacatcatagaaatgtcttttaattcttgaccaaaatttgacaacgtctgcttctcagtagtcaccctatccrttacacacctggagaataacccagcatgggaattttcagaactgattttaaaaattatctcaaggacttatttacttttagaagaaacttttcagaaaggttcttggtggctgtggacttcaacccactgtcagctaggctaccacatacttcttctgagtttcagaaagtacttgcaaagtatcattcctggtcatgcataggtaagtgttgtttgggacaaaaagaaggaaaagtagagaagaccaaagttgattagaattaaaaatttatgcagatggttggcaggaccttgacattaaaatgtgaacagtttgggccgggcacggtggctcacgcctgtaatcccagcactttgggaggccacggtgggcagatcatgaagtcaagagtttgagaccagcctggccaacatagtgaaaccccgtctctactaaaaatacaaaaaattagccaggcatggtggcgggcacctgtaatcccagctactccagaggctg

SEQ ID NO: 114850 - DNA, 589 bp, Homo sapiens
gagttaactgttggatcacatcatagaaatgtcttttaattcttgaccaaaatttgacaacgtctgcttctcagtagtcaccctatccgttacacacctggagaataacccagcatgggaattttcagaactgattttaaaaattatctcaaggacttatttacttttagaagaaacttttcagaaaggttcttggtggctgtggacttcaacccactgtcagctaggctaccacatacttcttctgagtttcagaaagtacttgcaaagtatcattcctggtcawgcataggtaagtgttgtttgggacaaaaagaaggaaaagtagagaagaccaaagttgattagaattaaaaatttatgcagatggttggcaggaccttgacattaaaatgtgaacagtttgggccgggcacggtggctcacgcctgtaatcccagcactttgggaggccacggtgggcagatcatgaagtcaagagtttgagaccagcctggccaacatagtgaaaccccgtctctactaaaaatacaaaaaattagccaggcatggtggcgggcacctgtaatcccagctactccagaggctg

SEQ ID NO: 114851 - DNA, 561 bp, Homo sapiens
tcttctctctcaatctcccttatctctaaaatggctcctgtcatctggccaaaatcagaaacagagtcctcatctttcctaacttcacaaagccaattcagaaaatcttgcctgctcaaactgctaaatatgccttcaatctacaacctcttctttttccacagctgcctatcaagttttattatttcctacctggacagcagaaatggscttttaactggtatcccagcttctattgttgctcttcaacatttcattctctacgaaaaagctagagtaatctttataaacatatatgaattgtatcccttatctgcttaaactctctaaggcttcccattacatgcagaataaaactgaactcgttattgtgccccaaaagcccctgcatagtcagcttcttgcctgcctctctgatcacttcgggatgatgcaccttcacatttacaatgttccaaccacgttgcacaacttcttcagttccttgatcttctctagatatttttttacctcagggatctttttaatagagtgtacatttttcctgaaatggtattgctc

SEQ ID NO: 114852 - DNA, 584 bp, Homo sapiens
gccagccttcctaccctattctctcttctgtttcctctcccctcagacttctgcagcttactatgctttaggatttattgggagaaaaggtcttgtcctgtttggagtcattcccactgaagctactccctggagtctttcccagccctactttgagcctgtttacctcggtgctgttccttgctgagtattcctggataaagtcactcaacaggatgcaatgctgctcacttctcagcagagccaagagagaggtaaaagtgagtgatccacacttccatatactgcctcctccctttatttatttctaatactctcagtaaattaatgcacattcatcagacttgacaaaagtttcgtgagggtttccagatatttatkgtagtgggaagatgaattctatcttctgactgcctcctgtgtgaggaggaagcacctttctaatggggtgttgggaatctggtctgcaggtcttatctttgctttctggacttcagggcatttcaattgttccagaacaccttctttacatctcatggcatgaatactcattattttagaggaagacccatgagacaaatact

SEQ ID NO: 114853 - DNA, 579 bp, Homo sapiens
tatttgcctctgcattcaatctgttgagatatcacctgtcatgtagtcctggaaaactctactgtatacttataaaagyacgacagtgaaaaaggaaattgacgtcttagatttgttatgaaataaatcttgacctcatgagcttcctgaaaatatctcagggtctcttgtgggttcctggcccacattttgagaagcactgatataggttaatcattgttgctttcagctgtcttatttaaattcaaagacccttggtaagcaagctatatttactcaacaacttggggtgaatttattaaattcctgagtccttctgagtgggagagatggaaaggataagagcaatgtagacttgaagggaatgtggccttggagagtgtggagcatgggggcaatgaatcagtattaatttcatttgcagtatacaaactggctccattaattaatagtgtcttaaatttggatcagtttcttaatctttctaactctcagattcctcatctataagagaggaataataatatttaattcatggtggtgttgtgatgattaaatcaggtaacatatgtaatatgc

SEQ ID NO: 114854 - DNA, 606 bp, Homo sapiens
gtagcctgggctccccctgagacttgcagtcgtcacctgaagtgggaacagtctggtggaggactgtgcctttaatctattagatctgtgctaatgccagggtagtttgtgtcagatttgaattgcagtatacccagtatatgtcagacagttgtgttaaaacagagtattcattaggtttattcctttgaacaagaaaaaaaaatatatagcatgtttcatctaccaaatgacacactgagactttttaacagtcaataattaaatcatcaatctatcttgccaaattccctgttcatctttcttacaatgcacacatctcatattttattttatttatatatatatrtgtgtgtgtgtgtgtgtgtgtgtgtgtgtgtgtcctttcatttatttctttcaggatttaacatttgtttgattttttaataattttaaatatttttatttctgctggaattgatagtctgatctatgattttgataactgccttccttggaattagttttatttgttttgaattttggttggcaggccctatcttgattggaaagttcctcactctttctctccttatctatctagtgtaacgggattttcaggag

SEQ ID NO: 114855 - DNA, 600 bp, Homo sapiens
ttgacaccatcctaagctaacttgatcgtcctgtatagttcacatcagcataattgttcagctcaaacccaactcttctttactgattttcaaacacatcatgcttatgcttgaactccaggttttcattcacacactttgtgtgtcctaattttctttsccccttacttgtctaaatactccctttgtctatttagcactgccattataacattgatcctattttatcctaattaatgtatatatttttatctctctaataatggttcatacaatgtcatgcctgaaacatcattattcattgtctctgatccctctggattctacaaagcccagaagaagagatgctttcccctatctttactcattttatagcctttagcataagactagaaaaataagtattctgcattttagtgtgttttgtttccatgtcaaacgaatgtatcccctttcaagttgtgtattcagaaataattcacttcatgaatagctgaagtccgcaagattaaatggttgtttttatggaattgcctccattaatttcccaataaatcatttataatcttgtatgcctattaaacatgatagtctcaatct

SEQ ID NO: 114856 - DNA, 600 bp, Homo sapiens
ttgacaccatcctaagctaacttgatcgtcctgtatagttcacatcagcataattgttcagctcaaacccaactcttctttactgattttcaaacacatcatgcttatgcttgaactccaggttttcattcacacactttgtgtgtcctaattttctttcccccttacttgtctaaatactccctttgtctatttagcactgccattataacattgatcytattttatcctaattaatgtatatatttttatctctctaataatggttcatacaatgtcatgcctgaaacatcattattcattgtctctgatccctctggattctacaaagcccagaagaagagatgctttcccctatctttactcattttatagcctttagcataagactagaaaaataagtattctgcattttagtgtgttttgtttccatgtcaaacgaatgtatcccctttcaagttgtgtattcagaaataattcacttcatgaatagctgaagtccgcaagattaaatggttgtttttatggaattgcctccattaatttcccaataaatcatttataatcttgtatgcctattaaacatgatagtctcaatct

SEQ ID NO: 114857 - DNA, 600 bp, Homo sapiens
ttgacaccatcctaagctaacttgatcgtcctgtatagttcacatcagcataattgttcagctcaaacccaactcttctttactgattttcaaacacatcatgcttatgcttgaactccaggttttcattcacacactttgtgtgtcctaattttctttcccccttacttgtctaaatactccctttgtctatttagcactgccattataacattgatcctattttatcctaattaatgtatatatttttatctctctaataatggttcatacaatgtcatgcctgaaacatcattattcattgtctctgatccctctggattctacaaagcccagaagaagagatgctttcccctatctttactcattttatagcctttagcataagactagaaaaataagtattctgcattttagtgtgttttgtttccatgtcaaacgaatgtatcccctttcaagttgtgtattcagaaataattcacttcatgaatagctgargtccgcaagattaaatggttgtttttatggaattgcctccattaatttcccaataaatcatttataatcttgtatgcctattaaacatgatagtctcaatct

SEQ ID NO: 114858 - DNA, 600 bp, Homo sapiens
ttgacaccatcctaagctaacttgatcgtcctgtatagttcacatcagcataattgttcagctcaaacccaactcttctttactgattttcaaacacatcatgcttatgcttgaactccaggttttcattcacacactttgtgtgtcctaattttctttcccccttacttgtctaaatactccctttgtctatttagcactgccattataacattgatcctattttatcctaattaatgtatatatttttatctctctaataatggttcatacaatgtcatgcctgaaacatcattattcattgtctctgatccctctggattctacaaagcccagaagaagagatgctttcccctatctttactcattttatagcctttagcataagactagaaaaataagtattctgcattttagtgtgttttgtttccatgtcaaacgaatgtatcccctttcaagttgtgtattcagaaataattcacttcatgaatagctgaagtccrcaagattaaatggttgtttttatggaattgcctccattaatttcccaataaatcatttataatcttgtatgcctattaaacatgatagtctcaatct

SEQ ID NO: 114859 - DNA, 592 bp, Homo sapiens
cctagggaagacattaatatttgtgagtatagaggaagaatcaaagttttgagacaatggtcaaggttacaacagaggcaaaactgcctcgcattattttgtagctcaaccgttctaggatttatttccaaggggcccagagagaggagctgtaatgaagagcaacttacgaactctgttactggaaaaataagagaaaattaacatctcaaggtaatatataattttggctttaatgataataaccataaccaccatttatgtagcacttactatttgcaagaatgggtcatgatgttattgtttcatttaatttttatcaattttatggagttatgtttacatctcaacgttttagacttggagaagttatataatttgcctgaggtttaatagtaatgatggagtaagtttagttctaggtatgtttgatattcttggtcttaattcctgttctgtgttgccccaacaagtgggtgagcacaacaggcaggaaagaacattatattcatggaagtgtggtaatgattagaagggatgaaatgaaggagaatctrtaatgacaccaacattgtcaattgcctgccggatc

SEQ ID NO: 114860 - DNA, 535 bp, Homo sapiens
ataaagctgaaaccacaaagggttacatcctcagtataaagataaataagccgggcgtagtggctcacacctgtaatcccagcactttgggrggccaaggcagctggatcacctgaggtcaggagtttgagaccagcctgatcaatatgatgaaaccccgtctctactaaaaatacaaaaaaaaaaaaattagctgggtttggtggcatgcgcctgtaatcccagctactcgggaagctgatacaggagaattgcttgaacccaggaggcagaggttgcagtgagccgagatcacgccattgcactccagcctgggcaacaagagcaaaactccatcttaaaaaaaaaattaaataaataaataaataaaccctgccccaaagagcagtgctattagccaggacatttgtctatcttgttgacaggaaaggaaggacacgaaaaaagatctcctctaagaatttgaaactattaatacaaggagatctcacacagattttctatctagatccaccatttatgtagtccaaaaaaa

SEQ ID NO: 114861 - DNA, 509 bp, Homo sapiens
  misc_feature (1)...(509): n = A,T,C or G
nngaattcattcattcattcatctcaaccaatcttctcgagagcaccgtgaatgtgccaatcgttgtcaaaacactgtcaatgaccaaatgtggagatgatgtgaacagtgcccaccaagaggagtcaggggtgattttgaggtttgtgacctatgcagataaatggctagtagtgccacctactgagaaaatggttaawgaccaagtatttggggtagtgggggaggatgagcagtatccctgagctttgtcttgggcatggtgagtttgatgtgcctttgagacatcccaatggatatgtcaaggtagcagacggaaaaataggtctggaactcagcagagcagtctcagctgaagaactaaatctgggacgcattggaggggatggtctgaagctgtggtcttagataacaccagatctccaggggagagtgtatactcaagggtatcactcaaatcaagcattcaatgactcgctgtttcatcctgctgaaccttcagctggaat

SEQ ID NO: 114862 - DNA, 571 bp, Homo sapiens
ttttatatgctcagtataattaacaagacaatattagtgaaccaaaaactaaaaataatttacacactaaaagatgaaaagcccaggtggcaggtgaaagttctaatctaaaatgatcctgaaataagttactgatccctgaattaaaaaaaaaaaagcctcccaaatgccatgtcgcttaccatgtgataggcaggggtcaggcagtgacagtacgtgtgggactgtatgtccatttttcagaataagacactttttcagtgtctttcaaaaataaagattctgtctcctatcctgctccttttttcaaagaacaattttgggcaaagagtaaaatacagacayatagtttcagtgcttcatatggacatcagttttacgctggtcacattaattatgccctaattattttttatcttccccttcacaagactgtgaactcctcaagagtagggctatgcttgaaacagtttttttcccaaggtttgggtaataaaaggctaaggaggaaaaaagttggctgtgaggtatcgtgctttattctcaaataagacagatactgtttatggca

SEQ ID NO: 114863 - DNA, 571 bp, Homo sapiens
ttttatatgctcagtataattaacaagacaatattagtgaaccaaaaactaaaaataatttacacactaaaagatgaaaagcccaggtggcaggtgaaagttctaatctaaaatgatcctgaaataagttactgatccctgaattaaaaaaaaaaaagcctcccaaatgccatgtcgcttaccatgtgataggcaggggtcaggcagtgacagtacgtgtgggactgtatgtccatttttcagaataagacactttttcagtgtctttcaaaaataaagattctgtctcctatcctgctccttttttcaaagaacaattttgggcaaagagtaaaatacagacatatagtttcagtgcttcatatggacatcagttttacgctggtcacattaattatgccctaattattttttatcttccccttcacaagactgtgaactcctcaagagtagggctatgcttgaaacagtttttttcccaaggtttgggtaataaaaggctaaggaggaaaaaagttggctgtgaggtatygtgctttattctcaaataagacagatactgtttatggca

SEQ ID NO: 114864 - DNA, 561 bp, Homo sapiens
cagatacctaaagctcctgattccagcccctagctcctggagagcatttctagacaccctgggccagaagggaacctgctgccttgaagggagagacaaagacctggcaggattcaccagctcctgactaaagagtccttgggccttgaataaacttcagtggtagacaggaaatagtcatcacaggccatggccaagaccttcatgtgtaacctagaacagtgccagcaataatggtcacaggacacccctcccccaactccaggcacctcaacacagagaaagagactttgctagtttgggggaaagtaagggaagataacaagagactctgcctgtaattccatggaattctctcagatcttacccaagaccaataaggtagtattctctakgaatctgcaagagccacagtgttactaggcttggggtgctccctaattcagatgcaccaacagtgaccaaagacatagatcaaaacacacaatacttttgaataattggaaagcctcctcaagaaggaagagtacaaacaagtctagactacaacaattagaataa

SEQ ID NO: 114865 - DNA, 500 bp, Homo sapiens
aatttttgactcttcttacatttattattttattataattttttcagatttttgttggttttgaaaaatagataaaatagaaaataattaaaattaaaacataaaaccagaaaaaaaaaaagcgcaaacttaccatagctatcaaaaatgaatccaaccaacccgtataatatttggggcttttattaagaaagttgctcaaagttctgtggtctgtttcccctgaggatttcaacccaaaacttaaaattgtatttcaccagtatcaataactcacatttacaatcactagtctcacctcctctttcagaatttctcctgcgaaatcctccctccataccccaccatgccaccatgtctcagtgtgattttgctctcctcagtacttacagctgagctctgttcctccaggaactgcyttgttagatgagccctttacattgctgcttccatttccaccagtgatttttctgttattgtatttctcttgaactctacca

SEQ ID NO: 114866 - DNA, 583 bp, Homo sapiens
ggaattcaagagcgagccagttgtagaggaaaacagctttattgaggtggtgacaataggtacatctctgtgactgctcccgcagagcgggactactccatataggcagtgtgctgagagcagcagctcaggaacaggtctgcagtcatatttatacctgcttttaatgacatgctaattaaaagatgggtgattcacaatttgccagaaaatgtactggtgttgcttccaggtgttgccatggcaatggtaaactgtcttggtgcaagtgggtgtgtcttatggagaggtgctttccatgcctcttccctgtttcggtcagtcttcagtctggtccagagtccagtcctgtctgcctcctacctgattttcacctttgagaaatctgttgttttcaatggtgagagcaggaaacacaacrttaagggctgagtaaacagcaggtattgtcagggacggacgcagtaaaaagaaatggactaaagggataagaaggtcattagaaggtggttttacaatggggagagattgaaaacagaagaaaccagtggagaggtcacataacaacattggaagcaaggag

SEQ ID NO: 114867 - DNA, 628 bp, Homo sapiens
cctgttgggttgtgtagcattaccacgggagtgttaataagacaggacagatatgcctggccactagataaagggggaattctgaccacagtcagaatggggaaagagtgattccagaattcttcttgacagaaagcttgatgcctgtytcagtctgggtcataactaaaaatagaaaccacaataatacttcaaacaaagaaaattggttcacaagaaaaaaactgaaaaaccaaacagaggagatgaaggcaacctagggattagcatcagtaggaggttctaccacccctagaggactagagtaataaaaggaaggggtatggtactaaagcccagaggctaggactggtctgtgggatctagaccaaaaaaggcaggcataaccactccagagatgccacccaaagcaggatacagctctcaggcttctcctctaccactatgttgcatcagtgcctctcattgccaaaccttcccagaaatcagctggcaagagggactgtaatgctgtttgtgatacaagaaaagggcaagcgacggatctgagagcaaactagcatatgatggcaaccaagactctagccattaggtttatccagttaacctcttgcactgaccttgcaca

SEQ ID NO: 114868 - DNA, 628 bp, Homo sapiens
cctgttgggttgtgtagcattaccacgggagtgttaataagacaggacagatatgcctggccactagataaagggggaattctgaccacagtcagaatggggaaagagtgattccagaattcttcttgacagaaagcttgatgcctgtctcagtctgggtcataactaaaaatagaaaccacaataatacttcaaacaaagaaaattggttcacaagaaaaaaacygaaaaaccaaacagaggagatgaaggcaacctagggattagcatcagtaggaggttctaccacccctagaggactagagtaataaaaggaaggggtatggtactaaagcccagaggctaggactggtctgtgggatctagaccaaaaaaggcaggcataaccactccagagatgccacccaaagcaggatacagctctcaggcttctcctctaccactatgttgcatcagtgcctctcattgccaaaccttcccagaaatcagctggcaagagggactgtaatgctgtttgtgatacaagaaaagggcaagcgacggatctgagagcaaactagcatatgatggcaaccaagactctagccattaggtttatccagttaacctcttgcactgaccttgcaca

SEQ ID NO: 114869 - DNA, 628 bp, Homo sapiens
cctgttgggttgtgtagcattaccacgggagtgttaataagacaggacagatatgcctggccactagataaagggggaattctgaccacagtcagaatggggaaagagtgattccagaattcttcttgacagaaagcttgatgcctgtctcagtctgggtcataactaaaaatagaaaccacaataatacttcaaacaaagaaaattggttcacaagaaaaaaactgaaaaaccaaacagaggagatgaaggcaacctagggattagcatcagtaggaggttctaccacccctagaggactagagtaataaaaggaaggggtatggtactaaagcccagaggctaggactggtctgtgggatctrgaccaaaaaaggcaggcataaccactccagagatgccacccaaagcaggatacagctctcaggcttctcctctaccactatgttgcatcagtgcctctcattgccaaaccttcccagaaatcagctggcaagagggactgtaatgctgtttgtgatacaagaaaagggcaagcgacggatctgagagcaaactagcatatgatggcaaccaagactctagccattaggtttatccagttaacctcttgcactgaccttgcaca

SEQ ID NO: 114870 - DNA, 567 bp, Homo sapiens
caaatgttaccttactgagaaaacaaatagtttttaatgattatagcatatcttaataaattatgttggttttggtaaatatagatgtgagttttgattgttaatttctgaatcttttctgtatyaatgttattgtatcaaagcaagctcaataaatgggcttttagtgtgtgggttctactctcaagttttttaaaaaattattttcactgttggaaaacatgaaataaagtgagatgtcagaatcacctttggaaatattatagagttttaaatttaagaagcactttatttttatcataatcctagcatcagcactaacattcagagcctcaaatactcaacagttcttgcttgaaaataaattgcaaagtcataatcaatatttaactttaaagaagaatattaaagaacatgatacatactacactgatgctttcttttctttgtttttcagtgttctctactgacagtaaaattcatactccatttgtctaagaggcataaagctggaatttactgagagcactgcctataacgattatggcaaaattccaaatttttcca

SEQ ID NO: 114871 - DNA, 579 bp, Homo sapiens
ctagctgttgtatttttgagtaatttattacatagcaacwaacaaccaatacaactcctggtccatatttttctcagacctgctttacctgtttgaacccacactgaaccacatggtggttattttcaactaggtttttaagatgtaacctagactctcatcaacttgactgctctccatacctactttgttaatccctaatcttggtgaatcccatgatctaattttctggcttctacatatgggctgccataatttgttagagaaaaatcaaaacatatactaataattttactataaatccaagctatcttcagctgaccctcaaaatactcactatttttgtgtttctagttcactaacatcatatttccttcagtagctgccctcaattacacagctgccacactttccttctcagaagagtatctggctggcctttgacttcaaaatgaggacatcattaaatttttcttgatttttttcttctccattgcataatgtttatatttcaaccttacctctcctcttttccctgtgtttggagtagaaagtgttatccactttctatattaattc

SEQ ID NO: 114872 - DNA, 564 bp, Homo sapiens
ttactttctcctagtttcttaaactggatgctgatgtcatttattttcgatcttctttaattcttatacagaaacttaggatacaaattactgcttcagctgcatcccacagtttttaatgttgtgttttcattttttattcagttcaatatgctatttaaacttccccttgatttctttattttatatatgtgttatttggatatgttatttggtttccaaatatttgaaaatgttccattgtttctgttatctatttccatttaattctattgtraatttgaatatttaaaaatgtaagacatattgtatgtacgagatatgatatggcctatgatggtaagttctatgggaactttacactattctgctattgctgtgtggaaggatataaatataaatcaggtcaatttggtttttagtgttgttcaagccttttatatctttattgattttctgtctacttgttctgtcaattaataaaatagtagtgtcaaaaactaaaaggcatttatggatacacctaatttcggtactctctgcttttgcttactttaggcaatc

SEQ ID NO: 114873 - DNA, 563 bp, Homo sapiens
catgatttagttaaataatgccagtcacttgacaactaagatttagattagttttttcatatgccattgtatcctgctgtgttaaatttttttgccagctctgaattatttatagctattatttcttcacaaattttttattctcttcattctcttcttctgacattctgaccagatgtataaatattttatcgttctcagtatgttttctgtctttcaaaatagccatctccatttcttcattcatccataatttcttaatccctccctttgagtgcataattatttttttcaagacrtactttacctgctgttaaaacatttattatgtctctctttagtttcagtaagtatatatttttttctccaaactttatcattactgttttatctcttgagagttttttatttgtttgttagattgcatcattatttttaaaaatatttcacacatacactttacttcttaaaactaaacgcctgtagtttggagtctaaatctgttttgtgctgtgtcgttaactctctctaatgtcgatgtatcttcttacagtgtgtttttg

SEQ ID NO: 114874 - DNA, 563 bp, Homo sapiens
catgatttagttaaataatgccagtcacttgacaactaagatttagattagttttttcatatgccattgtatcctgctgtgttaaatttttttgccagctctgaattatttatagctattatttcttcacaaattttttattctcttcattctcttcttctgacattctgaccagatgtataaatattttatcgttctcagtatgttttctgtctttcaaaatagccatctccatttcttcattcatccataatttcttaatccctccctttgagtgcataattatttttttcaagacatactttacctgctgttaaaacatttattatgtctctctttagtttcagtaagtatatatttttttctccaaactttatcattactgttttatctcttgagagttttttatttrtttgttagattgcatcattatttttaaaaatatttcacacatacactttacttcttaaaactaaacgcctgtagtttggagtctaaatctgttttgtgctgtgtcgttaactctctctaatgtcgatgtatcttcttacagtgtgtttttg

SEQ ID NO: 114875 - DNA, 604 bp, Homo sapiens
ctcccactctcttcaacaccattcctgtcaaaattttcttgttaattgtagtcatgtaaataatactggaaatatcttggcatctataattttgatcctaytcactccagtctctggacatcacatgctatggctccaggtcacttaattcgatgtagcaacacctgaatctagaagcctatcagaaccttgcacatatccttcactcccttgtctcctttaacttcattttgctactctgaccaaacaaaaatccagtctcaggttgtttcatgtctgaacccacatagctaattacagccagagtacaatacaaagccatagtaatggagccaatttaaattcatactaattgacctaagtgtgctccttaatgctttactaaaatgtctctagccccttaactgccctacttccctttactaccctacttctttttattatcccactcttctggatatgtttaagggattttcttttttcctttaatttccaccaagctgttgcacattctgagcttccactttgacattgctctccatttcccttagaaataaaacaaggagatgacctctgcgtgctccattcacagcatctgcccacc

SEQ ID NO: 114876 - DNA, 604 bp, Homo sapiens
ctcccactctcttcaacaccattcctgtcaaaattttcttgttaattgtagtcatgtaaataatactggaaatatcttggcatctataattttgatcctactcactccagtctctggacatcacatgctatggctccaggtcacttaattygatgtagcaacacctgaatctagaagcctatcagaaccttgcacatatccttcactcccttgtctcctttaacttcattttgctactctgaccaaacaaaaatccagtctcaggttgtttcatgtctgaacccacatagctaattacagccagagtacaatacaaagccatagtaatggagccaatttaaattcatactaattgacctaagtgtgctccttaatgctttactaaaatgtctctagccccttaactgccctacttccctttactaccctacttctttttattatcccactcttctggatatgtttaagggattttcttttttcctttaatttccaccaagctgttgcacattctgagcttccactttgacattgctctccatttcccttagaaataaaacaaggagatgacctctgcgtgctccattcacagcatctgcccacc

SEQ ID NO: 114877 - DNA, 553 bp, Homo sapiens
tgtcaacaggaaaatgcaaattacaaaaacagtgagctacctctatacaaccattagaatggccaaaatccaaaacaatgacaacacatgcttgaaaggatatagaagagaggaactcttattcattgctgatagaaatatgttcactttggaaatctggcagtttcttataaaagtaaacatactcatactcatacatgatccagcaattgcatttcttgatatttacctaaaggggttgaaaacatgtccacataaaaaccagaacatggatgtttatagtagcttcattcataattgccaaaacatggaagcaactacaatgtcattttctaggtaaattcattagtaaactgcggtgcattcagacaatgaaatattattaagtactaaaagtaaatgagctatcaaaccatgaaaagacatggaggaatcttaactgcattactaagtgaaagaagccaatctgcaaaggctgcatactgtatgatgccaactacrtgatgttctggaatagtcaaaactatgcagacatttaaaagattacagttgt

SEQ ID NO: 114878 - DNA, 428 bp, Homo sapiens
tgtttactgtattactgatgaagctacattgtattctaaatctccataaaattactcagtcaagttttyttaaaggcatgactgtgatgccaaaataacttacttagttatgattataaaatgccaggtatgaactaatgatgtttttaagatgtgacaataaagtgtactggcagttaagaatgcatctcttcaaccagtatcaaaaagaagatactctgattctgttgctggacctttttcaagattcaatttcctaaattagaagactaaacataaagcttcaacaacttgatggaaatagctcttgagaataacccacagtttattctaattctttggatgccaagcagatttttgtctgacaccttgatctctagagtggacctgagtgaatgaatgtgaaaaaaggaggtctgccaaagtca

SEQ ID NO: 114879 - DNA, 498 bp, Homo sapiens
tggttggccaaagtttggtctctttaaataataagtacacgttccatatttctttcacaggtatagaagaagaccctatccacaaagataccactgcaaatgaaaaattagaaaggaatagagaatatacataccaatggcttcacacacaggttggggttcatgaaacgactagttccagaaatatgaaatggtgaggtcatttcctctaaattagatttttgtattgtaaacacatcttgaaaattgwaacctaggttaattgtgctaaaacaaacatgactttattgccaaaggccaatacgctacgttgccgggtaatacaaaggcctttcatatagaatagatttaattactccttctatttttcaccctgaaatgtttgggaacaactctattctgtaatacttgaaaccaacagatgagccacaaaaataattctactctataaagtaaaaaatgtggtattcattaaatgtttttagatatcatgtatat

SEQ ID NO: 114880 - DNA, 613 bp, Homo sapiens
tcttgtgttaagtcagacattaaagagatttacaaaaatgtgtaacaacacccttcttcccagtataactctttgtttagaaaacagaattaacatttataaaatttttgtgaatccaaaagttttattatttgaaattctaaatgaattaataaaacgtaaaaaaattttttttcgactacttggcaatattgctagacataacccatacaaataagttatttgagagaggtcctcaataatttctgagaatgtaaaacagtcctgcatctaaaataaagctcgtttaattatataagacacagaagactaaagcagaaagctttactacctatgaaaagagaygttttaaaatgatgaaactggtcaatttaacagaaacatgtaacagttataaatttgcaggcaccaaatagcatgccctcaaaaacatttaaagtaaaaaaatatataagaataaaaagattgaactacaataatcatgaagtcattgctaatattatcagtaccacacttaatcaacaggcaggtggcataacaaaaatatataggttctgaagtaggctgtcctgagttgtaaaaaacaagcctactcccaaactagctatttgaa

SEQ ID NO: 114881 - DNA, 568 bp, Homo sapiens
tctactaccatatgtggggattatgggaactacaattcaagatatttgtgtggggacacacccaaaccatatcaatctgtgtatcttctctttattttaaaaaaatgcatttttatttgtaagttcatctgagtatagctacagtaaatatctaaagttgatttttctaccctcaggctagtagttaaacactgattaggagctctagtaaatatctgtacctaagaaattgatgcctaagatttattcttaatattttgaggtagctgccacaggagaaaagagcatgagatgctatttcttgagcaamaaaaatattatctagggattttatatatctgattgtttcttcacaacatccatgaaaaaaaatacaattaccctcatttttttggagactgaaactaaaattttgagcttatgtaagactcatgagaatttgaacttaggtctgactccaaagcccatggtatttccacttcatcaagaagccatatttttccatgagactcctcttaatgtcatatttcttaatatggaaatgaatgacattttaaaatgttcttaa

SEQ ID NO: 114882 - DNA, 477 bp, Homo sapiens
tggggttgagtgacataagcacctctgtggccaccactactgtgactgcattgggtcagacctgaggccagcacagcacggggtcttgcccaagacctgctgtaaccactccttagctattgcaggagtttactgaaggccctggggctctacagtcatcacatcgtaaaaacagccaggcctgtgtccwtgccttcaggatggcaagttctcctagcctacaggtggatccacaggtgctgtctgggaatcagggcctagatcaaaaactgtaaaagtctacctagtgttttattgtgctatggctgagctgtcactcaaaccacaagatgcagtccttcccactctttccacccctgtccaaaggcagaggagcatcaatccatggccacctcaaacacaggacatggggggggtactgccagactaccaccaatgttctcataaggcccaaaggctcttaagtcagtttgtagt

SEQ ID NO: 114883 - DNA, 477 bp, Homo sapiens
tggggttgagtgacataagcacctctgtggccaccactactgtgactgcattgggtcagacctgaggccagcacagcacggggtcttgcccaagacctgctgtaaccactccttagctattgcaggagtttactgaaggccctggggctctacagtcatcacatcgtaaaaacagccaggcctgtgtccatgccttcaggatggcaagttctcctagcctacaggtggatccacaggtgctgtctgggaatcagggcctagatcaaaaactgtaaaagtctacctagtgttttattgtgctatggctgagctgtcactcaaaccacaagatgcagtccttcccactctttccacccctgtccaaaggcagaggagcatcaatccatggccacctcaaacacaggacatggggsgggtactgccagactaccaccaatgttctcataaggcccaaaggctcttaagtcagtttgtagt

SEQ ID NO: 114884 - DNA, 561 bp, Homo sapiens
ttgtaaaattcactgtcaggcatatccttggaaatacagaatatctttgacactatgtctaaatcttctcactgtaggatctatagataaccttctattttttttttcagaccaaattggataaaagaggatgaagtcatgaaagggatgyttcttcctcttagtatatttgtcactctaagttagtagtatccaatcccttaggaacctctgaggttttccatttatgagactctcctactactagagtgggccaaagggagagagaatcctatttggagcaatggggaggtaacaggtgacggaggagtgaagcactcagcaaaaagaacagagttcatgaaaccgtaatgggttcctcaccttctagcgttctaccaccatgtgaggctggtgccccaaacccaaacccacaatcattttgtagggagttcctgactcaggcctacagctacatggtcatatcttctgggcaagaaagacagccatgatgggtgaaagtaaagaagtgacagaaggacttaggaatcaagaatttagatggggtaagaggcatgtttc

SEQ ID NO: 114885 - DNA, 536 bp, Homo sapiens
gagctcctggtgggaggggcagctgccacctytgcagtttggtcaactcagccattccaacctgctggctttggagaatacaggtggtctggaggaggaaggatcccccacagtgcagcacacctgctctaccccaaagcagccagactgcttttttggatgggtccctgatcccatgcctcctgactgggtgagaatgcccaacaggggtctccagccacctcttgcaggtatgtgcgggctggatacaggtcagtatccccctgggatggagcttccaaaggaaggagctggctgccatctttgctgtttctcagccttcactggtaatatctccttcagagtctatgaggaacttaaatttacaagaaaaacacaaccccattaaaaagtgggcagaggatctgaacagacacttcccaaaagagacatgcatgcagtcaacaaaaatatgaaaaaaaaaaactcaacatcactgatcattaaagaaatgcaaacaaaaccacaatgagataccatctcatgccagtcagaat

SEQ ID NO: 114886 - DNA, 404 bp, Homo sapiens
cttcctgggtcagttgccttcccacaggcctcacaaacagtgcactcaagacacctccaacctttgctaagaaccactttagtgatctgtaaaagaaacaaccaatccatgtgatttatgcattaacctaacataatcaaatatactatataaattaatatggtgcttatgtacctagaagcagaaaggggcaatcaactaacatttattgagcrcctacggaggcccaatactgggttgggcatgttcatacacgcttttaggagcctactgagcagagtaatagacaatggcacatattttaatgcctttttaaagtccacataattaccttatgctgtacatttaatgtccactatatttatagatatagtgaccagattttaaagaaatcaagtaagctt

SEQ ID NO: 114887 - DNA, 404 bp, Homo sapiens
cttcctgggtcagttgccttcccacaggcctcacaaacagtgcactcaagacacctccaacctttgctaagaaccactttagtgatctgtaaaagaaacaaccaatccatgtgatttatgcattaacctaacataatcaaatatactatataaattaatatggtgcttatgtacctagaagcagaaaggggcaatcaactaacatttattgagcacctacggaggcccaatactgggttgggcatgttcatacacgcttttaggagcctactgagcagartaatagacaatggcacatattttaatgcctttttaaagtccacataattaccttatgctgtacatttaatgtccactatatttatagatatagtgaccagattttaaagaaatcaagtaagctt

SEQ ID NO: 114888 - DNA, 404 bp, Homo sapiens
cttcctgggtcagttgccttcccacaggcctcacaaacagtgcactcaagacacctccaacctttgctaagaaccactttagtgatctgtaaaagaaacaaccaatccatgtgatttatgcattaacctaacataatcaaatatactatataaattaatatggtgcttatgtacctagaagcagaaaggggcaatcaactaacatttattgagcacctacggaggcccaatactgggttgggcatgttcatacacgcttttaggagcctactgagcagagtaatagacaatggcacatattttaatgcctttttaaagtccacataattaccttatgctgtacatttaatgtccactrtatttatagatatagtgaccagattttaaagaaatcaagtaagctt

SEQ ID NO: 114889 - DNA, 614 bp, Homo sapiens
aataagtcgtagaagtcgaagtaaatgtgtccatctaagaataaatttaaacgatccatttttgcttcagaaacaaaattttatcaatataaactatgtctagagcagcagttgttaaccagaggcaattttccctcctctccccaattacctacctgggggatatttggcaatgtctggaggcatttaggttttcaccactggcgtgcgtgcatgtgtgtgtgtgtctgtgtgttacttacatctagtgaatagaggccaggaattttgctaaacaccctacaattaatataactgctcaccaccctcttatgacaatsatctggcccaaaatgtcagtaatgctgaggctgagaaattctggtctagagaaatagtgatacaatagactcttagcatctgtaaatttaattttgggatttaagactagcattttcaattttttccacatcaaaacaaatcgattattcttgttcatctttgttattcccatgagtaacagatgttcactacagctgctactacacatcagggaggcaacagattgagatacttccgaagtgtgctagctggaatctcccctaccatcagaaccactgaagcagagaactgat

SEQ ID NO: 114890 - DNA, 620 bp, Homo sapiens
agtttcccaatcccacttctaactttgcctgctttctttgtttctaccacaactatactgcaaaactctactattgtgttgccacgtgtcatctcctagtttctgttctgtttgctattttttagaaactcatgattgaagtcactctaattttgcatatgctcaaataaattccctcttggctgtaggaaaaatccagacagaacattatgtgtaagggatttgtagttgaagcacagaggggaattgttttcaatataaatttttttgatatagcagatattaaactgataagaatattatacttgatcttagccaaaaggccaaaaaatgatacaaatgggaatytgacgagaacttcaaaatgtagagaagttaaagttagtacaagagtaaaagtccttctttggggtactgcatcttctttattccattaatggtacttagcctgtatactcttcaccggtccctaaatatcacaatcttttagtttcaaagtatgtgggaatttacctaaacatttcattttaaagcaatgtatttggtatagaatgagaacatttgaagttgaaaagattatatagaataaaaggcacagaaaatgctaaaattaatgaaaa

SEQ ID NO: 114891 - DNA, 620 bp, Homo sapiens
agtttcccaatcccacttctaactttgcctgctttctttgtttctaccacaactatactgcaaaactctactattgtgttgccacgtgtcatctcctagtttctgttctgtttgctattttttagaaactcatgattgaagtcactctaattttgcatatgctcaaataaattccctcttggctgtaggaaaaatccagacagaacattatgtgtaagggatttgtagttgaagcacagaggggaattgttttcaatataaatttttttgatatagcagatattaaactgataagaatattatacttgatcttagccaaaaggccaaaaaatgatacaaatgggaatctgacgagaacttcaaaatgtagagaagttaaagttagtacaagagtaaaagtccttctttggggtactgcatcttctttattccattaatggtacttagcctgtatactcttcaccrgtccctaaatatcacaatcttttagtttcaaagtatgtgggaatttacctaaacatttcattttaaagcaatgtatttggtatagaatgagaacatttgaagttgaaaagattatatagaataaaaggcacagaaaatgctaaaattaatgaaaa

SEQ ID NO: 114892 - DNA, 589 bp, Homo sapiens
ttgttatttctatttatatcttattataccatctatgtcttgaaaagttgtagttaatatttttgattggctcatagtttagtctctctacttagagtaagagtagtttatacatcatagttacagtgttataacattctgcatttttctgtatacctactattaccagtgagttttataccttcaggttgttacttattgctcattaatgtccttatctttctgattgaaatactccctttagcatttcttctaggacaggtctggtgttgacaaaatccctcagcttttgtgtggaaaagtctttatttccccttcactttgaaggatactttcactggatacactgttctagggtaaatgtttttttccttcagcactttcaatatgtcatgccactctctcctggcctgaaacgtttctactaaagagtctgctgccagatatattgtagcrccatcgtatattattggtttcttttctcttgctgcttttaagatcctttttttatccttgatctttgggactgtgattattaaatgccttgaggtagtcttctttgagttacatctgcttggtgttttataac

SEQ ID NO: 114893 - DNA, 603 bp, Homo sapiens
tacttaggaaggccctggaacacagtaggtgctcaatacattttaagaatagtatttcaaagtagctgaagcatggtggtgtgtgaagacagatggagggaggcaaggcaacaaacaagtgggaaccaggtggtgataaatattgataaaagaataataaatagtatcaacaatagcaaacattaatcaygtgcttgatgtataccaggtcctgtcctgaaaacttcccatgcatcatctcatttaatccttcaatgatcgtatgaaataggcactattatagtcccttttctacagctagaaaatgcagatgctcagctaggggagtggcttcaccaaagtcaaagaaggttaggacagaactgggattcaaatctgggcctggctaattccacagccagggtgcttctgaggcaatggggagccatttaagatctgtgtgacactctcaggtgacactgcacctaccacccctttctccatctctctgctatgcagtctcagaagtgagctcaggtatggccagagcaacatgacaacattggatgggagaggccaagtccatcaggaatgagacgggggtagatgccaggaaatggtctt

SEQ ID NO: 114894 - DNA, 603 bp, Homo sapiens
tacttaggaaggccctggaacacagtaggtgctcaatacattttaagaatagtatttcaaagtagctgaagcatggtggtgtgtgaagacagatggagggaggcaaggcaacaaacaagtgggaaccaggtggtgataaatattgataaaagaataataaatagtatcaacaatagcaaacattaatcacgtgcttgatgtataccaggtcctgtcctgaaaacttcccatgcatcatctcatttaatccttcaatgatcgtatgaaataggcactattatagtcccttttctacagctagaaaatgcagatgctcagctaggggagtggcttcaycaaagtcaaagaaggttaggacagaactgggattcaaatctgggcctggctaattccacagccagggtgcttctgaggcaatggggagccatttaagatctgtgtgacactctcaggtgacactgcacctaccacccctttctccatctctctgctatgcagtctcagaagtgagctcaggtatggccagagcaacatgacaacattggatgggagaggccaagtccatcaggaatgagacgggggtagatgccaggaaatggtctt

SEQ ID NO: 114895 - DNA, 525 bp, Homo sapiens
ctatataaaaatggtgtgttttgttcaccaaaagttaaaatgtttatcatattttgaaacatccctttactcacctgagctccttgcagtgtcattgatttcttttgcatctcctttctttagtgtacaagtaaatgccgattctttatcagaaatatagatcagcaaaaagaaaaaaatatcccccaaactctgccatctacttacccaaaaaaccagatgcctagaaggcatccttgacttctcgcaaatcagatcacattggaacaatcacctaagtcttgttgattccacttccttagtaacactggaatctgaaatctctccatcccatggccccctaacctaagtcaagcccttctcctgtctcacctagatccttgctccttaaaatgtgatccatgggccagcagcattgacattaactgataacttrttagaaatgcaaagttgcaggctctttcccagacatactgaatcagaatttatgttttatcaagttttctgggggcgattcatatgcac

SEQ ID NO: 114896 - DNA, 564 bp, Homo sapiens
cataaccagtacaagtttaatgagattaaacttatttagcaaacaaatcaatctgactttgattatctttgacagaaatgagagtgaatatagagagaaaagttatgtttcgggagaaaactgcagtgcacccaatattagattctagctgtttttttttttttcctgaggttttattatctgcctgcaatctgcaatagatcctcaatttttctagtttactacaatatttagctacaacactccaaattaatatttcatttttttccctgctattctggcttggaatcactaaaattataaacttttcatttcttgaagtccttcaaactgaaactggatgacttgacataagcttcagaaaaattaccacaacagcttgtgtgtggcccatctttatgrcattcaaactgcaaactaatccaatgcctcttctcactccagctgaagatactacaagcccagcatctagaaatcttattgaccagctgccctctgggctcagaaactgtctttatagttcgttccaactattaatcttttttaattttatttttatagaaa

SEQ ID NO: 114897 - DNA, 590 bp, Homo sapiens
caacatttaggccaccctcctgtattccaggcactgtacgtggcactgagaatgcaaagcaaaacgagtcatggtctactggcgggagccttctcagcggagaaaagatcaacaagaaaagtgcctgctggagatccctcctagggcataaaccaatatagaggtggggcagctacgtcagcctgaggtgtccttaggcagaacagaaagtgagaatcagagcagtatctcatttctgaamacctggattgtagctttccctggactgactgtcaaaggaggtggttttaaaaagcaagccaaacaggtttccatcctttaggaagaccctggaacgtgccagttgattctgacaatttctcatgaacagaaacacctaggaagggagaactggtgagtcttttcaagaggaggaagtccctcaaaaggggctgtgtttcgcaaacggcgccccaaaagggctgaaatacttcgatctggaggaaaaagactcaggcactgagggaaggggagggtgcacatctggagtaatttcaaggctttttccgtgttatctgaggtggcaacaagtaaagatttgttcgttttat

SEQ ID NO: 114898 - DNA, 590 bp, Homo sapiens
caacatttaggccaccctcctgtattccaggcactgtacgtggcactgagaatgcaaagcaaaacgagtcatggtctactggcgggagccttctcagcggagaaaagatcaacaagaaaagtgcctgctggagatccctcctagggcataaaccaatatagaggtggggcagctacgtcagcctgaggtgtccttaggcagaacagaaagtgagaatcagagcagtatctcatttctgaacacctggattgtagctttccctggrctgactgtcaaaggaggtggttttaaaaagcaagccaaacaggtttccatcctttaggaagaccctggaacgtgccagttgattctgacaatttctcatgaacagaaacacctaggaagggagaactggtgagtcttttcaagaggaggaagtccctcaaaaggggctgtgtttcgcaaacggcgccccaaaagggctgaaatacttcgatctggaggaaaaagactcaggcactgagggaaggggagggtgcacatctggagtaatttcaaggctttttccgtgttatctgaggtggcaacaagtaaagatttgttcgttttat

SEQ ID NO: 114899 - DNA, 361 bp, Homo sapiens
ctggatatgaagtgaaatgtataaaagacataaaatgtcacaaaatagtttgatcacaagtgttgattttcctggtgagttggggctgcgtgtttccatgttttctgaaggttcacataaacatgcagcctgccaattctctgtacatttttttttttcaatgagyggtatttcggttttcacgtttagttgtaagacagaaattggagacttatatgtagctggagtggatgacttctttcttttgggggaagaatgagagatgcacatttcgttagtaaattgtgaacaacttgaaacaaacccaaatccaattttgaatttaagaagtagagttaaaatgaaaggtagccattcaaat

SEQ ID NO: 114900 - DNA, 558 bp, Homo sapiens
gctatagtatattaaaagatatttaatacataaataacagtaaacaaagtatcctctactatggtttgaaaattatttagaatcttgcaattgtcctgggtctctctaaatgctaatgatcaccaatgagtttgacaaatagagatgttacaagtgattggtttaaatctttgctgcaccttaaatgtattttaaaatgtgcccctaactctttattttacctgactgtatttcagtgcatcagtttaagagaagacatgagatcatgggtttaagtgaggcttcatcatactaagacaacgtgatcaggtaagtacttgcccctctacatgtcagcattctcacctgtaacatagtacaaacaggactttgtctgagtcccttgcaacattttgtggagcatsaaatacaataaagaccgtggatatgctttgtaaaccttgagtttctacacatatgcaaatataagtactggtaagatatagaatgaacaagggaaatagaatcctatttttatgtttcaattttatggattgctggaaaattgaagtgtatagg

SEQ ID NO: 114901 - DNA, 291 bp, Homo sapiens
tagaaaaaagaattgaggaaataatgccaaaaattgttcagttgtgatagagaatatcaactcacaggtacaaaaatctcaatgaatgctaagaaaactaagcaatgagcaaaccttaccagccatataatagtcaaagtgctaaaaagcaaaaacagaaaatttttamgacaggaagctaaagaaattacgtatctgagaaaaatgataagcaatactaataacttctcctcactaactaatgcaagctcagacctccatagaataacatctttaaaatttgggggtagg

SEQ ID NO: 114902 - DNA, 594 bp, Homo sapiens
gtctgaattctgtcataaagtttaatagtatagttaaggttcagaagagaatacctgaygtacatccacggcatgtactacatttccagacacttgaaatgagttagagtagggttttgcataggatcctaagctttctaggacccaggcctcccaagatctagaaaaagagggaaatgtgagtcgttaaataattttttttcctctggcaaaatgccagacatctagcaaaaattcctttatagagtccaattattttcttgaaataaagataaaaatgaattcatagcaaaagtctctgcttaagagacagcaattaacacaatggataatctatggtttcctaaaagacagaaattttcaaatgcatgcatctactatcgaatctttataaaggagaaggcatattactaaatcacagctcagtgagaagctgagataattatgtgttaggctctgttgcattctagtgatctaaattataaggatagtgacttaagagagaccctcatggatacacagtctctctatccagctattcttcctctcaaatatcatatgtcttaggcaagcatttggcaggtgtcaaattgc

SEQ ID NO: 114903 - DNA, 527 bp, Homo sapiens
agttttgtttttcagtgctgtgggtttttcttttcataatccttcacttagtacttttcagcaggctccgttctcttcttcaggggttactcgtatctcagatattcacattcctcagattacattcattacatttattttttacccataaacaaacgttttttgaatttctttagttgatttaaaatttatttgtttgagttcctgctgtgtatgattttcgtgacataaagtcattctatgtttgtaaaaatttcattttgatgtcaaatatccactttcaattacaatgttctcttgattgtcttacataatacattaagacatgtttagtattcctcctgttactyggagtaagcctgctttattggacgtaactattacagaattttcaaaatagtgtcctccttttagactagtgagacatgaaaatttatgaatttataaattgctttctacattgatgtggctttctattcctgtgttttagtctaaattattaggaaaggaaaggaagatatttacac

SEQ ID NO: 114904 - DNA, 410 bp, Homo sapiens
acaaggtaagaattattccattatgtaggtaagaaaattaaaaggtaaaataaatgtaactgaattggaaaatatcctacaactatctggactctatgtaacttcagagctcttccttctcttccctactatctggtgaccaaatcttggatgctctgtgctacttaatgacctcagtgtctgttcataagttagggagctggccctgtgccttctaccctctaagtataactaggatatctcaaaaagcactgtgtgcttttgggtgaaaggttttgtgtttgttttaaaatgcaagtgaaaacaacttcaaaaatgtgaacaaaagcaatygcataagaatgaatttgaatgaacactctcataatttgacattttggaatatagcacacaagatcagtttgttataa

SEQ ID NO: 114905 - DNA, 632 bp, Homo sapiens
tatgtgaagaggcatccagttcaattagctctaatcccattaaattatgcagctacttctttatgccttattatacatatgctatgctataatgacagatgcctcatttgtataagctgatgcattcattattttggtttcaattatgctttcatgaataaactgtacaaaagtcacgctatttcccttttgtttctcatgtttcccattgaccctactcctccaacccctttgtgagagatgaaagtcaaaatgcatacatatagaatacaacactgttccaatttgtttgaattcttaagtgaaaacagtcactctagagttcaccataaagtgaggcaaaatcccaaaataagctttagcaatgtagtcaccaggaaattcctatggaagaaagcctaatatctgygctgttgaataggacacaacctttctcagtgtggctgaagcaagattcttagaatacagtagatagtcaatatatatggttgttgaactgaaccattggtgtcacctgggagatctgactaattacaacagagataacaggtttggggaaaaacctaaaaacttcatgggacattatagcatgaggatgttggtggcatcccatgaattcacgttgaagaagg

SEQ ID NO: 114906 - DNA, 595 bp, Homo sapiens
  misc_feature (1)...(595): n = A,T,C or G
nnnnnnnnnnnnnttattttggtccaaaccttgttataaatttttcaaatgttaaaagctctgatttgggatctggagggcatacagagccttcaaagrtactaataatataggatttcttatatgatgctattgttctttaaattttatgtacacacgattaactctcttccaaagatacatttcttgaaaaaacattaacattaggaaataccatttagtgtgttactatgattctaagtgcctcaattatctgttagcatatctgcaaactattacttgaaaattgttttatttctgtacatctagaaaaaattgcattctaattataatatgtaaccttaaaatttttttcagcgacttttagaacaaaattttgtcatatgaaaaatgagggaaattgccagaggagattcaggaaaagtaaatctgggtagaaaatttcctttcactcctgaaatacctattatttccataaattgctctataataatagttctttaaaagaatttgggtagagatgcactaaaaggtttagaaaaaaatatctctctgtagagagttgtcccgcaatcagtctctcccctgtctccaa

SEQ ID NO: 114907 - DNA, 557 bp, Homo sapiens
cccgcagaccaggagattcccttgggtgcctgtgccaccagcccctgagtttcaagcaaaaaactgggtggctktttgggcagatactgagctagctgcatgagttcttttcataccccagtggcacctggaatgccagcaggagagaactgttcattcccctggaaagggggctgaagccagggagccaagaggtctagctcagtggatcccacccccttggagcccagcaagctaagatccactgacttgaaattctcactgccagcacagcagtctgaaattgacctgggacacttgagcttggttgggggagtagtgtccaccattactgaggcttgagtagggggctgtcctttcacagtgtaaacaaattccctgggaattttgactcaggttgaggccaccgcagctaagcaaagccactgtagccagactgcctctctagattcctcctctctgggcaggggatttctgaaaaaagaggtagcagccccagtcagaggcttatagataaaaccccatctgtctgggacagagcacctgggggaagtgat

SEQ ID NO: 114908 - DNA, 538 bp, Homo sapiens
caaaaaaactattaaaattgataaatttagtaaagttgcagtatacaaaatcaacatacaaaaatcagtagtatttctatatgctaatagtgaacaaagaaaaaggaataaaaaagcaatcccatttacaatagccacagataaaattaaatacctaggaattaaccaaagaagtaaaagatttctgtaatgaaaactgtaaaacaatgattaaaaataaatagaagaggaaccaaaaattggaaagatattccatgttcatgaattggaaaaaatcaatatttttaaaatgtccgtaccacccaaagcaagctacaggttcaactcaatccttgtaaaaataccaaagacattcttcacagaaatacaaaaaataattctaaaatttgtatggaagcacgaaagatgaaaaatagacaaagctattggatatagaaccaaaaaggcccagaatagccaaagctatttatatggaaccacaaaagacccagaatagccaaagcytacgcaaaagggacaaaattggaaacatattacc

SEQ ID NO: 114909 - DNA, 616 bp, Homo sapiens
tcttctctgtggtcactgaaataatgatactgtcacttaataacatttactgagagcttactatgtatactttgctagtattttatttgtattatttacattctcttgaaatagataccatattatccccatcttatggatgacaaaactgagacatagaaaggtcatgycacatgttcaaggtcacatagtgagtggcaagctcaaatttaaactctagcagtctggctctcctgagagaccttagagtgggagctcattttaaatggaaccccagaagaaacacttaaaatgtctatcttccttaacccaaggcttcttaagaacctaaattgtattttgtattcatctgaagaacctctaattgtactctcaatttaaggttcttaagcatgtaattgtactcttaaagttttctttaaaactgcatttgccccttagaccacaactaaaatctgccacctggctgctcatcctgccagaaaaacaagatggatggcattttagagttcatcttaaactttgcaattccctgggctcttccgaaagaccaaaagtctcactctgtccatccttatgtgaactcatgctatctaggaccctgcttgtgcattag

SEQ ID NO: 114910 - DNA, 570 bp, Homo sapiens
tctactagaatccatgtgaggtggtgggggtttgcttggaattgttcttaatttggaaatgatctaaacagaaagaggtaagtctgtccctgaatatgaatacatgtttagcttaataatatttctttatagttcccatttgtttagagattgtattatgtttcccaggctcagaaagacttgttataaatactctaatcctttctaaatcaggtgtttgtccacctatttccatatagatatcttaggagcatgagcgataatttattctcataatctgcctacgaaagaagaaggttcctccttcctctgccagccttgcccagatgaaagagccagagcctcctgcatgcttctgaggccagctgtggraaatcagctgagatttttgaagagaaataagcctttttagtctttgaagaaatatctgtagaatccacactctggtagacaacttccagaggtcacttaattctgcatggagtttctaactcaacatttataaatgggtcacgtttcttcctttggaaaggcagatttggcaagttaatattatctcacagaacacat

SEQ ID NO: 114911 - DNA, 602 bp, Homo sapiens
actctgtgtttctgcagctctctctgyctgtttttaccactggacaggaagctccatgaaggcagagtcagtttgacttattccctgtctattatatgctcagcacctaccacagtttctggcacaaagcagtactgtatttgtagaatgaatgaataaaaccattagaagtattataatatatgtgtgtgaatcatgctatttggtcaacctataagcactgattcatgcaaatatggtgctcctgtgggatctcagggtccacagattagaaaccatgcatttagatttatgtctttgtgcccaatattttgttccattttcctcatagggagcttacgagtcagtagatcacaaacattggtctctggatttagagacaaacaatgactaaagccaggagcttgaaccaggtgatctcccaaggttcttcccaaaatgaacagtccatgaggacacagtgcctaccttaaagaaggccgaaccttcctgacacccacggggacagggatgttgatgacaggttctctcaagagccagcttctaacatttgcaggagcaataagtaagctaatatctggcagcctctaggcagtctagtt

SEQ ID NO: 114912 - DNA, 602 bp, Homo sapiens
actctgtgtttctgcagctctctctgcctgtttttaccactggacaggaagctccatgaaggcagagtcagtttgacttattccctgtctattatatgctcagcacctaccacagtttctggcacaaagcagtactgtatttgtagaatgaatgaataaaaccattagaagtattataatatatgtgtgtgaatcatgctatttggtcaacctataagcactgattcatgcaaatatggtgctcctgtgggatctcagggtccacagattagaaaccatgcatttagatttatgtctttgtgcccaatattttgttccattttcctcatagggagcttacgagtcagtagatcacaaacattggtctctggatttagagacaaacaatgactaaagscaggagcttgaaccaggtgatctcccaaggttcttcccaaaatgaacagtccatgaggacacagtgcctaccttaaagaaggccgaaccttcctgacacccacggggacagggatgttgatgacaggttctctcaagagccagcttctaacatttgcaggagcaataagtaagctaatatctggcagcctctaggcagtctagtt

SEQ ID NO: 114913 - DNA, 602 bp, Homo sapiens
actctgtgtttctgcagctctctctgcctgtttttaccactggacaggaagctccatgaaggcagagtcagtttgacttattccctgtctattatatgctcagcacctaccacagtttctggcacaaagcagtactgtatttgtagaatgaatgaataaaaccattagaagtattataatatatgtgtgtgaatcatgctatttggtcaacctataagcactgattcatgcaaatatggtgctcctgtgggatctcagggtccacagattagaaaccatgcatttagatttatgtctttgtgcccaatattttgttccattttcctcatagggagcttacgagtcagtagatcacaaacattggtctctggatttagagacaaacaatgactaaagccaggagcttgaaccaggtgatctcccaaggttcttcccaaaatgaacagtccatgaggacacagtgcctaccttaaagaaggccgaaccttcctgacacccacrgggacagggatgttgatgacaggttctctcaagagccagcttctaacatttgcaggagcaataagtaagctaatatctggcagcctctaggcagtctagtt

SEQ ID NO: 114914 - DNA, 602 bp, Homo sapiens
actctgtgtttctgcagctctctctgcctgtttttaccactggacaggaagctccatgaaggcagagtcagtttgacttattccctgtctattatatgctcagcacctaccacagtttctggcacaaagcagtactgtatttgtagaatgaatgaataaaaccattagaagtattataatatatgtgtgtgaatcatgctatttggtcaacctataagcactgattcatgcaaatatggtgctcctgtgggatctcagggtccacagattagaaaccatgcatttagatttatgtctttgtgcccaatattttgttccattttcctcatagggagcttacgagtcagtagatcacaaacattggtctctggatttagagacaaacaatgactaaagccaggagcttgaaccaggtgatctcccaaggttcttcccaaaatgaacagtccatgaggacacagtgcctaccttaaagaaggccgaaccttcctgacacccacggggacagggatgttgaygacaggttctctcaagagccagcttctaacatttgcaggagcaataagtaagctaatatctggcagcctctaggcagtctagtt

SEQ ID NO: 114915 - DNA, 539 bp, Homo sapiens
aaaccaccactacaatcaagacaaggcaagtttttcactctaaaaaatttcctttcttcactgctttttagagatgactaaatccttgaagcaccatttacctcagacgtaaagattctttatagtgaaacactttagggaaaattttatttaaaagttttaatcttggtgatatgttcaaagttttgactttgggggacttccaggtctgatgttgcagttgtatcttagatttttctctcagctaaaggccacatttgccatytacatctgctattgatgtagaatatgttcacagatggcaggtatcttgggcaaagactaatacattggccttataccctctccatacttgccacctgccattttaacaattcttggtcagtctcacaactcatccagcagtggccagcctttccccagctaatgaactgaatgaagtgtcacaatcagatcttagcagctttagaaaactgtgttgtccaaaaggcgttgcattcttttctgttctttatagaatctcctccattccattcagc

SEQ ID NO: 114916 - DNA, 520 bp, Homo sapiens
ctatgtgatctttaatatataaatcaataatttgaaggaacacagtaacaaatagatttccaattttttgtatgacatagagtgatggagaaaacattaaaagtaatctctatacactagaagtctggatcagattcaagaagatgagacttaacacatataaatgttaatctactgcaccaatgctcaaaaaaatcaactgtgcaatgacagaatagggaaagctagttttgcagatgctaatattgaaaaggcaagggctttttacgtaaaggactctttattggaccataaccaaaagatgaaacaatagtgacatgtggttttcctaaaagcaaatatgatctaagatgtgtccagagaatcatgttaggttggtgaagggcttggaaaatatgttacatgaggaatgattgaacgactaaaagaayttgtcgtatctgggctataaaagagatgactaaaatgtcaaggttgtcttccaatatttgaggtttcctgtaaggaaaatggagagggt

SEQ ID NO: 114917 - DNA, 631 bp, Homo sapiens
tagattaggttaacaaagtaaagagtctagaaatagatccacataaatatggtccattgatatttaatgaatgtgtaaaggcaaatcattgaagaagggtagttggtcaaaaatgtggtcgaacaattggttcaaatgtttggttcattgaactaagtataaaagtagaactataaaacttttagaagaaaacataagaaaactattttaggcaagaagttcttagacatgatactaaacacactatccataaaagaaaaaaatgataaactagacttcaccaacatttttttttaaaatctgctgtatgaatacacttgtaagagaacaaagatacaagctacaaattgagagaaaatatctgcaaatcacatatctgacaatatacccaggcaatactgattatgatcctaaaagatactattctgaatgccataatcacaaatgttgaaattccaaaagttcaaaatccctaaattcaaaactccttaatgtctaaaaaaatccccataatcaaaatcccaaaggattaaaattccaaaygttgaaagcctgaaatccaaattctggggacgaagttggtgcattttcagttgtatgccacctaatgttagttgtgtcatgttaggca

SEQ ID NO: 114918 - DNA, 628 bp, Homo sapiens
ccaggctggtcttgaactcctagcctcaagggatctactgcctcagtctcccaaggtgctgggattacaggcatgagccaccaaacctggctggttgtttgtttcttttacccatggatgctcaattgttccagtaccatttgttgaaaagacttatctttcctccttgaattgcttttgcaccattgacagaactcagctggccatatttgtgtgagtctacttctgggttctctattctgtgtggtcttgatctgtgtgtctacctctctgccaatatcccacagtcttcactatagctatataataagtcttgaaattggatagactgagtctctctactttcttctttttcaagattggtttagctattctaattcctttgcctttccatatacattttaaaataatcttgtgtatatrtattttgggattttacttacttactgggattttgatagaaattacattaaatatgtgtataaatctggagcgaattggccagattgagtcttccatccatggacatgttgtgtctcttctttatttatatgtttgacatccttcatcaatgttttgtagctttcagcaaataagtcctatacatgttttgttaggtttacactca

SEQ ID NO: 114919 - DNA, 628 bp, Homo sapiens
ccaggctggtcttgaactcctagcctcaagggatctactgcctcagtctcccaaggtgctgggattacaggcatgagccaccaaacctggctggttgtttgtttcttttacccatggatgctcaattgttccagtaccatttgttgaaaagacttatctttcctccttgaattgcttttgcaccattgacagaactcagctggccatatttgtgtgagtctacttctgggttctctattctgtgtggtcttgatctgtgtgtctacctctctgccaatatcccacagtcttcactatagctatataataagtcttgaaattggatagactgagtctctctactttcttctttttcaagattggtttagctattctaattcctttgcctttccatatacattttaaaataatcttgtgtatatgtattttgggattttacttacttactgggattttgatagaaattacattaaatatgtgtataaatctggagcgaattggccagattgagtcttccatccatggacatgttgtgtctcttctttatttatatstttgacatccttcatcaatgttttgtagctttcagcaaataagtcctatacatgttttgttaggtttacactca

SEQ ID NO: 114920 - DNA, 488 bp, Homo sapiens
aaactcaatctttcatttgctagctttatgatactacccatatctctttaaataaagaagtcagttttcttaccaacaaaatatgaaaaaataatacctactctgttttacctggatcaagaattcataatgcatgtccatttttatacaaaaayggcaataaaaataggactgtatgtgaatgtctttttctctgcaactgttccttattttagataattcattgctaacagcattttgctaattttcacagaatgttttttgcaaagaataataatcctatgagaaacaaagtaaataggacctatacagatttttttaaaaaatagtggtgtacacacagcatagagaaccctatagtgaataagtagaaatgattccagatttgtagtttgtaagatcattcattttatcaggtaaattctatcacataaaacatatccagaaaaaaaagttttctggtcaatagttttgtttttcaatgcttt

SEQ ID NO: 114921 - DNA, 533 bp, Homo sapiens
ttcataggtgccagtacttttattctacataggcttccttaattggaatgtttttaaacaaagaacttattttggcyaattaaattcacactatgtgaattatatgcatcattactaaacaatgacataaactcaactaaacagatgtttacctgaagcaggcatattttggccgcttatccctctggcttggaagaaccatctggtcaaatgtttttcacagtattttatagtagttatgatgttaagtctgtgagaacagacaggcacagatgcagatcttgtttttgtcatttactacaagtggaacctcagacatatatgcttcagtttctccctacgtaaaattcagataatattatttcgagggtttgtggtgatatgaataacatctatcatttattgatctcttactatgtgtgcaaagctctgctaagttatttacatacactagtcctcacgaagtatgttatgatttaggcttttgccctagaaagaaatgaatagattagacttacgatatatgactgttt

SEQ ID NO: 114922 - DNA, 533 bp, Homo sapiens
ttcataggtgccagtacttttattctacataggcttccttaattggaatgtttttaaacaaagaacttattttggccaattaaattcacactatgtgaattatatgcatcattactaaacaatgacataaactcaactaaacagatgtttacctgaagcaggcatattttggccgcttatccctctggcttggaagaaccatctggtcaaatgtttttcacagtattttatagtagttatgatgttaagtctgtgagaacagacaggcacagatgcagatcttgtttttgtcatttactacaagtggaacctcagacatatatgcttcagtttctccctacgtaaaattcagataatattatttcragggtttgtggtgatatgaataacatctatcatttattgatctcttactatgtgtgcaaagctctgctaagttatttacatacactagtcctcacgaagtatgttatgatttaggcttttgccctagaaagaaatgaatagattagacttacgatatatgactgttt

SEQ ID NO: 114923 - DNA, 559 bp, Homo sapiens
gtgacaccaaatgctggtgaggatatatgtcaacaggaactctcattaatttctggtgggaatgcaaagtcttacaaccactttggaaaatagtttggcaatttcttataaaataacctatcatctccaaattatccagtgattgtactcattgatatttaccaaaatgagtccatacaaaaacattcaagagatgtttatggcagctttactcatattgtcaaaaattggagacaaccaagatgtccttcaataggtgaaagaacaaaccgtggaatagccatacagtgtaatatcattcagtgattttttaagtgatttaccaatccacaaaaacacatggatgagccttaaatgctcattagtaaaagaaactagtctgaaaaggctatrtaccacatgattccaactacgtaacattccacaaaagtaaaaatacccaacaaagagatcaatggttgccaagatttcagggaagaaggaaagaagagatgaatagacgtaacagagaagattttttttagggcagtaagactattctatatgatcctgtaatggt

SEQ ID NO: 114924 - DNA, 555 bp, Homo sapiens
attttgccaataaaattggcaaatttcacaagtatgaaataccctccccctcatttttgaagtaaactgaaaaattacaacccatattgacctgtaaattgcacaaagggaaatgcaatttttttcaattactcccagtgtatatcagatatactcattctcactcttgtgtatttttcaactagcagattttgtacttttgattgggacaggaggcagggaaattctgggcagaagaggatgggtcaccagcaagggccccaccctcaagcatgggaccacagcccaaagtgaatatgtgcattgctgttttcccactctaatgttgcctttgccaaaaccaccctggccctcactgcccctcatcytgtgcccgtaaaaaccccaggctctgctggcagagagcagagaagaggagtagcaatggaatgttggaggctatggtttgacatcaaagaaaagcagctttacttctgggagatggcttcatggcattgctcttggggaagatcaccttcccattccattccctttccagtcctccttcccactgag

SEQ ID NO: 114925 - DNA, 420 bp, Homo sapiens
gaattcctacaaatcaacaagaaaacaaaaactgaatgataaaaatgggagctagaatcttaaacaaaacratacacaaaagaatatacaaatggctattcaacatattaaaatgtacttaatttcattagtcatcagggaagtgccaggcataccacattgagataggactgtacattcagcataatggctaaaataatggaggcagattccaagtgttggagaggacatggagcaactgaaaatctcatacactgcagataggagtaaaaattggtatatctattttggaaatatatttggcattattcactaaagctgtttgtatgtatatacaattagcacagacagatacacaacagaaatgtgtccttatgtcgactatctttcatgttttagaatgtttatagcagcaatatt

SEQ ID NO: 114926 - DNA, 420 bp, Homo sapiens
gaattcctacaaatcaacaagaaaacaaaaactgaatgataaaaatgggagctagaatcttaaacaaaacgatacacaaaagaatatacaaatggctattcaacatattaaaatgtacttaatttcattagtcatcagggaagtgccaggcataccacattgagataggactgtacattcagcataatggctaaaataatggaggcagattccaagtgttggagaggacatggagcaactgaaaatctcatacactgcagatargagtaaaaattggtatatctattttggaaatatatttggcattattcactaaagctgtttgtatgtatatacaattagcacagacagatacacaacagaaatgtgtccttatgtcgactatctttcatgttttagaatgtttatagcagcaatatt

SEQ ID NO: 114927 - DNA, 554 bp, Homo sapiens
gagctagaatcttaaacaaaacgatacacaaaagaatatacaaatggctattcaacatattaaaatgtacttaatttcattagtcatcagggaagtgccaggcataccacattgagataggactgtacattcagcataatggctaaaataatggaggcagattccaagtgttggagaggacatggagcaactgaaaatctcatacactgcagataggagtaaaaattggtatatctattttggaaatatatttggcattattcactaaagctgtttgtatgtatatacaattagcacagacagatacacaacagaaatgtgtccttatgtcgactatctttcatgttttagaatgtttatagcagcaatattctctatgatattataatggaattcaacacatacccatttaaaayagtgtgaataaatagattgtggtatataccactatgaaatattgtactaagatgaaaataaatgatttacaactactaacagtaatgtaaatctcagaaataaaatatggaattacgaagcagaacagtgaatattct

SEQ ID NO: 114928 - DNA, 554 bp, Homo sapiens
gagctagaatcttaaacaaaacgatacacaaaagaatatacaaatggctattcaacatattaaaatgtacttaatttcattagtcatcagggaagtgccaggcataccacattgagataggactgtacattcagcataatggctaaaataatggaggcagattccaagtgttggagaggacatggagcaactgaaaatctcatacactgcagataggagtaaaaattggtatatctattttggaaatatatttggcattattcactaaagctgtttgtatgtatatacaattagcacagacagatacacaacagaaatgtgtccttatgtcgactatctttcatgttttagaatgtttatagcagcaatattctctatgatattataatggaattcaacacatacccatttaaaatagtgtgaataaatagattgtggtatataccactatgaaatattgtactaagawgaaaataaatgatttacaactactaacagtaatgtaaatctcagaaataaaatatggaattacgaagcagaacagtgaatattct

SEQ ID NO: 114929 - DNA, 494 bp, Homo sapiens
tcagcagaagactgagtaataaatttatcctttaggattagtggtccctcgactgaatcaggagatagagagttgtgctttaccaagtcctctcagcctttcaaggaaggcagtgggattttcatcaaatccctggtccatgatggacaacttagtataattgagaggcttggcttggtcttagtcctgtgtaagccctccattatgaacaactaaaagtgtctccttttccagtcttccacttcatcattgggaccccatttagggccatgcattggtactgcttctcttctggttggataatatttgtccccatacctgatgctatatgtgatacaatcctcaaccccawatctctgtgctgcttgcagagcagactgtttctcattgtctgtcagggtctgattcaaaagtaacataatgtctctcaaggagagttcaaatatttgggagaaattctggaaagtctatatatctatcagggtcatctgaga

SEQ ID NO: 114930 - DNA, 577 bp, Homo sapiens
gggggtgtgtcacagggtgctctcttagtttgctgtttataggtagcttgtgttaaccaagtcaattagaccctctaccttgtcacaaggacagagggctttatgtatcccaggttcttggcttggtgtactggaagaattggatcacacatgggcttcgagaatgagtgcaaagttttatgaagtgaagtggaagtcgctctccgacaatgggggagcctgaagggagatggttttcccctggagttgggccccttggtggctctggctcttctctgactaccctggccaaactccgccttgtaccgctggttgttgggctgcygctgtgcatcagcggtaagtgtgctctttcaccagcgtgctccctctacgtcctcgcctctagccacttgtgtcttcttccactgatgtgctcctctccatgtctgggcgcctctgtgtttgcccactaggatctcggggttttataggtccatggaggtgaagccctcgcaagggactatccctttctctacccagcaattccctgagccctcccctatcattccccactctgaagaggtatatctaactg

SEQ ID NO: 114931 - DNA, 549 bp, Homo sapiens
tgattctcaggtttaaaattgcactgtgctcagttttgtctattttcttatcctacttcctacattcccttgctgttccctcccagaagtacttccttcataaatcacttatacctaaatgcttgactcatagtctgcttctgggagaacaagatccaagaagcatcrccttgattcttttagaggtgatggccacaccacctttgatttgatctatgcttccaattgcatttattggacatgaccttgacttgtttggcccccagtacttgtattaaattgaatcttttattgaagttagagagcacttttattttccaaccaagttctagatttttctgagctttctatattatcttccaatttttgttttcaaaacaaattttctgttttcctctgagtttgttctttttaaaaaattattaaaaaattattctttctcaaatgcagctagtaggagccagctgatgcgttcaacaagatcattagccatatttcatatttcccagtttattataggtgatacttttaacaaatgtttgaccatta

SEQ ID NO: 114932 - DNA, 578 bp, Homo sapiens
tagtatctacaattattcttgttattgtgagttatgtttgctctcgccaggtttggttcctctataaaatataagtaacatgaacaaagaatatatctatatttaattttttattttaaaaataaaaatgatatgaataggcttctgtggaattaaccatggtatcaaaaaagaagttatatagtgaaaacctacaacattcttattgctataggaaaaacatatatttggggactgaattctagcgacctacaacccatttggacaattttagcacaaaatagaaaatatacttcaaaatggcatatagtataacataaagataagtgtgaaatgctgtaatataytacagaacataactatcacagaagttcggaggaaggaaaaaatcaatgaaagctagaaaggagtatgatgcttcatagacgggatggggaaacctgaagcataattagagaaatgagaatggtttagattaaaagagggctgaaacaaccaatgtgtgcagcgaaatacactgcatcacctctgcatacttgccaaagtatcaagcttgccttaaaccaagacttacaatc

SEQ ID NO: 114933 - DNA, 598 bp, Homo sapiens
ccaactgcttatcagagagtggaaggaaagagaaaatctaagagggttcagacaaaacctcagaaatacagtacacatgctgtagctgtgccttttaaggaataacatcaaaagtttcatgctgaactcaataacatagcccagcctagtctctaagcaaataaggaaacaataagctctggagcaggggggagagaatatctacagtttatasaatataaaatctaaaatgtgcagttgagagagaaagagagagaagatgcaagaaacaggaagatgtgacccatatgccagtgaaaaatcaagcaacagaaactgtctctgagagcatccggatgttagacataccagacaaatattttagccatttatatatgttcaaagtacaaaaggaaaccatgcttcaagaaacaaatgagaggcagaggcagagcaagatgtcaagatagaaagctccaccagttgcctcccctcccccaacaaggacagcaagttaacaactatctacaccaaaaaaaaaacaccttcataagaaccaaaaataaggtaaacactcatagtacctggttttacttcatactgctgaaggaggtactga

SEQ ID NO: 114934 - DNA, 598 bp, Homo sapiens
ccaactgcttatcagagagtggaaggaaagagaaaatctaagagggttcagacaaaacctcagaaatacagtacacatgctgtagctgtgccttttaaggaataacatcaaaagtttcatgctgaactcaataacatagcccagcctagtctctaagcaaataaggaaacaataagctctggagcaggggggagagaatatctacagtttatacaatataaaatctaaaatgtgcagttgagagagaaagagagagaagatgcaagaaacaggaagatgtgacccatatgccagtgaaaaatcaagcaacagaaactgtctctgagagcatccggatgttagacataccagacaaatattttagccatttatatatgttcaaagtacaaaaggaaaccatgcttcaagaaacaaatgagaggcagaggcagagcaagatgkcaagatagaaagctccaccagttgcctcccctcccccaacaaggacagcaagttaacaactatctacaccaaaaaaaaaacaccttcataagaaccaaaaataaggtaaacactcatagtacctggttttacttcatactgctgaaggaggtactga

SEQ ID NO: 114935 - DNA, 544 bp, Homo sapiens
gatagccactaatataactaccaaccatcaaaataccatttaaaawttttttttatttttgtgggtattcattaaagcataaagaataggaccaaacataccagtcatggcaatacatgtgaatttaattaattaaaataaacattttaaatttggctgttgaactaagcctaactatatgttttatataaacacctgaaacaaaatgatttcaaaatgcaaaattaaagccatgcacaaaggtgtctgggaaaaaaaatcccaatagaaaacataacaactccactgtcagatagatagaaatgagggaaaaggcattaaaagtgataaagaagaaaacttaccaagcaagagacacgcaaatcacaagatatctattatatatatatatgtatatttatgcaccaaataatgctaagaccccctttatgaagacacagataccagatacatgccactgagagacataagtagaaacacactaataagcagcactcttggaacaagacagatcaagtggaaaaaataaacaagcagagataag

SEQ ID NO: 114936 - DNA, 586 bp, Homo sapiens
tgctatctttaaaaatcattcctccggggagaaaggaaatatgtatcctaatattatttggtaatttagtagaagaataagagtagatactaagtttcggttattccggctgcagtatggggaatgtattaayaagaaaagcttcaattctggaggtcaagagattattataataactcacataattaatgataggtgataaaatgttactggtgtctgttcagatggagaggaaaagatgtgtttgagattaaggcagaaaaatcaatattatttcaggatcaatgaaatacagtacaggggtggggggaggaaggaatctaagatgacttttaggatttttgtcacagttggctcggtgaatgaaaagaacatcactgaaggtacagaatgcaacaaaagggagagtttgtgaaggaagactgtaagttcagttttaaaaaagtgaataggaggagcctttggagtatcaaaatagaaaggtacaacaggtatttgtaaataaaatctgactttcaggagagatcaaaaccagagatacagggattttggaattatcagcatagctatgtttttaagtcatgtc

SEQ ID NO: 114937 - DNA, 586 bp, Homo sapiens
tgctttttgcttccatcccaaggctgaaagaatccttctcatatctaatggacaaaggtaggattctcccttcaaatttttgtccaagacattgtgtatccacacttaatctcccgactctggaacacaaaatccaggaaggctcattctctatttctgttttctgccctgccaaaagcttcccccaatgcagccaagtcactggatactgggagaacaatgagcataatatatcttmatatctcagaagtactacactgcatcgctacttaagcgagcaatctcttgctagcttctaattctccttgtgtaatttttcccaagtgtctttccctcctcttgatacatgttctggaaactaagaacaaatctgcaatcctactgaatctccttgcaaacagggcccctgcactgctgactgtaatataaacccttccagacactattttcttgcttttggttcattttgcagaactcacacttttaagagaaaatttaaaaacaagattgcaaactagtatggattgaattgtatcaccccaaaatggatgttgaaagcctaacccctagtactcaggatgtgacc

SEQ ID NO: 114938 - DNA, 624 bp, Homo sapiens
ggtcctgatgaactgtgagggactagctagatgggagaaagaaaacacaggttgtcaaggcacgggaggtaactcacataaatgtaccaagagcatggtgccttagacaaataaggcacccttgcaagtagtttcaaaaggctagaatagggtgcctgtgggtaggtagtaagaggatgtgctgggaaaagcagaaggaaagttgctaaaggaacctgcacgtgatggtaggtcatgacatattttcagctggggaattgcacaatcagattaatgttttggatagaccacacaatcatattaatgttttggatagaatagattctagatacccaagaatccatgtgtagagacactaggtggaagcccagtcctgtattccaaacaagatttagttggtaccaggaacagtgcggctggagatgaatagatggattagagagattactaggtactctgatgaggggtgagagaggagtgggaacttagcacaagatccagtgtagacggtgatgccttttaacacccacctgtcttttgatcgcatttttggrtatatcgagtttgacgtgagcatgcccccttggtgcagttgtgtttatagaccttctagcaccattgaga

SEQ ID NO: 114939 - DNA, 608 bp, Homo sapiens
attacttactttttttttttttaagacgaagtcttgctgtgtcaccaggctggagtacaatggcacaatctcaactcactgcaacctccacctcccaggttcaagcaattcccctgcctcagcctcccaagtagctgggattacaggcatgtgccaccacgcccagctaatttttcgtattttagtagagatggggtttcaccatgttggccaagatagtcttgatctcctgacctcgtgatccaccagcctctgtctcccaaagtgctgggattacaggtgtgagccactgcacctggcctatattattttcttgacattcttagtataagacggatcttgacgtaacacttgaattgcaagtgacatacatttttgaacaacaaacagscttgtgatttcaaagcctggcttttaaataataaacatcaaataactgagtgaaaattttatcattaaatgagagactaaatagaattgggaaaaaatgaggaaccatataagaagttgcctcctccaattgtatggaggagaggattggagatggaagaattgaggagtcatctgtgtggattatcaatgaatatactatgtatattagctcctct

SEQ ID NO: 114940 - DNA, 494 bp, Homo sapiens
cgctttcacacctaattccacaaatatggtttactttaatatcatacactcatggtattagaaaacattaataaattttacaaaataaaaaacagcttcaaaatttataaatcaaaaagcaaaagcatcttaatcctyttttctatttgcaactctggggaaatttcacgtcatattgtagaattacttatatgggatacacagagttaaagagaaatggcatcaaggcagatctaggaagtgaagaagtaaaatgtaccgtaaatttctttttactttgacctcccaaatgtatagtaccctaagccaatgaaaaggaatatcctaagattcctctcctaagagagatacagaagatgcctgaaaaaaaaaaaaaatacaaatgaagaggtatattcacatcaaagaagcaaaaaagaaagaaactacaaataaaacacacatgattatcaaaaataaaaaaatatacagagcttagggatcaaacactcaca

SEQ ID NO: 114941 - DNA, 496 bp, Homo sapiens
ctaatcccatctcccactggaaggcagggcaacatcctaatattgggtacttgttgccaagactgctgtccaagttgctgccaagatttataaatattttactaaccttccttgaaagcttgtcactcccctgccctttcactcgaaggatgcgcctgagtctcagggctataaatgttaggtgtattctaattgattatctgagaccaaaagctttcataagtgactcatggagtgaatttcttgaatgagttctaattttccagtgcacttaaaacagaattaaaagaataatatatattcaacaacatctaaaaataatttaaatagcaacacatattaatagccatggccattattatttatagcatgtcagccctatactatcattttaattgttaacttttttattattatactttargttctggggtacatgtgcagaacctgcaattttgttacataggtatacatgtgccatggtggtttactatgc

SEQ ID NO: 114942 - DNA, 608 bp, Homo sapiens
ctctgggtgccgcaagacatattttgtagctatttctggccacacatttacaaattagaaaatataaatgccaacctcagccctagagggccagcacaaatgaggtaaccattcatattctcccaatgctgatttctccattagcctgtgtgaaagaagaggcttggggctcatcagggaatgtgagctgcagcaagaaagccaaaagaagagggtaggaaaagacaaattcctcttgagatcaggaaggactacaattctctgcaaataagcagagcatctagaggaaatataaactctcactgttccaagagcacaaggttggaatagcaatgattagcctggaaataaattattttaaaagttatagaagtagatgtagagttactttttaaaaatagaaaaatgcaaaaagcaaaaataatattcaatcatgatgacaaaattagattttgargtatatgatcaagcaataaaatctctcccaatctatcctttccaatatggaagtttgagatcgtactacaaatattactaagctgtttcccttttctcacaaaactgtatatagtagatacttttccattttggtactttgttattagccc

SEQ ID NO: 114943 - DNA, 578 bp, Homo sapiens
atttggtgattttatgagactaaatatagatatcttccactgaagcctaactgtcttcactcagaggacgtatgtgttgcataattaaagaagatcagagctaattcagaaagccagctgagaaaaatgctgctgagcaattgttatttttgagattctataatcaaggtcatcctcaagggtatggaatgagaaacaaatgactctgggtggtactccattgctatcattccaattccatgtgcrgtgtgcctaggaaatcacatggacattgcagccagaaagacctggatttatatctctttactactattcatgggctgggttgctttgggcaagtttcttaatctatctggtctcagctctcttcatctataagatgttgatcgcaaaaacacagagagggcttaatgtgctaggtactactgtaagtgtttcacatataatagtcatttaatttttacaagaaccctaggaagatagcactcttattagccttattttacaaatgagaaaattgagtcacagagagattaaatttcttttttaagattgcacagctaataagtggtagagat

SEQ ID NO: 114944 - DNA, 533 bp, Homo sapiens
ggtctgaatgtccctcacatagtattccagaacactccttctgtggtctgaatgtttgttcctcacataggattcgagaacactcctgctgtggtctgaatgtttgtccrttacctaggatttgagaacattcatgctgggatgtaaatgcttgcccttaacataggatttcagaacactgctcctggggtctgaaagtttgtccctcacataggatcccagaactctcctgctgtggtctgaaagtttgtaccgcacataggattccagagcactgctgctgtggtcggaatgtttttctgtcacataggatttcagaacactgcggctgggttctgaatgtttctccctcacataggatttcagaacactgctacgagggtctgattgttggtccctcacataggattcctgaacactgctgctgggctctgaatgtttgtccctcacattggattgcagaacactgctgctatggtctgaacgtttgtccgtcacataggattccagaacgttcctgctgtggtctgaat

SEQ ID NO: 114945 - DNA, 533 bp, Homo sapiens
ggtctgaatgtccctcacatagtattccagaacactccttctgtggtctgaatgtttgttcctcacataggattcgagaacactcctgctgtggtctgaatgtttgtccgttacctaggatttgagaacattcatgctgggatgtaaatgcttgcccttaacataggatttcagaacactgctcctggggtctgaaagtttgtccctcacataggatcccagaactctcctgctgtggtctgaaagtttgtaccgcacataggattccagagcactgctgctgtggtcsgaatgtttttctgtcacataggatttcagaacactgcggctgggttctgaatgtttctccctcacataggatttcagaacactgctacgagggtctgattgttggtccctcacataggattcctgaacactgctgctgggctctgaatgtttgtccctcacattggattgcagaacactgctgctatggtctgaacgtttgtccgtcacataggattccagaacgttcctgctgtggtctgaat

SEQ ID NO: 114946 - DNA, 533 bp, Homo sapiens
ggtctgaatgtccctcacatagtattccagaacactccttctgtggtctgaatgtttgttcctcacataggattcgagaacactcctgctgtggtctgaatgtttgtccgttacctaggatttgagaacattcatgctgggatgtaaatgcttgcccttaacataggatttcagaacactgctcctggggtctgaaagtttgtccctcacataggatcccagaactctcctgctgtggtctgaaagtttgtaccgcacataggattccagagcactgctgctgtggtcggratgtttttctgtcacataggatttcagaacactgcggctgggttctgaatgtttctccctcacataggatttcagaacactgctacgagggtctgattgttggtccctcacataggattcctgaacactgctgctgggctctgaatgtttgtccctcacattggattgcagaacactgctgctatggtctgaacgtttgtccgtcacataggattccagaacgttcctgctgtggtctgaat

SEQ ID NO: 114947 - DNA, 450 bp, Homo sapiens
gtgcgactgggcagtgtggcaggagagatgctctgggacttctgaggggygatcatgagagtccttacagcttctgcctgggcctcttggacacacaccctgggagaagccagacaaacctgactacctgacgctgccagactgggaggaagtccgtgctggccacgaagagagggctgggtgcctgctccatgtccccagccactagagtccttccagatgagaccaaggacatcatgaagcaaccaaccaacaccgccctgtccagtgtcttgacccagaaaattgtgacatgtaaaaagaataaattcctggtttaagccagtaaggttactggtacattgttacatctcagataattaaaaccttgaaaatctcatgagagatcacaagtagaaccttgatctgaaaaggcatgtagcgatttatattgagtattaggttaaaaat

SEQ ID NO: 114948 - DNA, 531 bp, Homo sapiens
caaccagtttttcattgtttatgttccaactgatcaggccccactaataaggccaccactgactaggtccccccactgaccaggcttccaatgattaggtcaccaggtccccactgatgaggcctttactgaggaggccgccactaaccaggcccctgctgatcaggtcccacatgactaggtcctgatgaccaggtcatctctgaccatggtccactgaccaggcccatgagcaacggggctcaaagtctcattacaatgtccccctcagctcatagaccctccctccctgcatgtgtrcccagaggtcaggctctggggttttttttgagacatggcctttcctccaagacacagggagagacagttggcctcaggctccaggttcccagctccacactcaccccaaaggccctctgggcccgtctcaaaggagaaagtgaggtggcctgacactgcctggacacaccatctaccctattcctgagtgtcagagtgtgaggaagggagggacatttggcagatgagaca

SEQ ID NO: 114949 - DNA, 615 bp, Homo sapiens
tcatttaaaataccctataaattatcatcatatatatcatacaaaaatatcctacttcagtaaatattgtaatgttatacattttatgagaaacaactaaaatgtgtaaatagcccagtaataaagttttataatcttttaaatcatacaatttttctttaagacattatggttaaatattctcttcgttagatgtggcttacccgtggattctagagaagaaagtagatgggagcaagtgtccaacacagcagcagctggaaagaaaaataaagaattatgttctttacytaaaacacttcagttgactaagtgtgcgtttaaaaactaaagagttgataactttatcagagttaataagaatgagaaatatgtatgtgcatttacaatacaaaattactatttaataatttacacatggcattaattctaattgtgtttaaatatcagagtttctcattcttcattcatgtaatcaacagccacatgctaaggtactagaaccagcactggaattacaagatgaagatggcatggtccacctcccaacagtcatatgctataacctaaaaaaacagacaggcaggcaatgtccatatagagtcaaagatacca

SEQ ID NO: 114950 - DNA, 615 bp, Homo sapiens
tcatttaaaataccctataaattatcatcatatatatcatacaaaaatatcctacttcagtaaatattgtaatgttatacattttatgagaaacaactaaaatgtgtaaatagcccagtaataaagttttataatcttttaaatcatacaatttttctttaagacattatggttaaatattctcttcgttagatgtggcttacccgtggattctagagaagaaagtagatgggagcaagtgtccaacacagcagcagctggaaagaaaaataaagaattatgttctttacctaaaacacttcagttgactaagtgtgcgtttaaaaactaaagagttgataactttatcagagttaataagaatgagaaatatgtatgtgcatttacaatacaaaattactatttaataatttacacatggcattaattctaattgtgtttaaatatcagagtttytcattcttcattcatgtaatcaacagccacatgctaaggtactagaaccagcactggaattacaagatgaagatggcatggtccacctcccaacagtcatatgctataacctaaaaaaacagacaggcaggcaatgtccatatagagtcaaagatacca

SEQ ID NO: 114951 - DNA, 521 bp, Homo sapiens
tagacacaaggtctactgtgggtggagggtgggggkagagtgaggatcaaaaaactccctattagatactacgttcactacctggatgactacgtaatctgtacaccaaatcccattgacacacattttacccatataataaacctgcacatgtacccgctgaacctaaaataaatgttggaaggaaataaagttacaaccaactcttgtactattgtgaggaaacaatcatatgtgttgacaaaaaatcagctactaatagatttataatagtatatatgtagcagaaaaatatcagatataacttatatacccaaaagtatgacttaaaaacagcatgacaatctttatgatgggatattgtgcaactactagaagcatattttcagagattatttattaacatatgataatgactacattgagtggtttttagaagcatgaattgaaaccatgtataagcatgactttattgaacttatatataacattacacacacatttacataattataaaataa

SEQ ID NO: 114952 - DNA, 521 bp, Homo sapiens
tagacacaaggtctactgtgggtggagggtggggggagagtgaggatcaaaaaactccctattagatactacgttcactacctggatgactacgtaatctgtacaccaaatcccattgacacacattttacccatataataaacctgcacatgtacccgctgaacctaaaataaatgttggaaggaaataaagttacaaccaactcttgtactattgtgaggaaacaatcatatgtgttgacaaaaaatcagctactaatagatttataatagtatatatgtagcagaaaaatatcagatataacttatatacccaaaagtatgacttaaaaacagcatgacaatctttatgatgggatattgtgcaactactagaagcayattttcagagattatttattaacatatgataatgactacattgagtggtttttagaagcatgaattgaaaccatgtataagcatgactttattgaacttatatataacattacacacacatttacataattataaaataa

SEQ ID NO: 114953 - DNA, 606 bp, Homo sapiens
agtatgacttaaaaacagcatgacaatctttatgatgggatattgtgcaactactagaagcatattttcagagattatttattaacatatgataatgactacattgagtggtttttagaagcatgaattgaaaccatgtataagcatgactttattgaacttatatataacattacacacacatttacataattataaaataagtatgctcatgttcataatatgtatttatttatattcatatgtaaggccaataggaagtaatctctgtatctgagttattatttcataaataatttatgcttgttctgtgaaaataaaaacactgctatggatcttccaagtatcctgaaaggataccgtttataattaaacaataacaattttagaaataattattttaaataaggctatgataaatctggtttcattgcacactttaactttggaacatttcatgaagcktcccttgatcacgactctcatattcaggagttttttgagatcaaaatgggacaatcagtatgaatctattttttagacatgcaaatggataactttaaatagcagtagcgatataatcagagtgcacagttgctctgggac

SEQ ID NO: 114954 - DNA, 576 bp, Homo sapiens
atcctgaaaggataccgtttataattaaacaataacaattttagaaataattattttaaataaggctatgataaatctggtttcattgcacactttaactttggaacatttcatgaagcttcccttgatcacgactctcatattcaggagttttttgagatcaaaatgggacaatcagtatgaatctattttttagacatgcaaatggataactttaaatagcagtagcgatataatcagagtgcacagttgytctgggacaaaacttggaaatgagcatatttttagattcttaatgttttacacactttagcattccacagcaccattacatactcatttttctactagaataccttggtaaaaattcacagtagagatcaggcttgtccttcatacattaactaatcaagtaggaaagtgcaaatgagaacacagtgccaaacataggcaccacatggaaacaagcatggaactgccaggaagccatctttgtagctttgtagcccaattatatttttcctaatgtattgcacacaaaacttgggggaaaaaaaaagaggcagagagaaaaca

SEQ ID NO: 114955 - DNA, 576 bp, Homo sapiens
atcctgaaaggataccgtttataattaaacaataacaattttagaaataattattttaaataaggctatgataaatctggtttcattgcacactttaactttggaacatttcatgaagcttcccttgatcacgactctcatattcaggagttttttgagatcaaaatgggacaatcagtatgaatctattttttagacatgcaaatggataactttaaatagcagtagcgatataatcagagtgcacagttgctctgggacaaaacttggaaatgagcatatttttagattcttaatgttttacacactttagcattccacagcaccattacatactcatttttctactagaataccttggtaaaaaytcacagtagagatcaggcttgtccttcatacattaactaatcaagtaggaaagtgcaaatgagaacacagtgccaaacataggcaccacatggaaacaagcatggaactgccaggaagccatctttgtagctttgtagcccaattatatttttcctaatgtattgcacacaaaacttgggggaaaaaaaaagaggcagagagaaaaca

SEQ ID NO: 114956 - DNA, 463 bp, Homo sapiens
caacattcctcagtctgccttctccgccaattaaaataccactttacatctagtcatcactttgcctttgaagccgctgcctgatatcgacactttgtagatgtagtatgactattcttgtatgtttctatttattgatgaggatcttactcttttagtrtaaatagtaccatgatttccaaagttttgatagcatccgaaaaacagtaattcacctaacattaaccctagtaatcaacaccctattagccctgttactaataattattacattttggctcccacaacttaatatatatatgtagagagagagaaaaatatatatatatgtataaaataaatatatatagaaaaatctagcccttatgaatgcagatttgaccctctatcctctgcccactttcccttctccataaaattctttctagtagccatcacatttcccctatttgagttagaactc

SEQ ID NO: 114957 - DNA, 599 bp, Homo sapiens
cgttgcctaaccattggtgaaggatctgcctcccacacccacctcctactgtttccacgcagtagcctcctgcagacgaagagttattgggaaacctctactagggcagtgcagaaggaaaatatggacttggagcccccatgctaccaccctccagaccccagatacatagacccaccaacagcttgcaccctccgtgtggaaaagctacaggcactcaacactagtccagtctatgagagcagccatgggggctcagacctgcaaagccacaggtgcamttccccagtagggattttccatgaggctctgcctctgcagcaggctactcccccttcctactacccaccaccttcccaccaccatacagccagtctactccctcccaccctacccacccctttttcccttccacatccacccccacccatccatgattaaatcactccctcccactccctctagtactctaatccctccaagcccttccaatctttgtttgctacccactattgagcctgcttctacttttttagctatctgtatagcaggttggctaggtagcaataacaaaaatcccatttaaggggaaacattca

SEQ ID NO: 114958 - DNA, 599 bp, Homo sapiens
cgttgcctaaccattggtgaaggatctgcctcccacacccacctcctactgtttccacgcagtagcctcctgcagacgaagagttattgggaaacctctactagggcagtgcagaaggaaaatatggacttggagcccccatgctaccaccctccagaccccagatacatagacccaccaacagcttgcaccctccgtgtggaaaagctacaggcactcaacactagtccagtctatgagagcagccatgggggctcagacctgcaaagccacaggtgcaattccccagtaggsattttccatgaggctctgcctctgcagcaggctactcccccttcctactacccaccaccttcccaccaccatacagccagtctactccctcccaccctacccacccctttttcccttccacatccacccccacccatccatgattaaatcactccctcccactccctctagtactctaatccctccaagcccttccaatctttgtttgctacccactattgagcctgcttctacttttttagctatctgtatagcaggttggctaggtagcaataacaaaaatcccatttaaggggaaacattca

SEQ ID NO: 114959 - DNA, 599 bp, Homo sapiens
cgttgcctaaccattggtgaaggatctgcctcccacacccacctcctactgtttccacgcagtagcctcctgcagacgaagagttattgggaaacctctactagggcagtgcagaaggaaaatatggacttggagcccccatgctaccaccctccagaccccagatacatagacccaccaacagcttgcaccctccgtgtggaaaagctacaggcactcaacactagtccagtctatgagagcagccatgggggctcagacctgcaaagccacaggtgcaattccccagtagggattttccatgaggctctgcctctgcagcaggctactcccccttcctactacccaccaccttcccaccaccatacagccagtctactccctcccaccctacccacccctttttcccttccacatmcacccccacccatccatgattaaatcactccctcccactccctctagtactctaatccctccaagcccttccaatctttgtttgctacccactattgagcctgcttctacttttttagctatctgtatagcaggttggctaggtagcaataacaaaaatcccatttaaggggaaacattca

SEQ ID NO: 114960 - DNA, 595 bp, Homo sapiens
ggcagttacttaacctctctgagcctcagtttctgagtctataaaatgggaataaaagtggtactttatatggttgttcttacatacgatgctctgaggatgtagtttgtgagaaggcagtgggaatgcagtaagtttaatcaaggtttgttgagtgagggaaattcaggaaacttctgtcagtcactttagccaatttgaagctctccyttttttgtgcaaagacaaactacagcttactcaactggtactaatttatctaggttcagcatttgattttattgggccttggattttcatctattttgtgtctatctcattgctccaaactagtacaagctcctgaattgccagggccacttcttattcctcctgggatgatcaggttgggcgggccagggtgctgctttaaaagtcagattttgcttctttagtcttccctattgttaatgaacagtttttggatgtcactttgtgcctagcttgttctaagtgtttatgttagttaagggttttctgtgtctatagaaggaaaaattcaaactgagttaagcccaaactagactttgttggctcacatagctgaaaggccccg

SEQ ID NO: 114961 - DNA, 501 bp, Homo sapiens
aacagtttaaagtaacggaaaatgcagcagaaagtctaaaaagcataataaatttctcataktgaataaagaaagaaaattttcaccatttaaaatacgtattagactaatgtaatatttattttaaaagtttcgaataactagtggtaacattttaaacgtgacatctactttccaaatcacaaaagaaaaacaaagaataaagtgaagaaaatgaggtctctatttccaaaatcaagaaaacagcaataatcaaggaaataattcttcaaaagtgtagtattgaaagaagagaggactaagacccaatattctcacgcatttcttaaacacaaagtgatctttaagtcatagcaactacaacttatttagaaaacacaatgaaactggaaactaataataagaatctcagggaaaatttctttctatacatttacaaatggtattataaagtattgtgtagccaaagaggaaattaaaagtgtaagtatagaaaaaata

SEQ ID NO: 114962 - DNA, 548 bp, Homo sapiens
tcactggttcttgcgaggtccagagcggaacagaaatacgaattatcttcatcgtttatccccagacagcaaaagggctggaatggagtagatatccctccagcccatggcaatcctcattcttctgaggtcatggttcttacatcaactcctctttcagcgattgtggatgaagtagggcttggtgttctgtgagtctcctcccatatggttatgtgactctactgtgatttttatcctgaatatgtttatgttctatctcttgaaaaagagtayagtatccttagcggtaaagctatagttggccttcattgatgaccactgaacctaccatggtgtgtaaaaattgtgtgcgtgacacaggtcctccaaggaattgtgtattaattctcacattacagttgatgtagacttttgcacacatattaataaaaaaagaagagaactaaagaactagagaaactgggtgagcaaatatctcactgtggaggcaggaacaaaaattatttttgcaaatcagaagataaatagaatatatttttcatagt

SEQ ID NO: 114963 - DNA, 548 bp, Homo sapiens
tcactggttcttgcgaggtccagagcggaacagaaatacgaattatcttcatcgtttatccccagacagcaaaagggctggaatggagtagatatccctccagcccatggcaatcctcattcttctgaggtcatggttcttacatcaactcctctttcagcgattgtggatgaagtagggcttggtgttctgtgagtctcctcccatatggttatgtgactctactgtgatttttatcctgaatatgtttatgttctatctcttgaaaaagagtacagtatccttagcggtaaagctatagttggccttcattgatgaccactgaacctaccatggtgtgtaaaaattgtgtgcgtgacacaggtcctccaaggaattgtgtattaattctcacattacagttgatgtagacttttgcacacatattaataaaaaragaagagaactaaagaactagagaaactgggtgagcaaatatctcactgtggaggcaggaacaaaaattatttttgcaaatcagaagataaatagaatatatttttcatagt

SEQ ID NO: 114964 - DNA, 631 bp, Homo sapiens
tcactttattgccaaatgcattatatttatcaacctcaagaagtaaataactgctgattattccgatggagaatttagcagtcaaagaatattcctctgataatcatttctcactttcctcccttttcaaattgaaattatcttggatttgttgacccattttttaaatttcacaattatgaatatcaatatgcatcatgtctttttgagttatgattatttattttgttttgaaaagtatttatgactataacaattgttctacaattacatgtctgtgtgatcccattgcttgccataaacctttctaccccttgtttcattcctgcttcttttaaaattcaccataattttctrtataattctcaaagttacttttttacaaggaaaacggtgggagataagtttatttaattgcttcctcctgtaatcttatcaatggaacaactttgccaggcatccagttactggatagcagtgtttcctttctctggccactttttgttcaccagctctgagtcccagggatgcggtgccctcctctcccgggatttaatgcatggagggtagccctgccttcccttcacttagtaggtaatgttttagtagggttggtctttgtgattgttgt

SEQ ID NO: 114965 - DNA, 631 bp, Homo sapiens
tcactttattgccaaatgcattatatttatcaacctcaagaagtaaataactgctgattattccgatggagaatttagcagtcaaagaatattcctctgataatcatttctcactttcctcccttttcaaattgaaattatcttggatttgttgacccattttttaaatttcacaattatgaatatcaatatgcatcatgtctttttgagttatgattatttattttgttttgaaaagtatttatgactataacaattgttctacaattacatgtctgtgtgatcccattgcttgccataaacctttctaccccttgtttcattcctgcttcttttaaaattcaccataattttctatataattctcaaagttacttttttacaaggaaaacggtgggagataagtttatttaattscttcctcctgtaatcttatcaatggaacaactttgccaggcatccagttactggatagcagtgtttcctttctctggccactttttgttcaccagctctgagtcccagggatgcggtgccctcctctcccgggatttaatgcatggagggtagccctgccttcccttcacttagtaggtaatgttttagtagggttggtctttgtgattgttgt

SEQ ID NO: 114966 - DNA, 631 bp, Homo sapiens
tcactttattgccaaatgcattatatttatcaacctcaagaagtaaataactgctgattattccgatggagaatttagcagtcaaagaatattcctctgataatcatttctcactttcctcccttttcaaattgaaattatcttggatttgttgacccattttttaaatttcacaattatgaatatcaatatgcatcatgtctttttgagttatgattatttattttgttttgaaaagtatttatgactataacaattgttctacaattacatgtctgtgtgatcccattgcttgccataaacctttctaccccttgtttcattcctgcttcttttaaaattcaccataattttctatataattctcaaagttacttttttacaaggaaaacggtgggagataagtttatttaattgcttcctcctgtaatcttatcaatggaacaactttgccaggcatccagttactggatagcagtgtttcctttctctggccactttttgttcaccagctctgagtcccagggatgcggtgccctcctctcccgggatttaatgcatggagggtagccctgccttcccttcayttagtaggtaatgttttagtagggttggtctttgtgattgttgt

SEQ ID NO: 114967 - DNA, 546 bp, Homo sapiens
caaatctgaaaatcagattacaccctccccaaggaggagggaatgttgttgttacttagtgttttttctgaaagaattctacaaaatctgtattctttattatatgtggcaactgaagtctctgcttgattagtttgttagcttaatggtcagttaaaggattggatagatattttcttaaacacttgaaataagtgttttcctatcttggggaagggccttgtgtatatattggggcataccttcaaccctcagcaaggccttcttacttgtgcagagcctccaagtcagcccacagtgacagctcargtctttctcaggtctcttctgactgtgtgcacagacatgggcatgtgcacaactctgtgcatcatgttaccttctggattccaagaaatatgttggagcttttcaatacctttgtgggtatctacttccccaggctttacttttaagcattttggttagcctactgtttgccccaactgttgtccattgcctcatacagccagaaagttattcaattgcctctaattgtttttggaa

SEQ ID NO: 114968 - DNA, 581 bp, Homo sapiens
ttgcacccactgtctaaccagtctcagtggatgaacygggtacctcagttagaaatggagaaatcacccaccttctgtgttgatcttactggaagctgtagactggacctgttcctatttggccatcttcaagtttcttttttttttaatccattctagcactggtggcataatcagtgattgacattgaaacgtcaacctggaaatataatttttaatcattctcaagaacatttatgagataactattttgggctaggcagtttggaagaacaaatcctgtgctcaaaatcattcaaaggctggtaattttctattaaaggagggagggtgcttgacgtaatagaaaaataaagggatgtgtagtcagacaaacttggatttgaatttcagttctccattttctaactaagttactgtctaggaaactctcgtggaaagtaacctaacttacctgagactttgcttcccttcttgcaaaataagataatcatgggtgtgtgacagtcactgccagttgccttgataatacttattcctctccttctccctattttgttggggtggcaatgtacccagct

SEQ ID NO: 114969 - DNA, 603 bp, Homo sapiens
ctggcttcactaactttgaccaaagtcattaggatggctgaatttgtcattttaatttttaytctgaaaatttaaatctttccatgtccctatgatagtgaagtgaaatcttgcctcatctcttgagtagcttatatttaaacatatgtttcaaggtatgatgtgttggccttgctgagtttgcctagagtcaactattcttcttttatatttttgttattctatcagtcctaattcttattcatccgtttccattgctccattgttcctattgactattaggaatgatcacattgcattattctgatctatgtctcacaaacagagattataaatattttgaagatatagaccattccttttcaactttatatatgcaatatgtggcttatactaggcattcagttatatttttgttgaaaaaataaaactgtggccaggtagtatttgttacttaagtcatggactctacagagaagtatggaaaagaatagatattacaaatgaatattattacatctttaaatataagaaacatacaaatataaaactcacagctctggtggatccttgaaaaacagcttgtcctgtgctgctttcaag

SEQ ID NO: 114970 - DNA, 583 bp, Homo sapiens
tatatgtcgattctttcttgtaggaacaaacatttatattttctaacaaattcatatacacatttaaatgcttttattttcctgtttagaaggtacctaccacaaacagatgatatttgagactctgatctctttcatcacaaggttttccyttggtgatctcatctgcttggtcaaatcacagagttgaattctagagctctaaagtttatgtcgtactcttgtcacaaggtactagtttaaaagaaacaaaaacgctatttacagttaaagtgatgtatatttgaatccatattacagcaagattgggtagacatttactaatcttattttccttttctccaaaaagaaaggaaaaataaaactcccagtgttttctgcagttgagttaattacaggtacctgggttctggccagtgatatatagaaggaagcaatttaccattttcatgcctatttcataaaattcaatgcatggtcatccataaaggcaacaatggagactatgcaatgaaaatggcagagcaacttcaactgcatcagacagggaagtaaatcttaatttactaagccactgagagtc

SEQ ID NO: 114971 - DNA, 578 bp, Homo sapiens
tctcaccctctccagccaaagaaaacctcagagcaattagttgttatgaatgtatattaattcttaaacaataagtaagccatattccttggtctatctaagaacaatccgctatcgctaactagggttagcaaggaatgtaagggttatttatttattagaatattaaataatgtaattatttcaaaaggttaataatgataaatcattgagaaagattttgaaagcccatgataaaaattaagcctctgtttgtgtatagctctgtgagctaggacttgaagaataattatttaacaagataacyaatgcccacctcaaatcaattgccaatctcatctttaatggtgaaaaaccatgggaaataagaatgtctttcattaccatgaacatttccatttcaaaccaatacaataagaaacaaagcagaaacaagaaaccaaccaataataatatataataaaacacaagattattattattttcatataatatgttaatctaggaaaacaaaaaatcatcccaccaaattttccaatagttcagataattggctagtatagaataaatgtgggaaa

SEQ ID NO: 114972 - DNA, 608 bp, Homo sapiens
caaaattactccttgatccatgagctgcagaaggaatgttgtcctagcaggcatagaaacaacatgactccttgtacacctccatcagagctcttgggtgaccaggtgcattgtctgtgagcagtaatattttgagaggaaccttttttttcctgagcagtaggtttcagtgtgcttaaaatatttagtawaccattctgtaaacagatgtgctgtcaaccaggcttcattattctatttatagatgacaggcagagaatacttgtaataattcttttgtgtgtgtgtgtgtgtgtgtgtgtgtgtgtgtgtgtgtatgttatcaagctgaatctaagattcccaccagaccattataggctttttatcattgttatcgtactttaagttctgggatacagaacctgcaggtttttacataggaatacacatgccatggaggtttgctgcacccatcaacccatcatctacattaggtatttcttctaatgctatccctcccctagcctccaacaccccccgacaggcccccgtgggtgatgttcacctccctgtgtccatgtgttctcatcgctcaactcccacttatgagtgagaacatacggtgt

SEQ ID NO: 114973 - DNA, 584 bp, Homo sapiens
atataatacaataatgttcctcacagcaaacctcctgtgtgtcaaaaagcgtcaaagaattagtggagaccaagatggcagggttttatttcacagcacagggaatatagacagaataacaaaggagagaccaataaaaagaaaggaagggcaaataaactaggttacatccatgtaacttcccaactttgccaagccaggaagaataggygagctttccatcggtgagtttccaaatctgaaatatccccaaagttacactcttgttccagtgcctctcgggaagatgttaggtagagctgagccgtgactactgagggagcgtggtgactctctgttgtaacctactcagtctccccagaaggtttagcagcagcctcaagatgcgcaacatgtacatgatcactcccaccatctaagtcatcaatgttgcccccaggtgacatctcagagtcattccctaaatcacaaagctaaccggatgaatcacagatttgtaactgcaatgaacaaggactcttcagtacctctgaagatcaaatacctttgaggggatttatgtacatgattttcttatcctgcac

SEQ ID NO: 114974 - DNA, 462 bp, Homo sapiens
cttatattttccccataaatggcaagtcattgagtygcagtaaataaatcatatggaatctagtttcataagcaaaactgattttaactcagttcttgaactatgcctgaaaataaagtgtactatttaaagagaacttgtgaaattccaggaatgttacatattagtaaacaattcagaactacatgtgtaaagaggcaattaacttgctgaataaatgaaaaacagattttccttcagttacttttctctacaaagtaactctgggtgatcatacccaaattcagaaaaacactagcagttctgtcttaaatgtactgttctaagtggggtcccactctttaatccttgcctcttacataccctccaacatctggccaatgagcctggactgcacaggcaccgtgatgaagaaaagcaggtggggactaacagaatgatggggctgttgcagagcaacct

SEQ ID NO: 114975 - DNA, 630 bp, Homo sapiens
atggggtgtgtgaccctgtgcrcactgaggtccatcccctctgttccaggttgtcacagatgctctgacatttgcagggaaggagtggacctgccacatgatccaaagcatgtgcaggagatttgagagatcaggacatccgccatccatcagcctgtggaaggagagtgcaataacattccccagggaaaaatgcatggcaaacaccaggaaagccactttcttgcctcccagaggtgacaaggtttcccctcttgattgatgcagggggcagcagcatcttggagagaagcacaggcaagggagaggagagaagctcggaccaggtctatgtgggatccaatgatttctaagtcaagatgttcagctccgggaaatttacttaactttctgaacctaagcgtcttcctttgaataatggagacacttacaatacctactgcatcaaggttgtcatgagatttgatgagttaataattcatctcaccaatatttgttggacacctaatatgtgttggttgctcttctaggtgcctgagctacataaatgatcaaaatagagacacctgccttcctggagctttcatcacagtgaacacaggcagagctgctaccacaatgtaggtgccc

SEQ ID NO: 114976 - DNA, 630 bp, Homo sapiens
atggggtgtgtgaccctgtgcgcactgaggtccatcccctctgttccaggttgtcacagatgctctgacatttgcagggaaggagtggacctgccacatgatccaaagcatgtgcaggagatttgagagatcaggacatccgccatccatcagcctgtggaaggagagtgcaataacattccccagggaaaaatgcatggcaaacaccaggaaagccactttcttgcctcccagaggkgacaaggtttcccctcttgattgatgcagggggcagcagcatcttggagagaagcacaggcaagggagaggagagaagctcggaccaggtctatgtgggatccaatgatttctaagtcaagatgttcagctccgggaaatttacttaactttctgaacctaagcgtcttcctttgaataatggagacacttacaatacctactgcatcaaggttgtcatgagatttgatgagttaataattcatctcaccaatatttgttggacacctaatatgtgttggttgctcttctaggtgcctgagctacataaatgatcaaaatagagacacctgccttcctggagctttcatcacagtgaacacaggcagagctgctaccacaatgtaggtgccc

SEQ ID NO: 114977 - DNA, 630 bp, Homo sapiens
atggggtgtgtgaccctgtgcgcactgaggtccatcccctctgttccaggttgtcacagatgctctgacatttgcagggaaggagtggacctgccacatgatccaaagcatgtgcaggagatttgagagatcaggacatccgccatccatcagcctgtggaaggagagtgcaataacattccccagggaaaaatgcatggcaaacaccaggaaagccactttcttgcctcccagaggtgacaaggtttcccctcttgattgatgcagggggcagcagcatcttggagagaagcacaggcaagggagaggagagaagctcggaccaggtctatgtgggatccaatgatttctaagtcaagatgttcagctccgggmaatttacttaactttctgaacctaagcgtcttcctttgaataatggagacacttacaatacctactgcatcaaggttgtcatgagatttgatgagttaataattcatctcaccaatatttgttggacacctaatatgtgttggttgctcttctaggtgcctgagctacataaatgatcaaaatagagacacctgccttcctggagctttcatcacagtgaacacaggcagagctgctaccacaatgtaggtgccc

SEQ ID NO: 114978 - DNA, 609 bp, Homo sapiens
gtctctacatagggttcatgtctagtccatggggctaaggmaagttggggagaatttagaaacagacactattctatggcctccagttttctctctcttctatatgagcgcaatacaaaaatcttgttctaaccaaaaatagactgataaaaattacctcttgtaaattaactacctctctaatcttccctgctaattcattcacctcttttattaccaatggtctgaattagctattattattcctaagttacatgtaaggaaactgaggctcagagatattggggaacttgcttaaggtcacacagcttgtaagtgattagatatgatttgaatccaggtctgtgtgactccaaagccattgctgtttttgttatacgacactgcctattaagttacaagcactagtacctcatgataaaaaatgggctacttgtaatatgaacatttttaatagagaagttccaagaaacaggacatcaccagggccatgatgtcattgtggtttacacttcccatgaactctttccaataaacatttcatttaaatttagtaaagcagttaataaagccataaaggttaattactagttaagggaaaaatatgac

SEQ ID NO: 114979 - DNA, 609 bp, Homo sapiens
gtctctacatagggttcatgtctagtccatggggctaaggaaagttggggagaatttagaaacagacactattctatggcctccagttttctctctcttctatatgagcgcaatacaaaaatcttgttctaaccaaaaatagactgataaaaattacctcttgtaaattaactacctctctaatcttccctrctaattcattcacctcttttattaccaatggtctgaattagctattattattcctaagttacatgtaaggaaactgaggctcagagatattggggaacttgcttaaggtcacacagcttgtaagtgattagatatgatttgaatccaggtctgtgtgactccaaagccattgctgtttttgttatacgacactgcctattaagttacaagcactagtacctcatgataaaaaatgggctacttgtaatatgaacatttttaatagagaagttccaagaaacaggacatcaccagggccatgatgtcattgtggtttacacttcccatgaactctttccaataaacatttcatttaaatttagtaaagcagttaataaagccataaaggttaattactagttaagggaaaaatatgac

SEQ ID NO: 114980 - DNA, 609 bp, Homo sapiens
gtctctacatagggttcatgtctagtccatggggctaaggaaagttggggagaatttagaaacagacactattctatggcctccagttttctctctcttctatatgagcgcaatacaaaaatcttgttctaaccaaaaatagactgataaaaattacctcttgtaaattaactacctctctaatcttccctgctaattcattcacctcttttattaccaatggtctgaattagctattattattcctaagttacatgtaaggaaactgaggctcagagatattggggaacttgcttaaggtcacacagcttgtaagtgattagatatgatttgaatccaggtctgtgtgactccaaagccattgctgtttttgttatacgacactgcctattaagttacaagcactagtacctcrtgataaaaaatgggctacttgtaatatgaacatttttaatagagaagttccaagaaacaggacatcaccagggccatgatgtcattgtggtttacacttcccatgaactctttccaataaacatttcatttaaatttagtaaagcagttaataaagccataaaggttaattactagttaagggaaaaatatgac

SEQ ID NO: 114981 - DNA, 609 bp, Homo sapiens
gtctctacatagggttcatgtctagtccatggggctaaggaaagttggggagaatttagaaacagacactattctatggcctccagttttctctctcttctatatgagcgcaatacaaaaatcttgttctaaccaaaaatagactgataaaaattacctcttgtaaattaactacctctctaatcttccctgctaattcattcacctcttttattaccaatggtctgaattagctattattattcctaagttacatgtaaggaaactgaggctcagagatattggggaacttgcttaaggtcacacagcttgtaagtgattagatatgatttgaatccaggtctgtgtgactccaaagccattgctgtttttgttatacgacactgcctattaagttacaagcactagtacctcatgataaaaaatgggctacttgtaatatgaacatttttaatagagaagttccaagaaacaggacatcaccagggccaygatgtcattgtggtttacacttcccatgaactctttccaataaacatttcatttaaatttagtaaagcagttaataaagccataaaggttaattactagttaagggaaaaatatgac

SEQ ID NO: 114982 - DNA, 602 bp, Homo sapiens
gtctggctgtgtccccacccaaatctcatcttgaactgtagctgccataattcccacctgttttgagagggactcagtgggaggtaattgaatcatggggttggatcattcccatgctgttcttgtggctgtgaataagtctcacaagatctgattgttttataaaggggagttccccttcacatgctgtcttttgcctgctgccatgtaagatgtgactttgctcctcattcaccttcctccatgattgtgaggcctccctagccatgtggaactgtgagtcaattaaacctctttcctttataaattacccagtcttttttaggagcataagaacagactaatacacttcctaaacaattttgcagctctctttcaatctttgtctgtgtatattccattgtttatatcatgctaattggagtgtgtttaggaaccattttgtaaagaaaaactaaaaaacatgagcttatgacacaatctctgcacttaaaaccctgaaaatatacatacttayttccaaggaaaggaaacaggtaaaccacttgatttactgagctgctgggagtgtgatgcttttcttctcttttgatttgacttaa

SEQ ID NO: 114983 - DNA, 595 bp, Homo sapiens
aaatctgccctgtggagatgagctattgtgaggcacagccaccagagcgtgttctggctcatgtgccatcttggtatagtcacccagacttgagcccagacgcacatgcacctaaaaatagatacaattatatgcgatgtgtgtgactcttgatgagcacatgaaaaatgttgcctctccacctcaagtacactgctcctttacctggaggtctgcctattcttgcctctccctgccttttctgattattcaaattcattggtcaagctacagtcaccgtgccctcttgttgagarctctatttcttctcccactggaagggagattctcttcctttgatctctcctggtgatatttttttctattgggagtgtttcatattttgatttatgttgtgtgtattaaccatgtcttctataaacaccctatagatggctccaaatataccaattctctctaccctagcagacatgagggatacactaaaaggcaaagccctcaggagagagttgagtgaatagatcactagcactggggttacaaacaattcacgaaagaggaaatacaaaagactaagaaagatttggaaagctat

SEQ ID NO: 114984 - DNA, 595 bp, Homo sapiens
aaatctgccctgtggagatgagctattgtgaggcacagccaccagagcgtgttctggctcatgtgccatcttggtatagtcacccagacttgagcccagacgcacatgcacctaaaaatagatacaattatatgcgatgtgtgtgactcttgatgagcacatgaaaaatgttgcctctccacctcaagtacactgctcctttacctggaggtctgcctattcttgcctctccctgccttttctgattattcaaattcattggtcaagctacagtcaccgtgccctcttgttgagaactctatttcttctcccactggaagggagattctcttcctttgatctctcctggtgatattttttyctattgggagtgtttcatattttgatttatgttgtgtgtattaaccatgtcttctataaacaccctatagatggctccaaatataccaattctctctaccctagcagacatgagggatacactaaaaggcaaagccctcaggagagagttgagtgaatagatcactagcactggggttacaaacaattcacgaaagaggaaatacaaaagactaagaaagatttggaaagctat

SEQ ID NO: 114985 - DNA, 540 bp, Homo sapiens
agtctattactgtgcttcaggcaaagataacagtccaagtctaagctggacaaagatgcagcggtagggaaggaaagaagtgtttagattgcagagatgtttagaggatacaatcaacaggatatgaaaagaaaagtaagagggtgccaaaaatgactccaagatttctgcctggtggaaacattaaagagtggcagggcatggtggctcacgcctgtaatcccaggagttcaaaaccagcctggccaacatggcraaaccctgaatctaccaaaaatacaaaagttagcttggccgcagtggtgcacacctgtaatctcagctactttggaggctaaggcaagagaatcgcttgagcctgggaggaggaggttgcagtgagcctagatcgcaccactgcattctggtctgggtgacagagtgagaccctatctcaaaaaaaaaaaattaaaaaattaaaaaccattaaagagtgtatatcaagatgtcagttggataagcagagaggggctcagataggaaacctgggctggaattata

SEQ ID NO: 114986 - DNA, 595 bp, Homo sapiens
taattaataatgtaaatgaagggcattttaaaataatgcatacagaaagaaagtttattataagactgcagtagggytgaatcaagctgtttccaaaagagagactgaattctggtcaccagagagatatcttatggcacataattggtggccactgatcttgttaaactgattatagaatcttggcagaaatgctgctaaagaagatatggggatttcagctcaatgaacctgaacattctattcatcaaaaagaaccaaaatgaaatggactgcctctggggtagtaaatattatgtcactgtgaagcaaaatgccattttctgaagggcctcacacatcgggcagagaagtagactaaaaatgttttaaggtccctttgatatgtcactttatgagtgtggccttcagggctctacactttaaccaggaagcagaatatggtttcttcaaggagctgcagcagggctatgcacctggagcaaggctagaacagaagccaagaagcactcccagggctatctcccatgtgcagagactcctggctgccattgcaaagagacacccagcaatgctgggtgatcccacggggcag

SEQ ID NO: 114987 - DNA, 595 bp, Homo sapiens
taattaataatgtaaatgaagggcattttaaaataatgcatacagaaagaaagtttattataagactgcagtagggctgaatcaagctgtttccaaaagagagactgaattctggtcaccagagagatatcttatggcacataattggtggccactgatcttgttaaactgattatagaatcttggcagaaatgctgctaaagaagatatggggatttcagctcaatgaacctgaacattctattcatcaaaaagaaccaaaatgaaatggactgcctctggggtagtaaatattatgtcactgtgaagcaaaatgccattttctgaagggcctcacacatcgggcagagaagtagactaaaawtgttttaaggtccctttgatatgtcactttatgagtgtggccttcagggctctacactttaaccaggaagcagaatatggtttcttcaaggagctgcagcagggctatgcacctggagcaaggctagaacagaagccaagaagcactcccagggctatctcccatgtgcagagactcctggctgccattgcaaagagacacccagcaatgctgggtgatcccacggggcag

SEQ ID NO: 114988 - DNA, 519 bp, Homo sapiens
gaggtcaaggctgcagtgaaccattatcataccactgcagcccagcctggatgacaaagtgagaccctgtctcaaaaaaataaaataaaaatataaagccaataagaactgcgaatatcacaacatcgagaaaaataacattttcattaattaactataagctttgtaatatattttcttaccatttagggggtacatactctttgactcttcattttctatgtcaagaataaaaaggcaaatggatccttcctttaacatggttaatgaaaagtaaamtttcaatattgatagtttttgaaagtttctttccagttcacaacttgttattagtaatgtcatatttttaggattgttttcaaatttgggaaaacatctattgaatttctttcctatatgagctgtaagatttcaaaacattttgagcttttctattcagtaattgaatctaagtacatttttgaattgataatactcattaaccaggttttgtcaatatcttattgtgttggcacattt

SEQ ID NO: 114989 - DNA, 564 bp, Homo sapiens
taaagacttcatgactaagctaagaaattctgccacctcatccttctcattgggaatagaaaaacagcataaggcagaagaacaaagaaaacaycttacccatctattctcagaaattcatggctcttttcctttcttcccagtgaggaatggtctatgtgtcaaaggcacagcttatatttgctatctcagcttttataattttcatcaatgcatgaagacagctatcttaaagctaagcaattccatttggctttgggtcccaaaagataacctatatctaagtgcttctgcacaaaaaaaaaaaaaagcatttgctgttttactcttttcttattttatttcctaaataaatataatacactgcagcaatttactcagctggctctgcttgcctggctgtgtgcttcacccttgaggtctccctctgaattgttggcccaccctccaagggccagctcaaatgttatggccttgataagccccttctctgatgagctccttctccttctaaacctgtttcctatcctgtagatacatgcttttatacaacactcctaaaat

SEQ ID NO: 114990 - DNA, 580 bp, Homo sapiens
atccaagacctagaatcaaccccctcattgctcaggggtttttcagaaacttagrgcattttctacaatgaagacatataggtcaggcacagtggctcatgcctgtaatcccagcggggaggccaaggtgggcagatcacttgagcccaggagtttgagaccagcctgggcaacatagtgagagcccgtctctacaaaaactacaaaaattagccaggtgtggtggcatgcacctgtagtcccagctactcaggaggctgaggtgggaggattgtttgagcctgggagtttgaggctgcagtgagctgtgatcatagcactgcactccagcctgagtaacagagtgagaccctgtctcaaaaaaaaatctatgaataatacattaaaagtttgcaccaggaaatacaggaactagcataattttaatagctaacatttattgagtgtttcctatgtgtgtgctactggtgtaaatgctttacatggattgactcaataagttgttgcaaaaaaaacttgagctagacaagatcattatcactatttcataaatgaaattaaggaacttgctgaaaagtca

SEQ ID NO: 114991 - DNA, 583 bp, Homo sapiens
agtgtctatcaactgatgaatggataaaccaagtgcggtatagccatacactggaatattatttggccataaaaaggaatgaagtactgaaacatgccacaacatggatgaaccttgaaaacagtgtgcctagcgaaagagcccattacaaaaggccacatattttaagatttcatttacgtgaaatgttcagaataggtaaatctatggggacagaaagtagattactcattgccgagggttaggtgcatgggggtgtttaggaagggattgattactaaaaaatatggagtttctttgagggtgatgaaaatgttccaagatcaattgtggcactgatcacacaatcctatggatgtatgataaactcttgaattatatactttaagtgggtgaattgtatggtatgtgagctaaaaaaagcttttaccaagaaaaaaaaagtcaagaaagtggtaagtctccaaattaaaagctcaacactggtgcacttggcagtctcaccagactccccattctkcccaagcactaattaggcagccttggccacctgcgcaggacacagcctcagcaaggcagacca

SEQ ID NO: 114992 - DNA, 538 bp, Homo sapiens
acccctttcccacatgtgaagacatggaagaagttagcagtcagcaacccagaagaacctcaccagaacctcaccatgctggcctctccattccccagaactgtgagaaataagttgctgctgtttataagccacctagtctatggcactttgttatagcagcccacactaaaacactcacttaatcttttggttatgaataaggactttccttccccaccaagttttaccactcctcacccccgctgcccagagaaccaagaatggctcacttctggcataaagataggacrtggagagtagctatttgagatgtgatcaggagtctattgtccatactatgccctcttttggtgagcctgatccacaattggcctctccacattcccggaatttatttgtttccctgtgtgacacaccccagtcaatgacaaacatttcaataacctggagaagaggccttgttttcctatcctgccagatccctgcacttttccggagcacttatgctctgcctgagtgatcctccacctgggag

SEQ ID NO: 114993 - DNA, 497 bp, Homo sapiens
tgcaatactaaatttggataaatctcactctccccaaatctgctttgcccccagtagggatcataaaaataatgtctaaacttgctttctatatctatattatctatatctacctatacacatgtattttaaaatatataaatatatggtttgaaatacacacagacacccacacatatgatctgaaaatacattttataaacattgtcaaagtttctcattggggataatttaagaaatatcaaaccattattattaaggtttttaaaattataagaccaaggttttaaaacaagagtgttcaatcttttggcttccctgggccacattggaagaagaagaattgtcttgggccacacacacaaaatacactaatgatagttgatgagctttaaaaaaaaactcaccaaaaaaatcccaggttttaagaaagtttacmaatttgtggtgggcagcattcaaagccctcctgagttgtatgtggtgtgtgggctgca

SEQ ID NO: 114994 - DNA, 590 bp, Homo sapiens
gttccttggtgttcaaaggctgtgcatgtgagtcccgtgtccataaaatacttaacatcatgttttaaattgattcaaaacttcttcatgattgcactcttagtcataatccacatcctattatcaagttccacctttataaaactatcagccaagacacccttttcattactgctaagttaaaaaaagcctccagttatgaaattgatatttacataatacagtttttgcaccagatgcttctggtaaaaggaagcaaatcatgacctctctcaccagcaggatcagtccactgttttcacaactgaatgatatttgctcataaagctaaaatgtgtgtgggctgcaagaaatgaagttaaaggtaaagccctttatttcttctttgcctttccctcttcctccctttcttttatctccatttatgatcaagaaaatctgttacataattagcttcagaatgtgtctrtattaattagagattatttaacaaatgaattatgcaatttaatttatttaaaatcatttattttcaggaaaaccaaacatatcgttgagtttacatagaaatacaattttcaaccagatct

SEQ ID NO: 114995 - DNA, 610 bp, Homo sapiens
ctatattacatacctctgcatcacactgaaattgtggaaatcttttcaatggttttagaaattggatccttattttatacagtcacttagatacactgagaaatttccgttacttgactgtkctgtttgctttttgctgtgtttcagtggtttggcaatagattagaggttgggttttccaccatttggtactaattttctgggaacaatctgatttccatttattacattcatatggcaatgctgcctgtatttatattagaaaaagagtttattctgccctcatagcctcatagcctcatgaatgcctgcagaagattgtttcattataagatgtgggcataacaagttaaatcaaaatgttcctcttgattcttgtatctgggtactttcattttactcttctgactatagaaggttttaaccaaaccagactattgccaggaagttaagtgagtaaaattgtagtcctagggaatactggattctattgctgagtaaaacaaatgtcttcctttcaattaaacccagtgttagataaaattatttctttacataatcaactgtgtggccactgattagacttgataggacaattataacctaaaac

SEQ ID NO: 114996 - DNA, 610 bp, Homo sapiens
ctatattacatacctctgcatcacactgaaattgtggaaatcttttcaatggttttagaaattggatccttattttatacagtcacttagatacactgagaaatttccgttacttgactgtgctgtttgctttttgctgtgtttcagtggtttggcaatagattagaggttgggttttccaccatttggtactaattttctgggaacaatctgatttccatttattacattcatatggcaatgctgcctgtatttatattagaaaaagagtttattctgccctcatagcctcatagcctcatgaatgcctgcagaagattgtttcattataagatgtgggcataacaagytaaatcaaaatgttcctcttgattcttgtatctgggtactttcattttactcttctgactatagaaggttttaaccaaaccagactattgccaggaagttaagtgagtaaaattgtagtcctagggaatactggattctattgctgagtaaaacaaatgtcttcctttcaattaaacccagtgttagataaaattatttctttacataatcaactgtgtggccactgattagacttgataggacaattataacctaaaac

SEQ ID NO: 114997 - DNA, 668 bp, Homo sapiens
cttgtcaatcacctcttcccatcacccaaaaagtcttacaatttggagctcctcatgactatagaaagggcatgatgactagartcagactgttttgaattttgaatctgctttctacctcatacaagtcacaaagaatctgtggaccttaattcccatgtatttattgtaataaggacataatatcactactactgatacttcaaataatgttttgaggattaaatataaaatgtatgttgtaatcccttttgaaaattctacacaaccataactttatgtacaagagtttactcctagttctgtaactgttctctcattactatccttcctttttccatttcattacagaagccctctccaaaataaatcttcaggctttcttcatgtttctctccattaccttcctcttaggtcccgatgaatgcaatattctatttaaaataccaaaaaatgtaatatttcagtaaaaaaaagatcaaattaagcaatccagaatctaaggactatcacataggaaaatcaactctaactctatgttttaattttagaaaagttactgtgaaatgatcttatcatcttaacaaaacaccattttacaaataaatttcaagtatactttctcctttcctccatgcctgccctcttaggatatttctttttctgtc

SEQ ID NO: 114998 - DNA, 668 bp, Homo sapiens
cttgtcaatcacctcttcccatcacccaaaaagtcttacaatttggagctcctcatgactatagaaagggcatgatgactagagtcagactgttttgaattttgaatctgctttctacctcatacaagtcacaaagaatctgtggaccttaattcccatgtatttattgtaataaggacataatatcactactactgatacttcaaataatgttttgaggattaaatataaaatgtatgttgtaatcccttttgaaaattctacacaaccataactttatgtacaagagtttactcctagttctgtaactgttctctcattactatccttcctttttccatttcattacagaagccctctccaaaataaatcttcaggctttcttcatgtttctctccattaccttcctcttaggtcccgatgaatgcaayattctatttaaaataccaaaaaatgtaatatttcagtaaaaaaaagatcaaattaagcaatccagaatctaaggactatcacataggaaaatcaactctaactctatgttttaattttagaaaagttactgtgaaatgatcttatcatcttaacaaaacaccattttacaaataaatttcaagtatactttctcctttcctccatgcctgccctcttaggatatttctttttctgtc

SEQ ID NO: 114999 - DNA, 391 bp, Homo sapiens
caggattcctagggctcctgctgtttatgctatgaacacttttctctatgcatggacatgatagcagcctacagtttattaccatggttatgaagacaaggttawgatgttttaaaagccttcaatgaatgactgaggacaatgaaatcaaacaaccaaaaaagtaacttcaaattgaatactttcccaggatgatatgatacaaaatgtataggaatttcataaaatggaaaaatgtaaacatatatagttaaatatataatgtgcttatattatctatgttaacatccacatgtgttaagcaaatatattcattgaaacaaagattgcaacttcactttcattgttagatgcacatttactaaagttggccatttagtaaaccacaaat

SEQ ID NO: 115000 - DNA, 614 bp, Homo sapiens
tgatgatgtctctgcaagcttatgatttcaattctttgggctatatattcaagagtaagattgctggatcatatagtagttccatttttaattttttgaggaacctccttactgttttccatagtggctgcacatttacagtcctaacaacagtgtagaagaggttccatttctccacagaattgccaacacatgttatttctccttcttctttttcttcttcttctgatgctgctgcctcttcttattctttggcctcccaaagtgctgggattacaggtgtgagctgctacacctggtgtgcagttttttaacagcataattagataagcaggcattgycagagggcagtatctagagaagttatatccttcttctctttctccttctccttctccttttccttcttcttcttcccatcctaacaagtgtgaggtgatatttatgaatttgatttgcatttccctgatatttagtgatattgaccatccaatcatacacctggtcaccatttgcatgtctttgttatagaaaccagttgtacgacatgatacaggtaaatttctaataacggagttcaatgtaaagatagttaaagcaacataagcttatat

SEQ ID NO: 115001 - DNA, 520 bp, Homo sapiens
actgttatggaaggtcttgccctggttttgctgaaagttctatgggagaactggggcctggaagcctagagcaggcacaaagctttatgcctcctttctcattccacggtccccttcccattctgtcataggcttttcaggtctagaacagttcatggagaatctgggtaggaatgtcaaccaggagccatctgtaaagctatcaaaattggctgcctttatgtcaacatcagactgctaacatatgtgacctttaagatccatttgtgcttgctctcagcaggattgtaaagatgttcttaacattcaagaatggaatgaatgctgacttttaaccttctttactctcccccagttgaagctgagaaaaagtttttacaatttgaatgtcagrctttttcttttctttctttttttttttgttgagacagattaaggagaaacagagctttagaactactttctcttccaaggcctccaggagtttggctgacagccctaatgcccacagcaagtcaaa

SEQ ID NO: 115002 - DNA, 619 bp, Homo sapiens
tataagaccttttatattaatatctttaatgctttattattgtctaaaacttagttgagccattaagactctcattgctgtaacagtagctttacattcatttggtatttataataatagctatcatttattcagtacccatctaattttaaatgctttacatatttattttcattttgtctttaattttatgactaaatattgctcatattttcttggtaaggagttggaggcataaaaatattatgcaacttttctaaggtcacaaagttagtaagtattggtggcatttaatatgtatcayggattatgttactgatggccaactttttctttccctccttgtactgttccactttatataccttttctgctgaactcaggagtatgcatgtgacttactttggacaacaaaataatatgtcttcactgctgagcagaagtgatatgtgactctgccaagcagaactgctgagtcagcatgtggcttgccatgcttctctttaccacaagatcagtaatgccccagttagagacagcttcttttacttggtgtagagcttccttggaggagaatagcaataactcggaatgaatttgtagggtgagtgagaaataa

SEQ ID NO: 115003 - DNA, 581 bp, Homo sapiens
ctgaatgttaatagccaagacaatggggaagatgtcaccagcacatgtcagacatctgcggcagcccctcccrtcaaaggtccagaggcctaagaggaaaaaatggtttcgtgggccaagcccagggccctgctgctctgtgcaacctcaggacttgatgtcctgcatcccagccactccagctctagccatggctaaaaggggccaagatacagctcaagccattgcttcatggggtaaaagccctaagccttggtggcttccctgtggtgttgggcctgcaggtgcacagaagacaagagttgagctttgggagcctctgcctagatttcggaggatgtatggaaacgcctgaatgttcaggcagaagtctgtggcaggagcagagccctcatggagaacctctactagggcaatgcagaggagaaatgtagggttaaagcccccacacagagtccccactggggcactgcctagtggagctgtgagaagagggccactgtctttcagacccccgaatggtagatccaccaacagcttgcactgtgtgcctgtcactcaatgccagcctgtgaaaacag

SEQ ID NO: 115004 - DNA, 588 bp, Homo sapiens
tacctgtgttttggtgtttcgatgtagtattatcttgtatgtttcagaattttttttccagcattttcaaggtttaatattcacttggaaagggggacccttggaattcttttgagacgtaccttattcatcttgaagtcatcctgaaratgtggcaggccattaatacttttgtagagaaacacaggctccatttttccactgtaaatatatgctgaggtctgtctttaaatgtgtacctaggagtaggaaaggttgagaaaggagagaatgatatttttgccctgcattcaactttgattgttatgaagggaaatattttacataaaatatttctacaataaggagattcaaaggctagaacagttttgtcatcgctcctgtactttttttcaagactactattatctctaattctgagccaggtacactatttacttagaagtcattgattaatatttatttataactagtaggcaagttaaagaatgtaaaatacatattcttctgataattgttttttaaatcttaggtttatttgggggaatttcttcctttccttatgccaagaatggctaatgcctgtga

SEQ ID NO: 115005 - DNA, 547 bp, Homo sapiens
caggaaatgttctaagtacttaagattatttactccatttaattttcacattctttatctgaagtatgtactactattttccctttataggtatgagaagactgagtctcaaggatggcaaatgaataaagttcctgtggtttgtaaatggtagactaggatttgaaaccagagataattgtctcaaaattcctggctcttcgccataatatgtgccacctctagacctcagtggtaagcttggctcaaattgctgcaataagcaataagaattgaggccctcagagagacattttcccatccccaaggcattaaattggaagtataatggagtggtttaaaacaacagttcttcaagagttccgtttaaatatcctataaaaattagtttcttccactttatttyctagcatcatttttctccactaagaagatttagtattcatgcagaggaaaaaaaaaatcacattacttcgaaggacaagattgatgggacctcgggaaaaaaaataatgattgaaattctcagctgctctccaaggtgatt

SEQ ID NO: 115006 - DNA, 547 bp, Homo sapiens
caggaaatgttctaagtacttaagattatttactccatttaattttcacattctttatctgaagtatgtactactattttccctttataggtatgagaagactgagtctcaaggatggcaaatgaataaagttcctgtggtttgtaaatggtagactaggatttgaaaccagagataattgtctcaaaattcctggctcttcgccataatatgtgccacctctagacctcagtggtaagcttggctcaaattgctgcaataagcaataagaattgaggccctcagagagacattttcccatccccaaggcattaaattggaagtataatggagtggtttaaaacaacagttcttcaagagttccgtttaaatatcctataaaaattagtttcttccactttatttcctagcwtcatttttctccactaagaagatttagtattcatgcagaggaaaaaaaaaatcacattacttcgaaggacaagattgatgggacctcgggaaaaaaaataatgattgaaattctcagctgctctccaaggtgatt

SEQ ID NO: 115007 - DNA, 587 bp, Homo sapiens
ttaaataaaattctgtcaaaacaaaaaaatctatgtcacaatttccagtttaatgaaacttgggatgtaacttttttgcttcttttcccctatgatttcctccaggcactagagactacaatttgcattcctcttgtctttactgaaggactacagtgtgcatattgtccaatttgaaaacatttaagaataccatatgtattaagaatatataacyaagaaataatatttttcttaccactgtctccactatttttaccattaagttcaatgggttaaatctaatttctcaatcatgctgaacattcatatgtatttggcatattaattttcagatatacaaaatatcaataataaaacaaatatgctttggaaatttgcaaaagattaagtatttaaagcatcaaagaggtagcaattttggttctaaagttcttgcacttttcactatggctcagcttccataaacaccataatgcttccttgcgtccctacggggtaccgttcaatgaatggttcatttatcagcttgtttcagaatagagaaaatattgccacatatagtaccaaaaaattttattgtgtct

SEQ ID NO: 115008 - DNA, 595 bp, Homo sapiens
ggccctaatatgaattctgcccttataaaaatgggaaatttgaatatagacacactattggaaaacataacttamaatataatcttccaatttggaaaacctcttcacaaaggcagtagagaaaggaaacaattttattattgaataagcatttagccagaatatgatgcacgtaacaggtaatctgctgatatatttcaaagacagaaataaatcttaccgtttcacatatatgttctttttttcttttctttttttttttttgagacagcatctcactctgttgccccggttagagtatagtggcgtgatctcggctcactgcaacctccgcctcccgggttcaagtgattctcctgcttcagcctcctgagtagctaggactacaggcacgcaccatcacgcccagctaatttttgtatttatagtagagatggggtttcaccatattggccaggctggtcttgaactcctgacctcgtgatccgcccacctcagcctctcaaagtgctgcgattacaggcgtgagccactgtgcccggcttcacatgtatgttcttaaggtaaatagtaattagtgctcaagagaacttga

SEQ ID NO: 115009 - DNA, 595 bp, Homo sapiens
ggccctaatatgaattctgcccttataaaaatgggaaatttgaatatagacacactattggaaaacataacttaaaatataatcttccaatttggaaaacctcttcacaaaggcagtagagaaaggaaacaattttattattgaataagcatttagccagaatatgatgcacgtaacaggtaatctgctratatatttcaaagacagaaataaatcttaccgtttcacatatatgttctttttttcttttctttttttttttttgagacagcatctcactctgttgccccggttagagtatagtggcgtgatctcggctcactgcaacctccgcctcccgggttcaagtgattctcctgcttcagcctcctgagtagctaggactacaggcacgcaccatcacgcccagctaatttttgtatttatagtagagatggggtttcaccatattggccaggctggtcttgaactcctgacctcgtgatccgcccacctcagcctctcaaagtgctgcgattacaggcgtgagccactgtgcccggcttcacatgtatgttcttaaggtaaatagtaattagtgctcaagagaacttga

SEQ ID NO: 115010 - DNA, 595 bp, Homo sapiens
ggccctaatatgaattctgcccttataaaaatgggaaatttgaatatagacacactattggaaaacataacttaaaatataatcttccaatttggaaaacctcttcacaaaggcagtagagaaaggaaacaattttattattgaataagcatttagccagaatatgatgcacgtaacaggtaatctgctgatatatttcaaagacagaaataaatcttaccgtttcacatatatgttctttttttcttttctttttttttttttgagacagcatctcactctgttgccccggytagagtatagtggcgtgatctcggctcactgcaacctccgcctcccgggttcaagtgattctcctgcttcagcctcctgagtagctaggactacaggcacgcaccatcacgcccagctaatttttgtatttatagtagagatggggtttcaccatattggccaggctggtcttgaactcctgacctcgtgatccgcccacctcagcctctcaaagtgctgcgattacaggcgtgagccactgtgcccggcttcacatgtatgttcttaaggtaaatagtaattagtgctcaagagaacttga

SEQ ID NO: 115011 - DNA, 595 bp, Homo sapiens
ggccctaatatgaattctgcccttataaaaatgggaaatttgaatatagacacactattggaaaacataacttaaaatataatcttccaatttggaaaacctcttcacaaaggcagtagagaaaggaaacaattttattattgaataagcatttagccagaatatgatgcacgtaacaggtaatctgctgatatatttcaaagacagaaataaatcttaccgtttcacatatatgttctttttttcttttctttttttttttttgagacagcatctcactctgttgccccggttagagtatagtggcgtgatctcggctcactgcaacctccgcctcccgggttcaagtgattctcctgcttcagcctcctgagtagctaggactacaggcacgcaccatcacgcccagctaatttttgtatttatagtagagatggggtttcaccatattggccaggctggtcttgaactcctgacctcgtgatccrcccacctcagcctctcaaagtgctgcgattacaggcgtgagccactgtgcccggcttcacatgtatgttcttaaggtaaatagtaattagtgctcaagagaacttga

SEQ ID NO: 115012 - DNA, 525 bp, Homo sapiens
gaatttgaaatctctagtgctaccttggatttaaggtagcttcgagcaggaggttccaaaaatccctaagtgttttgactgaggggatattttctagggagttttttttccttaagttataatgttttaaactctaaaatacattgttgatgtttaaagcttataaattagtcatgttagtggaagtagttttaggcataaacactctggaattttcatctcctgaaaagtaaatactgttttcatgcgagagaataaaagaagaactagagaagtctcatttcaccctgtccctgagaagtctccttgggaaaccaaaatctacaatgaaagagtgaagtagccacctcctgtcctttagatggtacctttatctcagyactcagtgggtctacagtttgtcttgttgttttcgacatgacgcctaatgtatctggggtgggatactaaacactgatcaaagttgccttgcttagggtggcctctgcatctactccttgatcttagagttgttgggtgttcctt

SEQ ID NO: 115013 - DNA, 535 bp, Homo sapiens
aattccatgtaaatttttaatagttttaaaattatattgccaaattaataaggttgcttagaagcaaagaatcagaacagaggaacatggattatctgaaggaacatttcatctaaaaccaggtagcttccaggtaattatcaatatcccacaaaaaagcgtatcacatggaaactgctaataaatatctccttgcccacktgtgaagttttctcattttacaaatccacagtcaagcagagacttcaaaatttcagtggggataagcagtattcctaatggttttgccggctctaactctggctaattttttttgaagatgacatttccgactatattatctcttaacaacacattgaaggcagataaaagccaggagttataagaccaatctctatcatatgggcaacactataggtagatacatatttaaccttattttaccaaggaaaatgtgaaataatttgtttgttaaatgtaccagtgggtttctattttcagtttcctaaggaaactatcattatcccttattttc

SEQ ID NO: 115014 - DNA, 492 bp, Homo sapiens
caccagcttcaggtgttttctatctattggaagactgcctttccctagtcccagctgcagccaattattattttggagacacagtttagcaatctcatgaacatcatctgctggtcacctgacattcctgggcggcattctcctgccctgctcatgtctgcctagctactcactcaaacacatctactatgttacatttatagtccttacattttctctccccacaagaagttgcctgaaattcacctaaaatgatcatttctatttcctgagagtaatgcaatatgaagcaaatctacatcaatatattcctgktgagtactgcatgactgttatgatttttcctgaattggaaccaaagggacaaatgtagcaccaaagaggaaaagaaaaataaatacagtaatgaaggtagttcatgaattgacagtcttgtcaggtacacttgcatctgtcatgagaaatgactagagttttacctgatatctaaat

SEQ ID NO: 115015 - DNA, 546 bp, Homo sapiens
gggtaaattttaggaaagcagaagttacaggcaaattatgaakaaatttgcatggagattatacattgattttggtataaatgggcaggatctcttgaagcagggagttacagatcataggaagactcaaagactttttgattctcaattggttaaggaaaaaaagggttgtttaaaaattaagtgtcaacagaaaagaatattagctctggctagtggatatgactttctccatgcccctcaggaagaactttaaaacaaagaaaagtggtcatagaccagtctttagttctcccttcacctgaggtctacatgccaggggatccacttggtggagttctgggtttgtaaaaaacaactcagggaacagagtagagagcccaaaaataagaccacacacctatgaccacctgatcttcaacaaagctgacaaaaacaagcaatggataaaagattcccaattcaaagaatggtgctgggataactggctagtcgtatgcagaagactgaagctgggccccttccttatactatatacaaaaatta

SEQ ID NO: 115016 - DNA, 546 bp, Homo sapiens
gggtaaattttaggaaagcagaagttacaggcaaattatgaagaaatttgcatggagattatacattgattttggtataaatgggcaggatctcttgaagcagggagttacagatcataggaagactcaaagactttttgattctcaattggttaaggaaaaaaagggttgtttaaaaattaagtgtcaacagaaaagaatattagctctggctagtggatatgactttctccakgcccctcaggaagaactttaaaacaaagaaaagtggtcatagaccagtctttagttctcccttcacctgaggtctacatgccaggggatccacttggtggagttctgggtttgtaaaaaacaactcagggaacagagtagagagcccaaaaataagaccacacacctatgaccacctgatcttcaacaaagctgacaaaaacaagcaatggataaaagattcccaattcaaagaatggtgctgggataactggctagtcgtatgcagaagactgaagctgggccccttccttatactatatacaaaaatta

SEQ ID NO: 115017 - DNA, 557 bp, Homo sapiens
gttttggtgattatagacaaatccaaatgaataattacatagaaagtattatttatataaaatttatactcatgctatatttattctgtaaccagtattttcactcaatartatgtcaaggacatctgtcaattaatacagatctagattatagatgtctggtttataggttggttgcaataatttatatatgcattcacctgtagatggacatttagattccccaccccccccaccacttattttattactattatgtgtttctttaacaaacatctaaacacattttttgtacatgtgtcttattattgccttaggatatattttaaaaaagaaatagtgctagttagaaagacatgcaagtttaagtaaattttgacataggaagagtgtttccaacatggcaaccaacagtgtctgaagaatcttcctcatacccatcttcactaggtttttaaatagactttagcgctcttttagatatctaaaatcccattggcattgatggggttcagagtatggcatctcaaaatatgtcattttcgaacagggttatt

SEQ ID NO: 115018 - DNA, 586 bp, Homo sapiens
ttcacggcaaaataaagatcagatagaaaaaaaagaaatctgactcacaaagtcacattttttattcttcctacattatagagatgtccttgaggtgagaggccctgaggttttaccacttggtttatagatatatgtatgtgtaggaayaaatttatctaaattagtcccaggtatattatagtgattacctaagaaaacaaagctaaaagtatactttggtcttgtcccttattacacagcactgctattccttgtgtctatctcagtcatcaaatgcagcaccaaagtataaaggagatagtgccaaatggactgctaagtacagtatatgaagagaattattataattcctgattcattttcttattctaaaagtatcattgttatgacattatttatgatattatacactagaatttcggtctttaaaaatctatctcctgtaaaaaaaaaaaaaaaagtcatcatgtttgacccttcaaggtaccacagtttagtctacccactggctctgaatgcattttttttagtttaaatttatttgaaataagttctgtctattgattctattatctaatattat

SEQ ID NO: 115019 - DNA, 586 bp, Homo sapiens
ttcacggcaaaataaagatcagatagaaaaaaaagaaatctgactcacaaagtcacattttttattcttcctacattatagagatgtccttgaggtgagaggccctgaggttttaccacttggtttatagatatatgtatgtgtaggaataaatttatctaaattagtcccaggtayattatagtgattacctaagaaaacaaagctaaaagtatactttggtcttgtcccttattacacagcactgctattccttgtgtctatctcagtcatcaaatgcagcaccaaagtataaaggagatagtgccaaatggactgctaagtacagtatatgaagagaattattataattcctgattcattttcttattctaaaagtatcattgttatgacattatttatgatattatacactagaatttcggtctttaaaaatctatctcctgtaaaaaaaaaaaaaaaagtcatcatgtttgacccttcaaggtaccacagtttagtctacccactggctctgaatgcattttttttagtttaaatttatttgaaataagttctgtctattgattctattatctaatattat

SEQ ID NO: 115020 - DNA, 586 bp, Homo sapiens
ttcacggcaaaataaagatcagatagaaaaaaaagaaatctgactcacaaagtcacattttttattcttcctacattatagagatgtccttgaggtgagaggccctgaggttttaccacttggtttatagatatatgtatgtgtaggaataaatttatctaaattagtcccaggtatattatagtgattacctaagaaaacaaagctaaaagtatactttggtcttgtcycttattacacagcactgctattccttgtgtctatctcagtcatcaaatgcagcaccaaagtataaaggagatagtgccaaatggactgctaagtacagtatatgaagagaattattataattcctgattcattttcttattctaaaagtatcattgttatgacattatttatgatattatacactagaatttcggtctttaaaaatctatctcctgtaaaaaaaaaaaaaaaagtcatcatgtttgacccttcaaggtaccacagtttagtctacccactggctctgaatgcattttttttagtttaaatttatttgaaataagttctgtctattgattctattatctaatattat

SEQ ID NO: 115021 - DNA, 586 bp, Homo sapiens
ttcacggcaaaataaagatcagatagaaaaaaaagaaatctgactcacaaagtcacattttttattcttcctacattatagagatgtccttgaggtgagaggccctgaggttttaccacttggtttatagatatatgtatgtgtaggaataaatttatctaaattagtcccaggtatattatagtgattacctaagaaaacaaagctaaaagtatactttggtcttgtcccttattacacagcactgctattccttgtgtctatctcagtcatcaaatgcagcaccaaagtataaaggagatagtgccaaatggactgctaagtacagtataygaagagaattattataattcctgattcattttcttattctaaaagtatcattgttatgacattatttatgatattatacactagaatttcggtctttaaaaatctatctcctgtaaaaaaaaaaaaaaaagtcatcatgtttgacccttcaaggtaccacagtttagtctacccactggctctgaatgcattttttttagtttaaatttatttgaaataagttctgtctattgattctattatctaatattat

SEQ ID NO: 115022 - DNA, 553 bp, Homo sapiens
accaaaactcactcatgtgggcccaaaggtggagaccccccgcccacccaccatttacaagcagcagcagtactgtcacactggcaaagacgtgagccataaaactgtctgtatcaggttcagagattaaattatgccctgaaaccactcccacagagagkcacaaaacaggcatttactgtggctctcaacctcactgtagtccagagatagactagaatatgaatctaaactaggagtcatgagccctggaacaattgtgtaataggaaaacagatcaagttcctgcctatgtaggataggaagctggtgcaaccatctcaactccctgcagagtctttagtgcacttcataaggaactcctcccattaaccctcatcagggcaggtgcctgtgcttgccatttgggcatttgtgggaaagcaaggggctccagctgtgtctctccaaccccacagaacaggaaacttatggcaccaggtactccaatgtccagtccttcacttgaaacaacagagagcacctcaataaacaaagatcaggtacctaccta

SEQ ID NO: 115023 - DNA, 594 bp, Homo sapiens
agattaaatataaatatttggcaaatttgtgaatttaggcttgtttatatattcatcatgaaagacacctttttattttgggtatggctttctcatgaaaacatttacaaactccaaagtatttactatgatttctgatttacaaattgctaatgcaacaaagtatttgaatatgacttgtgttttgaaatgctaaatattaaacttaaaaacacccagtgagattcctaccatcttcatttcacactacccagggacattacttatttgaatcaatcctatccatcagttagtacaataacagaaaagcacagcaagcatttgattcataattttatgtattgtgctttactgtaacaggtgcttagtccttgggcataaaataaacttgtaaagtccgcttaartggatcaagattcattataaagtaaaagaaaagtcataaataattttgtaggtaaacagaaaaaaaaacaggaacatacatagaatgactcagtagttttaaaattattaatatgcaaacaaagttcctgtagtcactaaggagattatgtaagaccttgatgccagggaatacaatattttgagggg

SEQ ID NO: 115024 - DNA, 616 bp, Homo sapiens
ggccccatgcaagtctgaaatccagcagagcagtcaaatcttaaagcttcaaaatgatctcctacgactccatgtctcacatctacatcatgctgatgcaagagatgggctcccatggccttgggcagctccacccctgtggctttgcagggtacagcttccctcttggctgctttcatgggttggcattgagtgtctgtggcttttacaggcacatggtgcaagctgtcagtggagctacaattctggggtctagaggacagtggccctcttctcacagctccactaggcagtacccccgtggggactctatgtggggactctcaccccacatttccctttcacactgcccttgcagaggttctccatgagggttccacccctgcagcacacctctgcctggatatccaggcatttccatacatcctctaatttctaggcagaaggtaccaaaccccaatgcttaacttctgtgcaccctcaggctcaacaccatgtgtaagccaccgaggcttgcaccctctgaagcaatgtcctgatctgtacattgtatkttggctccatttcatccatggctgggacacagggcaccaagtcccaagactgcacaaagcag

SEQ ID NO: 115025 - DNA, 602 bp, Homo sapiens
ataaagaaaatctcatcagactaacagcagacttctaagcagaaaccttgaagctagaagagatgctagaagagtgagcctagggttagtcttcttaaagaaaacaaaaagccagctgatatggtttggctgtgtccccacccaaatctcatcttcaatgcccacatgttgcrggagggttgcagtgggaagtaattgaatcatgatggtaggtttttccctgctgttcttgggatggtgaataagtctcacaagatctgataatttaaaaaatgggagtttccccgcacaagctctctctttgcctgctgccatccatgtaagaaatgacttgcttctccctgccttccaccacgattgtgaggcctccccagccatgtggaaccctaagtccattaaatctttttcctgtataaattacccagtctcgtgtatgtctttattagcagcacaaaagcagactaattcagtaaattggtaccggtatagtggggtgctgctaaaaagataccaaaaaatgtggaagagactttggaactgggtaacaggcagaggttggaacaatttggagggcccagaagacaggaagatgtgaggaagtt

SEQ ID NO: 115026 - DNA, 602 bp, Homo sapiens
ataaagaaaatctcatcagactaacagcagacttctaagcagaaaccttgaagctagaagagatgctagaagagtgagcctagggttagtcttcttaaagaaaacaaaaagccagctgatatggtttggctgtgtccccacccaaatctcatcttcaatgcccacatgttgcaggagggttgcagtgggaagtaattgaatcatgayggtaggtttttccctgctgttcttgggatggtgaataagtctcacaagatctgataatttaaaaaatgggagtttccccgcacaagctctctctttgcctgctgccatccatgtaagaaatgacttgcttctccctgccttccaccacgattgtgaggcctccccagccatgtggaaccctaagtccattaaatctttttcctgtataaattacccagtctcgtgtatgtctttattagcagcacaaaagcagactaattcagtaaattggtaccggtatagtggggtgctgctaaaaagataccaaaaaatgtggaagagactttggaactgggtaacaggcagaggttggaacaatttggagggcccagaagacaggaagatgtgaggaagtt

SEQ ID NO: 115027 - DNA, 602 bp, Homo sapiens
ataaagaaaatctcatcagactaacagcagacttctaagcagaaaccttgaagctagaagagatgctagaagagtgagcctagggttagtcttcttaaagaaaacaaaaagccagctgatatggtttggctgtgtccccacccaaatctcatcttcaatgcccacatgttgcaggagggttgcagtgggaagtaattgaatcatgatggtaggtttttccctgctgttcttgggatggtgaataagtctcacaagatctgatartttaaaaaatgggagtttccccgcacaagctctctctttgcctgctgccatccatgtaagaaatgacttgcttctccctgccttccaccacgattgtgaggcctccccagccatgtggaaccctaagtccattaaatctttttcctgtataaattacccagtctcgtgtatgtctttattagcagcacaaaagcagactaattcagtaaattggtaccggtatagtggggtgctgctaaaaagataccaaaaaatgtggaagagactttggaactgggtaacaggcagaggttggaacaatttggagggcccagaagacaggaagatgtgaggaagtt

SEQ ID NO: 115028 - DNA, 602 bp, Homo sapiens
ataaagaaaatctcatcagactaacagcagacttctaagcagaaaccttgaagctagaagagatgctagaagagtgagcctagggttagtcttcttaaagaaaacaaaaagccagctgatatggtttggctgtgtccccacccaaatctcatcttcaatgcccacatgttgcaggagggttgcagtgggaagtaattgaatcatgatggtaggtttttccctgctgttcttgggatggtgaataagtctcacaagatctgataatttaaaaaatgggagtttccccgcacaagctctctctttgcctgctgccatccatgtaagaaatgacttgcttctccctgccttccaccacgawtgtgaggcctccccagccatgtggaaccctaagtccattaaatctttttcctgtataaattacccagtctcgtgtatgtctttattagcagcacaaaagcagactaattcagtaaattggtaccggtatagtggggtgctgctaaaaagataccaaaaaatgtggaagagactttggaactgggtaacaggcagaggttggaacaatttggagggcccagaagacaggaagatgtgaggaagtt

SEQ ID NO: 115029 - DNA, 515 bp, Homo sapiens
gttgcttccattttcattttttcctcaagatattttgattttccttttgatttctttcttgacccaatgggtgttcagtttctatatatttataaattttcctcttcctattactgatttttaatttcatgtcatcgtggtcagaagagatgcttgatatgattttagccttcttaaagtggttaagacttgttttgtggcccaacatatgatctatcctggaaaatgttttgtgtgcaygtgagaaaaatgtgcattctgctgctttggatggaatgttctgtatatgtctgttaggtccattttgtcttcagtgttgtcaagtcctttgtttccctactagttttctctgtagaaatctatcaatttttgaaaatagggtcttatagtctcctattattattgctttgtagtctacttcttccctcagttctgttaatatttgctttatatatttaggtgctccaacatctagtgcatatatatttactattgttatatcctctttatgaatt

SEQ ID NO: 115030 - DNA, 588 bp, Homo sapiens
aggtttttaagtcagcgtgtatttgttataatatatagtctatagagtatataaatccctcagttatgaagttgaattttggaatttagaagtttttgaaactcttttctttatatataccacaaataattatctgcccctaagaatgcctagaagactttttaggttattcctggttatagttggataatttatgaatattgcagacattacatctttctcctcagcgctcttccttagaaatgcaagtgacttactggcttttattatgccagaaataattcatatggatcagtatgagaacttttattgataggccattatgtttttatttctgatttatattttgtctaaaataaaaaataattttaagtagccctttaagtggaagccaataaaaatggatttaaaaagtagagctgccctggagtccygggattaccattataattgagaatagtatttcttactgagttttggttttttaaatatttgttcttaagttttttaaacctatttctcttacacagaacatactgagctttctaacagtaaagataaaaatctattctcttgtattagggaaaa

SEQ ID NO: 115031 - DNA, 565 bp, Homo sapiens
caggcagcataatgaaacccagtatccacaaaaacaaaacaaaacaaaatctgggtgtggtggtgcacacctgttatgcctgcagtgctacctactcaggagtctgagctgggaggtcacaggaacccaggaggctgtagtgagctatgytcatgccactgcactccagcctgggagacagagttagaccatttttcaaaaacaaattataaattaaataataaaataaggataaataaataaagacatgtaaactgtgctccttgtaaatgataaatctatgctcccttagtgaagaagatgagaataatggatatagcagggaaatggacagaattggccacattagaccacaatgaaagtcataataggcaccccaaatcggtaccattaaagccacataatgtgaccataatgcaggcaaattgtgaccaattaaaacaaactgacaaaaaaaaaaagggtatcctggagcatacgaattctaaatctaaattgaatggaactcaaagaaggcttcacattgaaaataaaaccatgggtatgtaagtgaattgtaacaaag

SEQ ID NO: 115032 - DNA, 565 bp, Homo sapiens
caggcagcataatgaaacccagtatccacaaaaacaaaacaaaacaaaatctgggtgtggtggtgcacacctgttatgcctgcagtgctacctactcaggagtctgagctgggaggtcacaggaacccaggaggctgtagtgagctatgttcatgycactgcactccagcctgggagacagagttagaccatttttcaaaaacaaattataaattaaataataaaataaggataaataaataaagacatgtaaactgtgctccttgtaaatgataaatctatgctcccttagtgaagaagatgagaataatggatatagcagggaaatggacagaattggccacattagaccacaatgaaagtcataataggcaccccaaatcggtaccattaaagccacataatgtgaccataatgcaggcaaattgtgaccaattaaaacaaactgacaaaaaaaaaaagggtatcctggagcatacgaattctaaatctaaattgaatggaactcaaagaaggcttcacattgaaaataaaaccatgggtatgtaagtgaattgtaacaaag

SEQ ID NO: 115033 - DNA, 589 bp, Homo sapiens
ttatcacagccattctttattatgataaaaagaatttatccaccaaaaagttttctgaattctaaatctgartgaacccaataaaacagagatttgggcctgttgttacaatttaataaaggatttactaaaccaaaaaatttacttaaatacataaactctggaaggagtataaaaatcataaagattcatttcaataaaggctggtatgcaaggttatcagacatgtgacagagtagtagaaaatgttgacaatgcttagggcacagtgaatatcattgattttcaaatgaacaaagaagatagtcaactcaatagaaagatgggccaaaaaattccaatacattattaacaatatgacagatgcaaatgtgcacaataaaatgagatctgtattttcaccactcgcttagaaaattaagaatcctagataacattgtgtgatgaggatatgaggataacaacctttatgggcaatggatgggaaattcaatggttttaaacatttcagaaaataacatgacaggatccatttgaaagtatgcatactctacaacctgtctcaatgacggtcacatatacctgatat

SEQ ID NO: 115034 - DNA, 622 bp, Homo sapiens
acattgtgtgatgaggatatgaggataacaacctttatgggcaatggatgggaaattcaatggttttaaacatttcagaaaataacatgacaggatccatttgaaagtatgcatactctacaacctgtctcaatgacggtcacatatacctgatatagtttgtatgtgtgtcccctccaaatctcatgctgaaatgtgatcccccatgttggaggtggggcccagtgagaggtattggatcatggggtggatcccttatgaatagtttagcacaggaatgtccaacttttggcttccctggaccacaatggaagaataattytcttgggccacacataaaatacactaaaaatagctgctgagctaaacacacacacacacacacacacacacacacacacacacacacacgaagtctcttatgttttaacaaagttgacaaatttgttttgggccacattcaaagctgtttgacctgcattcagcctgcaagctgcaggttagacaagcttggtttagaaccatccccttgtgagtgagttcttctcagtgagttcatgagagatctgattgttaaaaacagcctgggactgcccccttctctctcttactccctctctga

SEQ ID NO: 115035 - DNA, 622 bp, Homo sapiens
acattgtgtgatgaggatatgaggataacaacctttatgggcaatggatgggaaattcaatggttttaaacatttcagaaaataacatgacaggatccatttgaaagtatgcatactctacaacctgtctcaatgacggtcacatatacctgatatagtttgtatgtgtgtcccctccaaatctcatgctgaaatgtgatcccccatgttggaggtggggcccagtgagaggtattggatcatggggtggatcccttatgaatagtttagcacaggaatgtccaacttttggcttccctggaccacaatggaagaataattttcttgggccacacataaaatacactaaaaatagctgctgagctaaacacacacacacacacacacacacacacacacacacacacacaygaagtctcttatgttttaacaaagttgacaaatttgttttgggccacattcaaagctgtttgacctgcattcagcctgcaagctgcaggttagacaagcttggtttagaaccatccccttgtgagtgagttcttctcagtgagttcatgagagatctgattgttaaaaacagcctgggactgcccccttctctctcttactccctctctga

SEQ ID NO: 115036 - DNA, 489 bp, Homo sapiens
tgaataataattattttattcaataaaaagaacattttccctgattttttcacttgattcaggttaactatcaccattttaatgataaaagtattttgtgcttactttaattttatcattatacataattattataattataaggtactcatcattttatcattgaaatttttgtcaagtctgctcatttctgtttgagtgaatggaagaattttaaaattaaaaaaatggaaaattttaaaaagkccgcttctccattttgtgcttttattcccatccactctttgctatctgacataaatgtttatgttatctgactggcagaaacagagaaataaaaagacacaggcataacatatgtcttctgtctttaccacctggattttacatgaaatagccagattaagaggatgtgactttgtagggcttcaggaacagtaaagaagttttcccttttctgcactaagctattcttttccccagtgcctt

SEQ ID NO: 115037 - DNA, 437 bp, Homo sapiens
tctagaattttgtctatctttagaacacaatgtacagaactcaaytttctactaaagagtcaaaggctaaatttttggctaagaaattatgcttcttacatgataaaaatcatacatgccaaaacttaccatactttattaaacaacataatgtaaggtctgattcaacagaaatattggagagtggtgattttttaaaatatgtggaagtatatatttgttttcaaaatattggaaataaccatgatgggactataagttcaaacagtttgagctaagcagataaacttgcatgcatgaaaacacattaaacagactcatttggctgggaatatccattgcaactctcaaggctagacgtgtttttgtggcttgtcgcagtcattgcttccctcccattgtattaccattctatcattaaataaatgtaattcatc

SEQ ID NO: 115038 - DNA, 437 bp, Homo sapiens
tctagaattttgtctatctttagaacacaatgtacagaactcaattttctactaaagagtcaaaggctaaatttttggctaagaaattatgcttcttacrtgataaaaatcatacatgccaaaacttaccatactttattaaacaacataatgtaaggtctgattcaacagaaatattggagagtggtgattttttaaaatatgtggaagtatatatttgttttcaaaatattggaaataaccatgatgggactataagttcaaacagtttgagctaagcagataaacttgcatgcatgaaaacacattaaacagactcatttggctgggaatatccattgcaactctcaaggctagacgtgtttttgtggcttgtcgcagtcattgcttccctcccattgtattaccattctatcattaaataaatgtaattcatc

SEQ ID NO: 115039 - DNA, 437 bp, Homo sapiens
tctagaattttgtctatctttagaacacaatgtacagaactcaattttctactaaagagtcaaaggctaaatttttggctaagaaattatgcttcttacatgataaaaatcatacatgccaaaacttaccatactttattaaacaacataatgtaaggtctgattcaacagaaatattggagagtggtgattttttaaaatatgtggaagtatatatttgttttcaaaatattggaaataaccatgatgggactataagttcaaacagtttgagctaagcagataaacttgcatgcatgaaaacacattaaacagactcatttggctgggaatatccattgcaactctcaaggctagacgtgtttttgtggcttgtcgcagtcattgcttccctcccaytgtattaccattctatcattaaataaatgtaattcatc

SEQ ID NO: 115040 - DNA, 511 bp, Homo sapiens
tgatgctgtaaccaggcggggacccgggcggtggctactgcacggaggccgactccgggtcggctagggcagggttggagggaccacgcccgccacctgcgctcccatcgccaaggctcctgggggcggctccctagctccgagctacgctctccacttcccgggctatctgcactcagagcgaggggaggccgcggcggcctcggagccgtgggaagggggacgaggccgaaggaaactctgggaagttgggagttggggacrgccccgggttggggccgaatcccaccgggtgctgctcatcctttctcccaagcgtctagttcctttccttggtatggggtgagaagggcgggacgcgatccggcgttgggccggggacagggtgcttctggccttgggcagacgggcctgaacccgttcccggcgggtcgcacggcatggaggtggcctgggcctgggcgctaggctcgaccagcgactaccgccggccacgatggggttcgtagac

SEQ ID NO: 115041 - DNA, 576 bp, Homo sapiens
atttatataggccaggcatggtggctcatgcctgtaatcccagcactttgggaggctgaggcgggcagatcacctgaggtcagaagttcgagaccagcctggacaacatggtgaaactccatctctactaaaaatacagaaattagcagggcgtggtagtgcatgcctgtagtcccagctactcgggaggctgatgcaggaaaattgcttaaatctgggaggtagaggttgcagtgaccagttgaagattgtgccattgctctccagcctgagcgatagagttagaccatctcaaaaaaaaaaaaaaaaaaaaaaaaaaagaaagaaaaaaaatttaaccatttctaatcaaccttgtgctcaaggatctagccagagcaatttggcaagaaaaagaagtaaaagscatgcagattgaaaaggaaataaaactatctctattcacagatggtatgatctggtatataaaaattcctgaagaactcacacacatagaaaactattagcgctaataaacaagttgagcaaggttgtaagatacaatatacaaaaatttatatttctataaactagtaa

SEQ ID NO: 115042 - DNA, 560 bp, Homo sapiens
gtaactaactaccagctgttcagatactgcttttgtgcatatatcctccctcttcacctgcaataaagcaacacaaaatgactttggacgtttaagagaattgttcacagctaaataaaccatatgatgtaaaaccacccgtgcaaccaaatcaagattgaattgaacagttaattgacaacagggctccayggctgtcaaaacagccacccaaactttataattctggttagactccaaaagtcaactgtaataatatggctgaggtctgagaattgtgtttaaagcaattgctcttgttaagtgtagactaaataagtgatcttccgaggggagttcccaaagtgattgtttagagaacaagaagaagatattagaattttttgtatattggctatctaaataaagaaattatgcttgactattatttaatagaatgcacacagacatggactccttgaatctgtatgtcaaatagttacaaagagctacagagttagttccctcatctttagatcttcaagccctttctctggggctatttaatttaaaagtgcagt

SEQ ID NO: 115043 - DNA, 576 bp, Homo sapiens
caacatccctagactggcttcagagcctattcatttgaatagtgatgagggaaggagcaattcagttgacaaaatgcccaacaaataaagatgagacctaaarttaaagaagaaagcaataacttcttttaaatttttggatatactcataaattgtagtgaaagaagaaaaaagtgatcgttgcagatacttatcatatctgtttttgtgatgattatgtagatcttgaactcaagtcatttctgaatcgaaagaaaatttagaaatggtttaattttacagtaatctcaaatacctatccagagctctgtgacttcctaagaattatgcaacccagattttataccctcttgacccagatggactagtctgtatattctgggtttttttcaaatgctatttgaagctgtatattttatgtagaatttttagttgttttgaaagtttcccttattaatctaattttcaagtgtattgtctgagaaatgccacttatcacaaacaacatacaattgagagactgaagttgtgttatgaaaaaagcttaaggaaaagtgaaattgtcatgttagatc

SEQ ID NO: 115044 - DNA, 576 bp, Homo sapiens
caacatccctagactggcttcagagcctattcatttgaatagtgatgagggaaggagcaattcagttgacaaaatgcccaacaaataaagatgagacctaaagttaaagaagaaagcaataacttcttttaaatttttggatatactcataaattgtagtgaaagaagaaaaaagtgatcgttgcagatacttatcatatctgtttttgtgatgattatgtagatcttgaactcaagtcatttctgaatcgaaagaaaatttagaaatggtttaattttacagtaatctcaaatacctatccagagctctgtgacttcctaagaattatgcaacccagattttataccctcttgacccagatggactagtctgtatattctgggtttttttcaaatgctatttgaagctgtatattttatgtagaatttttagttgttttgaaagtttcccttattaatctaattttcaagtgtattgtctgagaaatgccacttatcacaaacaacatacaattgagagactraagttgtgttatgaaaaaagcttaaggaaaagtgaaattgtcatgttagatc

SEQ ID NO: 115045 - DNA, 575 bp, Homo sapiens
tgcaggactgattaatgtcctagtccaaattagttactattgctccagttgttattttacttcaagtattaaattgtatatctttaccatcaaagtagtktatgttcttaaaggccatagttcccaaaacaagagacttttcaacaaggcaactgactaaaaaacacttttatcagaactttaagtaaaaattgtgaacaaaaataagctagaaaatgtttggaaagacttccaaaaatatgactttttgttcaataacctttgatttttttttgttatttcatatctactaataactgacaccatgatgaattcagttagttatagaacacatttaatatataatttaattgaatttccaacatagtaggacatgtattattctgagggagaaaaaagtccaaatttactgaggttgatatatgcatcaggatattcttgaaagagtaattcagaattctttattcaagtctgacttcaaagcaccactgttagataaagcaaggcagagtgtaattaaaaccagttaaattcaaacaaaagcaaaattatttaagtatattcatcatccagtt

SEQ ID NO: 115046 - DNA, 570 bp, Homo sapiens
aattgatagttataataagtggcaagcaacaggttgcacaaatcaccattttgaaaaatgaatgttcttcttagaccacttttaatctcttagtcaaaatgtcaaaaatatattttaacttttggggaaagcctgtatcatacaatatcaagataaaacagcacagtagataagtctttgtactgagggcatgctaacaaatgtgcattgtgttggcaagatgcattttgtttttctcatctggattttaaaataaagctgtttcactcttttctcaagtatagtacattctttttaaatcaaaggagaaagaaagcttttcttttttatttgaatgtgaaagaaaataacacattccacttaaaagaaagcaaaggaacgtttaatgtcaagaacagtccttgtggaacaaacagtatggaagactgagtgaccactggaattacaaaacaaaaccacaacaaaaacaaataagcaaatattaaaacaacagcaactagtagttttactcttattaggaaatcgttagtcagaaaaaacacmaaaaaagagatgtttcattgttattgt

SEQ ID NO: 115047 - DNA, 474 bp, Homo sapiens
gataatgtattagaatgtacacgagagcattcattttgttttatggggtagtaataaaaataatgaaggttgtctaatcttgcygccttttttctctttgtgcttcagtttcctatctgtgcaatgtggataataattgtgaatgctactttacctgctgtagtcatctgaggggttttcctgcccactgcacagacaaaatcagttctctaagatcatcacattgcagtaaagaaagactttaaatgtcacaaggttagccatgtgaaggagtaaaattattgcttaaatcgatctccctgaaggcttggaggttaggggttttcgaggatagtttggtgagtaggggactagggaatggatgctgctgattggtcagggatgaaatcacaggagtgtgaaaaacggtcctcaggcactgagtctgcctctgggtgaggggcacaggatgggttgagtcatgagtcatgagtc

SEQ ID NO: 115048 - DNA, 474 bp, Homo sapiens
gataatgtattagaatgtacacgagagcattcattttgttttatggggtagtaataaaaataatgaaggttgtctaatcttgctrccttttttctctttgtgcttcagtttcctatctgtgcaatgtggataataattgtgaatgctactttacctgctgtagtcatctgaggggttttcctgcccactgcacagacaaaatcagttctctaagatcatcacattgcagtaaagaaagactttaaatgtcacaaggttagccatgtgaaggagtaaaattattgcttaaatcgatctccctgaaggcttggaggttaggggttttcgaggatagtttggtgagtaggggactagggaatggatgctgctgattggtcagggatgaaatcacaggagtgtgaaaaacggtcctcaggcactgagtctgcctctgggtgaggggcacaggatgggttgagtcatgagtcatgagtc

SEQ ID NO: 115049 - DNA, 474 bp, Homo sapiens
gataatgtattagaatgtacacgagagcattcattttgttttatggggtagtaataaaaataatgaaggttgtctaatcttgctgccttttttctctttgtgcttcagtttcctatctgtgcaatgtggataataattgtgaatgctactttacctgctgtagtcatctgaggggttttcctgcccactgcacagacaaaatcagttctctaagatcatcacattgcagtaaagaaagactttaaatgtcacaaggttagccatgtgaaggagtaraattattgcttaaatcgatctccctgaaggcttggaggttaggggttttcgaggatagtttggtgagtaggggactagggaatggatgctgctgattggtcagggatgaaatcacaggagtgtgaaaaacggtcctcaggcactgagtctgcctctgggtgaggggcacaggatgggttgagtcatgagtcatgagtc

SEQ ID NO: 115050 - DNA, 474 bp, Homo sapiens
gataatgtattagaatgtacacgagagcattcattttgttttatggggtagtaataaaaataatgaaggttgtctaatcttgctgccttttttctctttgtgcttcagtttcctatctgtgcaatgtggataataattgtgaatgctactttacctgctgtagtcatctgaggggttttcctgcccactgcacagacaaaatcagttctctaagatcatcacattgcagtaaagaaagactttaaatgtcacaaggttagccatgtgaaggagtaaaattattgcttaaatcgatctccctgaaggcttggaggttaggggttttcgaggatagtttggtgagtaggggrctagggaatggatgctgctgattggtcagggatgaaatcacaggagtgtgaaaaacggtcctcaggcactgagtctgcctctgggtgaggggcacaggatgggttgagtcatgagtcatgagtc

SEQ ID NO: 115051 - DNA, 417 bp, Homo sapiens
aaacagtaaaataaatttctaattctttaagagtgcatgtgagttcacttactccaggtcctgcccatgttcctagagatatattcaatgtagaaatgtgcattttaggcaytgggacttaatctttacctttatttcattaattcatatataaacttaaaaatccctattcaagagtaatatgtttattgagtgtctgcaaaaaacaaaagactgataatacatgcaaatactttaactttttaataagtgcattaattagtgcatgattcatgcaactcagcatcatctgtaacaagaaacaaacattacaaatatagtgttagtttttggtaaccagaaatattttctacccaaaatttgtcccacttaactgttaagttgctaaactttcactattattagttcactcatttg

SEQ ID NO: 115052 - DNA, 417 bp, Homo sapiens
aaacagtaaaataaatttctaattctttaagagtgcatgtgagttcacttactccaggtcctgcccatgttcctagagatatattcaatgtagaaatgtgcattttaggcattggracttaatctttacctttatttcattaattcatatataaacttaaaaatccctattcaagagtaatatgtttattgagtgtctgcaaaaaacaaaagactgataatacatgcaaatactttaactttttaataagtgcattaattagtgcatgattcatgcaactcagcatcatctgtaacaagaaacaaacattacaaatatagtgttagtttttggtaaccagaaatattttctacccaaaatttgtcccacttaactgttaagttgctaaactttcactattattagttcactcatttg

SEQ ID NO: 115053 - DNA, 542 bp, Homo sapiens
ccccttgcttcctgtagatctgaaagaatgtggatatgtaaatatttacaaaaatataaatgatatatagcgttttrttttgtgttttggtagagtgtattttatataaattttttttaccaatatagacttagttgtgtgactatactatatcttagacattttcatacccatatccattcatgggactatatgtttttccagtttttgactattacacagtgtgcatgcgttcagaatgtcttaagctatgtgatctagtgtattttgttgatacattctaaggtagcacatctttctttctctcctttcttcttttctcaaacaatttctaccaacaagggctcttggccgaacacaacagaagttgactctggctgtgttataggactttctccatagttcggctaaaaatggggtccttgtcatacgaccatgaaagattaggcttgcagaaactttgaagggtaacgccatgcgtggtggctcacgcctgtaatcccagcactttgggaggccaaggccggtggatcacgaggtca

SEQ ID NO: 115054 - DNA, 589 bp, Homo sapiens
cactggttcaagtgagtagagctagtctgactccagagcccatcttcttgcccatttcatgtatttattcaattaacatttattgaagacctactatgaagctggcaccgtttagatgctttgaatatatcagtcaagaagacctgccttcacgcagctcctgttctactgcgcacactgcctctgctcagagacagctgaggatatggatgacagttctggctggaggggcaggggggctgctacacccactcccactctgaaatctcacttccagggtgagggacaggtgcttccttcacccacccrcatcagtctatatccccatgctaaccattttgctttgtgccaggccaggtggcagaaggaagggcagatgcttgagaaggacagtcatagaatagttccttctaacccttttgtggcgtcagtctcagacggtttctatatggagctggacatatccctccatctctatcagctcatggtggagaccatgtgttgaggagatcatgaaggggctcttcctctgggtgctctgtcacccagcccccagcagcccacccaggtgtcaaaagacaggtctgcc

SEQ ID NO: 115055 - DNA, 566 bp, Homo sapiens
caatggacccatgaatggagaggctacagaaacaagggaggatgctacaaatgggccccatggcatggggtccctctcatcagtgtgaatctgactactgatgcagctaaatgtttgtcctgtcaccagcagaggctgatgctgagtctttgatatggtaccagcccttaagaagaccaaccagccatgtggtggcaggatgattacaataggcccctccacctaacagggaattgtcacctaattcatataggggtttgactaacctgcccattgtgcttcctccagctctccatgcaaagtcttaaagaataccaggtttaatggcatagaatcttgaacaatattgattcagaccaaggaatacattttatgacaaagaaggkgtgtgaatatgtaactaccatataccacatcacctggaagataccaacatacagaacaatgaaatcatttttaaagacttagagtaagtgccagattggggacaacacctgcagaactggggctctttcctcgcagaatgcaatatatacaatgaaccaagggtcatgccgggtatagtg

SEQ ID NO: 115056 - DNA, 571 bp, Homo sapiens
cggtgcttgggcaatggacccatgaatggagaggctacagaaacaagggaggatgctacaaatgggccccatggcatggggtccctctcatcagtgtgaatctgactactgatgcagctaaatgtttgtcctgtcaccagcagaggctgatgctgagtctttgatatggtaccagcccttaagaagaccaaccagccatgtggtggcaggatgattacaataggcccctccacctaacagggaattgtcacctaattcatataggggtttgactaacctgcccattgtgcttcctccagctctccatgcaaagtcttaaagaataccaggtttaatggcatagaatcttgaacaatattgattcagaccaaggaatacattttatgacaaagaaggtgtgtgaatatgtaactaccatataccacatcayctggaagataccaacatacagaacaatgaaatcatttttaaagacttagagtaagtgccagattggggacaacacctgcagaactggggctctttcctcgcagaatgcaatatatacaatgaaccaagggtcatgccgggt

SEQ ID NO: 115057 - DNA, 546 bp, Homo sapiens
ctaggccagtctaatcttttcacatttttctgcctgctttatattctagctgcactggtagctgattagatggtgcccacccagattaagggtgggtctgccattcccagtccactcactcaaatgttaatctcctttggcaacaccctcgcagacacacccaggatcaatattttgcatccttcaagtcaatcaagtttacactcagtattaaccatcacatcgagttattaaatgtatctctaagatgtgtcttaaagcaaaagtgaccaaaatcagagcaataaaccttaatcttattgaaagtatttctgagatatgttacagagcaaaagtgcctgaaatgagaccaatagaccttaatcttttattggtgctgtgaatctttaattaaaaawcaatcttagccctcatttgtaaagctcccagaagtaatttccccttgacaactactgtagttctgagggaaaaaattgagtcttatcttcaattctaacatatctttgcatagcaatctgaaaagtcagatatttaatcgtcatgaat

SEQ ID NO: 115058 - DNA, 586 bp, Homo sapiens
agcccaacatgttatgtagatatattaagacaaggagagcaacagaggcttaaaactttgatccttctgggcagaytgaaatttttggctgatgcgtttaaccaaatgatttgggaaagagaaggagatgacaagtcgttaaggcagtacaatcacacgtcttaaatgttggcttcgtggagcatctaattctcatttcattaacataccaagtaagttccagagacactaaaactccaaatacgttacatgtaagtatgtgtaccgcagagtcataaatgggagattttatctgaaggactgagatttaattgatatcatcgactaaggagagctatggtctttcattgtaatcatgaaaagctagttatattatccttaagtcccttacccatgtaagaaagatgggttgagtcgattgtagaaattagttctggaagggattttagagagtgcaatgttatatctcttatacaggggaggagaatggaggtatctaccctttcttcaagcataagagaaagaagcttcaatagtatcatttttaaagtttgatgtgtattacttgaagctgaagcaaacacaa

SEQ ID NO: 115059 - DNA, 586 bp, Homo sapiens
agcccaacatgttatgtagatatattaagacaaggagagcaacagaggcttaaaactttgatccttctgggcagattgaaatttttggctgatgcgtttaaccaaatgatttgggaaagagaaggagatgacaagtcgttaaggcagtacaatcacacgtcttaaatgttggcttcgtggagcatctaattctcatttcattaacataccaagtaagttccagagacactaaaactccaaatacgttacatgtaagtatgtgtaccgcagagtcataaatgggagattttatctgaaggactgagatttaattgatatcatcgactaaggagagctatggtctttcattgtaatcatgaaaagctagttatattatccttaagtcccttacccatgtaagaaagatgggttgagtcgattgtagaaattarttctggaagggattttagagagtgcaatgttatatctcttatacaggggaggagaatggaggtatctaccctttcttcaagcataagagaaagaagcttcaatagtatcatttttaaagtttgatgtgtattacttgaagctgaagcaaacacaa

SEQ ID NO: 115060 - DNA, 530 bp, Homo sapiens
tgtaacttctaagcacgcttacctgatagggtgmcagcaaagactcgaagaggtgcctgggcttggcacatagtagctattgctactattatgaatgttgttttgtctttgtttttgttttgagacagggcctcactctgttgcccaggttggagtacagcagtgccatcatagctcactgaagcctcaacctccctgggtttgagcaatcctcccacctcagcctcccaagtagctgagactacaggtgtgcgccaccaagcccagccaattgtttgtattttcagtagagactggttttgccaagtcgcccaggctggtttcgaactctggggttcaagcaatctgcccacctcagcctcccaaagtgctggcattacaggcgtgtgccactgcgcccagccattatgaatgtcaatattgacatgatcttgtatccttatgcccacactgggagaggtctgattgtccccatgttcctggtgtggaaccacatggaagaggcctatgttatcccaacagtgcagaag

SEQ ID NO: 115061 - DNA, 355 bp, Homo sapiens
ggcactaacacttcttatacaggcagactaaatattcagatcaacactactaatgagaaccactataaaaggagtttttaaaagtttaatacttatgataaaatttaataatcttaatcattttaaatgtyaacatgaaattatttttatctcggtgtcaatatttttaatattagtaataacaatcatttcactattttaattggaaaagttttaaatttggtattaaatatatatattttatgagatggagtttccctcttgttgcccaggctggagtgcaatggcgcaatctcggctcaccgcaacctccgcctcctgggttcaagcaattctcctgcctcagtctcctgac

SEQ ID NO: 115062 - DNA, 499 bp, Homo sapiens
aattctgagtccatcacccctgccctccaaacttgagatgtcctgcctttctgggcgaatccagtatataccttacatgtattgatgtatgtctttgcctgtaacttcagtctccctaaaatgtataaaaccaaactgtaactagaccaactcaggcacacattctcaggatctcttgagggtgtaccccaggtgrtggtcacttacattttgctcagagtaagcctctttaaatatttcatagagcttggctttcttcatcaacaagggtcaatgagagctacgaagtattccctaggactgagggagagctcccaaagaggaaataagccttccctagcccccatcaagatagtggtgggtgaatgtgcattaatgtatttaaagctaaaataaaatatttagggtatgtatgaccttttttttttgtcattgcctgccttagcaaactaattgccagtcctgaccactcacagctggaggcatcaaaggaatgtac

SEQ ID NO: 115063 - DNA, 543 bp, Homo sapiens
  misc_feature (1)...(543): n = A,T,C or G
nnnnnnnnnnnnnnnnnnnnnnnnnnnnnnnnnnnnnnnnnntattccaacttgaattttcctttttttttttttttttttcaaaaaaattttttggggaccgggtgtggtgtctcatgcttgtaatcccagcactttgggaggctgaggcgggtggatcatgaggtcaggagtttgaaaccagcctggccaacagagtgaaaccccgtctctactaaaaatacaaaaaattagctgggtgtggtgctgtgcacctgtaatcccagctactcgggaggctgaggcaggagaattgcatgaatctgggaggcggaggttgcagtgagccgagatcgcgccattgcactctagcccaggtgacagtgcgagagtctgtctcaaaaaaaaaaaagggtatatatatatatatatatatatatatatatatttkgcgattttggggcccttgcaattctatgcgaatttgaggatcatctttttcatttctgcaagaaagaccgttgcagttttgatagggattgcactgaatttatagatcacttt

SEQ ID NO: 115064 - DNA, 418 bp, Homo sapiens
aaaaaagcctgtaggggagagactgttgtgaggttaatccatataaagccctggaaaaagcctgtaggggagagactgttgtgaggtwaatccatataaagccctggaaaaagcctgtaggggagagactgttgtgaggttaatccatataaagccctggaaaaagcctgtaggggagagactgttgtgaggttaatccatataaagccctggaaaaagcctgtaggggagagactgttgtgaggttaatccatataaagccctgggaaaagtctgtaggggagagactgttgtgaggtaaatccatataaagccctgggaaaagtctgtaggggagagactgttgtgaggttaatccatataaagccctggaaaaagtctgtaggggagagactgttgtgaggtaaatccatataaa

SEQ ID NO: 115065 - DNA, 418 bp, Homo sapiens
aaaaaagcctgtaggggagagactgttgtgaggttaatccatataaagccctggaaaaagcctgtaggggagagactgttgtgaggttaatccatataaagccctggaaaaagcctgtaggggagagactgttgtgaggttaatccatataaagccctggaaaaagcctgtaggggagagactgttgtgaggttaatccatataaagccctggaraaagcctgtaggggagagactgttgtgaggttaatccatataaagccctgggaaaagtctgtaggggagagactgttgtgaggtaaatccatataaagccctgggaaaagtctgtaggggagagactgttgtgaggttaatccatataaagccctggaaaaagtctgtaggggagagactgttgtgaggtaaatccatataaa

SEQ ID NO: 115066 - DNA, 418 bp, Homo sapiens
aaaaaagcctgtaggggagagactgttgtgaggttaatccatataaagccctggaaaaagcctgtaggggagagactgttgtgaggttaatccatataaagccctggaaaaagcctgtaggggagagactgttgtgaggttaatccatataaagccctggaaaaagcctgtaggggagagactgttgtgaggttaatccatataaagccctggaaaaagcctgtaggggagagactgttgtgaggttaatccatataaagccctgggaaaagtctgtaggggagagactgttgtgaggtaaatccatataaagccctggraaaagtctgtaggggagagactgttgtgaggttaatccatataaagccctggaaaaagtctgtaggggagagactgttgtgaggtaaatccatataaa

SEQ ID NO: 115067 - DNA, 540 bp, Homo sapiens
attcatagagcctgggacaaggattctcaaatattttggtatcatgatctctttacactctaaaaaattaatgataactccaaggaactagtttcatgtgggttatatatatattgatatttactacattaaaaaattaaagctgygaaaaattttaaacataaaaatacacaagcatacattctattagctctcagagtgatgacattaccactccacgtgtagtgtttggaatgcctctttcttgttttcttccaggagcaatgacttcccaagaccactccaccttgtcccatagctgggtaagcccctttctttcttcttctttgccagtgctctgactagccaagtttcagaactgttcccaggagtgcccatgcatgtggcactttctcttcctgttttgtttttttcactactagtgccttctaccctccccagctctgcttcactgcagtctttatttcccatatcctggaaaataggtgtttgcaatcttccttgcttcctaagaatgctgtgagtataggttgtagatat

SEQ ID NO: 115068 - DNA, 597 bp, Homo sapiens
gcaattcccctgtcttgataaatccgctctgtctaggcagcagccaacgtgaacccattgggcggttacatttccagctttcagaactataagaaataaatttctgtkgtttataagtcatcccatttatggtactctgttatagcaaccaaacagattaagacaaaagtacagagattctacagaattcgcctttagattctagaagttgatgttagcattcagataataataatatcattattttaatgaaaggagttgtgtcacccttataacctgctggtatttttaaaaatctatttttattgaccttaacattgcacaagacagaaaagggacatgtattagcatagcaaatccattttacatatgcaattctggtgctctgagtttaaatgacttgcaattataatctaaatttattaacatttgaagtacaaatattatgttcaagacacttggtagatactccacactctatcatatttgaaattttgagtgggagagttaaaagtgggaatgaaaaaattaacatacattatctattctataatttacaactacagatagtattgcatgatttttatccaattacaa

SEQ ID NO: 115069 - DNA, 597 bp, Homo sapiens
gcaattcccctgtcttgataaatccgctctgtctaggcagcagccaacgtgaacccattgggcggttacatttccagctttcagaactataagaaataaatttctgtggtttataagtcatcccatttatggtactctgttatagcaaccaaacagattaagacaaaagtacagagattctacagaattcgcctttagattctagaagttgatgttagcattcagataataataatatcattattttaatgaaaggagttrtgtcacccttataacctgctggtatttttaaaaatctatttttattgaccttaacattgcacaagacagaaaagggacatgtattagcatagcaaatccattttacatatgcaattctggtgctctgagtttaaatgacttgcaattataatctaaatttattaacatttgaagtacaaatattatgttcaagacacttggtagatactccacactctatcatatttgaaattttgagtgggagagttaaaagtgggaatgaaaaaattaacatacattatctattctataatttacaactacagatagtattgcatgatttttatccaattacaa

SEQ ID NO: 115070 - DNA, 597 bp, Homo sapiens
gcaattcccctgtcttgataaatccgctctgtctaggcagcagccaacgtgaacccattgggcggttacatttccagctttcagaactataagaaataaatttctgtggtttataagtcatcccatttatggtactctgttatagcaaccaaacagattaagacaaaagtacagagattctacagaattcgcctttagattctagaagttgatgttagcattcagataataataatatcattattttaatgaaaggagttgtgtcaccyttataacctgctggtatttttaaaaatctatttttattgaccttaacattgcacaagacagaaaagggacatgtattagcatagcaaatccattttacatatgcaattctggtgctctgagtttaaatgacttgcaattataatctaaatttattaacatttgaagtacaaatattatgttcaagacacttggtagatactccacactctatcatatttgaaattttgagtgggagagttaaaagtgggaatgaaaaaattaacatacattatctattctataatttacaactacagatagtattgcatgatttttatccaattacaa

SEQ ID NO: 115071 - DNA, 597 bp, Homo sapiens
gcaattcccctgtcttgataaatccgctctgtctaggcagcagccaacgtgaacccattgggcggttacatttccagctttcagaactataagaaataaatttctgtggtttataagtcatcccatttatggtactctgttatagcaaccaaacagattaagacaaaagtacagagattctacagaattcgcctttagattctagaagttgatgttagcattcagataataataatatcattattttaatgaaaggagttgtgtcacccttataacctgctggtatttttaaaaatctatttttattgaccttaacattgcacaagacagaaaagggacatgtattagcatagcaaatccatttyacatatgcaattctggtgctctgagtttaaatgacttgcaattataatctaaatttattaacatttgaagtacaaatattatgttcaagacacttggtagatactccacactctatcatatttgaaattttgagtgggagagttaaaagtgggaatgaaaaaattaacatacattatctattctataatttacaactacagatagtattgcatgatttttatccaattacaa

SEQ ID NO: 115072 - DNA, 519 bp, Homo sapiens
gtgttaatagtgttccttgatacgtaaataggtaaacgtttgtcacttaaatagacattgcatttgattgtttggaaagacaatgtggtaaatctctctgtctagttctagagttccatacggctctgcatgatgagcagggcttgagctctgtgttctctgctgtctatcttccatctctgtctcattccttctgcatttgaatgaaggagtaaaggaagctagacatgaatgagctaaaactttgtgcatagaagagtattgctaagccctttccctttctctcatggatacaatatttgttaagtaaattaataaatttctccagstgactgtttttttctttccagatggacttgccagtttcaaaagtttcctgaagtctgaattcagtgaggaaaaccttgagttctggattgcctgtgaggattacaagaagatcaagtcccctgccaagatggctgagaaggcaaagcaaatttatgaagaattcattcaaacggaggctcctaaagaggt

SEQ ID NO: 115073 - DNA, 605 bp, Homo sapiens
tgacatctttctctagtcacttttgtgtctccttttttacagaaaagagcattcacayagacacacttccacacagcacaaaacatacacatttccacaataattcttaaaacttaacacatattaataattctcaaattaaccatagtcagtgaggctagaggagagcaagtctgggccatcttttagtaaaagttgagttttgcaatagtttcattttatttgcatttgtcttcaaactctgttttctctgaggtttgtctttaaaccctcttattgggtatttagattcttttttgcttttaatatttccactatcttgaattcttaaatctttacagcatcttgaattcttcaattcctttggattagtgatacggtttggctctgtccccacccaaatctcatcttgaattgtaatctccacaatccccatgtgtctaggaagagacctggggggagatgattagaccatgggggcagtttcctccatgctgttctcatgatagtgagtgagttctcatgagatctgatggttttataaggggctctttccccttcattccttgcttcttctctctcctgctgccctgtgaagaggtgtc

SEQ ID NO: 115074 - DNA, 615 bp, Homo sapiens
ggtggatttacgggaataaagaacactaaaggcagagtagctttgagaggggaaaattatttcaattctgaacatattgagtttgatgtgaaaggcaaatgagataatgtagtaaaaggtgcttcacaaactgagaagtgaaatggaagggttgttttaaaaggaaatggctgaaacaattttatgactcaacacaaacccaatcaacactcctgcaaaaacaatcaaagcccatgagctatatagattgtgggacagtcctatycaatttctaggtcaacatcatggcattatgatattatttttatctctactatttcctttgaaatgaagggcagctgttccaatagactgatgtaggtaaatacatttacctgtttactcatgagcctagatagaactgctaaaagagttgcaaagctatttgtctgcaaatctttagtgggtgagatatttagttcaggagtgagggataaaatttgataagccctcctcagcttggttctccttattagtttttttttttcagtgtttctttaaaacttgacctttatagaaacagataagattacttcttcgtaccttaattatcaagtcaaatgataagttaaaaaa

SEQ ID NO: 115075 - DNA, 574 bp, Homo sapiens
ctaataaaagaataataatggatatttaatccaaaagagaacgagagagagagaagcagaaaggaacacagaatagatgggagaaatagaaaactaataaggttgttgatataaacccaagtatgtcagtaattatgttaagtgcaatttgaccaagattgtcagacttaaaaagattttaaaaagaacctagttctttactatttacaagagacacagtttaattacaagaacacagaatagttgaaagtaaaggatggaaaaatataccatgcaaatattaacccttcaaaataagctgacacagttacattaatatcaatgtatattttaagatgaaacagttcataatgataaggaggccaactcaacagtaatatatcataatctggaatctatatgtacttgataaaatagcttcaatctatatgtagcraaaatggacagaaaaaatagacaaatacacactcatagttagaaaattccacacctatctcaatagctaataggacaagcaaccaaaaatcagtgagactaaagatctgagcaacaattaaacatatatacatatgag

SEQ ID NO: 115076 - DNA, 662 bp, Homo sapiens
tagggctcaaaaaatatatgtggaatgatggaaattttcctataacaatgagaaaggatttgggattttgaaggttgacaatgagatatccaagtggacttatgctgttgacaaccaggaatgtgaaaamagtttcggggagaaaacagaatatgaaatacagacaaaaaattttcagcacagagaagctaaatgaagtgatgggtaatacaatgacttctcttgataaatgcacataaagagagaaaagcagaagcacagagattgtgtcttggcacatatcctttggtctctgtgaaaggagctgtggcagaagatgctatagatagctgtaagtgccccttggcgttctcctctacacacccacctaaggctgtttatggcaaactctgggaccctctgcctcaccatgggagcatgctgggccagtacaggacaagtcagaactgctggagagtcatgctcccataagcagttctcaactaatggcaaatgggaagttggtggcaaaatacacccacttctctgcccctcctttggaataagtatgaggtggattcttcaccatccctcagaggtccccagtaaggctgaatgccagcagttgtgttcagtggtaactagtatgagcacccacactttgtcagtttacttcttttccc

SEQ ID NO: 115077 - DNA, 589 bp, Homo sapiens
taggtggcaggtgcacagcttgaacatatttcatttcagaattccaatatccttagtgtttgaataataagaaaaaagccttatatgtttatctatgtagttaccatttctggtgctcttcattcctttggataggtcaatatttccatctggtattttccttcttcctaaaaaaactttaactactattatcttgtgaggtaaatctgctggttattaattcagtttttgaatatgtgatatggtttggttgtatccccacccagaatctcatcttgcattgtaatccccataatccccatgtgttaagggtgggaccaggtggragtaattggatcatgggggcagtttctcccatgctgttctcgtgatagtgagtttcacgagatctgatggttttacaagcatctgacatttcaactgcttgcactcactctgtcctgctgccctgtgaagaaggttgtaggtacatgaatgtgctttggtcaacgaataggccgaggtgaatatccaagcctgcatgactcggtgagtttggtgctcaagcgcacacctccacttgttatataacctgtttgtgtaagttcat

SEQ ID NO: 115078 - DNA, 467 bp, Homo sapiens
gttctgatgatattagtatttcacctaatttggaccaatgagactgaatgaaagaatattatattctattgtttctgggacagaattttcttttacttgtactggaaatgaaccagggagctcattgccttgtttaccactgacaaccatcttatgaccatgagaaaaggtcgtctgaggaaataaaatgaaacaaagtgcataccaatgagggaaaaggagttggaagatcagataaatggagctagagcttagacctatcttacttacagactgtgggttytgtgagataaaagtgtctttactttagccattttaagtcaagtttttttatagtgatttgacaaagttatttgcattgataacacacaggtgcacacacacacacacacacacacacatatatatatatatatataaaaacatgtatatatacatatacatacatacacaatattcatgttaat

SEQ ID NO: 115079 - DNA, 548 bp, Homo sapiens
ccaaaggaatttacagattcaatgctattcctgtcaaactaccatgacattcttcacagaactgaaaaaaataaaaactattttaaaattcacatggaaccaaaaaaagagccccaatagccagggcaatcctaactaaaaaaaarcaaagctggaagcatcacattacccagcttcaaactatattacagcactatggtaaccaaaatagcatggtactggtacaaaaacagacccgtagattaatggaacagaacagagagcccagaaataaggccacacacctacaaccatctgaacttcaacaaaaccaacaaaaacaagcaatgaggaaaagactcctgtattagtccgttctcacactgctacaaaggactgcctgagattgggtaattacaaacaagagaggtttaactgactcacacttccacatggctggggaggcctcgggaaacttacaataatggcagaaggcaaaagaagcacgttttacatggcagcagatgagagaggagtgtgagagtgcaggaaaaactaccatttataaa

SEQ ID NO: 115080 - DNA, 518 bp, Homo sapiens
gactgtcctatgttgaaccactcctgagataagtccctaccttgtcatagtgtataatgtttagtatgctgctgggattcagtttgctagaattttgttgagwatttttgcatctctctctctctagtaacttccctgcttttgttgctgattttcataatttgagtgctctttttttttctgtctagctgaaggtttgcaaattttgttttgtggtcttttcagagtaccaacttttgggttcattattttccatttttatattctcttttatttctctctgctgtaatcattatttttcttttctgctttatttttttttctttttctagctctttaacatggaaagttaggctactaatttgaaatctttcggccaggtgcagtggctcacgcctttaatctcagcactttgggaggccgaggtgagagaatcacgaggtcaggagttcaagacctccctggccaacatggtgaaaccccatgtctactaaaaatacaaaaaattagctgggcgt

SEQ ID NO: 115081 - DNA, 597 bp, Homo sapiens
atggacactattcgtcagggggttaggctgagctgtgctcagttccgagccttccagtcctcagtgggtctaagcagagatccttgaaagtcgtgatgaaggacccaggcgctgcagcccatgcttctccacattcattgcccttgcctcagtcagacttttcacagagcctgaacagsacgtggctggagatcatcttcttaaaccaagcagtgtagtcaggggatcctgagctgctgcttcaaggaggatcctgatgacttaacaactgggagaatgggcaggtggttatcgtcctccagcgagtacctaagaggctactcagtcctcaccagatggatggcctggaccaccagaagactgacttgcctctgagaaatctacgttgtgggggctgtttccatgccttttaatttccccatttacaatatgcaattttacatgttccttatagaaagactagaaaatataggtaaattaaaagagggagaaatagacagggaaggaagggagggagggagggagggaggaaaagagggaaagaagggaaggaggggaaaggaggaagaagtccttcaaattctgcaacccagcaat

SEQ ID NO: 115082 - DNA, 494 bp, Homo sapiens
gttcttatttcagtccacttgttttataaatttgaaaaagattaaactcatacattttattaaacaaataaaaaaaatgttagcttgacatggagcatgattaatgattgcttcrgtgtaacaggcataaattggaagtatttcaggcaaactagaatgactaatcagactacctaaaaatgacccataactttcaatggcactaagagttgatgttatgcatctctttttttccttctaattgcacctgtctctttcataccttatccttggattgtattaatgatcacatgctatttttaaaaagtactagaaatatttgagcttcttatgagactagcctgaaactggacgtcaagttttttacttcatcccattctacatccttgacccctttccccctgtaagtaccccttcagtaacaaagaactttgctgagaagcccattttgggctctgcttctagaggacctaacctaagacaatgggatttgg

SEQ ID NO: 115083 - DNA, 498 bp, Homo sapiens
tgcagggcttatctttataataaaggaaggggacagtaagatcaaaagagatagaaaacactaaaataatcctgggttgccactgaggaagggagaggacatagtttatgctataatttttctaatatctgcctatattttcctaaaatggattctgacttttggtccaagatacatcattgaaactatcaacaagaacttatcttctgcctttataaaaactagattaaaaaacaaaaaaactttgctcccaaggaagaacagcattctagctcaacctgggaccatatacaccttgtaggaaatacctttgtattttcaggggacacatagtagatgttcagtaaatcttggtaaaatgaatgaatgaaaggagcatcaatcagttatttgtcagtwtgcttcaatgctaggtctacctgatccatatatcctagaaatatgttgctttagttgttttccagttaccagagcagatactcatccgaactcccttca

SEQ ID NO: 115084 - DNA, 649 bp, Homo sapiens
gacagtgttacaaaacttaatgttttaaaattttgaacaaattaaaaacatgaaatttatatttctcttacattttactattctctaatgagggaaaatgatttaaattttggactgaatgcaaccagtgtataaaataattatcttctgagtgatagtgaaacaattactgaattacaactatatgcagaaagtatttttgcctaacgtgttttccatgtgactaacattatagctcattgtaagtggtttgttttataattaataaagaagtccaagtggagttttacacaaaaacagaagatagagatcatttaattatatggtttgtgataaaatataattaagtatcaataagattttgcaatgctgtaatcttaaaatttctgaaataattcatggaatttaagccttgaaattaaagaggtaattagaaagctttaacacatwtttctgaaaatgctaaaagtgtatattgattaataaagaataaaactcttagagcttctaatatctgcagcttgattaatgcatactagggcttgatctataaagtacatatcaaaatttgtagatgtctaaaataagactgtattatccagtggaatcataactatgtatagctagatcaatagcataagccatatat

SEQ ID NO: 115085 - DNA, 471 bp, Homo sapiens
ttttttttttttttttagaattggaaggaaaaattactttatcaataaccaggctccaccaggattgacctagatggttgttcctggcacttgtcattctcagcaagcacagctcagasaacaaatacaaaagacccaaagtgcattgcatcttttatgggtaagcatgaaataggtttatttgtggtagtgtaatctaacttaagaggtgggaagacaaggctttggaaccaatgccacaaacattgtgttagtttttgttcatctatagtaaaaagtgaatgctgactggaatttctgggaaagatttatagcatatgcaattttaagtattcaggtaactctttagttactgtgttttaatccttcaagcccatcagagaacaaaccaatccttgttcttgggattgaaaatactagatatcccatcaagcaccattatcttgatattgaaagtagaaatgtgcttct

SEQ ID NO: 115086 - DNA, 593 bp, Homo sapiens
gttcaacagagacaatatgactatattataatgtcatttaaaattttaaaattttaaaaaaaggaaataatmtcaatagatgttaaaagagcatttactataaattcaattaatgttaagataaaaattattaatttaggtatgaaagttattgctttggtataataaagaatattcttctgaaaccaacagccaccaaaaaccatatgcaatgaatcaagaacaagagaaaaataccaactattattatccttcaatggtgtcccagaaatttcaatcagtgtaataaaacaagaaaaagatatttttaaaagtataactactagaaaggaagagataaaatcatcatttttgcaaatgatatagcaatttaactagaaaacacaagagactgaaatgaaaatttattaaaactgattttttaagttcagtaaaatggcacaatgccaaagacacataggaatcaacagctttttgcagactaaattaggcagatttctaatttaaaattctctttacaaaagtaagcacctccaaaaatctccctagtgttttccaataaaaatgtaatgtgagtcacatatgtaatttta

SEQ ID NO: 115087 - DNA, 593 bp, Homo sapiens
gttcaacagagacaatatgactatattataatgtcatttaaaattttaaaattttaaaaaaaggaaataatctcaatagatgttaaaagagcatttactataaattcaattaatgttaagataaaaattattaatttaggtatgaaagttattgctttggtataataaagaatattcttctgaaaccaacagccaccaaaaaccatatgcaatgaatcaagaacaagagaaaaataccaactattattatccttcaatggtgtcccagaaatttcaatcagtgtaataaaacaagaaaaagatatttttaaaagtataactactagaaaggaagagataaaatcatcatttttgcaaatgatatagcaatttaactagaaaacacaagagactraaatgaaaatttattaaaactgattttttaagttcagtaaaatggcacaatgccaaagacacataggaatcaacagctttttgcagactaaattaggcagatttctaatttaaaattctctttacaaaagtaagcacctccaaaaatctccctagtgttttccaataaaaatgtaatgtgagtcacatatgtaatttta

SEQ ID NO: 115088 - DNA, 593 bp, Homo sapiens
gttcaacagagacaatatgactatattataatgtcatttaaaattttaaaattttaaaaaaaggaaataatctcaatagatgttaaaagagcatttactataaattcaattaatgttaagataaaaattattaatttaggtatgaaagttattgctttggtataataaagaatattcttctgaaaccaacagccaccaaaaaccatatgcaatgaatcaagaacaagagaaaaataccaactattattatccttcaatggtgtcccagaaatttcaatcagtgtaataaaacaagaaaaagatatttttaaaagtataactactagaaaggaagagataaaatcatcatttttgcaaatgatatagcaatttaactagaaaacacaagagactgaaatgaaaatttattaaaactgattttttaagttcagtaaaatggcacaatgccaaagacacayaggaatcaacagctttttgcagactaaattaggcagatttctaatttaaaattctctttacaaaagtaagcacctccaaaaatctccctagtgttttccaataaaaatgtaatgtgagtcacatatgtaatttta

SEQ ID NO: 115089 - DNA, 593 bp, Homo sapiens
gttcaacagagacaatatgactatattataatgtcatttaaaattttaaaattttaaaaaaaggaaataatctcaatagatgttaaaagagcatttactataaattcaattaatgttaagataaaaattattaatttaggtatgaaagttattgctttggtataataaagaatattcttctgaaaccaacagccaccaaaaaccatatgcaatgaatcaagaacaagagaaaaataccaactattattatccttcaatggtgtcccagaaatttcaatcagtgtaataaaacaagaaaaagatatttttaaaagtataactactagaaaggaagagataaaatcatcatttttgcaaatgatatagcaatttaactagaaaacacaagagactgaaatgaaaatttattaaaactgattttttaagttcagtaaaatggcacaatgccaaagacacataggaatcaacagctttttgcagactaaattaggcagatttctaatttaaaattctctttacaaaagtaagcayctccaaaaatctccctagtgttttccaataaaaatgtaatgtgagtcacatatgtaatttta

SEQ ID NO: 115090 - DNA, 592 bp, Homo sapiens
cacctctgcctcttcctgggtgagtgatcctggagaagtcaccagacttctgagtctgtacactcatctagaaaatggaaaaaataaccctgctcacctcagaggtttattctgagaatcaaataagctggcatttatgacagcattttataaatctaaaaatgtaaaataattacaagttcttcatcttgttatatgagcatttcatctaacaacttttatcccatgtaactctatgtttcatagtcttaataaactactcctagagtaaaaatagccttgtagttgcacattggtttacaagataggaggtactcagtctgactgctctttasaatggcagatttgataatgcatgtggccacattttccacttattggataagcatcctgatgtgggagcactcacatgtacatgaagctaagtagctttcaatggtctgagggcaaagacagcactcttatatgactagctgaaagtttgcaagatgacctaagtagtgtgaaattggccgaggttttggatttcatttccagatatttaagtctgaatttttcataaacagcctttggggatgggacaaatcagatc

SEQ ID NO: 115091 - DNA, 592 bp, Homo sapiens
cacctctgcctcttcctgggtgagtgatcctggagaagtcaccagacttctgagtctgtacactcatctagaaaatggaaaaaataaccctgctcacctcagaggtttattctgagaatcaaataagctggcatttatgacagcattttataaatctaaaaatgtaaaataattacaagttcttcatcttgttatatgagcatttcatctaacaacttttatcccatgtaactctatgtttcatagtcttaataaactactcctagagtaaaaatagccttgtagttgcacattggtttacaagataggaggtactcagtctgactgctctttagaayggcagatttgataatgcatgtggccacattttccacttattggataagcatcctgatgtgggagcactcacatgtacatgaagctaagtagctttcaatggtctgagggcaaagacagcactcttatatgactagctgaaagtttgcaagatgacctaagtagtgtgaaattggccgaggttttggatttcatttccagatatttaagtctgaatttttcataaacagcctttggggatgggacaaatcagatc

SEQ ID NO: 115092 - DNA, 592 bp, Homo sapiens
cacctctgcctcttcctgggtgagtgatcctggagaagtcaccagacttctgagtctgtacactcatctagaaaatggaaaaaataaccctgctcacctcagaggtttattctgagaatcaaataagctggcatttatgacagcattttataaatctaaaaatgtaaaataattacaagttcttcatcttgttatatgagcatttcatctaacaacttttatcccatgtaactctatgtttcatagtcttaataaactactcctagagtaaaaatagccttgtagttgcacattggtttacaagataggaggtactcagtctgactgctctttagaatggcagatttgataatgcatgtggccacattttccacttattggataagcatcctgatgtgggagcactcacatgtacatgaagctaagtagctttcaatggtctgagggcaaagacagcactcttayatgactagctgaaagtttgcaagatgacctaagtagtgtgaaattggccgaggttttggatttcatttccagatatttaagtctgaatttttcataaacagcctttggggatgggacaaatcagatc

SEQ ID NO: 115093 - DNA, 478 bp, Homo sapiens
ttacaggcacgtgccaccatgcccagctaattttgtatttttggtagagacagggtttctccatgttggtcaagctggtctcgaactcccaacctcaggtgatcctcctgcttcagcctcccaawgtgctgggcttacaggtgtgagccaccacgcctggacttaaagtttttctgatttctacattgcaactaaattctcctgtaaatagaaaaatactttttattacttataagaacaaataattggtttgagttttaaagatgaagcactaacttttgttttcatcgtgcacttgtccctatttgtgctgctcactgtctctcagcatgtcctggtctttctccttgcacttaccctcctcctgctgaacaatctccatgcactgtccaacaccaccagcaattccagctctcccttggcctccccaaaatgggtgcaggtgtcaggatgtcaaacacatcctaaatgcaaaagc

SEQ ID NO: 115094 - DNA, 614 bp, Homo sapiens
gcacttgctaactttctagtttcttcttaggcagctagattatttataagtcctctttacttacatatctctactgaagtttgaattcttagccgaacgattccttttcttgtaaggtgagaggcttggagaagaccggtcttgtcactgtgcagaaaaggtaaaaaaaaattctattcaaagcaagtttgaatttgaaactagggctttcactgtttccaacgtggaaggtcagtgtctcaagcacatgtctccaagggcttgtgtctctgctgtactccagataaagctaaaatggggccgaaggatccaggtctcttagagtcccccagtttctctgggctttagaggctgcaatgaacatatcctgttgttctgctctggcttacttttgtattgtggctttgggatgatgtgatgcagcttagtggttcctacccccaagctgatcagagtaagaaacaacacctgggaaagttagtgcaamtacaagtccatcaaccccattgcagtgattctgattcagtggccttacctggtgcctggaatgcatttgtcaatgttactcagatgtgcaggcagtttgggcacccactgatatcatcaatcttaca

SEQ ID NO: 115095 - DNA, 571 bp, Homo sapiens
gctgagactactagtgatggggtttcaccatgttgcccaagctggtgttgaacttctgggctcaagcaatctgcctgtctaggcctcccaaagtgctgggcttacaagcatgagcactgtgcctagcctgcattgcagtttgacttctctgtcttcccaatcttgtttcctgtcccttccctttacatattttgactcctaataaacaccatgagccctgcattctgtctcagcatctgcttctagagaacccaacctgcaacatttattttgtattattatggattcaacacagaatttggagtcagacaggcctgggctggaatcctagcactggtgctcaccaacytggtggccttgggaaagtaatttgaactcctagcttcctagcctctggctcaggaagtctcctcatcaaatggagatgaaaatatctttattgcagagttttaggattagttgaagtaatgttatatgtcagcatgttaaaatggaagttgggaatgagtgcccaagctatgaaatggaattgagggacagaccacccctttcaaagtagatatcccacagt

SEQ ID NO: 115096 - DNA, 558 bp, Homo sapiens
attgcaattactaatataatttarttctgacattttcattttgtactgttctatttgttttgttttactcttctctcctcagtgtgtgtgtatgtgtttgtgcatgtgtgtgtatttccgttacctgtcttttaaaatattgcttgagtttattattacatatttctttctactttatttgaaggtttctattctcttagtagttactatcaatattccagtgaatatttataaaatcaacctctttgcagatgactagagtaaaataaagatctaggatgcctttaactctattcacttttgtctttgaggctggaaaaaacagaaatggacaagtggaaaactagagctagaagctctgaaagcaggcttaagcaatgggaatgacattcaggagcctgggtccttgggactttgcatgcaattgttatctgttattttaacagcattgttacaagctcaaactaattattactattgttttatatcattaatttgtttttagatgtatatgattattttctttgctcaccagtctcacttccatttcagatattc

SEQ ID NO: 115097 - DNA, 558 bp, Homo sapiens
attgcaattactaatataatttaattctgacattttcattttgtactgttctatttgttttgttttactcttctctcctcagtgtgtgtgtatgtgtttgtgcatgtgtgtgtatttccgttacctgtcttttaaaatattgcttgagtttattattacatatttctttctactttatttgaaggtttctattctyttagtagttactatcaatattccagtgaatatttataaaatcaacctctttgcagatgactagagtaaaataaagatctaggatgcctttaactctattcacttttgtctttgaggctggaaaaaacagaaatggacaagtggaaaactagagctagaagctctgaaagcaggcttaagcaatgggaatgacattcaggagcctgggtccttgggactttgcatgcaattgttatctgttattttaacagcattgttacaagctcaaactaattattactattgttttatatcattaatttgtttttagatgtatatgattattttctttgctcaccagtctcacttccatttcagatattc

SEQ ID NO: 115098 - DNA, 598 bp, Homo sapiens
agaaggcaggctctgttgtttcctcttctctcggagtccaagaatggtaatttaattcaattaaaaattgtattcattcaaactatggcacagatctctgacttgcaagaaaaagcttcaatcaagttaatttaacaattttttccagatrtctccaatgccctctaagactgcaagcctgctcttccccagtcttctctactgttcatccaattgcctctcagatcactgagaattattccttattcttctttcttgtttcattcccagtttccaaaacttcaaatggtcactgggtcctgcaaattctgcctcttcggtatctctggactctgccccttcctgtcagattattcctggattattgtgataaacctctagccagtttatctgcctccagtcttgtctcctaaaaatctcacttactcaattgctaaataaagtttctaacacttgcacttgtctctccttcttccctgccatactgcaagctccagatggaagttatgcttattaatactgtttctcaatgcctgaaacatgtatggtatgctaattatgtgagaacacacaaaatgttttcttgaaaactaccatc

SEQ ID NO: 115099 - DNA, 665 bp, Homo sapiens
aggaatgcagctcaggcaactataccacaaggccctggctgcagatcctgtccagagctgagagacatgcaggggctggattctgactcagactccacagggaggtaactagcagagcatggtgggggtgccggttggagagggacaacagtcatgttgtgctgatggtcagagagctttgactgtgtctcctgctggctgtggggggccacatcactggcaggtcacttcacctggttgagtcttagggtcttgacagtgctgatggaaagatttcatgagtaccaagtagataaaggcatgatgccaaggacraggattcccctgtaagtttcttaaaggtaggatggatacagtacctggcataaaacgtggaacagttaatgtatacgaagcttgtttaaatgaagataaagtggtcatgtggataaatggaggataaagtggaaaaaatatgggtaaattagaggaaagcactggcctagaggagaaaaagacacgtttgagtctttgccctgttgctgactttcgtgtatgctatccggcaagttacttcccttttctgggcttcagtttctctatctgtaaaaaggaggtactaacagtcctaccacacagaagtatgttgggtaaagtatgaaatgcaagtaaagcattagaataat

SEQ ID NO: 115100 - DNA, 551 bp, Homo sapiens
gagggctatatttttgagaaatgagtacagtaaaatacagaggaaagaagtccctcttcctgttgtgctcctaagatgacagcataaatggtcacatctacttaattcccaggaactgcatcacttctctttccagcagggccagtttcatgggtgcacaacctggtgcagctacacacaacccttctctcagaaggggccccgtacttgatttagtgctctcctgttgctctcttgaattcttcataattttagttttgtgcttatggaataaggaacatctgcatgagcagaggagcccctgaaggtgcagcccacatgggttcaagctggcaggcaccctagcagcaggcagtggcacacaatgagcatctgacctggcaagcacatgccttaggcagtctgggatcccttggctcccctagtggggtgaggtgcagctgggggtcaagactcrggtctagattggtggtgatgacagcagtatccctggccctgaaaaagaggtgggtatggcgtgggggcagcactgggacctggactgtgacccc

SEQ ID NO: 115101 - DNA, 585 bp, Homo sapiens
ccaacaataacacataatagttatttccaattctgtcaattattgattgagaattcttccaattctctcttttaattttcagaccaaccttccataccaatgcaaaatttcagcttctttcactcatgtttcactaatgagaataaaaatattctcagctccagaatgtgtgaaattacttgctctgatgtatgtatctactcaatacgtgccatataacacatcaaaacaggggcayagggactcctgctgcagcaccatattgtcttagagagttatgttatctggaaaactaggactagaacaatggcagatagaactgccggccatgaatgatggggcaagatagcatcctgttgagagagttcaactctgtaagaattcatctgaaactcctcccatttatggagacagaaaaatttctcaccccattattatttatgaaatgagtcagaaaataatctaaaaaagaaagttacttatctgcataaaaacacatacataaatgtttttagcagctctgtacattgcaaaacccaggaacaacccaaatgtccttgagcaggggaatggataaacaaacta

SEQ ID NO: 115102 - DNA, 396 bp, Homo sapiens
tgtgaagcttttatttattcctaatgctaggcacaattgtctgtgtattgttttgttcccctctccccgccatgcttatcttccattataaaagttctgaggacataagttcttagaggacgactggggagaagattgaatgctcaaggtccaaatttgcatcatacagtttctccctccttgggaattcttcctacttggaaacaattccaatctctgaaagatattaytcaggaattcagggatgtgtatttgaatataatcttatgtggggatgattggaagaagtaagaaataagggcagtaattatactgaaatatcaagaaaatgatattgaaaattcaaataggatcttagatgatacaaatatataaaagaaataattttctaaaaat

SEQ ID NO: 115103 - DNA, 643 bp, Homo sapiens
gcaatcaaatttttacatcttaaaagccccgatgaattacatacagagtaaccaggtttgtcctcataaaagtcattctgctatcctcaaactcatcataaaaagatctatattaaaaatcagcatgatgatatccataaaagattgaagcaaaaaaaaatgcaatgttgattctcccagggcctaaggcaaccctgtcttcaaggcagagcttccatgaatgtcagcataagtaagggaatccatcaattagttatttcataaagccaaggagtaactgaaaccatatagttgtatatatgtttaactctttggaagctgaagaatgatcaaaacacataggtgaaagttttactgttctgttaatactgtcttaattttggtccaccccaacaccaaacaggtcttacaggattaaattcttaccagcctaaatatttattttatccacacagtcttgaattattttttcaaaataagacattagctgtcttggacatttcttattgccacaatcagctgattttccctcttgcttyctctgtttgttcccttccttaaagccaaagagtttgaatttcttttcccagacctgagagagttcttgtacactggtaaattgacactgaacatggaagacata

SEQ ID NO: 115104 - DNA, 553 bp, Homo sapiens
aatgagaacaaagacacaatgtaccagaatctctggaacacatttaaagcagggtgtggagggaaatttatagcactaaatggccacaagagaaagaatgatccaaaatcgacaccccaacatcayaattaaaagaactggagaaacaagggcaaacaaattcaaaagctagcagaagatgagaaataactaagatcagagcagaactcaaggagacagagacatgaaaaacccttcaaaaaaatcaatgaatctgagagctttttttttttttttttttggaggtatcttgaagggaatatgaaatcttggccaggaaactggaggatttgtgactgcaggtggtgttttcattattttttcctgctctaggtagaacttcacggaggggatgatctgggaggtaaatagctgaaattccactggatttgtgtttgtggcctatagctcctgataccagaaagaagggccttttctggggttggagtatttcttaagaggcctggaagaatgtgattgccttgagctaactcgccttatgaaaaggacctta

SEQ ID NO: 115105 - DNA, 609 bp, Homo sapiens
acaacctaagtgtggcactgtcattacaaacaataggcacctggcctcctttctctttgctctaataagagatggcttttgtaatcaggaaaacgatcaaaatgcycagtccaaagaaccaatagagacaagtgaactgaaataataacttcgcctcttgactttgtgtgttaattggtgattctttcttctgaactccccttttgctcacaggctgttgtgatgctaaacgatgttgcaatgtgaacagctaatgtgcacctttgctggtagctgtctttcccacatatgccttgattttagtgactgaatgttagcaattgctgttacacatctggactgattgatgagtgaggcagccttacatgtctatggaaactgtaaaaacaaattgatcaggcctttctactttatcttccctgaagatctcatttttatactcagatttattctatttgacaacagtcattagagatacctttgtgtacattttaatgagactgatactattctggaggtggaagactggtttggacttgtggttgttaaggtgcagagttttctaactaaaagatgagaaatgagctccagaagctaataacatgaata

SEQ ID NO: 115106 - DNA, 609 bp, Homo sapiens
acaacctaagtgtggcactgtcattacaaacaataggcacctggcctcctttctctttgctctaataagagatggcttttgtaatcaggaaaacgatcaaaatgcccagtccaaagaaccaatagagacaagtgaactgaaataataacttcgcctcttgactttgtgtgttaattggtgattctttcttctgaactccccttttgctcacaggctgttgtgatgctaaacgatgttgcaatgtgaacagctaatgtgcacctttgctggtagctgtctttcccacatatgccttgattttagtgactgaatgttagcaattgctgttacacatctggactgattgatgagtgaggcagccttacaygtctatggaaactgtaaaaacaaattgatcaggcctttctactttatcttccctgaagatctcatttttatactcagatttattctatttgacaacagtcattagagatacctttgtgtacattttaatgagactgatactattctggaggtggaagactggtttggacttgtggttgttaaggtgcagagttttctaactaaaagatgagaaatgagctccagaagctaataacatgaata

SEQ ID NO: 115107 - DNA, 524 bp, Homo sapiens
aatttaaatgtagtttaacatagaacatccaaaaaagaaaagtccagcagcaatctagttacacatatggagtccagtagggatatacgtgctagacaaaaaaaaaaaaaaaaaaaaaaaaaaaacctcacagttgctagggaattcggattacccctgaratcataactgttggctttccttccagattatatcagttaataattccttgtgatggggccaaactttaagcttgcttttaaagagagatgtattatattaaacaatgcatacaacaaatatggcaataattcaaatatgtgattgctttaggaaagacagtcccaatctaaacgtggttgtcagatcagagttacacctgtaactgactcctcagatttattttgttactgctgggaacatttctggaatacagtccctgaaaagaatcagaactagacttttacaggccaggtaacagaaaacctgatttccccaccctggtaaagccaaaaaaaaaatattctgcaagatccagtttattg

SEQ ID NO: 115108 - DNA, 524 bp, Homo sapiens
aatttaaatgtagtttaacatagaacatccaaaaaagaaaagtccagcagcaatctagttacacatatggagtccagtagggatatacgtgctagacaaaaaaaaaaaaaaaaaaaaaaaaaaaacctcacagttgctagggaattcggattacccctgaaatcataactgttggctttccttccagattatatcagttaataattccttgtgatggggccaaactttaagcttgcttttaaagagagatgtattatattwaacaatgcatacaacaaatatggcaataattcaaatatgtgattgctttaggaaagacagtcccaatctaaacgtggttgtcagatcagagttacacctgtaactgactcctcagatttattttgttactgctgggaacatttctggaatacagtccctgaaaagaatcagaactagacttttacaggccaggtaacagaaaacctgatttccccaccctggtaaagccaaaaaaaaaatattctgcaagatccagtttattg

SEQ ID NO: 115109 - DNA, 524 bp, Homo sapiens
aatttaaatgtagtttaacatagaacatccaaaaaagaaaagtccagcagcaatctagttacacatatggagtccagtagggatatacgtgctagacaaaaaaaaaaaaaaaaaaaaaaaaaaaacctcacagttgctagggaattcggattacccctgaaatcataactgttggctttccttccagattatatcagttaataattccttgtgatggggccaaactttaagcttgcttttaaagagagatgtattatattaaacaatgcatacaacaaatatggcaataattcaaatatgtgattgctttaggaaagacagtcccaatctaaacgtggttgtcagatcagagttacacctgtaactgactcctcagatttattttgttactgctgggaacatttctggaatacagtccctgaaaagaatcagaactagacttytacaggccaggtaacagaaaacctgatttccccaccctggtaaagccaaaaaaaaaatattctgcaagatccagtttattg

SEQ ID NO: 115110 - DNA, 582 bp, Homo sapiens
aaaggtttgtatgtggtggttttgtgagaactgcaccaaattaatcataattaatataaataataaggggactactttaaaatgtcactgaatacacaaaagacctaataaatcgaaaagtatatccttagaaaagaaaacacaacattataaagcatcaatttgccttaacgtgatcaaaataaagataccagcagacaagcccaccttaaaattcaaatagagaaataaggaagaggttgggtgctggtggctcatacctttaatcccagcattttgggaggctgaggcaagtggatcacttgaggtcaggagttcaagaccagcctggtcaacatggtaaaacccaatctctactaaaaatacaaaagttagctgggtgtggtggcaggcaccagtagtcccagctactcgggaggctgaggcaggagaattgcttgaatccaggaggtggaggttgcagtgagccgagattgcaccactgcactccagcctgggcaagagaggcagactctgtcmcaaaaaaaaaaaaaaaaagaatgaaaggaaaaataataggaaattctgtaaaataaaaaccct

SEQ ID NO: 115111 - DNA, 560 bp, Homo sapiens
aaaaaccaatttggcaaaaggaaaaatggacaatgttttaaaaccttagggagacggggaagtgagctggtggcgctttcatcccaaaggatataccttccctccatttcctgggccgtttccattccacgcttatcttcagcaataactgaaccacatcgggatgcgtcgctcatttaaaatcagaactcttccctatgggatctactcccagccactgattgtgttcctgtgttctaccggcaggtccagcctgaccaggcgcagactctgcgcgcgcggagcagcgcgcgatcctggggatgcaggggtcatcccggaggtctcggcctcgggcggtgggcctctcgccggcagcagggggcgctgcagaacctcggtccccatcctggagaaccacctccccggctcagccggtctgcgccgcccgccaccatccgaccccaagttctctacctagttctgagcgttcttcctaaaaragacagtaaaccctgcggcactcccagtgttacgtgacagaaaaaatacagagcatctcaccctgtgaaaccgatcac

SEQ ID NO: 115112 - DNA, 588 bp, Homo sapiens
ataaacttcctttagcatctagtgtgccatttacatacgagcagtccagacggtgggattctttccttgtattattttgatagcctctgatctaagatggccactgccrcaactacctgtaaacagtgaggccagccttttctactgtatcaatttccttacttagatatgccactggttgtggggttgtcccacaagtctgagtaaggactccaagagctactcctgctctctctatgacaaataagagaagttttgtcctgtgggaaagcttaaggctggcgcttgtactaggcctgctttaaggttttgaaggctgtttctgccactggttcccattctactagatgagtagttgccctctgggtttccttgaatacagtatagagtggcctggccatcttgctgtatctggggatccataataggcaaaagccggtgatcccaaggaacccccacaactgttttaaagccttagggtgaggataagccagtataggctcttttcactccttgctgagggccctggttcctctggctaagattaggcctagatatttgacctgttgtaggcagagctgggccttc

SEQ ID NO: 115113 - DNA, 361 bp, Homo sapiens
cttaatcctatggctgtaaaaaaatacattctactaactgaatgatcttggaagcagattcttccccaaataaraatgtggcccagccaacacatttttggcagccttgggagaccctaagcaaaaaatccagctaagcctggtgtccaaaaactgtgagataataaaagtgtactgttttaagccagcgaatttgtggtaatttattatatagcaatagacaactaatacaatcaatccaccatagattaccataagtgagatccaaatctcctgaaaattagtcttggcaatttgaaagggtagaaggaggcagaaactagctcactggatagcaaagggtgtaagtagagctgtccct

SEQ ID NO: 115114 - DNA, 482 bp, Homo sapiens
gtcatgccctactggcatgcaacatccaagtggggcaggctttccaatgagtactaccttgatgttagmaggtgggtggatggtgatgatgattagactctaagcactatggcttttgtggtgagcaatctgggtgtcctcactttgtacagaggaaggaaatcctactgcctttaactgtcttacatggttttgggcaatgacattcagaggtgatgatgatgggccagggttgaagctctgcttctattttctgatgccacaaacaccccatattcttttctaattccttagagagattgaagaaagtgctccaagaataatagaggctgatttttttttcctttccaccatagagattaggggcttagagctatattcaagatttgatttaaaaaataaagcaatatgacatctcttttatcaatatagcaaattcatgccagcaccatgtattatttcaagaaacatgtaattaggct

SEQ ID NO: 115115 - DNA, 482 bp, Homo sapiens
gtcatgccctactggcatgcaacatccaagtggggcaggctttccaatgagtactaccttgatgttagaaggtgggtggatggtgatgatgattagactctaagcactatggcttttgtggtgagcaatctgggtgtcctcactttgtacagaggaaggaaatcctactgcctttaactgtcttacatggttttgggcaatgacattcagaggtgatgatgatgggccagggttgaagctctgcttctrttttctgatgccacaaacaccccatattcttttctaattccttagagagattgaagaaagtgctccaagaataatagaggctgatttttttttcctttccaccatagagattaggggcttagagctatattcaagatttgatttaaaaaataaagcaatatgacatctcttttatcaatatagcaaattcatgccagcaccatgtattatttcaagaaacatgtaattaggct

SEQ ID NO: 115116 - DNA, 561 bp, Homo sapiens
gtaataaaagtatctatttggtgtcttaacattagccatcctgattcctatgctaatttcttaccttgtgtaggggggccctaaaaaaaaaaaaaaaatttgtatgtgcctcagtttattttttttcaatacaattcacaggagcattgttatttaaagattataatcagcattcaaaaaactcaaaataagagcatatttttcccttccacaaataattatgtatgaaaatcaaaagttttcaggaaaggtcaatkaagtgatttttttttttccttgcaaaaatattaaccccaactccttgaaaaagcttccctaaagtatgtcaagtatgatgtgtcttatggaaaacgtttttttaaagcagccattcccaaggttgtattttatattatggctaagtggaaagcaaatgtattcctcttggcaattttagcaaaaaaaaaaaaaaaaacaagtcacagaggttatcattatgtaacatcaaatacttggataaaaactagagaaattcagccatgtatccaaatagttggtatacaactatactaacatgtaata

SEQ ID NO: 115117 - DNA, 596 bp, Homo sapiens
tataggcaggaaatgctgcacgggagcctggttagcaggggtgctgtgggccccgggctgcagggcctgctrtgcatgcagcagcatctcgtgacgggtcatctcctggtgcgtcctgtgatgaagcaggtgcgccacaagccagagaggagcaccagaggggaaaataacaccctgtccatctgactgcagaaggcatgcccctcacatctccgtgcctctgcaatcgagacacagcgagagtgtctcagatgtaacgaataccataaatctgtgtaaagcaagtcctgggggaagaagaagtatggggtctcccttggaaaggacaacaaatatgccacagaatggcacccagcacccctgaggtgagcccagcaggctgtggacggtgctgaatttccagttacttcttaaggcctaaagaagatggctcagcatgctcctggcctctaatgcatttggagtggggcaaaacacacaccttctcagtgagagggactcaagaggtcccagaggtgcaatcctaaaatggacaggctgctcttggagaaaaggcgccctccaggcctggaagactctagcagaggctggtgggc

SEQ ID NO: 115118 - DNA, 609 bp, Homo sapiens
ctaagaaatagcatacaaagacataagaagaaagccaagaggacatgtgttctggaagccaaagaaaaaaagctggttttgtttgtttgtttgtttatgtgtttttgtttgtttgttttttaattaaagaaaaagagactactgatagatcaataaaatgagaataaaaaattwacctttatattttggaacatgaaaataattagcgatttgaaaggaacatttaattgaaatggtcaatacttttctagtattttaattgtaactcatgcctcactttgttacccaggttggactggactcctggcctcacatttttaaataattaatgcttatttagatttacccttacatttaacaggtttacagttgccacttgcttctcacacttgtcttttttagtgttttcttttttctttctttgttactttaaaaacagttgttcaatgaatccatgagtgtgctttcttaaaattttgtagacccaaaaagtctcagtgctgtgtatagtattctatcttgcactgtatattttggatttggaacttggtatgcccattgcattattgtattagtttttcagtgaacaaatttctttttaaaatattc

SEQ ID NO: 115119 - DNA, 460 bp, Homo sapiens
agaaggggaatttgaatcagaaagaaagggcagtgatcagttggaaatatctgaatacatattgcctaatgggcatgtcctctctctgacaaaaagcctgatctgactgcaaatgaggcaaattgtggcckgtagcagcatgaacctccttctccaccaaaggattgctcagtaataacagtctagcagaaactcaccttgaaaaaaaaaatgtagacaacatgaaaaaaagaaagaaaggaagaaaatcaacagtcattcagagaagtgccatcattgtaagtgcatagggtaagatttaaaataacataaagcaaatgaaagatgcataaaatacaaaagaaagacggcagagagcaataaaaagagtacttccaaataagtagaattaatattctcaggggaatgccagaagttactgcatccattaataaagaagaggaaagctaaaaatgagatc

SEQ ID NO: 115120 - DNA, 460 bp, Homo sapiens
agaaggggaatttgaatcagaaagaaagggcagtgatcagttggaaatatctgaatacatattgcctaatgggcatgtcctctctctgacaaaaagcctgatctgactgcaaatgaggcaaattgtggccggtagcagcatgaacctccttctccaccaaaggattgctcagtaataacagtctagcagaaactcaccttgaaaaaaaaaatgtagacaacatgaaaaaaagaaagaaaggaagaaaatcaacagtcattcagagaagtgccatcattgtaagtgcatagggtaagatttaaaataacataaagcaaatgaaagatgyataaaatacaaaagaaagacggcagagagcaataaaaagagtacttccaaataagtagaattaatattctcaggggaatgccagaagttactgcatccattaataaagaagaggaaagctaaaaatgagatc

SEQ ID NO: 115121 - DNA, 460 bp, Homo sapiens
agaaggggaatttgaatcagaaagaaagggcagtgatcagttggaaatatctgaatacatattgcctaatgggcatgtcctctctctgacaaaaagcctgatctgactgcaaatgaggcaaattgtggccggtagcagcatgaacctccttctccaccaaaggattgctcagtaataacagtctagcagaaactcaccttgaaaaaaaaaatgtagacaacatgaaaaaaagaaagaaaggaagaaaatcaacagtcattcagagaagtgccatcattgtaagtgcatagggtaagatttaaaataacataaagcaaatgaaagatgcataaaatacaaaagaaagacrgcagagagcaataaaaagagtacttccaaataagtagaattaatattctcaggggaatgccagaagttactgcatccattaataaagaagaggaaagctaaaaatgagatc

SEQ ID NO: 115122 - DNA, 567 bp, Homo sapiens
tttcttctcattcatataataattcagtagaggattaactttctgaaattccttaaaggttttcactgaatcctctgcatttamtataaagaggagtatgagaagcattgtgtgaggtatcttatagctcagtctaaaagtgggaaatataactttaacctacatttcattcaccagtgaaatggtctcatcctacctgcaactgaggctgaaaaatacagcatttccgtatggtccaaaggaggaaataatgttatcatctcaccagtctctgtcaaggtcagtccttctgatgccaaagtatctgctttaatcttcgtcccattataaaacacaccgacttctcctctcaaaatgaaaaatgcagagttctttcaaggtctggcatccagctcaaaatttagtatctccggccactcataattctcccaatgaagtccagataaggtcctcatttctcagtaaaatctaaacttaaaagactaaatatgtgtcctgtgtacaaatatgcaacggtgaagtgggaacaaggtggcagcaataaatatatctctatcaccacagtca

SEQ ID NO: 115123 - DNA, 499 bp, Homo sapiens
ctcttggaacctttagatgctatcatgatgttagcacagaagataaatttataatgttgcagtgaggtaaggaaataaaacatgtaagtctttgaaaacaacactatgasagcccttgcaggctaaaaattagacaccaaagcattttttgttacttttggagaataaaagaagtgtgcccctcaatgtcttatgggagaaaatatatagtttgatacacttgtcaatatctctaactcaaaaatgatgagtataaggagtgacccttattgtagtcttatatttctctccaacaattaagagagttggtggggatgttttttccatgagttcatcccgggccccaggagattttcatcttgtattctctttataatcctatcttagtgtttcatcctcatggctaagttcagcaatacttctgcattccagccagtaaaatgtgtaagaagagatgtaaaaacaaccggctttgtctttatggagattaacttaaatt

SEQ ID NO: 115124 - DNA, 499 bp, Homo sapiens
ctcttggaacctttagatgctatcatgatgttagcacagaagataaatttataatgttgcagtgaggtaaggaaataaaacatgtaagtctttgaaaacaacactatgagagcccttgcaggctaaaaattagacaccaaagcattttttgttacttttggagaataaaagaagtgtgcccctcaatgtcttrtgggagaaaatatatagtttgatacacttgtcaatatctctaactcaaaaatgatgagtataaggagtgacccttattgtagtcttatatttctctccaacaattaagagagttggtggggatgttttttccatgagttcatcccgggccccaggagattttcatcttgtattctctttataatcctatcttagtgtttcatcctcatggctaagttcagcaatacttctgcattccagccagtaaaatgtgtaagaagagatgtaaaaacaaccggctttgtctttatggagattaacttaaatt

SEQ ID NO: 115125 - DNA, 639 bp, Homo sapiens
ctctgtcctttccatatgttggcaggcaaaatggaaatgaatttgaacttttgtagtttttatgtagatgaattgattgtttattttttatttgagccatgtttttaatttcaaaatacattttctcataaaaaatacttaatgtttctatgaaaactagaacatagaaatcagtcagtaaacataataaaccaaaaatgtttaaacttcacattaatatcccaggctaagaagtaccaaaatacagatgcacatgttaatagacaaaacacttgaggrcaatataggataacattacatagaaagaatatataatattttaaaagtgtttacaatgtctaagcatgtcttatacttatgaaggattataaatgcaatgttgtttttctcttatttcttcactcaatgtagatgtagactaaagatgcacagtgcaatagaataaaatttcttatttttcattatattgtcttcccataattagaaggaatatatattgtcagataactttggtcaatcaggtttcaataaatattatgttatttagggaatttaacaagattggtagaattaagttaaataataggaataacacaatatataccatggcccaggctcaatagcactccagctaatata

SEQ ID NO: 115126 - DNA, 639 bp, Homo sapiens
ctctgtcctttccatatgttggcaggcaaaatggaaatgaatttgaacttttgtagtttttatgtagatgaattgattgtttattttttatttgagccatgtttttaatttcaaaatacattttctcataaaaaatacttaatgtttctatgaaaactagaacatagaaatcagtcagtaaacataataaaccaaaaatgtttaaacttcacattaatatcccaggctaagaagtaccaaaatacagatgcacatgttaatagacaaaacacttgaggacaatataggataacattacatagaaagaatatataatattttaaaagtgtttacaatgtctaagcatgtcttatacttatgaaggattataaatgcaatgttgtttttctcttatttcttcactcaatgtagatgtagactaaagatgcacagtgcaatagaataaaatttcttatttttcattatattgtcttcccataattagaaggaatatatattgtcagwtaactttggtcaatcaggtttcaataaatattatgttatttagggaatttaacaagattggtagaattaagttaaataataggaataacacaatatataccatggcccaggctcaatagcactccagctaatata

SEQ ID NO: 115127 - DNA, 177 bp, Homo sapiens
gtcacagcatttccacttccaggcctatacagataaataaaatcagtgttatacacagartaggtacacacacacacacacacacacacacacacacacacgtgttcagatataaagatttcaactgtagcatcatttgtaataaacaatattggaaacaatgttggtatatattgc

SEQ ID NO: 115128 - DNA, 562 bp, Homo sapiens
aattaagttgtctctatacctcacttctgtttaaatgctgccagatcacttttttggccagagtcctctgaacctgttttggttttgggggctgtccaatttgagaattgttttttgtattgttttattttgttttactcaaataaactccggtaaatttaagtctaagggttytttttcttttaacagattggcgtggtcagcgggatctgaagcagaactccagtgattgccaggggcactgggtaaccaggtatagttacctgcactgtgcttattttttccttgctgcatctggggctcatgagtaagttctctcttggattccaaagctccacagatttgtgctttgagctatctttgagcaaagttttgatctggactagatttggaagttgattctagaatcatgaataaaggatctttctttttgccttgagcccaaatccgaggttaatttgtgctatgagagagcacgtgaacttgagctgggtaccaaggattatcttgtgctgtaagaaggcatataacctttggggtttgcagtgtctagatcagacag

SEQ ID NO: 115129 - DNA, 303 bp, Homo sapiens
aagccttttcctgtaaacgctgggcggcatctcttactatccctgacctgttagtgtaaaaacaacactcttcccytaagaaggtgcagcagtcctcctttctcagcagtgaggaggtctatgcctcagaggcttcggagtgtcactgctgccagagtctatttgggattgtagagtaaggataggtttcattatttcttgcaaactgagaaatcctttgagagtgtgtggtagtaggataatacatgttacactgttaacttttagcaaactttacttttgttgaaaacgttgtaagtttgg

SEQ ID NO: 115130 - DNA, 585 bp, Homo sapiens
cttcctcttttttttaaagtgagaaacacatcacatggcactggtcatgctgccatagtcacgttgccctctgactctactgcctcccccttccacttctaagaactattttcgttaytttggccccagggagataatcttagataatcaccccatctcagattcctagatttaatcacatccacaaagtccattttaccatgtaacgaagtatactcctggatattcctgagagcaattattctgactattccattcatttatcagctaaacaggcaggaagatattacaaacacagataagatggtaaatgtattgctgaggaaatgtagttctcagtttactgcctgtgatttatcattgaattaggaagaataaatattggaagtttgctgaaaggaaaaatcagtattttggcatatgggagaatgaattagctaggctagtattagactttttaaatcttactttaactttcagatgactattcaacatagttgtatattttctccattggatttcatatgttagtatcttgtagatggatatttgggttaaccacgtgaacaagaggagaaacaaggc

SEQ ID NO: 115131 - DNA, 606 bp, Homo sapiens
ttaaatttctttctaaatataagactgtacttttaaaaggagagagaatttttagattaacaagttcaattctcataattttcacttcataaaaatgattcacagacactctttttttaagctagaaacacatacatttaagcaaagaatgtaaacagaagtcttcatatttttaccaacagaatgtcttgtttttcattttttaaaaactgttttgggaagcagctgtgctggggatctccagtttggcattccatattggttctgcccttcttcaccttgtctcactccaggatgctgacttcttgccacatcaacagggattttcctctccttcctattggccactgaaaatcccagcagatggtcagggaaaggcaggagagtgagatgagggcatttattttccccaatcccttcgaagtctcctaaggtgacagttgtctctgcagaccttyccttcatgctgttctccttccttttctggtaactggaatgtgaccttctaatgtgaaatcagaatgttaaccttctagttggaaagcgacaagctccaaatcctctttgaaggaaaacaaatattgaggacctaaaagattgaataca

SEQ ID NO: 115132 - DNA, 511 bp, Homo sapiens
ggaaagaaagccacacatctacaaccatctcatcttcaatgaagctgacaaaagaaagcaatggggaaagactctgcagtcactaaatgatgctgtgataactggctagccatacgcagaagaatgaaactggacccctacctcacaccatagacaaaaatttacaaatgatagattaactatttaaatgtaagacctcaaactgtaagaaccttagaatataacctaggaaatactattctggagatcaaccctggcaaagagtttatgacgaagtcctccaaagcaagtataacaaaaacaaaaattaacaagtggggcctaattaaactaaagagcttttgcacagcaaaaaacaaaaamaaacaaacaaacaaaaaaaaaaaaccatcacagagtaaatagacaatgcacaggcacagaatgggggaaaatatttgcaaactctgcatctgacaaatgtctaacattcagaatctataaggaacttaacaagcaaaaaaacatataa

SEQ ID NO: 115133 - DNA, 525 bp, Homo sapiens
tgtaggtccacacttgctgcgtgtttcacacattcctcttctcagtgccatcttctcaacacgtataaaacaaactcgctaccttctccctctctcgttggtgttattatcagcattgttgctattattatgatagctccattctagtaatgccattctcatgtttccagttgctcatgcctgatacgagaagccatcttagcattccccttccacgttgtatgggatccaatctgtgcgcagatttgctgggccttccctgastgtttgaggtgtatctgcctcctctccatgttgcccacacattcagtaagttttgtttgtacaagcgtactggcctctcaaccagtttccaggtctcttatctttccctttcttattccagaagtcacacttctttctagaaaatttccttagtgacaatatttggttgatgcccattgcaaacaaagtaaatttaaacggctcagtttgatatttaacaccttggctccaacttaaatgcctagctttatttctaccact

SEQ ID NO: 115134 - DNA, 525 bp, Homo sapiens
tgtaggtccacacttgctgcgtgtttcacacattcctcttctcagtgccatcttctcaacacgtataaaacaaactcgctaccttctccctctctcgttggtgttattatcagcattgttgctattattatgatagctccattctagtaatgccattctcatgtttccagttgctcatgcctgatacgagaagccatcttagcattccccttccacgttgtatgggatccaatctgtgcgcagatttgctgggccttccctgactgtttgaggtgtatctgcctcctctccatgttgcccacacattcagtaagttttgtttgtacaagcgtactggcctctcaaccagtytccaggtctcttatctttccctttcttattccagaagtcacacttctttctagaaaatttccttagtgacaatatttggttgatgcccattgcaaacaaagtaaatttaaacggctcagtttgatatttaacaccttggctccaacttaaatgcctagctttatttctaccact

SEQ ID NO: 115135 - DNA, 621 bp, Homo sapiens
tgtccttgctattgtcagcactgtttcagtcgggaggcaggatggyttttagttctgctgacagggtcatttgacttggctgactctcgctgctcttctggtttctttatcctctcaggtatcagcctatgccaaccacagaccacacagaaataggaggcaggctttggttcgtagcaagtgcttttcttgattcaaaaagttgctgttttagagcagtggttcgcaaagtgcaacccccagagcagcagcatcaaaatcacccagaaacatattggatatgcaaagtttcaggaccaccccagaattactgactcagaaacagtgagggtgaggcccagcaatctgtgtttgaacaaatttccaggtgatgctgatgcttgtttgagtttgaggatcactgatttagagtcaatattaaatataaatccctagatgttttttggaaaaaaaaataacagttttattgagatataattcctataccatagaaatcactcatttctaagttctccactgtggccattagcagaagcggctccatgggtgctgaaggctggcatccagctgctccacagctctgagggctggttccagtgctcaggtatggatagcatgctt

SEQ ID NO: 115136 - DNA, 621 bp, Homo sapiens
tgtccttgctattgtcagcactgtttcagtcgggaggcaggatggtttttagttctgctgacagggtcatttgacttggctgactctcgctgctcttctggtttctttatcctctcaggtatcagcctatgccaaccacagaccacacagaaataggaggcaggctttggttcgtagcaagtgcttttcttgattcaaaaagttgctgttttagagcagtggttcgcaaagtgcaacccccagagcagcagcatcaaaatcacccagaaacatattggatatgcaaagtttcaggaccaccccagaattactgactcagaaacagtgagggtgaggcccagcaatctgtgtttgaacaaatttccaggtgatgctgatgcttgtttgagtttgrggatcactgatttagagtcaatattaaatataaatccctagatgttttttggaaaaaaaaataacagttttattgagatataattcctataccatagaaatcactcatttctaagttctccactgtggccattagcagaagcggctccatgggtgctgaaggctggcatccagctgctccacagctctgagggctggttccagtgctcaggtatggatagcatgctt

SEQ ID NO: 115137 - DNA, 621 bp, Homo sapiens
tgtccttgctattgtcagcactgtttcagtcgggaggcaggatggtttttagttctgctgacagggtcatttgacttggctgactctcgctgctcttctggtttctttatcctctcaggtatcagcctatgccaaccacagaccacacagaaataggaggcaggctttggttcgtagcaagtgcttttcttgattcaaaaagttgctgttttagagcagtggttcgcaaagtgcaacccccagagcagcagcatcaaaatcacccagaaacatattggatatgcaaagtttcaggaccaccccagaattactgactcagaaacagtgagggtgaggcccagcaatctgtgtttgaacaaatttccaggtgatgctgatgcttgtttgagtttgaggatcactgatttagagtcaatattaaatataaatccctagatgttttttggaaaaaaaaataacagttttattgagatataattcctataccatagaaatcactcatttctaagytctccactgtggccattagcagaagcggctccatgggtgctgaaggctggcatccagctgctccacagctctgagggctggttccagtgctcaggtatggatagcatgctt

SEQ ID NO: 115138 - DNA, 621 bp, Homo sapiens
tgtccttgctattgtcagcactgtttcagtcgggaggcaggatggtttttagttctgctgacagggtcatttgacttggctgactctcgctgctcttctggtttctttatcctctcaggtatcagcctatgccaaccacagaccacacagaaataggaggcaggctttggttcgtagcaagtgcttttcttgattcaaaaagttgctgttttagagcagtggttcgcaaagtgcaacccccagagcagcagcatcaaaatcacccagaaacatattggatatgcaaagtttcaggaccaccccagaattactgactcagaaacagtgagggtgaggcccagcaatctgtgtttgaacaaatttccaggtgatgctgatgcttgtttgagtttgaggatcactgatttagagtcaatattaaatataaatccctagatgttttttggaaaaaaaaataacagttttattgagatataattcctataccatagaaatcactcatttctaagttctccactgtggccattagcagaagcggcyccatgggtgctgaaggctggcatccagctgctccacagctctgagggctggttccagtgctcaggtatggatagcatgctt

SEQ ID NO: 115139 - DNA, 552 bp, Homo sapiens
tgcgctttccatctacgttattatgttgtcaccattgtcttcatctcatctatttttttaaagtacccacataaattcatttctagccaaaaatacatactcatgggtaaacagttgtaggacaggagagaaaagtttgggagcctctgacaccaacaaatctctcaaggccaagtgcattcccactatgtaaagggagatgaggggtgcgygagcaccagatgcctgggtcctccctgcacacctggcacctgaggttccttcctgggattttgctttgaaaattctggtcaagttttcatggttgattgattggttggttgactgatttgttgtttgtaatactgttttattccaaaaaggattccaggtggaccaagagtatgcattctctcctagaggagtcagaaggataaacgcggtttgcccacctgtcaatcactgctctattcacttaccagacccatccccacgtttagtctatgaatggaggcccagtgtttgcagtctgactctggtccatggcttcttaatcacctcagaccctctgcc

SEQ ID NO: 115140 - DNA, 625 bp, Homo sapiens
aatttgaacacaatggcagctgttatgaatgcttagcagaaaccgttaccttcttgggggtcttagcaaagctgcttggctttctaattccttaygccatctgctttcatagacttagcaaagggctctgcagagttgaatagaaggaggaagttggcacttccaagtagaagttggcactgcaactcttcatggatgggtcactgtcaagctgctccctggagtgtaggagaatgggcatgctgtgaacaggggttgtgccacacaagggagagactttgaaattgctcctaagggatgcttccgccatagctgttaggcagcctctcctgagccagagggatgagcgcatcctcccaaggttgttggtgacagcactcacaagggtctttataccaccctgacatctcctcctcctccttttccttcttcatcaacatcatgtttatcacgtctatgtcgttatctttgtcaatattatcaccactattatcactatgtatttatcgctgtggcaagcacttcacatgcattcactaacttgcgctccacaatagctatgtgagaccagtactatcagccccgcttcatccaggaagaaactgaggcctgaaaaggtgagtta

SEQ ID NO: 115141 - DNA, 625 bp, Homo sapiens
aatttgaacacaatggcagctgttatgaatgcttagcagaaaccgttaccttcttgggggtcttagcaaagctgcttggctttctaattccttacgccatctgctttcatagacttagcaaagggctctgcagagttgaatagaaggaggaagttggcacttccaagtagaagttggcactgcaactcttcatggatgggtcactgtcaagctgctccctggagtgtaggagaatgggcatgctgtgaacaggggttgtgccacacaagggagagactttgaaattgctcctaagggatgcttccgccatagctgttaggcagcctctcctgagccagagggatgagcgcatcctcccaaggttgttggtgacagcaytcacaagggtctttataccaccctgacatctcctcctcctccttttccttcttcatcaacatcatgtttatcacgtctatgtcgttatctttgtcaatattatcaccactattatcactatgtatttatcgctgtggcaagcacttcacatgcattcactaacttgcgctccacaatagctatgtgagaccagtactatcagccccgcttcatccaggaagaaactgaggcctgaaaaggtgagtta

SEQ ID NO: 115142 - DNA, 624 bp, Homo sapiens
tcactgaataaacaacaggttatttttttcatgactcatgcttgtactctattattgcatggttagcaggtcaccataaaaaataaaaattaggaaaacactggttgtcagtatgaaaatattttaggtctttaggattgctctgtggatatttgctagtattagtagggtaataaaaaaggtaaaattaggagaaggtacttttaattgaaaatcaatgaggacaaatgcttgcccctatttgtatgttgaagggaagctgccagtagaggggagggagaggaggaatttcatgagatgctactctgagaagatgagtagggatgaagttgctgtacaggtatcaggagcagctccactcctgtaggatagaagggaagatggcrtgcatttttgcagaggttagagaatgttttcaatcaggcaaggaaaatttcttttattagaatctttcatcctcaactctccttatttatttatgccttatctctctcccttttcacctatctgagtagttcaaatttgcctctgggattatcaaaaaattgccttaatctgaaattcttaggaatgtttagactggttatgaaacggcctcctgagggctttcttcttagttaggcc

SEQ ID NO: 115143 - DNA, 511 bp, Homo sapiens
tacttgaacaaaattaatggcccaaaaagtagactcatacatgtagaggttataatataatttgtttacaacataattggcatttcaggcccattaatataacataacgtctaygttagtgtataataaacacagtacagtcacctgtacataaatggtgtggggacaatagattttccatatgaaagcaatgaaatgagatcttataccctaaataattaaattataattggattagagactcaaatattaaaggaaaaattaaaaatcatgtcattataagaaaatatatggttgacagtgacaaaagaaagaattatgtaaactgaatttaaaaacaacagcaacgacatagaccatcaagaaaaatatacgtatgtatgcaattacattaaaattaaggagttctgtttattaaaaggcttcataaaaaagtggaaagtcaagccacagacctgaagggaaaccttagaaaacagatgaattaccaaaagactactatacagaattc

SEQ ID NO: 115144 - DNA, 556 bp, Homo sapiens
cagcccaatttgttataccatagttggaaaaggcttgtggaatgaatccattgaaacatgcctaaatggtacttgaatttaaaaacaaaaaacttttaaattttaacttaaaacttgataatattataattttaggatttctctttttcttttaattgtggcaaaatatgcatataaaatttactgtcttaaccatctttaartacacagttcagtgacattaactatatttacattgctaagtaaccaatctctaggaatttttcatcttgaaaaactaaaactctatattcattaaacaaacctgtattaacccctcttttcagcccctggaaactagcattctactttctatttctgtgaattagattactttagacacttatgtaactggagtcatacagtatgtgtcttttcatgactgacttatttcacttagcataatgtcttcgggttttatccatgttgtagtaggtgacgggatttccttcccttttaaggctgaataacattccactgaatgtacataccatattttctttatctttattccact

SEQ ID NO: 115145 - DNA, 556 bp, Homo sapiens
cagcccaatttgttataccatagttggaaaaggcttgtggaatgaatccattgaaacatgcctaaatggtacttgaatttaaaaacaaaaaacttttaaattttaacttaaaacttgataatattataattttaggatttctctttttcttttaattgtggcaaaatatgcatataaaatttactgtcttaaccatctttaagtacacagttcagtgacattaactatatttacattgctaagtaaccaatctctaggaatttttcatcttgaaaaactaaaactctatattcattaaacaaacctgtattaacccctcttttcagcccctggaaactagcattctactttctatttctgtgaattagattactttagacacttatgtaactggagtcatacagtatgtgtcttttcatgactgacttatttcacttagyataatgtcttcgggttttatccatgttgtagtaggtgacgggatttccttcccttttaaggctgaataacattccactgaatgtacataccatattttctttatctttattccact

SEQ ID NO: 115146 - DNA, 556 bp, Homo sapiens
cagcccaatttgttataccatagttggaaaaggcttgtggaatgaatccattgaaacatgcctaaatggtacttgaatttaaaaacaaaaaacttttaaattttaacttaaaacttgataatattataattttaggatttctctttttcttttaattgtggcaaaatatgcatataaaatttactgtcttaaccatctttaagtacacagttcagtgacattaactatatttacattgctaagtaaccaatctctaggaatttttcatcttgaaaaactaaaactctatattcattaaacaaacctgtattaacccctcttttcagcccctggaaactagcattctactttctatttctgtgaattagattactttagacacttatgtaactggagtcatacagtatgtgtcttttcatgactgacttatttcacttagcataatgtcttcgggttttatccatgttgtagtaggtgacgggatttccttcccttttaaggctgaataacattccactgaatgtacatacmatattttctttatctttattccact

SEQ ID NO: 115147 - DNA, 607 bp, Homo sapiens
aatttattgcttcttatttctgaattcacccttcactatatgctctgtaccaaatcaaggattcctttaaaacttttcactttaatgagcacaatgttaagatttctcagtagagggcgctggagagacattgcaggaggaagagattagctgtatgggtgtgcagacatccagtggaatgtgccccagccaccagcttagaacatgattccattgagacctcgttgcatcctagacstatcaataacctttcttcagtcctctagacatggaaaccagaaccctccacacatgtaggtgttgctctgatggcctcctgccacaccaacacctggactctctgagtggatttccaacatctgcttctgacctggagcatcaaacaccaagcactgtttcaaaaccccactctcatgccaggctgcatgtgctacaggccttctaccatggctggcaccagactctcactgcaaaaccatgccaccacgtgctaacctacctaacctaccctgcttgcccaggaactctagacctgctcaggcctggcctaaccagtaaacacctctgctatccattgggctaaactataccttccccaacaaggtct

SEQ ID NO: 115148 - DNA, 607 bp, Homo sapiens
aatttattgcttcttatttctgaattcacccttcactatatgctctgtaccaaatcaaggattcctttaaaacttttcactttaatgagcacaatgttaagatttctcagtagagggcgctggagagacattgcaggaggaagagattagctgtatgggtgtgcagacatccagtggaatgtgccccagccaccagcttagaacatgattccattgagacctcgttgcatcctagacgtatcaataacctttcttcagtcctctagacatggaaaccagaaccctccacacatgtaggtgttgctctgatggcctcctgccacaccaacacctggactctctgagtggatttccaacatctgcttctgacctggagcatcaaacaccaagcastgtttcaaaaccccactctcatgccaggctgcatgtgctacaggccttctaccatggctggcaccagactctcactgcaaaaccatgccaccacgtgctaacctacctaacctaccctgcttgcccaggaactctagacctgctcaggcctggcctaaccagtaaacacctctgctatccattgggctaaactataccttccccaacaaggtct

SEQ ID NO: 115149 - DNA, 607 bp, Homo sapiens
aatttattgcttcttatttctgaattcacccttcactatatgctctgtaccaaatcaaggattcctttaaaacttttcactttaatgagcacaatgttaagatttctcagtagagggcgctggagagacattgcaggaggaagagattagctgtatgggtgtgcagacatccagtggaatgtgccccagccaccagcttagaacatgattccattgagacctcgttgcatcctagacgtatcaataacctttcttcagtcctctagacatggaaaccagaaccctccacacatgtaggtgttgctctgatggcctcctgccacaccaacacctggactctctgagtggatttccaacatctgcttctgacctggagcatcaaacaccaagcactgtttcaaamccccactctcatgccaggctgcatgtgctacaggccttctaccatggctggcaccagactctcactgcaaaaccatgccaccacgtgctaacctacctaacctaccctgcttgcccaggaactctagacctgctcaggcctggcctaaccagtaaacacctctgctatccattgggctaaactataccttccccaacaaggtct

SEQ ID NO: 115150 - DNA, 627 bp, Homo sapiens
aatgaacgtatcagtggcagatataataacctggatcatagagcatctatcccaactcttyttggtattctcttccatagtgcacatgttggaaagctaaaaacatttctcagatatcactgtggctcaggttctcgatataatttgggctctccaatcagacacacagatgaagttatacattcaaaactgaattaaatggagaaagaggcaacgatgtgcagagatccattttgcaaatattatcctagcatgagtggcatggcactagggtcagcagttctggcagaaacttctggacatccagactatgacccaggtgatgtgatgctagaaccagtagttggcacagtggcttcgtacctctgaaatttcctggctatagtagatgtagctgttcccctggtgggccagttctggggtgttctgggagtcagccttggagcggatgaacaattagctttctctattaaatctctttattcttagagtggctagagttagttctcttttcagaaatggaaccctaactgataaaatatactagggaaaatacctcgaaaatttggtgtgtggtctcttcatgttcctaagccatagaattcatcatagaacaccctgaactat

SEQ ID NO: 115151 - DNA, 624 bp, Homo sapiens
tcactgaataaacaacaggttatttttttcatgactcatgcttgtactctattattgcatggttagcargtcaccataaaaaataaaaattaggaaaacactggttgtcagtatgaaaatattttaggtctttaggattgctctgtggatatttgctagtattagtagggtaataaaaaaggtaaaattaggagaaggtacttttaattgaaaatcaatgaggacaaatgcttgcccctatttgtatgttgaagggaagctgccagtagaggggagggagaggaggaatttcatgagatgctactctgagaagatgagtagggatgaagttgctgtacaggtatcaggagcagctccactcctgtaggatagaagggaagatggcgtgcatttttgcagaggttagagaatgttttcaatcaggcaaggaaaatttcttttattagaatctttcatcctcaactctccttatttatttatgccttatctctctcccttttcacctatctgagtagttcaaatttgcctctgggattatcaaaaaattgccttaatctgaaattcttaggaatgtttagactggttatgaaacggcctcctgagggctttcttcttagttaggcc

SEQ ID NO: 115152 - DNA, 393 bp, Homo sapiens
ggtacctccggactcgggcgggtgggagcctggcgggcaccccacgccgtccggtgggcccgcccttggactctcagcscggccccagccccggccccggcctccctgacccaccctgctctcccactgcaggcctcttcggcacaggaattcggtcctacttcaccttcctccgcttcctgctgctactcaacctgctgagcctgctgctcaccgcaagcttcgtgctgctgcccctggtctggctccgcccccctgacccaggccccaccctgaacttgagtgagtgtgaggcccaccaggggaagtgctccggtgcccacctgcgccatgggggggctggcccagggcccagagcgtggcgacaacgctgggcgtggtcctgccgtgcag

SEQ ID NO: 115153 - DNA, 573 bp, Homo sapiens
aaacggagtagtcaggactttgaaaggtttctatttataatctactgattatattaaagatgaaagacacaaatgaaaactaaacagaggataacatccagctcccttcttgggtactgaaaagtaatcttcctgaaaagtaatcaagttttcactgtttactatagtgccatgaaaaatgccgccatcaatgaaatgatgtatctatcggtgggagtcatgcatcactgctatgtaagtcaattgaaaaaagaatctgattgataatccttatctattttcctgtgatgcatatattcctgcacatacccattcaattttttttcctrtttcccgattgtttggtgccttttgaagtaaataccaacactctcactagctcattctccacttttacatcttcagcataattcaatttttttcccttttttctctattgtatcactttgtactttattttgtttcctgttccaaggataatctttatacttccaatgttgggacttctcttgttatcaccagaatgaaatcatctagaagttataataaaattcagattaactattaacatcc

SEQ ID NO: 115154 - DNA, 503 bp, Homo sapiens
aaattacaacctctaaggatgtaggtgttcatttattatagaatagaatattttcttcttgccagtcttatctctaaactaaattagaagactctaagcaataaattgaacactatgttaagagaatgtgtttcctcatgacagcccaccagtcctgcactctccctaaatgacaactacrtattagtggctggaaaaagtggctatgttttcttttactatgaaagaggaaagaggacatttccttttgctagcaaagaggaaactattgtgtcacataaatgaagcatattgctagttgctataaaaattagatttatagtcaaggttgcccattctgagttacttcttgggataggcaatacaaaatgttacaggatctgagatgtttataaataatatttgaaaacccactcactactgctgctgctattaaaattagtatttagagtatataatatgcatgaattagaaggcttaatactgtatggtctcaaaactaa

SEQ ID NO: 115155 - DNA, 599 bp, Homo sapiens
tgtctgttgtaggttttgcctatgtatacaatcccatatttcttataggttttgttcaattttaaaaattctttttactttatctttgtctgactgagttgattcaaagaaccagtctttgggctccaaaattgtttcctctgcttggtttattatgctgttaaaacttacaattgaattatgaaattmttatagtgagtttttcagctctattattagattaggaaagattagattctttcctaaaatggctaatttcacctttcacctcttgaattgtattactggattccttagattacttagattgggttttaactttcctgtgaatattgatgatcttccttgccatccagtctctgaattctatgtctgtcatttcatccaatttagtcatgaagaattattactggggagctagtgcagtcacatggaggtaaaaagacattgtggctttcagagtggccagagttcttgcactggctcctttaatctgtgtgggctgaggctcttttaatctttgaagttgctatgctttgcatgaggcttcttgcttttatattctctgaggcccttgacagtttgactctggtttaaat

SEQ ID NO: 115156 - DNA, 599 bp, Homo sapiens
tgtctgttgtaggttttgcctatgtatacaatcccatatttcttataggttttgttcaattttaaaaattctttttactttatctttgtctgactgagttgattcaaagaaccagtctttgggctccaaaattgtttcctctgcttggtttattatgctgttaaaacttacaattgaattatgaaattattatagtgagtttttcagctctattattagattaggaaagattagattctttcctaaaatggctaatttcayctttcacctcttgaattgtattactggattccttagattacttagattgggttttaactttcctgtgaatattgatgatcttccttgccatccagtctctgaattctatgtctgtcatttcatccaatttagtcatgaagaattattactggggagctagtgcagtcacatggaggtaaaaagacattgtggctttcagagtggccagagttcttgcactggctcctttaatctgtgtgggctgaggctcttttaatctttgaagttgctatgctttgcatgaggcttcttgcttttatattctctgaggcccttgacagtttgactctggtttaaat

SEQ ID NO: 115157 - DNA, 595 bp, Homo sapiens
tcgtaatctccactgcatttctcaaaaaaacgtacataaagtcagtggtttagttttttgaaataagagaaaaatcaatcacattttgtgactactgtgataaacatttattttcattatcattgccatctggtttcatcattctgggaggaaaargcttacctgttaaaataacttacacaacaggatccagttgcagatatctataatgagaaattcgagtaagtgatttgcagagttataatctctaagcctatacttttatgtggaaggaagtgtcactactgtggtgtaaatcacagagacatgcttatagacctggaaataaaatcaaatgcttttttttgaaatattaacaaaataaatgtatacaaacaaaagcgcaagctctatgagatcaggaaaatttccagcttgtttatttatctatgctcagctcctatcttctatctgacacatagtggtccctttatatatgtttgtgactaaatgaatgagtttagtcatctgtaataaaaagacactcagggagttagtgaaaattctcgattacattctcaatcaaggaaactaatatataatattaggaaaagat

SEQ ID NO: 115158 - DNA, 595 bp, Homo sapiens
tcgtaatctccactgcatttctcaaaaaaacgtacataaagtcagtggtttagttttttgaaataagagaaaaatcaatcacattttgtgactactgtgataaacatttattttcattatcattgccatctggtttcatcattctgggaggaaaaagcttacctgttaaaataacttacacaacaggatccagttgcagatatctataatgagaaattcgagtaagtgatttgcagagttataatctctaagcctatacttttatgtggaaggaagtgtcactactgtggtgtaaatcacagagacatgcttatagacctggaaataaaatcaaatgcttttttttgaaatattaacaaaataaatgtatacaaacaaaagcgcaagctctatgagatcaggaaaatttccagcttgtttatttatctatgctcagctcctatcttctatctgacacatagtggtccctttatayatgtttgtgactaaatgaatgagtttagtcatctgtaataaaaagacactcagggagttagtgaaaattctcgattacattctcaatcaaggaaactaatatataatattaggaaaagat

SEQ ID NO: 115159 - DNA, 595 bp, Homo sapiens
tcgtaatctccactgcatttctcaaaaaaacgtacataaagtcagtggtttagttttttgaaataagagaaaaatcaatcacattttgtgactactgtgataaacatttattttcattatcattgccatctggtttcatcattctgggaggaaaaagcttacctgttaaaataacttacacaacaggatccagttgcagatatctataatgagaaattcgagtaagtgatttgcagagttataatctctaagcctatacttttatgtggaaggaagtgtcactactgtggtgtaaatcacagagacatgcttatagacctggaaataaaatcaaatgcttttttttgaaatattaacaaaataaatgtatacaaacaaaagcgcaagctctatgagatcaggaaaatttccagcttgtttatttatctatgctcagctcctatcttctatctgacacatagtggtccctttatatatgtttgtgactaaatgaatgagtttagtcatctgtaataaaaagacactcagrgagttagtgaaaattctcgattacattctcaatcaaggaaactaatatataatattaggaaaagat

SEQ ID NO: 115160 - DNA, 524 bp, Homo sapiens
ttttaaatgtatacagagccaggcacagtaatagaaatttcacatcttcttacttatgggggtctgactcacagaccctgacccaacaacagatgaataaagtacactgacacacagatattctgctttgycagtccaactgagcgtccgggccccttaacagattccaagcagagtgctgtaaacagttgcaaccacagccctgaccagccagtgagactcacatttatttagtaaggattaattgacaaaggcttgagacaaccccactagagggtaattgatattgcagacttccggagtagaaagcaattaagcacccgtggtagatcaaaggttagtcttaggaccacatgagtaaacaagctagttagacaaactccccacattcctttgtttctactctaatttatttaattaaagggacaaggctgccttcagccaagtactatatgtaaaaactcccaggccttcctaaagggtttgtgtatattctctgtagctaaaatttttcccaccatcat

SEQ ID NO: 115161 - DNA, 511 bp, Homo sapiens
aaatataaatttaagtttcttatataatataaaaaagttcagtttagctcaaatttcaaagtctagatttacagaattccatgytgaaatacttgaatacctaaagaatctgaacacaatatgaaccattattttaatgctgttgacacagaaatcatgtacttaagacataaaatataatgatgggtcacaaaagagccatgatcctattatatttttacatttgaaaatgatatgcaccatgtacatttctataacaatgccacatttcaaagggcataggaaatatgtcatacaaggaataagacaaaaagaaatgtaatgtttccatggtaggtatgtagagaatgtgaaagagctaattatatagcctatagttagtttggcattaatcaaaaagtgtgtttaacgtcatgtttagagattttacataatttgaaaaatgattttgaaggtgtttgaataaggttgtgtggaagccattacttgaaagaagacagaatagattgag

SEQ ID NO: 115162 - DNA, 529 bp, Homo sapiens
aaatacaacctaatcaaaaagattatttcaagttcccaagttttcacatacacaaatcatgtattggttcctctaggagaatttattgccctagtctagaagaaattttaatacagcagaacccagctcttcagcataatttggtattatccactcatcaactcactcacaggcagcctcgccttgggtctccagagcagacagccagcataaggtggtgccaataagttagaaccttgtttactctcaacaaatatgtgttttcaaaggtgtgtagttgattacgtaagttctgtagtatagcagtctcccattatctgctgggtgtatgtcccaataccctcagtggatgcctgaaaccatggatatttccgaaccctatatatactattgttttttttaacctatacatacatgcttatgataaagaatttataaattaggcacagtaaragattatcaataactaataatataatggaacaattataactacatactgttcatacatagatttatttttaccaaa

SEQ ID NO: 115163 - DNA, 608 bp, Homo sapiens
aatgaaactgaagcccaaagagaatttggtcacctgctgaagtgacagaactgaggccagaacccaggtctcctgaccctaatctggtgctgtaatcactactttctgatagcacagttgtttctatttggttaatttactgattaagtaattccttcattttctcagaaagtatactttctgaacaaaactacagattattgtagcaagaaaactatgaaatcaacatagaaattgtaaacccagaatttgcaaaytaaatgaggaagcacagagaaagagaaaacaaggaaaactagaaatgaagaattaaaatacaatataactttataaaatgaatggatcagattacattgcataaattttccacacctttgcctacagtttgtgacattcacagcatactattaaccagggttttctatttgacagatattataataggtcatgttgagcacctaaatttgcacatgcatttcttattttgacattaagtatttttcttttatgtgccatgaagacataggaatactttgtacattttataattgtaaacatagttccatttaaaagtaacaaaaagtatcatattttttcagagttcagtt

SEQ ID NO: 115164 - DNA, 622 bp, Homo sapiens
ggtcaccactggccacagagccttctggctagaaaagtgacaccctaaagatcctgcaacagtaggccaaataaatccaggagtatataagactagcaataccctgcatttcttccagccagggtcgctaaacttcataaaacatgagccattgaatagagatctcaggagacacataatcccaaagggaagacatgtgaatgccagagaaacaataacaacaacaaaacccccaaaataagcaattaaaaacaaacaagacttaaagccacaaaaagatcaatctaaaactgaaaggcgctttactrtaggccagaacaaagttggacagtccttaaaacgatacaataaaactcaataactttaaattcagaatttctgccaggtgcagtgactcatgcctgtagtcctagcactttggaaggctcaggcaggcagatcacttgaggtcaggagtttgagaccagcctggccaacatggtgaaaccctgtctctgctgaaaaaaaacacaaaaattagccaggcatggtggcacatgcctgtagtcccagctactcaggaggcagaggcagaggttacagtgagccaagattgcaccactgcactccagcctgggtgaca

SEQ ID NO: 115165 - DNA, 607 bp, Homo sapiens
tttgccttctgccatgatcataagcttcctgagacctccctaggagctgagcagaggcccacaccatgcttcctgtaaagcctgcagaaccatgagacaattaagcctcttttctttataaattacccaatctctggtgtttctttatagcaatrcaagaatggcctacctagcacactgtctaataacagagtttcaaaatatgtgatctaaaaactgacaaaatggaaataatagaaaaagaaataagggacataaagattgataataaataaaattgattttaatagaagataaacaattgactaaaataaaacttaatgaatttacgtaaaagctactggaactaataagtgtttagtaagatcaatggttataaaatgaatacacaaaaatcaacagtgttttaatagacattttagcaatgaataatttttaaaataacatttataatggtatccgaaaatatgggatgcttagagaaaatttaacaaaacgtgcaaaaactgtattttttacactgaaagctataaaacatggccaagaaaaaataaagaagatgtaaaaaaatggagtcctctactaaaatctctccagattgatttag

SEQ ID NO: 115166 - DNA, 623 bp, Homo sapiens
cgaggctacaagcctgtaaaatcaaaaacaatttcgttccttccaagatacaatgggggtacaggcactgggtaggtacaccaattccaaatggaagaaattggccaaagcaaaggggctacaggccccatgcaagccccaaatccagcggggyagtccttaaatcttaaagcaccaaaaggatctcctttgtcttcatgtctcacacccagggcacactgatacaaggggtgggctcccatggctttgggcagctccttcgcaggctggcattgagtgcctgtggctattctgggcacacattgcaagctgtcagtggatctacaattccgggggctggaggacagtggcccttttcccacagctccactaggcagtgccccagtggggactctgtgtggggactccaaccccacatttcccttccacactaccctagcagaggtcctccatgacaccttgatttcagatttctaccctccagaactataaaagaataaatttaagctactcagtttgtggtactttgttacaacagcactaggaaactaatatagtttattttctgaattaattgaagtgatcatacgtttgcttttggctagtctgttaataagctgaat

SEQ ID NO: 115167 - DNA, 623 bp, Homo sapiens
cgaggctacaagcctgtaaaatcaaaaacaatttcgttccttccaagatacaatgggggtacaggcactgggtaggtacaccaattccaaatggaagaaattggccaaagcaaaggggctacaggccccatgcaagccccaaatccagcggggcagtccttaaatcttaaagcaccaaaaggatctcctttgtcttcatgtctcacacccagggcacactgatacaaggggtgggctcccatggctttgggcagctccttcgcaggctggcattgagtgcctgtggctattctgggcacacattgcaagctgtcagtggatctacaattccgggggctggaggacagtggcccttttcccacagctccactaggcagtgccccagtggggactctgtgtggggactccaaccccacatttcccttccacactaccctagcagaggtcctccatgacaccttgatttcagatttctaccctccagaactataaaagaataaatttaagctactcagtttgtggtactttgttacaacagcactaggaaactaatatagtttattttctgaattaattgaagtgatcataygtttgcttttggctagtctgttaataagctgaat

SEQ ID NO: 115168 - DNA, 429 bp, Homo sapiens
ctgataggattgggttttggtgagacctctctcctcagcttgcagatggcagcttctctgtatgtccttacatggacttttctctgcgcacacatggagagagctctggagtcccttcctcttcttatagacaacagtcctcttggattagggtcccacgctcatgacccatttaaccttaattaatcacttaaaggccstatctccaaagatagtcacactaggagttaggacttcaacatatgaattttggggaacacaatttactccatatcatctttctctctgccccctccaaattcatgtacctctgacatgcaaaatacattcagtctatcaccccccaacactctctaaaggctaaaaccatttcagaatcagttccaagtccaaagtctcatctaaatatctaaatcagatcaggtatgg

SEQ ID NO: 115169 - DNA, 590 bp, Homo sapiens
gtcctggtttatcatactccttcagtgacaccatatgctrctgacaccatctcttgaaacaactgattagccttactaaacctattgaactctgcaaggagacccagagcaaggattcaatgacacagaagggagccccttctctgaagctccagattcacttcattagtggaaccaaaatgaagccaaaaaccttacaggagatttgggagtgccgtgtttcttcactgggctcttgtagttgaatgttgcatctgagaataccagcaggtgcagatacattcagatgaaagcccactccatacccactattccaataacacacattttcccttcttcctaatatgtagcttttaggaagtgcctcctacactgacactaggcccagttatctgactttcttctcctagagatttaaagcaaacaggatacaggtggagacttgggaagtgcatgcaggttgttattttcactttctcagctgggaaaccagcaaagtccccataataaaagaagctgagatctatgatggcatttacaagatgttggtcttaaaaatcatgatgtcagaggcttcacattgctctact

SEQ ID NO: 115170 - DNA, 590 bp, Homo sapiens
gtcctggtttatcatactccttcagtgacaccatatgctgctgacaccatctcttgaaacaactgattagccttactaaacctattgaactctgcaaggagacccagagcaaggattcaatgacacagaagggagccccttctctgaagctccagattcacttcattagtggaaccaaaatgaagccaaaaaccttacaggagatttgggagtgccgtgtttcttcactgggctcttgtagttgaatgttgcatctgagaataccagcaggtgcagatacattcagatgaaagcccactccatacccactattccaataacacacattttcccttcttcctaatatgtagcttttaggaagtgcctcctacactgacactaggcccagttatctgactttcttctcctagagatttaaagcaaacaggatacaggtggagacttgggaagtgcatgcaggttgttattttcactttctcagctrggaaaccagcaaagtccccataataaaagaagctgagatctatgatggcatttacaagatgttggtcttaaaaatcatgatgtcagaggcttcacattgctctact

SEQ ID NO: 115171 - DNA, 599 bp, Homo sapiens
tggggaaattgtgagcaccacctctgaagagatggcagcagcggccacccagaaatctgatctcctctagtcagttctgtgaggggaggctccagggtagggacagacctggaccaggctcagaagaggctggatttgggcagagctggggcaggggctgggctaggcttctcatctctacattgctgctttattttcagctgtctttcctaagcctgaccaacaagaacttgactcccatggtttgccttgtttaaatagtttaagcttcatcctattttgtaacatgcaacaagcaatttaaccaaaacatgtagggctttctacgaaaattatattagtagctacataattatctttaacaagaaaaaatcaatataaataataattataataacaactcttttgtccacgggtggcccttcrggtggtgacatcagaattcacaacgtcaacataagggcagtgtcccaaatcaagcccaagttccctgtacacctccattcttgctcctgaccacatgatgttgaattcaaccattatccgtctgctttagactgaaagttcctggatggtagggactatggctgctgcatctg

SEQ ID NO: 115172 - DNA, 638 bp, Homo sapiens
aacgtgccatgtgagatgacatggggtggggagagcaactgagagagctgcagccaaaacacagacaaaggaggagaagggctgggatgcctgtggagcttgtggtgaaacttaacagagaggaacaggggagaatcagaaaatgaagccagcagaattcttgcaccacagatcagtgctgcagcctgggagcaggtatcctctctycacatgtagaagcatcacctggatgttgcagtcttttgcctgcagatacaatttcactctaataggaccatttcttagccccaccgcaacctctgaggaggcagagaggctgaaagttaagttaatcaccaataaccaatgatttaatcaatcatgcttatttagtgaagcttgcaggaaagcccaaaatgaaggggttcctagagcttctggatagctggatacatggcagttcctggaaggtagggtgcccacaccaagagagggccctgaagctccaggtagacgttgtcagaatccagttgaattatacaacacccagccagtgtctgctgcagaattggctgttgatatagagaaatctccataaattttggtgaccagaggtcacagaagtattctgtattgattgttgagtgaggaaaaggaaa

SEQ ID NO: 115173 - DNA, 661 bp, Homo sapiens
gaatttaagaaaagaaactcaatagagtaccagccctcttttcaacataaactaaaattggataattaacttttaaaagcactaatttcttctgaaggtgtaaaaagaaagttttctttgataaagcagaaattttatctttcttttcgaggcatgaataaattaaaggagacaaaatctagcttaatggagtaacccagtatttgagattataattaaaaagttgtacaggttaacatagcctaattgttttttctttttaccaacctacagctcatgtgtacactaattattttttgttaaataaaactgtttacatctgggcactgtggctcatgcctataatcccagcactttgggaggctgaggggggaggatcgcttgaccccaggagtttgagaccagcctggacaacatagtgagaccctcatctttacaaaaaataaaattatctgggcatggtggcacacacttgtagtctcagctactcggggagatgaggtgggaggatcacttgagtcctggaggcagagattgcaataagctgaaactggatcaatgcagttcagtytgcacaacagagcaagattttgtttcaaaaaaaaaaattgtttactttttgattacatgttcactctagaaaattttagaatatatttta

SEQ ID NO: 115174 - DNA, 661 bp, Homo sapiens
gaatttaagaaaagaaactcaatagagtaccagccctcttttcaacataaactaaaattggataattaacttttaaaagcactaatttcttctgaaggtgtaaaaagaaagttttctttgataaagcagaaattttatctttcttttcgaggcatgaataaattaaaggagacaaaatctagcttaatggagtaacccagtatttgagattataattaaaaagttgtacaggttaacatagcctaattgttttttctttttaccaacctacagctcatgtgtacactaattattttttgttaaataaaactgtttacatctgggcactgtggctcatgcctataatcccagcactttgggaggctgaggggggaggatcgcttgaccccaggagtttgagaccagcctggacaacatagtgagaccctcatctttacaaaaaataaaattatctgggcatggtggcacacacttgtagtctcagctactcggggagatgaggtgggaggatcacttgagtcctggaggcagagattgcaataagctgaaactggatcaatgcagttcagtttgcacaacagagcaagattytgtttcaaaaaaaaaaattgtttactttttgattacatgttcactctagaaaattttagaatatatttta

SEQ ID NO: 115175 - DNA, 661 bp, Homo sapiens
gaatttaagaaaagaaactcaatagagtaccagccctcttttcaacataaactaaaattggataattaacttttaaaagcactaatttcttctgaaggtgtaaaaagaaagttttctttgataaagcagaaattttatctttcttttcgaggcatgaataaattaaaggagacaaaatctagcttaatggagtaacccagtatttgagattataattaaaaagttgtacaggttaacatagcctaattgttttttctttttaccaacctacagctcatgtgtacactaattattttttgttaaataaaactgtttacatctgggcactgtggctcatgcctataatcccagcactttgggaggctgaggggggaggatcgcttgaccccaggagtttgagaccagcctggacaacatagtgagaccctcatctttacaaaaaataaaattatctgggcatggtggcacacacttgtagtctcagctactcggggagatgaggtgggaggatcacttgagtcctggaggcagagattgcaataagctgaaactggatcaatgcagttcagtttgcacaacagagcaagattttgtytcaaaaaaaaaaattgtttactttttgattacatgttcactctagaaaattttagaatatatttta

SEQ ID NO: 115176 - DNA, 661 bp, Homo sapiens
gaatttaagaaaagaaactcaatagagtaccagccctcttttcaacataaactaaaattggataattaacttttaaaagcactaatttcttctgaaggtgtaaaaagaaagttttctttgataaagcagaaattttatctttcttttcgaggcatgaataaattaaaggagacaaaatctagcttaatggagtaacccagtatttgagattataattaaaaagttgtacaggttaacatagcctaattgttttttctttttaccaacctacagctcatgtgtacactaattattttttgttaaataaaactgtttacatctgggcactgtggctcatgcctataatcccagcactttgggaggctgaggggggaggatcgcttgaccccaggagtttgagaccagcctggacaacatagtgagaccctcatctttacaaaaaataaaattatctgggcatggtggcacacacttgtagtctcagctactcggggagatgaggtgggaggatcacttgagtcctggaggcagagattgcaataagctgaaactggatcaatgcagttcagtttgcacaacagagcaagattttgtttcaaaaaaaaaaattgtttactttytgattacatgttcactctagaaaattttagaatatatttta

SEQ ID NO: 115177 - DNA, 459 bp, Homo sapiens
agcccaaagtcaggaagcactgaggggacattggcggcagtcttggtgatgtatgatgaggktctggacagggcggggtgggggtgggaggcagtggtgggtaggggagaggggcatggggttggggtggtggtgggagtaagatctgataacactctctcttcacctcttttttcctggcttctagatttcctcttatagttttctactttgaaaaattagcatagcaataacactttgccgcaattaatagtaggatgttcctaatctatttaaatttggaagagattgtatcattcttcagagaggtcagtttctacatttccaatctagaaaatcagtactactgaggagaatctggttgcaagactatgaattttgttcccctatgactcctgtgtggggaaaactggaaatggatccttcggaggtaaatattctgaagaaatacacctacct

SEQ ID NO: 115178 - DNA, 500 bp, Homo sapiens
ctgggatggttgcttgaaatttttctaccctatatatgaatctgatggtctggacaagtcacatagtttcggatgtcagtttcctcatccataaagtaatacctattttcctccaaagcttaggtgaggagtgaatgagttaaagagtgcaaagtgtttcttattgtggcggttgttattaatacgtgatttcacttttcatttatttcatttttatgtccattgtggcttctaacctcatatttcacacatagcggtactcagtaaatacttaataaatcaatcaatgcaagtaatgactatgtatatactagtggagaaggaaggaggggagggaaaggagaggagaggcgaaragaggtgggccaggcagaggagagaagagagggagggagagggagagagagagggagagggagagggagagagaggagaatgagaatgagaatgagaatggatataatttgggttggccttaggaaggagggctctcagaattc

SEQ ID NO: 115179 - DNA, 540 bp, Homo sapiens
tacaatttctacttctagtcccatctttttaaaggcattgaaaacatkagttttagggcagctataacagagtggaccagagaacacattaaaccatccattagcacctccatacgaataagtttatctattagctcttgggacctcgagaggcctggagaaaatctagtaagttttggtggatcaggggatttaaaaaaaaaaatgctccctgggttgtcactttagggaactgtaaagtactctgaagctcagggcagtggaggggtgaagaaaaggaatgcaaccctgagcagtagagggcagtgataggaaacccaggctctgacagttgaggcttgccaccaagagagtggagggctgatccctagtaaaggggaaggctctcctccaccccttcccttggtcagccaagcttctacttccagatcaacatagatttttcttctctgttataagtattttatttttctgatcctttcaactatcttttcattttaactgaatcttactctaaaagccttctgttgtcaccaacac

SEQ ID NO: 115180 - DNA, 449 bp, Homo sapiens
aatgattccattgctggctgatgagacagctcaccaacacgcgaaaaagagttgttattaagagcaaactgagttttttgctggcttttctcttccttttgctcccggaaaattctttccagtagccccttgggatcacacagagaatgacaaagaagggaaaaaacaatttccaaagtagacactctcaagaatcgtatttattttttctggaaccatctaggaaaaaaataacaaccacacagacaagacaattttaaaccaagsctgcttctgatttaagtcatttcctttctgctagcctgtcaaaattcaactgcatcatatcaagttggtctgaaaagcagattggtgcatgatgtactttatgaactcctttgactttggcagactctagaaaagattaaatgtgttagaaatctgagaggctaggagaatggagaaatgga

SEQ ID NO: 115181 - DNA, 620 bp, Homo sapiens
taatatacccctatattattatctccagcccagacctcactcctgatttcaagattcaccaatccaattgctgctttgacctctccacatgaaggtctaacaggcatttccatcttaatgtgtccaaaacaaacctcctgacattccatccaaacctgcacctccctcagtcttcctcatctcaggaaatgccaccagcctgtacctaatttcctccccgctacaccccgcttccatttcattagcacatcctaggtttaattaattctctacttctctccatcacaactaccaccccaagtccaaactagaacttcctacrctattacaatcacttcctaactggatcctctactctctttcctgtaatttatcattcacaaagcaatcagagggaagactacacagtctacaacctccttaccccttcttacaaacctccaacagctcaccagcacacttacaaaaaaaattctaattccttactctgtgttctcgctcttatcaactctccaaactcttcttactattttcctccttgccaatgctccaaccacattagtcttctctctgttcctccataacctcaagtttgtttctcccttgaggatactgaacta

SEQ ID NO: 115182 - DNA, 600 bp, Homo sapiens
cctcaattaatgtttatcgagttgcttgatctcagtgtattctggcttccttccctaccaaatacctaaatatttgacatacatctcttcagaaagagtagcttgcgtaaagcaatgatttacatatttaaaatcgaacttayaaggtaaaatgtgtagtttaaaaaattatccaacctaatgtgcacctccttcctccacttcatcacagaggtcatccacagttactggagaagttcggagcaggaatgtgtcccttgggactggccactaatgccacctcccagagggtgggaggcattcttacctggagaggctagactgatgaccttgagaggaccatttcacccttgagtttctaggaaatcattggaatttaaaataaagcactaaaaagaatttgaagagaccaccaaggacatcaccctgcctgttagaatatttttatatctccaggttcaatgttgaagtgtgaaggctttagctataagagaaattgatgggttagagggcaagaaagcttagggggagagaagagaaaggaaaagaagaatccaaggataaaggaatttatgccctcccaattaaccttaccaagga

SEQ ID NO: 115183 - DNA, 623 bp, Homo sapiens
ccacttcatcacagaggtcatccacagttactggagaagttcggagcaggaatgtgtcccttgggactggccactaatgccacctcccagagggtgggaggcattcttacctggagaggctagactgatgaccttgagaggaccatttcacccttgagtttctaggaaatcattggaatttaaaataaagcactaaaaagaatttgaagagaccaccaaggacatcaccctgcctgttaraatatttttatatctccaggttcaatgttgaagtgtgaaggctttagctataagagaaattgatgggttagagggcaagaaagcttagggggagagaagagaaaggaaaagaagaatccaaggataaaggaatttatgccctcccaattaaccttaccaaggacctcaaaattcccaaggcaaccttgattctacctttctttcttttgttttcaaatatggaattttccccaggcctaatgttagaattgagcatattcttcctttgatttatgagaacattcagggaatataaggtcatgaaagttagcaaaccagctggcttcaatgcaaagtaattaaatagaaagtcttaaaaacttaaaatccttactagacttgtt

SEQ ID NO: 115184 - DNA, 623 bp, Homo sapiens
ccacttcatcacagaggtcatccacagttactggagaagttcggagcaggaatgtgtcccttgggactggccactaatgccacctcccagagggtgggaggcattcttacctggagaggctagactgatgaccttgagaggaccatttcacccttgagtttctaggaaatcattggaatttaaaataaagcactaaaaagaatttgaagagaccaccaaggacatcaccctgcctgttagaatatttttatatctccaggttcaatgttgaagtgtgaaggctttagctataagagaaattgatgggttagagggcaagaaagcttagggggagagaagagaaaggaaaagaagaatccraggataaaggaatttatgccctcccaattaaccttaccaaggacctcaaaattcccaaggcaaccttgattctacctttctttcttttgttttcaaatatggaattttccccaggcctaatgttagaattgagcatattcttcctttgatttatgagaacattcagggaatataaggtcatgaaagttagcaaaccagctggcttcaatgcaaagtaattaaatagaaagtcttaaaaacttaaaatccttactagacttgtt

SEQ ID NO: 115185 - DNA, 619 bp, Homo sapiens
tccttacctcagctacgaacagctctgcgaggccatgcagtccaaagctccccatggattagctgagctctgagttgtggctgcatctcagtccrcttcctccctctgcctggtactggagagcagaggcgaaagtcttactcctcacaggtgttaatcctgagagcacttgcaatctctaactcagcacctcaggaaacccagcccaagagacttcacaatgagagtggctggagggcaacatagagatactgtaattcaacttttcctcttttgtaaaaaataaagaaacctcagccaagaacagttaaacaatttccgccaaatcaaaatctagttagtcccaggaccagagcctctatttctggacttacaggtgggtgttcctttattagaaatggttttcttcaaggaacttttaagtaaatgtcacctaacaaaatcacatttgagcttaaatctggccaagtaacagttaacattccatctctattcagggtcccatgtgccatatcatatttctagaaactctactaaggaagaagggtcagaatgcatgagagagatttaaggcatcagggtggttgaggtggaagtacctttcttctgcatgtctact

SEQ ID NO: 115186 - DNA, 550 bp, Homo sapiens
gaattcaatcagcgattttcaacagggtgtgatggaaatcgctaaattcatgtggcatcttcaggtgtttattgaaagcatttgcagtaatctcatgtccatctttacttctggggcctgtcctattattgtacatgattttgaggcccaaaaagtgttttaaaaataatccataaactggccgggcgtggtggctcacgcctgtgatcctagcactttggaaggccgaggtggggcagattgcctgagctcaggagtttgagaccagcctgggcaacacggtgaaaccccatctctactaaaatacaaaaaattagccagatgtkgcagtgtgcgcccttagtcccagctactcgggaggctgaggcaggagaattgcttgaatccaggaggcggaggtggcagtgagccaagattgtgccactgcactccagcctagtgacagagcaagactccatctcaaaaaaaaaaaaaaaaaaaaaattataaacttaaatttacaaagctcaaacgttgtaactactttagtttgggaaataaatggttagca

SEQ ID NO: 115187 - DNA, 625 bp, Homo sapiens
aggtgcacagaagcagaaatgaagggctagagcaatggagactttttttttttttttttttttttgagatggagttttgctcttgttgtccagcctggagtgcaacagcatgatctcggctaactgcaacctctacctcccaggttcaagcaattgtcctacctcagcctcccaagtagctgggattacaggcatgtgccaccatgcccagctaatttttatttttattttttttagacagagtctcgctctgtcccccaggytggagtgcagtggcgcattctccgctcactgcaaactctgcctcctgggttcacgccattctcctgcctcagcctccggagtagctgggactacaggagcctgccaccacgcccggctaatttttttatgtgtgtgtgtttttagtagatatggggtttcaccatattaaccaggatggtctccatctcctgacctcgtgatccgcccgcctcagcctcccataatttcgtattttttttttggtagagctgggtttcaccatgttggtcaggctggtctcgaacttgtgacctcaagtggtccacctgccacagcctcccaaagtgttggaattagaggcatgaaccaccgcacccagccg

SEQ ID NO: 115188 - DNA, 625 bp, Homo sapiens
aggtgcacagaagcagaaatgaagggctagagcaatggagactttttttttttttttttttttttgagatggagttttgctcttgttgtccagcctggagtgcaacagcatgatctcggctaactgcaacctctacctcccaggttcaagcaattgtcctacctcagcctcccaagtagctgggattacaggcatgtgccaccatgcccagctaatttttatttttattttttttagacagagtctcgctctgtcccccaggttggagtgcagtggcgcattctccgctcactgcaaactctgcctcctgggttcacgccattctcctgcctcagcctccggagtagctgggactacaggagcctgccaccacgcccggctaayttttttatgtgtgtgtgtttttagtagatatggggtttcaccatattaaccaggatggtctccatctcctgacctcgtgatccgcccgcctcagcctcccataatttcgtattttttttttggtagagctgggtttcaccatgttggtcaggctggtctcgaacttgtgacctcaagtggtccacctgccacagcctcccaaagtgttggaattagaggcatgaaccaccgcacccagccg

SEQ ID NO: 115189 - DNA, 570 bp, Homo sapiens
ggataaaacaacttttggaggtgtgggagatgcaaactacctttattattatcatcattacttttgcctaaaaactatttatgctttatctgttgttttaatacaactgyttgtctttaaagttcccttcatttggtctaaaaccttaaaccagaatttcaaattaacgttattgttagagtcctttttcaaaccctaataatatttggctctgtagtactacagaaacatgcttaaaaatcatacaaaatatttctattggtattacattttatttcccaagaattaagaactaaggtatgtattaacactgaaggtttctctaatctcttttaaagaaagagataaaactggatattcccatgtgcttataggtcatatactaaaatgctaccaaggtttatattgtaaataatgttactttagttcactacaacaaaagaggtttcccatctttttattacaatctagtagtttagcattatatattagtctgttctcacactgctataaagatactacccgagactcggtaatttataaagaaaggagttttaatcgactcacagt

SEQ ID NO: 115190 - DNA, 570 bp, Homo sapiens
ggataaaacaacttttggaggtgtgggagatgcaaactacctttattattatcatcattacttttgcctaaaaactatttatgctttatctgttgttttaatacaactgtttgtctttaaagttcccttcatttggtctaaaaccttaaaccagaatttcaaattaacgttattgttagagtcctttttcaaaccctaataatatttggctctgtagtactacagaaacatgcttaaaaatcatacaaaatatttctattggtattacattttatttcccaagaattaagaactaaggtatgtattaacactkaaggtttctctaatctcttttaaagaaagagataaaactggatattcccatgtgcttataggtcatatactaaaatgctaccaaggtttatattgtaaataatgttactttagttcactacaacaaaagaggtttcccatctttttattacaatctagtagtttagcattatatattagtctgttctcacactgctataaagatactacccgagactcggtaatttataaagaaaggagttttaatcgactcacagt

SEQ ID NO: 115191 - DNA, 591 bp, Homo sapiens
catactaatgggaactgggagaaaagttctttgatcagtgtttgcaaatttcctaaaccttgggttagtatctgactgctgtgttttatttgatgttaatgattgatatagtttggctctgtgtcctcacccaaatttcatgtcaaattgtaattcccaatgttgtgagayggacctggtgggagatgattgcattatgggggtggattttccccttgctattctcatgatagtgagttctcatgagatctagttgtttgaaagtgtgtagcacttcccccttcgctctctctctctctcctgctccaccatggtaagacatgcttgcttccctgtcaccttcctctatgatggtaagtttttggaagcatcccagctatgctccctgtacagcctgcagaactgtgagtcaattaaacctttttcttcatgaatgccccagtctcaggtagttctttatagcagtgtgagaacggactaatgaaatgatttaaacatattttattttgtctttgaaaactaccaaattcattttgcaaaaacagtataaataaacaaaccaaaatataattgtgtgagaaaatatgaata

SEQ ID NO: 115192 - DNA, 627 bp, Homo sapiens
agtgcacagttagatgcatttttagatatgtttaaactatgtaaccaccacccagatcaatatataaaatattttcatcattccagagttaccctcatgttccttcctagtcattagccttccacacagataactactattttgatttctgtcaccatagatgagttttctgttctgctttgaactttgtataaatggaattatatagtatatactcttttgcgtctgatttctttttctgattataatgttcttattcacatatgctgttgtatrtattaatagttctatttttccctgtttttctttcttttgctttgaagcatcccattgtatgaatatgttttgatccattctcctcttggtggacatttgggccatttccattatttgactattataaataaaagctactatgaatatgtttgtacatatctttcagtggaaaagccacaaatttctcttggttatataattaagagtggatttgttgggttatcaggtcatttgactctataaaatgctgccgaattgttttcccaagtggttgaacaaaattactttctcttcagcaatgtaagaaaattccagtttctccatacccttgccaacactacatattaccag

SEQ ID NO: 115193 - DNA, 609 bp, Homo sapiens
gggctggttgctgcttatggccacctcatacagagttcccagcatgacatgaaactaactcacaaagctatcattatattgtcagagaaaccgtgctctataccattttcatttcgaagcaggaataaaaagtttccttgtgcatactgaccaagaaatatctttgattatgattaatgcattatgtcaaaatgtaggctagttaaacttttgtaaagttgcctggaatgtcatttgttaggttataaacacaagatctaaatgaagggttttatgtgttgtgtacaaatcttaattattttgaaayggacaaacttgtcattacatttgtaaccttgtacagaggatttttcactgtgtgcctagcttagtgtacattcagctaaaattaaaaaaaaaaggtgcatgaagagttaaaatcaaattaaagtatatgtagacatgactattttatattacatgacccaatcctgtatttatttctaccccctttttgaaagtatttataaaactagttgaggacagctgtatttttttgttgaactatttagtagaattgtgcctttttgtctgtatgtgagtaaatgctatacattttgcaataaaaaa

SEQ ID NO: 115194 - DNA, 609 bp, Homo sapiens
gggctggttgctgcttatggccacctcatacagagttcccagcatgacatgaaactaactcacaaagctatcattatattgtcagagaaaccgtgctctataccattttcatttcgaagcaggaataaaaagtttccttgtgcatactgaccaagaaatatctttgattatgattaatgcattatgtcaaaatgtaggctagttaaacttttgtaaagttgcctggaatgtcatttgttaggttataaacacaagatctaaatgaagggttttatgtgttgtgtacaaatcttaattattttgaaacggacaaacttgtcattacatttgtaaccttgtacagaggatttttcactgtgtgcctagcttagtgtacattcagctaaaattraaaaaaaaaggtgcatgaagagttaaaatcaaattaaagtatatgtagacatgactattttatattacatgacccaatcctgtatttatttctaccccctttttgaaagtatttataaaactagttgaggacagctgtatttttttgttgaactatttagtagaattgtgcctttttgtctgtatgtgagtaaatgctatacattttgcaataaaaaa

SEQ ID NO: 115195 - DNA, 609 bp, Homo sapiens
gggctggttgctgcttatggccacctcatacagagttcccagcatgacatgaaactaactcacaaagctatcattatattgtcagagaaaccgtgctctataccattttcatttcgaagcaggaataaaaagtttccttgtgcatactgaccaagaaatatctttgattatgattaatgcattatgtcaaaatgtaggctagttaaacttttgtaaagttgcctggaatgtcatttgttaggttataaacacaagatctaaatgaagggttttatgtgttgtgtacaaatcttaattattttgaaacggacaaacttgtcattacatttgtaaccttgtacagaggatttttcactgtgtgcctagcttagtgtacattcagctaaaattaaaaaaaaaasgtgcatgaagagttaaaatcaaattaaagtatatgtagacatgactattttatattacatgacccaatcctgtatttatttctaccccctttttgaaagtatttataaaactagttgaggacagctgtatttttttgttgaactatttagtagaattgtgcctttttgtctgtatgtgagtaaatgctatacattttgcaataaaaaa

SEQ ID NO: 115196 - DNA, 636 bp, Homo sapiens
ggcttgtacctcctgttgagtagaagtagtgatagtgaacatccctgtcttgttatcagtctcatcagtttcaaggtgaaagcattcaatattttaacattaagtaagtgtggaggtgactgtccctctgagaccctcttttaaaggccaggaccttcagtgaaaataaaaatgaaaattcttttcaccagtatgaagaacagtgataaaggaatttttatcatggccacagctctgggtaggatgcttaraatttatcgtaatcacatgcctgtatcatataagttgtgatttgaaatcacactacctacatggtagaaattccccaaatagaaattaacttaaaagttggttttggggacatttagcataatcaaatacaaagcctctctggaaagaagtattcctggcccacagggcataagattttcatagataaaagctcactgaggatgaactcacagtttagaactacaaaccacaggagaaaaatatccaatattatcaagagttattagacagaatgaaataggatctttagatgttcaagaactatatattacctgatggacaccaaaaaataagcatgttaaaaaataatataaatctgactaaatcagctcattatgtgtctca

SEQ ID NO: 115197 - DNA, 589 bp, Homo sapiens
acaacccctttgactgtaattttccactacccacccaaattctataaaacggcccacccctatctctcttcactgactctcttttcagactcagtccgcctgcaaccaggtgattaaaaagctttattgctcacaaaaagcctgtttggcggtctcttcacatggacgtgcatgacagtrtctactgtcaagtttgttttttttttttttttcaaaaactcatgttattgaaccttcaaaggtaaaaaaaaagtttactttacccctacaaccttatcacttcccccaaggcctcacctccaaatgcagtcaaattgggaattaaggctttaacatacgaattttagggaaacaaaaatattcaattcatattgtgtgtgtgtgttatgtacaatacgtttcacagtaaaaagtttacaataaaaagatgtcttttagctgacctttcctgaaaaaataagttgattatatgcctttattgacaactccttgaattctcacctaagcacacatctccagtgccaatgctaagaaactgacctccctagatggtcacattgaggagagagggattgggtgctactattaa

SEQ ID NO: 115198 - DNA, 589 bp, Homo sapiens
acaacccctttgactgtaattttccactacccacccaaattctataaaacggcccacccctatctctcttcactgactctcttttcagactcagtccgcctgcaaccaggtgattaaaaagctttattgctcacaaaaagcctgtttggcggtctcttcacatggacgtgcatgacagtatctactgtcaagtttgttttttttttttttttcaaaaactcatgttattgaaccttcaraggtaaaaaaaaagtttactttacccctacaaccttatcacttcccccaaggcctcacctccaaatgcagtcaaattgggaattaaggctttaacatacgaattttagggaaacaaaaatattcaattcatattgtgtgtgtgtgttatgtacaatacgtttcacagtaaaaagtttacaataaaaagatgtcttttagctgacctttcctgaaaaaataagttgattatatgcctttattgacaactccttgaattctcacctaagcacacatctccagtgccaatgctaagaaactgacctccctagatggtcacattgaggagagagggattgggtgctactattaa

SEQ ID NO: 115199 - DNA, 589 bp, Homo sapiens
acaacccctttgactgtaattttccactacccacccaaattctataaaacggcccacccctatctctcttcactgactctcttttcagactcagtccgcctgcaaccaggtgattaaaaagctttattgctcacaaaaagcctgtttggcggtctcttcacatggacgtgcatgacagtatctactgtcaagtttgttttttttttttttttcaaaaactcatgttattgaaccttcaaaggtaaaaaaaaagtttactttacccctacaaccttatcacttcccccaaggcctcacctccaaatgcagtcaaattgggaattaaggctttaacatacgaattttagggaaacaaaaatattcaattcatattgtgtgtgtgtgttatgtacaatacgtttcacagtaaaaagtttacaataaaaagrtgtcttttagctgacctttcctgaaaaaataagttgattatatgcctttattgacaactccttgaattctcacctaagcacacatctccagtgccaatgctaagaaactgacctccctagatggtcacattgaggagagagggattgggtgctactattaa

SEQ ID NO: 115200 - DNA, 596 bp, Homo sapiens
gtattttcttattgatttttaagaattttatataatgggaagtcacccctttgtgatttgagttacaaatatttttcctggattataatttttttcgagtttacttatagtgaataacttcatgcaaaagtttacttggattttatgtgagagttaggaaggctttccccactttaaaattataaagtaggagaagtgtggtggctcatgcctgtaaacccagcatgttgggaggccaaggagggaggatggcttgaggccaggagttcaaaaccaacctggtcaacacagtgagactcatctctatctatttataaaattttaaaaaattataaaataatctaagagatattttcaagrtatacatttatagtgctgaaaatgaggaaagagaagtggccaaagattacctctacattttttagtttgggagtttaagagatgggggagagttgatctaatgacttaagacaaacatctctatcttttttaatgtgtgttttagagttgtcatgggtgctgtttttgtttttctagaattttctagagcatgagagatgaggaggctgtatttatgagaataagaaatcgtcagt

SEQ ID NO: 115201 - DNA, 577 bp, Homo sapiens
catatatttgaaccttctttgatgccacccaccgcaacccaagtcatgtagtcagttaatacatcttcagttttcatataacacttcatgtgattcactttctgtagcctagttatttgtttacatgtcaatcctctccacatacctgcttttatatatgtcactacattaaacttcagtgacattatgtaacaaaaagtgtgttgaacaggatattttagcmcaaacatttcatggcagccttaaggtctgagaattaatggaatcatgttatctgaggggactctgacactttttcttactcatgctactcccctttcactactaatttaagcaatttaaaagaaccaccatttattgaacactttctatgtgccatgcacacattatctcatttaatcattattactacctcttacgggaagtattattattcccattttatgactgaagaaacagaggctcatagaaactagattaatacaaggtctctcagttaaaaggtgacacagatgggacccaacccccctctttcattgtgctttagtttgttttcccttctaaatcctcaatctct

SEQ ID NO: 115202 - DNA, 522 bp, Homo sapiens
cttaaaaaaaatcaaattcaggaaaatttggacacagttttagaaatgtgaaatgctctggaaagtctcagcaatagaactgaacaagtagaagaaagaaattcagagytcaaagacaaggtcttcaaattaacaatccaacaaagacaaagaaaaaacaataagaaaatatgaacaaagcctccaagaagtctgggattatgttaaacaaccaaatctaagaataattggtgtacctgaggaagaagagaattacaaaatcctggaaaacatatttgggggaataatcaaggaaaacttccccagccttgtgagagacctagacagctaaatacaagaagcacaaagaacacctgggaaattcacagcaaaaagatcttcgcccaggcacattgtcatcaggttatccaaagttaagatgaaggaaagaatcttaagagctgtgaggcagaagcaccaggtaacctataaaggaaaacctatcaaattaacaggagatttctcagcagaaaccctacaaac

SEQ ID NO: 115203 - DNA, 621 bp, Homo sapiens
gtttctattctcaataaataaataaataaatttctatttccagggatgagcaaatgggtgaatatgtacattggttcaacctataataattttctgactatgacccaggtacttcccttcttcaaagagttaattggtagtaaagatagatataaactcacagtcaaatcatgtgaaaattgcaatggtattgattgagggtactatagtagtaatgaagaatgattccaaaggtagaaaccaacaattgttatgggcttctgtatccaagtgactgtgtaagcattttgtatgcattctctttaatacccacaaccactctgtgagattattattattattctacttttactatgagagaaactgagtcatggagtgtttttttatattttttaagtaatttgttcaaggccacacagtaaatggcrtagcctgacgtggcaggtgggagggtttcagggaacatgggctgaagatgttattctctttgagcctgagtgattggttagaagaaaaaacacagaaagaagggaaccgttatagagacacatttcagatagtgaaaacattatttaataaaacacaggggtgataaatatatgccatgtgaagcaaaatttg

SEQ ID NO: 115204 - DNA, 437 bp, Homo sapiens
aaagcaaacatgaacaaatgggatcacatcaagtttaaaggtttctgcatagcaaatgaaatcctcaacaatgtgaaaagacaactcacacacagaatggtaaaaaacatttgtaaactactcatctgacaagggattattaaccagaacatgtaaggaactgaaacaattcaacagaaacaaaaatctgattaaaaaatgggaaaatgatctgaatagacrtttgtcaaaaaggaaaaccatacaaacagccaacaggtatattttttaaattctcaactttaccaatcttcagagaaatgcaaattaaaactataatgagacataatctcatctcagttgaaatggctttcatccaaaagacaagcaataacaaatgttggagagaatgtggagaaaagggaacccctccacaatgttggtgagaatgtaaatta

SEQ ID NO: 115205 - DNA, 603 bp, Homo sapiens
gggtgcaaggcctgactattacacagttcacagggcaagtttagcctcttgatatgcttcacttaacattcgtgtttaacagagaaaatttgcctctgtgcaaatatgaagcacatttttattcttacattgcagaatacattgcagagagaacttcagccttgcctaaatccctaaattcaatagaatattatttaagtctaaaataagtctctccttagaataagttgtcttccacctacagaaacttacacccttgttataattacttcagtactaacaactcctcctcttaacactcaaagtgtgtgggttttgaaaaggcagcacacaaacctgatacttttaaaaggaatctattaatagcaacataatatttttcttcttccagatgcccatgtatcatcacttacttttatttttccttctattactgtttcctctaaatattcagcatgtatatattgcttattctaaactgaatctataagtaagaaatttattctttagctttaccattcrtgcaaattcctaagaccaaattgtaaaaggtgcaagacctagatgacttcatatagatgttaaactttattgtaaactggc

SEQ ID NO: 115206 - DNA, 442 bp, Homo sapiens
atatttagaacccgaacccacttatcaaaagtaggaatgagtctctggaacacagggctctgtaacaccaatgcaagaatatattgtgacaagtctcaatttcttttccaaaaggacttataaccatttacttggctgatggtacactgagacaaagagaatacacagacatttcaaggactcttagacacattacaaaaggatattgataccccaggactcatattattatctcagccctgtgttgcattggggctcactgggactaggtaakaatagagtcctggcaaaagtcagtctcacaatgggtctgagtatccacccagtgatcctgttcccagtttccatctacatgtttggaaatatgtttggtaactggagtaactgccacattggatctctgatctgttgtggaaaggctatcatgatggggaagattaaa

SEQ ID NO: 115207 - DNA, 560 bp, Homo sapiens
aggaattctctcccttactgaaaaagaataggattaagtaaagcttcagtatccccagggaaattaacaaagctattgaaaacataaaataagaacaaaatatcattaaaaacacagagaagagtatcaacatttctctcttcaaggaaatacttggttttttaaaaatttgtatacgtttttccccaaaaaggtgcgagagtattataaataaaatactttcaatcatggttataacagttttattaataagtgtttatattttcaatacacragttaataagttcactgtaaatacttaacctttatgaatttatgaatttactaatttattaattaaattataaatattttaaggctcattatttttcaaaaccttttaagaggtatttagcacaaacatgtattgcagtgctaatcctcataggtgatgaaatggctgacttaacagaaagttgcttacatttttgataattgcctgaagttagtctcaaagagactgaacaatagtgagacaagagcaatttttactgagtaagttctttcggttttcagagaaa

SEQ ID NO: 115208 - DNA, 604 bp, Homo sapiens
gcctgtgccaaacaaagatagccactgttggcaggctctttcagatgcttaaagtggctctgagaggagtgtcacagtcaaacttccctttcagataccaacagacatagcacatcaatacatcttgggaaattgttcagagaaacttttattcactgtcrcctaggtgcagataatacagtttgtgctgaatttttatattgttcttatttcatatctgatatgtattttatgccgttttaattgcttcctctttatattgtaaatctcattaggagaagtgactctgcttgaattttaaaaactatactgcataactacctgtactacctataatccttattgtttaatacttctaagtactcacttttatcatgatggcaattgattaaaccttacagggtctcatgtttacttatggttcctccacactgagaatataaattacagatctttgaatagaaagggcagacatgtaaaaaaatcagtactgatattataaaagagagttatttgatgctgacaagattatctcaatgctacatctattatttgggctcactcagaactagagtcaactttatcctaactttggcagctaaaa

SEQ ID NO: 115209 - DNA, 575 bp, Homo sapiens
aaggtacactcacaggtcttttcttggtgtgtggtgaataaaggatcactacttattcatccaggttttagccatatccaggataattgtataaggttccaaaatgacagaggaaagatctactcataatattttatcattttactgatttatgcaaaaatataaggacctgaaatttgcccattgagaacaagctagacaggaacacttgtcatggggtagaacagaaaaaggaccctgaatcctatacaacctgggagaggtctcktctaaatggaaaggatagttataattttctatagaaacaaagggtcctaactgggaagacaacatcatggtgaaatatgaaagaaggaaatggtgatgaaaaccaaagaacaagtaaagaagccagacccaggggtttcaaaagtaggtcaaacaagcaattcttgactgagttcaccaacagataacaagcatgtttctatgttgtggggccaagtgttgtgagttatggtagcctcaaacagtcactctttttaagcaaaaaaattaaaattttagacaatttggtaatcttgtgcatgaatact

SEQ ID NO: 115210 - DNA, 581 bp, Homo sapiens
ttgcatatttgtttaaagttaaaatattgggtattaatatttgcatatttgtttaagagtacatatatgtgctactctattatgcacattattaaacagacaaaacatatatttaaaaggtcatatagagatacaatacatatttataatgaatttaatttattaatagtaaaaatccccttttcggtcttttgttttgtttttgatttttttcagayagggtctgctgcccagactgcagtgcagtagtatgatcacggttcacaacaggcttgaccccccacactgaattgatcctcccacttcagcctccagaatagctgggactacaggcatgtaccaccatacctggctaatttttaatttttttgtagagttgagttctcactatgttgctgatatggtttcgctctgtgtctccaccaaaatctcatctcgaattgtaatccccagtgttgggggagggacctgctgggaggtgattgatcatgggggtgaatttctctcttgctattcttgtgatagggagtgagttctcatgagatctggttgtttaaaagtgtgaagcacttcccccttca

SEQ ID NO: 115211 - DNA, 581 bp, Homo sapiens
ttgcatatttgtttaaagttaaaatattgggtattaatatttgcatatttgtttaagagtacatatatgtgctactctattatgcacattattaaacagacaaaacatatatttaaaaggtcatatagagatacaatacatatttataatgaatttaatttattaatagtaaaaatccccttttcggtcttttgttttgtttttgatttttttcagatagggtctgctgcccagactgcagtgcagtagtatgatcacggttcacaacaggcttgaccccccacactgaattgatcctcccacttcagcctccagaatagctgggactacaggcatgtaccaccatacctggctaatttttaatttttttgtagagttgagttctcactatgttgctgatatggtttcgctctgtgtctccaccaaaatctcatctcgaattgtaatccccagtgtygggggagggacctgctgggaggtgattgatcatgggggtgaatttctctcttgctattcttgtgatagggagtgagttctcatgagatctggttgtttaaaagtgtgaagcacttcccccttca

SEQ ID NO: 115212 - DNA, 408 bp, Homo sapiens
aaaacaaaaaaaggcaggggttgcaatcctagtctctgataaaacagagtttaaaccaacaaagatcaaaagagacaaagaaggccattacataatgttaaagggatcaattcaacaagaagagctaactatcctaaatatatatgcacccaatacaggagcacccggattcataaagcaaataacagaatttcaaaatcaatwtcagggcatcacattcattcatgctttagaaggctctaaagcctagaggagagagctcaccagaacaggacagtgaagatacagagaaaaggtacagagcaatagaatgagagaagcaatgagaattttgattagactggtacatagatcccgtgaaagtaatcatgtctatgcagtggcctccaaactggtgttgttactttc

SEQ ID NO: 115213 - DNA, 521 bp, Homo sapiens
gtttttcttgtgctgacacatgctgtcttgcctgctgccatgtaagacgtgcctgcttcacctgctgccatgtttgtaagtttcctgaggcttcccaggcatatggaactgtgagtcaaaactttttcctttatacattgcccagtcttgggtatttctttatagcagtgtgaaaatggactrttacactaagttaatttaaaaacattatataaaactacaggaagaagaggaaaaatggattttaagtgttcctttgttaattctgagagtatctcaccctaaaccctttgcaaaaattacacacatagattttccactaattgcattacaaattccataggaaagaatgcattttaagcatcatctttgcattgccacatacatttagcaaaatgacttacatacggtaggaactcaaaatttaatttaagaagtttttttttgacttatctctgagcgaaaataatggattgctaaatgaaaaccaaacaaattaggagtcatcatatccagaattc

SEQ ID NO: 115214 - DNA, 644 bp, Homo sapiens
tcttggttttgcttttttccattcaattatgtcaaaatgtttttaaactgagataaatttgtataattataattgtaatggttgtataatattccatggggtggaaatgccataatttacataactattcttacattattagacattaaaattgtttccagctttcattaatataaagaacactgcaatggatatcttaatattcaaagagttttatttttaggttattactttgggatatatatgcaaaagtaaatttgtgtgcaatcgaactatgaaagatttaggaaagtagttgaaaatgacytgagaactggtttctcacagtgagaagttgtatgtgtaggccctggcagacctactgcaggaagaaatagaagctggaagcagacagactgctgacgggatcctcccttagcttagcagcatggtataaaatgcagtgaggtctgtgacctagctggttcttggctctatgaagatgatatatgaccaccaaacttcagtcttgcttgtgtgaaaaactctaaagacaagaaatctgcatacactcactcacttgtatcatcaactgataatctttgcaccattgtttgctggtttgaaaatgaatcaaggagaatacgttttgaatgaggccaaga

SEQ ID NO: 115215 - DNA, 507 bp, Homo sapiens
ggttgtataatattccatggggtggaaatgccataatttacataactattcttacattattagacattaaaattgtttccagctttcattaatataaagaacactgcaatggatatcttaatattcaaagagttttatttttaggttattactttgggatatatatgcaaaagtaaatttgtgtgcaatcgaactatgaaagatttaggaaagtagttgaaaatgacttgaraactggtttctcacagtgagaagttgtatgtgtaggccctggcagacctactgcaggaagaaatagaagctggaagcagacagactgctgacgggatcctcccttagcttagcagcatggtataaaatgcagtgaggtctgtgacctagctggttcttggctctatgaagatgatatatgaccaccaaacttcagtcttgcttgtgtgaaaaactctaaagacaagaaatctgcatacactcactcacttgtatcatcaactgataatctttgca

SEQ ID NO: 115216 - DNA, 644 bp, Homo sapiens
tcttggttttgcttttttccattcaattatgtcaaaatgtttttaaactgagataaatttgtataattataattgtaatggttgtataatattccatggggtggaaatgccataatttacataactattcttacattattagacattaaaattgtttccagctttcattaatataaagaacactgcaatggatatcttaatattcaaagagttttatttttaggttattactttgggatatatatgcaaaagtaaatttgtgtgcaatcgaactatgaaagatttaggaaagtagttgaaaatgacttgagaactggtttctcacagtgagaagttgtatgtgtaggccctggcagacctactgcaggaagaaatagaagctggaagcagacagactgctgacgggatcctcccttagcttagcagcatggtataaaatgcagtgaggtctgtgacctagctggttcttggctctatgaagatgatatatgaccaccaaacttcagtcttgcttgtgtgaaaaactctaaagacaagaartctgcatacactcactcacttgtatcatcaactgataatctttgcaccattgtttgctggtttgaaaatgaatcaaggagaatacgttttgaatgaggccaaga

SEQ ID NO: 115217 - DNA, 606 bp, Homo sapiens
cagcatgcataattattgggaaacataatatttaagaagctttaaaatataacatgggagggtgcggggccaagatggccaactagaagcagccgtgatgggaggttcccatctaaaagaaccaaaacaccatgcaaatccagcataggcaactgaggtatccaggttgtgtcatcaggactgactaggcagctggtgtgacccacagagaggtaggaagagcagtgtgktgctgcggcccacctgagagccccacataaccaggcagctcccactcccccagccaagggaggcggtgagggagtgggctacccagccagggaaactgtgcgctttccacggaactgtgcaacccatgaatcatgagcccatgccaccagggcctagagtcccaaccacggagctgcgcagattctcaacagccactcagctagaatctgcttaggcctgctgagttccctgggggaggggcagctgcctgctctctaagccatctgagcttcttgtgtgaggggcagcagccaacactaggaccatagctgcctaacacactaagctcctggggcgggggatgggcagcagcaatctctatagttccaggccagg

SEQ ID NO: 115218 - DNA, 554 bp, Homo sapiens
tgccctgctcttgtttacactgccagtttacattgtttctccaagccatcacagctgatatccgctggtgctatccccaaactgccactcttaactaactcttaaagtaaataaayaatctttgctggcaggactatgctgaatctccttaggcactctctaattaaatgtcctagctcctcccaattcttagacctttaatacctgtttttctccttctcttattccatttagtttttcaattcatacaaaaccgtatccaggccatcaccaataattctaaatgacaaatgtttcttctaacagtcccacaatatcaccccttaccacaaaatcttccttcagcttaatctctcccactttatgttcccatgccgcctctaatcccgctcgaagcagccatgagaaacatcgtccattatctctccatatcatccccccaaaattttcgctgtcccaacactttaccactatttcattttatttttcttattaatatgagaagacaggaatgttaggcctctgagcccaagctaagccatcatatcccctgt

SEQ ID NO: 115219 - DNA, 554 bp, Homo sapiens
tgccctgctcttgtttacactgccagtttacattgtttctccaagccatcacagctgatatccgctggtgctatccccaaactgccactcttaactaactcttaaagtaaataaataatctttgctggcaggactatgctgaatctccttaggcactctctaattaaatgtcctagctcctcccaattcttagacctttaatacctgtttttctccttctcttattccatttagtttttcaattcatacaaaaccgtatccaggccatcaccaataattctaaatgacaaatgtttmttctaacagtcccacaatatcaccccttaccacaaaatcttccttcagcttaatctctcccactttatgttcccatgccgcctctaatcccgctcgaagcagccatgagaaacatcgtccattatctctccatatcatccccccaaaattttcgctgtcccaacactttaccactatttcattttatttttcttattaatatgagaagacaggaatgttaggcctctgagcccaagctaagccatcatatcccctgt

SEQ ID NO: 115220 - DNA, 554 bp, Homo sapiens
tgccctgctcttgtttacactgccagtttacattgtttctccaagccatcacagctgatatccgctggtgctatccccaaactgccactcttaactaactcttaaagtaaataaataatctttgctggcaggactatgctgaatctccttaggcactctctaattaaatgtcctagctcctcccaattcttagacctttaatacctgtttttctccttctcttattccatttagtttttcaattcatacaaaaccgtatccaggccatcaccaataattctaaatgacaaatgtttcttctaacagtcccacaatatcaccccttaccacaaaatcttccttcagcttaatctctcccactytatgttcccatgccgcctctaatcccgctcgaagcagccatgagaaacatcgtccattatctctccatatcatccccccaaaattttcgctgtcccaacactttaccactatttcattttatttttcttattaatatgagaagacaggaatgttaggcctctgagcccaagctaagccatcatatcccctgt

SEQ ID NO: 115221 - DNA, 638 bp, Homo sapiens
aattgccatctttacatttaatattctcatccataaagagggtctatcttttccatgaatgtatatctaatttatacttcagagtacactctttagtttttttcatcttaagacctgcagctttaacaaaattgttatacacacacacaaatacatttgatgtgaactctgaaagaatcacaatatattaccctactttatattttttaaaaagtccttcaagcttcttatcactgtccttactattgactggaattttatttttcattttttttaaattcccctgatgccgacrttcaaaatggttagaaggagcttattatatcctaatataactcagctatgtcatgtcaaaagtgacaaatagatatcattcttgaatcaatgaaggataatcacggttcctttactatgatacagaagtcgtagaaagtgatttgtccaccattataattcaaatatagtaagatttatggcacagattctcaatacaatataaaatctgataataagtcatttaatgttctgcttcacttaccaagcaaattactagctatttcccctgatctcaccaagttagatattgcattttacaatttgcattgcattttattatagaaacataaaatcatttaaga

SEQ ID NO: 115222 - DNA, 604 bp, Homo sapiens
tccctcactctccctgttctttgctggttttaggctttacctggctgaagactgtccgtagtgttttctagagttctaagtgtacacttggatagaattgaaagtgactgcagagtgtgcagacttctagaactttcctttagagaagtgatcaggagttggttctttactgagrctgtgattctaacaattctggtacgcagggtctggggttccttctaatttaatgccaagataaggatgtttcaggctgatgatatctgatagggggttgtccatcactcaaagtccctaaagtttccttgcataggttgtgaaaatacaaaacaaaaaatgtccttgtagcagttcagcaatcttactgtgttaatccctgctgtgggaaacagtcatagcaaaaggaatataaataaatcaatacatcaataaataacacctccttttgtgtttactccttcgccagaccttattggcacttacataatcaaaccattgtcctgtgcaccctgggaaagctgattgctaacacttgctttcaaacatcaaggagctatagtttcatgaagaaagagagagggagcgagagagagttgggtaaataaaa

SEQ ID NO: 115223 - DNA, 604 bp, Homo sapiens
tccctcactctccctgttctttgctggttttaggctttacctggctgaagactgtccgtagtgttttctagagttctaagtgtacacttggatagaattgaaagtgactgcagagtgtgcagacttctagaactttcctttagagaagtgatcaggagttggttctttactgaggctgtgattctaacaattctggtacgcagggtctggggttccttctaatttaatgccaagataaggatgtttcaggctgatgatatctgatagggggttgtccatcactcaaagtccctaaagtttccttgcataggttgtgaaaatacaaaacaaaaaatgtccytgtagcagttcagcaatcttactgtgttaatccctgctgtgggaaacagtcatagcaaaaggaatataaataaatcaatacatcaataaataacacctccttttgtgtttactccttcgccagaccttattggcacttacataatcaaaccattgtcctgtgcaccctgggaaagctgattgctaacacttgctttcaaacatcaaggagctatagtttcatgaagaaagagagagggagcgagagagagttgggtaaataaaa

SEQ ID NO: 115224 - DNA, 556 bp, Homo sapiens
tgatatctgatagggggttgtccatcactcaaagtccctaaagtttccttgcataggttgtgaaaatacaaaacaaaaaatgtccttgtagcagttcagcaatcttactgtgttaatccctgctgtgggaaacagtcatagcaaaaggaatatamataaatcaatacatcaataaataacacctccttttgtgtttactccttcgccagaccttattggcacttacataatcaaaccattgtcctgtgcaccctgggaaagctgattgctaacacttgctttcaaacatcaaggagctatagtttcatgaagaaagagagagggagcgagagagagttgggtaaataaaaatgttttacttaagtaatgataactgaattacagttatcgttactaaagaagagtcaggtaaatataaatctgaatgtaataaatcttataacttatctagaggcagcataacatttgcagacaaaaggattaattccagcttggaaaatcatggaaagcacctgaaaggtaattttgagttgagccttgagaaatgattggtgaa

SEQ ID NO: 115225 - DNA, 556 bp, Homo sapiens
tgatatctgatagggggttgtccatcactcaaagtccctaaagtttccttgcataggttgtgaaaatacaaaacaaaaaatgtccttgtagcagttcagcaatcttactgtgttaatccctgctgtgggaaacagtcatagcaaaaggaatataaataaatcaatacatcaataaataacacctccttttgtgtttactccttcgccagaccttattggcacttacataatcaaaccattgtcctgtgcaccctgggaaagctgattgctaacacttgctttcaaacatcaaggagctatagtttcatgaagaaagagagagggagcgagagagagttgggtaaataaaaatgttttacttaagtaatgataactgaattacagttatcgttactaaagaagagtcrggtaaatataaatctgaatgtaataaatcttataacttatctagaggcagcataacatttgcagacaaaaggattaattccagcttggaaaatcatggaaagcacctgaaaggtaattttgagttgagccttgagaaatgattggtgaa

SEQ ID NO: 115226 - DNA, 690 bp, Homo sapiens
atgtctttccttatttcatgtgaaggctgtgggtaggctgcagcttttcttggttctactgtgtacagctaggctcagctaggcttgcttccatttcaggactgaagaagaaaaaacattgcttctctagaagaaactgttcatacgggaaaggggaggaatacaagggtgacagagccaaacmaggaaatctcatttaagaattatgatcagttgtgacagtcacatcttctcaagttccactggccaaagcatgtcatgtgctcaagtgcaaagtcaaagagtcaaatagaatatacagatgctccttgacttacaatgggtttatgtcttgataaatccattgcaagttgaaaatatttttagtcaaaagtgcatttaatacacctaatctaccaaacatcatagctaaacctagcttaaccttaaacatgatcagaacatttttacattagcctatatttgggcaaagtcatctaactcaaagcctattttataataaactgttaaatctcacatgtaatttagtgagtactgtactgaaagtgaaaaacagaatggctgtagggctagttgaagtatgtttctactgaatgtgcatcactttcacaccatcataaattcaaatcattgttaagtcaaagactgtataattctttaacagaagtcaaatgacggtaactagggttc

SEQ ID NO: 115227 - DNA, 546 bp, Homo sapiens
acaaatttatgtgtgagaatatggcaacaaggggaagttggtaaatacattttaaatagacctaccttgacttccggaacactgttttcattttcatctatcccgtgtagctgcatcctaactaaaattctctgttagttttattttctagtagttgtcctcttctctactcttttttttttttgtattttcatttattaaacagaccctttattttcaaatgttctccctcctttcttgttttgtgataggcatgcagtccttctgaagtttttaagggtatttgttgcttgtattggtggaagaatgggatgggataaacaataccccttctaagctttcttcstctattcctcattttccctgtatttcctgcaaagaaacaaaaagctgcagatacatgccagtggtctttgtacacagacaatgaaggcagagtctgactcattttaaagaaaatccaggtggcattaatctaggtgtttcttcctagaatccaaggtagtcatgatggctcaggagagagaaacagaccaggcaggggca

SEQ ID NO: 115228 - DNA, 557 bp, Homo sapiens
atgggttatggggaacaacagtttgtattaggtcccttaattgagcctgagaaactgaggctccactagctttaagaagctgtttgaacacttttatatactgtttctgttgagctgataactgttgtcccatgatgaaaccctagcttgaaaattccctcgaacttggaaatcccgagtgggcaccagtgacttatggactgcgcagtctcttctccttcatttttgaggattctgtcatgatttattgcagtgttcctcacacagggcaccagctgccgggtccatcccacagaccctggctgagygatggatgaaaggagtactcagacacaagcatccagtgaaagagtgggctaggggactgccagcactaggggccaaagagagttagcagtcccaatgagctggggccacttttatttattcagtactggtataatgtcaaagacctggagccaacacaatctgtgggtaattaacattgtcatcccccccttgcaggtagcagtcttatgcacggatgaccaaaggttggtctctggatgacatcagta

SEQ ID NO: 115229 - DNA, 600 bp, Homo sapiens
cctctttaactccttgaaatctaattttcacccccaactgtttacccaaattgacccctagaagtcaccagttgccactgtaactcccaaggtcattctgacttctgcagctgtcactgtattttccacccccttcttcttggaaattattaatcctttcatgtttctgcccttacactattcttggtttcctgctaatcttccaagtcttctgaagctttccccatgtctcttgatcccttcctcatgccccgtcttacccaaggttcagtccttggtcctccatgcttcttgctggacaccaccatgtttagaggtcaactctgttctcatggctgcaaacacgagggctgatgactcacagatttatggctcatgtcctgtcttttgctcaaggtttattcccatatctstgactgcccactggtcattttcacttgaaagtcttcccatcacctcagactcaaccaacagtctctaattgagctcatcatctcccctacaaaaccagttccttttcttatttccttgttttttccatggtgcccatgtctcatggtcattcccactcaaagctttgaagtcatctctaatgtttct

SEQ ID NO: 115230 - DNA, 600 bp, Homo sapiens
cctctttaactccttgaaatctaattttcacccccaactgtttacccaaattgacccctagaagtcaccagttgccactgtaactcccaaggtcattctgacttctgcagctgtcactgtattttccacccccttcttcttggaaattattaatcctttcatgtttctgcccttacactattcttggtttcctgctaatcttccaagtcttctgaagctttccccatgtctcttgatcccttcctcatgccccgtcttacccaaggttcagtccttggtcctccatgcttcttgctggacaccaccatgtttagaggtcaactctgttctcatggctgcaaacacgagggctgatgactcacagatttatggctcatgtcctgtcttttgctcaaggtttattcccatatctctgactgcccactggtcattttcacttgaaagtcttcccatcacctcagactcaaccaacagtctctaattgagctcatcatctcccctacaaaaccagttccttttcttatttccttgttttttccatggtgccmatgtctcatggtcattcccactcaaagctttgaagtcatctctaatgtttct

SEQ ID NO: 115231 - DNA, 523 bp, Homo sapiens
tcctctgcatccaggttttgagacctccatactgttcattgctttttcttagtttcagatttgaagacaaacagttgctctttgagtgccratatgtgtcaggtgccatgttgaagtctagttggtgatggctagagtcatcccggcaatcaaagggaatcttcgcactcccacctcccaccatcccccaagttgggaagagagaccaacattcaaataatagaacgcataagggaatagagagacattggaaaattataagtgctgcctgtgtgctgggaattgaaaagcaggccctaggaaaccagattcttacatttatatagggatgtgtgctgattttaaagctctgcctatcttaaggctcaatagtggtaaattctcctaagaacacgtaactaataactggcctggtgaagaagacaaagaaaatttgccattgatcatgtttcccctcctgggtcacaagctttctgaagaaggggccagctgttattcttccataaatcttatagtgctgaaa

SEQ ID NO: 115232 - DNA, 523 bp, Homo sapiens
tcctctgcatccaggttttgagacctccatactgttcattgctttttcttagtttcagatttgaagacaaacagttgctctttgagtgccaatatgtgtcaggtgccatgttgaagtctagttggtgatggctagagtcatcccrgcaatcaaagggaatcttcgcactcccacctcccaccatcccccaagttgggaagagagaccaacattcaaataatagaacgcataagggaatagagagacattggaaaattataagtgctgcctgtgtgctgggaattgaaaagcaggccctaggaaaccagattcttacatttatatagggatgtgtgctgattttaaagctctgcctatcttaaggctcaatagtggtaaattctcctaagaacacgtaactaataactggcctggtgaagaagacaaagaaaatttgccattgatcatgtttcccctcctgggtcacaagctttctgaagaaggggccagctgttattcttccataaatcttatagtgctgaaa

SEQ ID NO: 115233 - DNA, 558 bp, Homo sapiens
caaagggagattcagatctttagatttcaaaagtttatcaagtatgaggyaaaattaatgaaatgacttaacttggccaacctttgaattttaatgggaaagaaaaatcctacaagccacatgtagggagatgaacaaaatcttgtttcccagaaaagggatattttccaggtatcattcccgtcatcccctgcaacaaaaagtcctcaaattctctactcattcctattatttctaatgtatataaacaacagaaagacctattcttggacatacaaagataaacaaagaccagaaatcatttatcttttctgatattttgaagtgaaaatatacaccagctgacttagaaattaataaaaagaacaaactcaaaacctagttataaaacctaatacaaatgtcaagagagtgtaaataatgtaaagaattattagagcataataaaaataagggtagtaagtcaactgagcaaggaaaaggaggaaatcaaagaatgctcaatgttttatttcataccaggacattaataactttacataaacagccttaaaaaga

SEQ ID NO: 115234 - DNA, 610 bp, Homo sapiens
tggggtgtaaagtaacttgcccatagcttctcacatgctcatgtcagagcctgaacagtcctcaactccagtgctccttcctcctcacctccacttccccaattaaagagggagtcaggctttttccaactagtactcatctctaattatgagacaaaatgccttcatccccctttcccaaacaagatcttcccctgctctgaatttttggtgaaataataattccatratgatacatcttcttccttcactactctctccccaaccaagtacagtgcctgtctcctattgcaatggacatttgtgaaaggaaggataggagagaggaaagcaaaaagagggtcaggcaggaagggaagactcagaaaattcatcttttctcattaccccagcaactaaccaaccctaagtgttttgaagcacttaataggtgctctgtattccgctaggatataagagaggtgtcagtcagggatcccaccctaaggaaaattataatacagcaaaaagataacaaaaaatggatcaagtagagaagaaaacaatgtgagacagaccattcaatggggagatgagagctggagagaggagagcagggagccaggggaag

SEQ ID NO: 115235 - DNA, 508 bp, Homo sapiens
tggagttgatcatttttttctttacatagcagactctacctcatccttcagttctgtcactgcagcctgttcatctcctgcacaacacccaccgtaatgtgtgatttaagtgtatgcatttgtgtgtggatgcatgtgaacgtcggcgcttattttcagactccccagtagaaaagagcttcatatatcctcagctcctatcaaggggcctgacacttggtaggcatggaatttttattgaacacatgaatcagtggtcacaaagtgattatctgattcaagaaaaccactaaaagattgttagccagcaattctgtggaagacatatctgtgtataccagaagtgtaacataaaatgctggattttggccaggcacgktggctcacgcctgtaatcccaacactttgggaggccaagacaggcggattgcttgaggccaggagtttgagaccagtctggccaaatggcaaaaccccatctttactaaaaatacaaaattagccagtc

SEQ ID NO: 115236 - DNA, 681 bp, Homo sapiens
tgcaatgtaacatctttgtacatatctcttcagttagatcataagcccttggaagtaggaataatatgtttaattgttttgtattcctctggagtagcatgtacattgttcacacccaacatggatatggattgaataaacaacatgctgtggttgcattttccagatttgctatttaattttagtttgttcttcaatataaaatgctactttcttcccccttgctgtctgggtgattaaactagatttgaaaagttttagagagaaatgtagaaaagctgacagcttgcaaatgtgcacaattagttggttatccatagtgatggggatgtctgaagtctttctgacgacgtgtatagaatgtatgaaacttgtaagaattcaaacaattcaaaaacttctaaatatcttggcaatttaattttcaaaattacagaagtgatgagaggaacttatgatgagttgggaacatttttttgccagatttttccccctcttttcttaatggtcctgaagtgactgcaatagaagaatggcctaggatgcaagtggccagttgggttctcctgaatattttaatggttttagaaaggggtcagtttgcaaatgtagtctagrgggaaagtagacttgcccctgagctgaaacttatttggcaagttgcaataaagatcatgtttc

SEQ ID NO: 115237 - DNA, 396 bp, Homo sapiens
ttggtcacagaagatgaatccttgaaggtggatctacagcgctggccacagctaagatgcattcccatactctcagaccagayttgggcaaatctcttttttgtctactgcaagtgttgaattatcttctttgaagtgttaatgggcaatatgccaaatgtattgtatgggggacatcttttttattcatttattttaaaaatctctgtgttttttagggaaatgcaaaccataagtttctgattcatttacacataactcatcaaaatgtggttttgtgagcactctttggtatgaaagaagcctcatgattcttttcactacactgttccaaccttcttccttcctagaaacagggagttatatttggccaaaaatagatgcataaataattat

SEQ ID NO: 115238 - DNA, 600 bp, Homo sapiens
gagcaagtactgtcaaccactttgagcagcatgacatggtgatcaggagacagtgaaggctgtgggctccatggagggttttcctggcttttctctacttttaggaccagggcagacagagcaagggtggcctgggatatccaatgtcattcagtgttgcagcccatctggtggctgtggccttcatagccctggaaatgctgatgctgtctcagaaacaaggggatagtgggaacctggaataaaggaggctggaggatgatttaggctcagccagagtagatgctgttaagtccttccckttgggctgctccacactggggtgcctctgggcatccttcagcgagaggctgcccctagtgtcccctccctccccgcctctggtgctgccggctgcatcccaggcctggaaccaacatgccgaacagcctcagcacatctgcatagctgacgtcaaagcagaccacagtttgtcctctggggaggaaagggaaccacagtatgtgtgttggtttctcttctatctgaaagctctttcgcccttttctgcactcaggcccctggctagctttcctgatgtgcctctgggattcttcccct

SEQ ID NO: 115239 - DNA, 583 bp, Homo sapiens
tatagaaaagtccagcccattttggtattttataccaaatataaaatggtcctattggagaataggaccccattctccaatatgttcaatattgtaactagcctttgttgtctctttttattttatgttgtataaaacaataactttttatttttctttgtattggatgggaggtaattgcatgttattaaattcattttctaggatttattatgccattattttctaccattcttacagttataytgtattaataataatcaccatttaaaaggtccaccatgtacaagagcaattctaaggctcctcttaataatggcctgtttatttcatgtctcacctcttttttaggggacttctctaaattgggcattggtatagccttctctggacaccccattatatcttaccatttagtattttactgtaaaatgcaatacttactggtctttgttttttcagaatgcattttgctttcttatatattctgatcaagtcttttattgagacacggtttacatacaataaaatgcacaaatcttgatcattcaattaagtattgatagttacatacttccaccag

SEQ ID NO: 115240 - DNA, 574 bp, Homo sapiens
atttattacctggctttttacagaaaaacattcactgagaagttctactcttccttgtcaagcctgcccatgaagggtcattccagatctttgtgtccacaacatttagttcttacctacagaaacatgctttccctaattgtgaaacatgcatgtacatatcttctccccagccctgcctcattaccttcttggaagccaagatcacgtcttatttatctctcattgtctcctggccattaacttagtgccaagtacacagtgggactcagccaacatggttgaatgtgtccagttctgagccctgcttccagataccatggcttttttttttttctttttggaaagtaagtggttaatatcatgggctagggagtttcactacctgatttgattctgggtctggcacctaaagctgtgcaaccttaggcaaattatcttaacctctctaagcctccctatcctcattgaccaacaaagataytgatagcaactatttcataggcttgttgtgagaattacatgcaaattactgttcaacgtgctaagcacagtgcgagtgcatagtacattt

SEQ ID NO: 115241 - DNA, 608 bp, Homo sapiens
ttcgtcatgatgtagcatgtgtcagaatttctttcctttttaagaatgaataatattcccttgtatgtatatatcatattttgtttattcattcatcttcatccatctatggacactgggttgctttcatcttttgactgttgtaaatgatgctgctatgagcataagtgtagaaatatttgtttcaggtgcctgcctgcaatgtttttgggtatatactcacaagtaaaattacttctttcgtggtaattcaagtggtaattctacctttattatttttttgaggaaacaccacactgttttccacagtgccttcaccattttgygatctcaccagcaatgtgagattgtaacaagggttataatttctccacatcctcaccaacatttgttatttaatgttttaagttaatagtcatcataatagatggctattcattcatttaacaataattggaaatctactatgtaagagacaatgcattaggagctagccatacaaaaggcagacatagccagcctggttggtgagacagaaaagtaattaagtgttagaaagccacgtaataagtgccattaggcagtaacccctcaaaagccatagagga

SEQ ID NO: 115242 - DNA, 458 bp, Homo sapiens
ttctaggaaatctttgcccaacctccatgctcacttcttcctggacagtcattccacttggaatctattgtgtcagttccgaacatttgcctgatattcagacttcctaaatatccctccctgtcttcaccaagcctcttggccaagarattttataaattcaaaaatgttatgtatattttttctatttatttctcaatattacctttggcaagtaatcaaacagagcctggacgtaaaccaagttaagataattaataatagctgaagtgtttttccccttctttcagggactggcggaattactcttaagaagaaataagaaacaaaaccaaaaacagtctgatctctgtttcttggggggagtgatggggttctgaaatctgttctaagtcagttttctgcccatttctatttctccatgatttctactctagggcaataaggaaacagttaag

SEQ ID NO: 115243 - DNA, 562 bp, Homo sapiens
ttttggtctgtttttgtgggagatgttcttcctggtggcatctagttaggtgtcttgccttggatacccagtccaaattttcagtattaatttccaagcatataaaatgagaataatagaagatcaactctgatggtttactatgaggattaaataagataatggatacaaagtttttagcccagtttcagatacaaaacaactgctgcaaatgtaacaagcttttacagttttattcttattactaccaaaatgaaatgatggctccaacatttaaatgtgagcctattyccctttgaattctatgttatttccacgctatcatgaagcctggacaagtcagtaaataaaaggagtaagaaagaaagggcaagaataatatattaaaaagctctctccatccttaaaacaggcttcattatgttgattagactacaggaagagccctctgtagcccagattagtacttccaaaatttcagaatttaccaagtttagtcatactccagctttctgggtagcataatggtactttattgccatgcttaagttgattcctttat

SEQ ID NO: 115244 - DNA, 459 bp, Homo sapiens
ctataaataggtgtataaactttgacagataatttaaccaatctgggcttaacttcttcattcaaaactagaaaatgtaatagaaatcatgatgaggattaagaattaataaatttaagctgcttgtcttattttgcatcaataaatgttattattgacatatctcccatatatarttggagatcaataagtatttgatgtcggtattgttggatattgtgatggtctaatgtgggttgcttaaggcagtgtttttgaaggctatgtgaagcagatcaagacatgcttaatgtagtgtggctgtactgaaattgtattggttgttttagtgtacttgtgttgaaggtgggaggcaagttcaaaggaaaacaggaattcaggtcctaaaaaagtgtgtgcaatgaaacagtgttcaatatatgacattaatgagtgacaaggggtgcttagtgctcaagt

SEQ ID NO: 115245 - DNA, 459 bp, Homo sapiens
ctataaataggtgtataaactttgacagataatttaaccaatctgggcttaacttcttcattcaaaactagaaaatgtaatagaaatcatgatgaggattaagaattaataaatttaagctgcttgtcttattttgcatcaataaatgttattattgacatatctcccatatataattggagatcaataagtatttgatgtcgktattgttggatattgtgatggtctaatgtgggttgcttaaggcagtgtttttgaaggctatgtgaagcagatcaagacatgcttaatgtagtgtggctgtactgaaattgtattggttgttttagtgtacttgtgttgaaggtgggaggcaagttcaaaggaaaacaggaattcaggtcctaaaaaagtgtgtgcaatgaaacagtgttcaatatatgacattaatgagtgacaaggggtgcttagtgctcaagt

SEQ ID NO: 115246 - DNA, 296 bp, Homo sapiens
cttgaattttacttaagtgcttgtagggggtgctatcaaaaaggcaataaataagtctgactgcatctactttgtttacctttagatgtgtgattttttttttttttttttttttttctgacagtaagctggagtggacagaaaaggtttaattgcatgaccctttttaaccaaaggtatctgtgagaaacagtagagcagctctttgaaattaaractgtgtgctttggaggcaaactgcctgggttccatttatggctttgttcttcggccaaattactcaagtactctactat

SEQ ID NO: 115247 - DNA, 502 bp, Homo sapiens
ccttttgtggatactatcagcctttctcctcagctaccagtcatgtcccaatgtgctcatgaacaacatggccatggtggcgggcatgagattatgcatgggttcagcaatatggattcccattcactaagccttgtatgactgtggccaccattaagtgcccagtctgccaacaacagaaacccacactgaacccttttacatggcaccattcttcatggtgatcagccagctacctggtgacaggttgattacattaggccccattcatcagtgaatggggaagatttttgttctaagtatttcttatttaatgttgttacacatatttttaaattttattttacaatttattgtttttaatatagagaaaaacatttattgttcatagactatagttggtgactgcttttcaatccagttgmcaatcggttcattttaattggaatgtttcaatcaattgtgtttaatttagttatcaatatatttggatttaaatcca

SEQ ID NO: 115248 - DNA, 557 bp, Homo sapiens
gtctgtactatttcttgcaaccatatgttaatctacatttatctcaaaacaaaaagtttaacctgaaaaaacagacctaaggtttaacttgccttttcaggaccattctcagtctacttttctaaactactggaccttaaattattgaaaacttagtaattgctgaacatataataacctttccttgtatgtaactgaaaatggtttaagagccaacaattcgagtatgacaatgaagcagaacagttctaatgctcaacsacttctgttcttgtgtatcacttacagccttaattttctgtgtgaaaatggttacattatttccttagctttgtttgttggagacgaagaaggaatgcttgttaagtacgtcaaaacataatcttatcttttgaatttttgttaatatattatagaagacagattattcatttgcctagaaagcttgtataacacatttggaaatttctgctctgtaacatctttagagctgacagtctgttttttacttcatgctgaagtatcatctggtggttttgtgaactggtcagaaattc

SEQ ID NO: 115249 - DNA, 618 bp, Homo sapiens
gtactatttcttgcaaccatatgttaatctacatttatctcaaaacaaaaagtttaacctgaaaaaacagacctaaggtttaacttgccttttcaggaccattctcagtctacttttctaaactactggaccttaaattattgaaaacttagtaattgctgaacatataataacctttccttgtatgtaactgaaaatggtttaagagccaacaattcgagtatgacaatgaagcagaacagttctaatgctcaaccacttctgttcttgtgtatsacttacagccttaattttctgtgtgaaaatggttacattatttccttagctttgtttgttggagacgaagaaggaatgcttgttaagtacgtcaaaacataatcttatcttttgaatttttgttaatatattatagaagacagattattcatttgcctagaaagcttgtataacacatttggaaatttctgctctgtaacatctttagagctgacagtctgttttttacttcatgctgaagtatcatctggtggttttgtgaactggtcagaaattcacaggttttaagtgtcttaagaaaatttatattgaacattgctctttgtctaacaaataaaagat

SEQ ID NO: 115250 - DNA, 618 bp, Homo sapiens
gtactatttcttgcaaccatatgttaatctacatttatctcaaaacaaaaagtttaacctgaaaaaacagacctaaggtttaacttgccttttcaggaccattctcagtctacttttctaaactactggaccttaaattattgaaaacttagtaattgctgaacatataataacctttccttgtatgtaactgaaaatggtttaagagccaacaattcgagtatgacaatgaagcagaacagttctaatgctcaaccacttctgttcttgtgtatcacttacagccttaattttctgtgtgaaaatggttacattatttccttagctttgtttgttggagacgaagaaggaatgcttgttaagtacgtcaaaacataatcttatcttttgaatttttgttaatatattatagaagayagattattcatttgcctagaaagcttgtataacacatttggaaatttctgctctgtaacatctttagagctgacagtctgttttttacttcatgctgaagtatcatctggtggttttgtgaactggtcagaaattcacaggttttaagtgtcttaagaaaatttatattgaacattgctctttgtctaacaaataaaagat

SEQ ID NO: 115251 - DNA, 573 bp, Homo sapiens
acgtcaatttaaggtggctggcataaagttgtgtcaaaacctgattagaaaagtatgagaaaagaaggtttcagccaatctctcataaacacagaaaaaggactttctacaaaaatgttagcaaacagcactgtataaaaatgaaaatatatgagaatctagttgggtttatttcagagatgcaaatttggtttaagagtaaaaaagtttatgttaataaatgtatatatatatatakagagagagagagagagagagagagagaaagagaaagagagagagagacagagacagagacaatgacagtttctctctgtcacccaggctggaatgcagcggcacaatctcagcttactgaaacttctgccacccgggttcaagtgattctcatgtctcggcttccctagtagctgggattacaggcatgcaccaccactcccagctaattttttgtatctttagtagagacggtgtttagccatgttggccagactgatctcgaactcccgacctcaagtgatccacccacctcagcctcccaaagttctgggataacaggtgttagctacatgt

SEQ ID NO: 115252 - DNA, 544 bp, Homo sapiens
taaacctcttttcttaataaattacccagtcttaagtagttctttatagcartgtgagaacggactattacactgttcttactgacatgcgatagacttctttgaataaatgtttctttattttttctatgcccttaggacaatttccaaagactgtttaatggttgtttttaaaaaagaatttatagcagctttgttggagtttgcagagctcctccagctgtctagtcagaagtctgtctcccacagttattttttagtagtagtgattactttattcagtttatttcttcttgcacacattatagtattcatattatgagtaaaaatttaatttctcctagaaatagttttaatccaactctccaaattcattgacatgaagatatttatagtgttttgtgtagttatttgttttttctttatatattaaattttacaattttttctgttaattagtacattttttgatgttttctttatgtatcatggattttactgtccttctacctaaattataattattttttgtatttctcaggga

SEQ ID NO: 115253 - DNA, 589 bp, Homo sapiens
ttacttacaaaagttattacttattatctctctgcatcaaatattttaatgaataatatgtaaactatcctattaaataaagataaattagataaattgaagaggggctcagaaagtaccatgaaatccatcttggaaagagcaccgagcaaagaatgtttctccagatgctatgtgaagaaaaaaagtttttctttttaatgagtttaatgaatttggaaaactcctcatattataacacgttcttarttattcacaatccacttcacagcattaaatactaacaatcccacaatgaagaaatataggtcggtttgtttgactcaaagttttcaaatgtactggagtatggaatcatttcctttctgaatgtctttagtgtccaactgaactgtaccctggtacatgctagccacctacaggctactcagatattcacttctcccctcttttgaggcccgtgatagatttgtacctctttacatcttcaacagttaggcatcaccaaataacatgcatttgtccagatgaatgtagcagttgtgacctgtgtcacttctaggccaaaggtttaagggccactatgtag

SEQ ID NO: 115254 - DNA, 588 bp, Homo sapiens
cctgagccacttcacgcttcctgcacatagaccatgatgtagcagggccctctctgccccatactcatgcagatcgccaggcagttggagcatcttttcaccaagatcagcagcatgagctgcaacatacttcctacacagagattgtggtgcagggggccccattctgctccaagatcaagcagatcaccaggtatttggagcacccactttcccagatttggagtttaggccacccccttgcctggtgcagagacttgaggacaagaagatttcccagatccatgcctaggcagacctctgggcacttggtggccatgygctggataccctcactgggctagtgcttgtgccaataattggcaaacctagagtcaggcctgcccagtctagtgccactcatcttggccttcccaatggggctgagcagggaatccagacctctgtgcaattcatggatcagccaattgcctgaagcaacagagagttcctcccagtaaacaagattttatgtatatactcagctgtgttagccacagatgactcttacccataaccatcatctactgatctgtacataaaactgca

SEQ ID NO: 115255 - DNA, 628 bp, Homo sapiens
taaacacaacatttttccactatttgcagtcaaaagtatcgttaacactctctttactctgctcaaagttacagagttcttttgtataaacattagaacacttatcacagcctgcctataatggagaataattccatgttgtatactatacaacactcttactaaagtccattagacagaaatatgtagcatttragacaccttccaattataaaactctatgcaaacaaaaattaacaacgcagatctgagactattatattatcctgtgaaggagggtctgtctgtctgcacagttggtcctaggctggcttctgaggacttgaatttcaagagggttccctaactggtaatcatggtttactgtatctagactatggaaataatgtggcttatcctgctattctttttgtgagtctggaaatttcacacatgctaggcagagtacacatatgtgaccagccaagataaaaactgtgtttcttgggaagtcacataggttgttgtattttcattaagggggaaagaaggtagtctgtgtgatcctcatggaaggcacagcacataaggaagccggtacatggatttttccagactctgtcagtgtcttttgccattgagatctttc

SEQ ID NO: 115256 - DNA, 189 bp, Homo sapiens
tctaccactttccttaagtttatgtaagtcattatgtgttaggtgagtctcctgaaggcagcagatagttagttggtgagttcttatccattctgtggttctgtatcttgtmagtggagcatttaagccatttacaaccaacattagtattaaaaagtgaggtaccattgctttcatcatgctctttgt

SEQ ID NO: 115257 - DNA, 606 bp, Homo sapiens
gtatttattctagttgtcctggcacaaggttatcaatgttgctgcgtgaccagccattggcttttcacatttacagctcctctgaattttttcttgcctcatttctggtgctgggaaattctgatattttctcctcatctccattgtacattttagggattcttgaaacttgtgatgcacaaacatccacaccttccacataagtaaaatattttacttagatattttctagcagacactgagttctcatgagaaatcctcagtctctttatttggaacacccccaccccagtattccatatggagtagttatgtgtagaatgtgattacttcattaatatrtcgaagtatgggtacattttgaacacatttgtgaacttgtaatccctttcttgatgaatagtacctgcggatgagcagaattgatattttctctggagcagtaagttagcactggtagaatctgttctgtaatcccaggtccctgggctccagtgtcaatgcttcctccttagatcctccctgaccctgtaaatttacctcagtctctatttcttaatccaatagctatttcaattgatcttcaattactttgcatgtggccag

SEQ ID NO: 115258 - DNA, 582 bp, Homo sapiens
cagagcccttctgaatgggattaatgaccttataaaagaaatgaagatgaacaaatgaccccttccaccacatgaggacatagcaagaaggtaccatcttaaagcagagagcaagccctcaccaagacactgaatctgcagatgccttgatcttagacttcccagcctctgaaactgcaaaaaaaaaataaataaataaacttctgttgtttataaattacccaatctaaggtattttgttttagcggctcaaaggaactaagacaaaggtcatggagaccatagggtgagtctcaagacttcccccagctctacttggctggtctcctgctggtatttkccgtctgtagagaggaaaaagaactcccattttatcttgcttacctgcacttatgaaaagtcaaactgagtcatgttgagagccagggaacataggagtcggttcttcagcaggagcactcagctagttgaaggcaatgtggagtgatgggaagagagcagtgatgcagtgatgctggcaccaactcctttactatggcatccattgtaccagctgccatacacctggctacttctacacct

SEQ ID NO: 115259 - DNA, 582 bp, Homo sapiens
cagagcccttctgaatgggattaatgaccttataaaagaaatgaagatgaacaaatgaccccttccaccacatgaggacatagcaagaaggtaccatcttaaagcagagagcaagccctcaccaagacactgaatctgcagatgccttgatcttagacttcccagcctctgaaactgcaaaaaaaaaataaataaataaacttctgttgtttataaattacccaatctaaggtattttgttttagcggctcaaaggaactaagacaaaggtcatggagaccatagggtgagtctcaagacttcccccagctctacttggctggtctcctgctggtatttgccgtctgtagagaggaaaaagaactcccattttatcttgcttacctgcacttatgaaaagtcaaactgagtcatgttgagagccagggaacataggagtcggttcttcagcaggagcactcagctagttgaaggcaatgtggagtgatgggaagagagcagtgatgcagtgatgctgscaccaactcctttactatggcatccattgtaccagctgccatacacctggctacttctacacct

SEQ ID NO: 115260 - DNA, 491 bp, Homo sapiens
attccacacactttcatctagcccctgctgaatgccaagcactgggctggaactctggggactgtggaggtggaataggagaatatgggctttctgtgagcagtgattgcctaaaatatatacatcaaggttgtaggatcatgtgcaccactgcactctagccggggtgacagagtgagaccctgtttcaaaaaaawtaaaaaaaaattgtaggatcatggagaaagtgtcttaagtgtttggtgctgtggacaggcaacacaggcagaaactggtggctagggaatcagagaagttttcaggagggagcatttgacttgggcttgaactgagcatcatagggcaatatagaaacaagtttatggataattaactgaattggtggcagtttataacttgaatcttccttcagatgattgaagttagtagcccagctatgaaagtctaggttacagatgtctcagccacagcttgcatatatatggatgagg

SEQ ID NO: 115261 - DNA, 601 bp, Homo sapiens
cacaaggctgctataaagaattaacgaggctgggcatggtggctcccacctgcaatcctagcacttgaggccgaggtgggtggatcacctgaagtcaggagttcgagaccagcctgaccaacatggtgaaaccccgtctctactaataatacaaaaaattagccgggcatggtggtgggtgcctgtaatcccagctactcgggaggctgaggcaggagaatcgcttgaaaccaaaaccgggtggcagagagaggttgcagtgagccaagattgcaccactgcactccagcctgggtgacaagagtgaaattccatctcaaaaaaaaaaaaaggaattaatgagatcactccrcacaaatcctaatgtggcatctgatacagggtgagttctagtaaatgagcattttttacactcaagatgtaagagtgatggtttcattattagagatgagagaaccaaattaataaacgtttaatcatgtacttaaaatcacacaactgggactcataaccaagcccttttcttcctggtctgatgttcattccttgttgtctgaaatgtcaaatcattttaccagaatagcaggggagagagggacag

SEQ ID NO: 115262 - DNA, 622 bp, Homo sapiens
cattgacttgattttatcaaacttcagacagtcttgtctcctctcctcaggcccctggaccttggctcaccacctaagactgaacaagcactaaaggacmgaccagcccgctaacagctcactccaaaaatgagcgggactcccagagaaactatttttattggagcatcctggttttgccacctgctcaccccactgcctgtccttctctccaaggaggcttctgccagccctgcttgtccttccctagaaaaggaaagccttttcctgtctgatcctgagacacctgtagattgagtttggaatattctccctattgcaatagtattgttgaataagttttatttttccctacctctggttgatttttaattaataccagtaagcttggatgaaagcctgcacaccttaggtgtgtgtgtgtgtgtgtgtatgtatgtactttagcattatcatgaaagtaataacagtaaaatcaaacaaacacagatggataagcaatatgttggactagtatgaaaatggcattgccagcagtgatatgattttttttcaaaatggtacactttttgaagtataatcttattttaacctaaaatcttactatcagaaaatgcagtgt

SEQ ID NO: 115263 - DNA, 533 bp, Homo sapiens
accagcccgctaacagctcactccaaaaatgagcgggactcccagagaaactatttttattggagcatcctggttttgccacctgctcaccccactgcctgtycttctctccaaggaggcttctgccagccctgcttgtccttccctagaaaaggaaagccttttcctgtctgatcctgagacacctgtagattgagtttggaatattctccctattgcaatagtattgttgaataagttttatttttccctacctctggttgatttttaattaataccagtaagcttggatgaaagcctgcacaccttaggtgtgtgtgtgtgtgtgtgtatgtatgtactttagcattatcatgaaagtaataacagtaaaatcaaacaaacacagatggataagcaatatgttggactagtatgaaaatggcattgccagcagtgatatgattttttttcaaaatggtacactttttgaagtataatcttattttaacctaaaatcttactatcagaaaatgcagtgtacattaaaatgt

SEQ ID NO: 115264 - DNA, 622 bp, Homo sapiens
cattgacttgattttatcaaacttcagacagtcttgtctcctctcctcaggcccctggaccttggctcaccacctaagactgaacaagcactaaaggaccgaccagcccgctaacagctcactccaaaaatgagcgggactcccagagaaactatttttattggagcatcctggttttgccacctgctcaccccactgcctgtccttctctccaaggaggcttctgccagccctgcttgtccttccctagaaaaggaaagccttttcctgtytgatcctgagacacctgtagattgagtttggaatattctccctattgcaatagtattgttgaataagttttatttttccctacctctggttgatttttaattaataccagtaagcttggatgaaagcctgcacaccttaggtgtgtgtgtgtgtgtgtgtatgtatgtactttagcattatcatgaaagtaataacagtaaaatcaaacaaacacagatggataagcaatatgttggactagtatgaaaatggcattgccagcagtgatatgattttttttcaaaatggtacactttttgaagtataatcttattttaacctaaaatcttactatcagaaaatgcagtgt

SEQ ID NO: 115265 - DNA, 615 bp, Homo sapiens
taagtgctctgagaagcaattgaagatttgaaatagaatagtgacttgcttgatcacatttgtacttttgaaaagttcctctggctgctgtggggaaaggcttgagtagatgcagggtgggagaagcataaccagcagtagactcttgtagcaggttaggtgagagatggtggtggccacgagtgggctgctagtggtggaagtgacaagaagcagaaggatcggagacaaaacttgaagataaaaagtcttgaatttgctgatgatttgcattgacgaggtgttgggggagaggactgaaggagcagaggagagtgacaagggactggatgccatttataaggatggggaagactgggatgaaaccggttaagggagaaattttaamcatggcaaaattaagaggggttttatgtgagaaaatggaaatgctaagaaggaagttgaaaatcctgctaatttggagatctttgattaaaactagaaataagaatgtgggaagcatcaacttccaagatgccctcattgtagataacaccatttaggatctaggctcaagccctgggaaactccagggctttggaagtcaaatagaggaagaacacgtacaggaga

SEQ ID NO: 115266 - DNA, 615 bp, Homo sapiens
taagtgctctgagaagcaattgaagatttgaaatagaatagtgacttgcttgatcacatttgtacttttgaaaagttcctctggctgctgtggggaaaggcttgagtagatgcagggtgggagaagcataaccagcagtagactcttgtagcaggttaggtgagagatggtggtggccacgagtgggctgctagtggtggaagtgacaagaagcagaaggatcggagacaaaacttgaagataaaaagtcttgaatttgctgatgatttgcattgacgaggtgttgggggagaggactgaaggagcagaggagagtgacaagggactggatgccatttataaggatggggaagactgggatgaaaccggttaagggagaaattttaaacatggcaaaattaagaggggttttatgtgagaaaatggaaatgctaagaaggaagttgaaaatcctgctaatttggagatctttgattaaaactagaaataagaatgtgggaagcatcaacttscaagatgccctcattgtagataacaccatttaggatctaggctcaagccctgggaaactccagggctttggaagtcaaatagaggaagaacacgtacaggaga

SEQ ID NO: 115267 - DNA, 476 bp, Homo sapiens
tttctccttttaagtagagtgatagttgttagaagaaaaataacgccccaatactttcttctagtgttaattcttaaagtgtgattkacttttatttactttttggtgcagtaattgcagttcatgagtcaatgttgatgtcatataaaccttaatttttaatgtttcattgtagtgatgtctctgtagcagcaaacatttaagttatttgttatacttaaatgtttaagtcactgttagtgattagcttattttgccttccttgaagcaatttgtcctaaatttccatatgtttgcatttgtttttgctgttctaaaattccttagttgctggctttgaccttttatgttgctgagttttacacatctattttctcaactgccatatcctaggaggcttggagtacccataatacagtgagcccaccttcctggtccccagacatttcaggaggtcgggaaatttttaaacccag

SEQ ID NO: 115268 - DNA, 586 bp, Homo sapiens
taataaaatgttttatctcagtggcatttggatttaaaaattattttgggctgtcacagaatgttgacttttcctaatctgttacatagggccatgggtctggatttccaggaaagcggagacctcgaggtgcaggactgtcggggcgaggtggccgaggcaggtcaaagctgaaaagtggaatcggagctgttgtattgcctggggtgaggcttgcttcatgtatattttctctaatctaaatgtcagttaatgatgaaaatctcatagcaagttattttgaacttaaaagtyatataaataggtcaaaatgtttattttactgtcctactttgcttttttttttttttttgagcctctggttacgttttcttgtatatttactttcttatcctttctcttttcttaccttcctctttgactccttatctttctatgccaaccctctctaaaaagtcagtatgtaatataggtgctcttttatttaaaaaattttaagattgatatttgcttactatcatgttatgaggctttatttatatgtgtattacaaatatatttgttaactactagcaaatattttatg

SEQ ID NO: 115269 - DNA, 586 bp, Homo sapiens
taataaaatgttttatctcagtggcatttggatttaaaaattattttgggctgtcacagaatgttgacttttcctaatctgttacatagggccatgggtctggatttccaggaaagcggagacctcgaggtgcaggactgtcggggcgaggtggccgaggcaggtcaaagctgaaaagtggaatcggagctgttgtattgcctggggtgaggcttgcttcatgtatattttctctaatctaaatgtcagttaatgatgaaaatctcatagcaagttattttgaacttaaaagttatataaataggtcaaaatgtttattttactgtcctactttgcttttttttttttttttgagcctctggttacgttttcttgtatatttactttctyatcctttctcttttcttaccttcctctttgactccttatctttctatgccaaccctctctaaaaagtcagtatgtaatataggtgctcttttatttaaaaaattttaagattgatatttgcttactatcatgttatgaggctttatttatatgtgtattacaaatatatttgttaactactagcaaatattttatg

SEQ ID NO: 115270 - DNA, 536 bp, Homo sapiens
atgagttgaataataaaatgtcatgactccattttrctgtagtatcttagcattaatatttggaattgttattctagaccttagcaaaaatatatgttttgattatgaattttctgaagctttccagttaagtgtaaaacaagtgaaaaatataacttcgtattttgtgtattttgctttttataggtgtctactgcagatatttcatcaaataaggatgatgaagaaaactctgtgctcgatatggttgtgttgttttctagcagtgacaagttcactttgaatcaggtttgaacttgacaatttactgtcttcctcattgaattcctccttgcacatttctgctttatctcatatacacagaagtgatccaatatttagctatagagctatattagttaagaaggtatttttaaagtaaaatttgtaggtttttagcttagtctccatttaaaatatgttctgttttcttaacttcaggatatatgtgtagtttgtggcagttttggccaaggagcagaaggaagattacttgc

SEQ ID NO: 115271 - DNA, 536 bp, Homo sapiens
atgagttgaataataaaatgtcatgactccattttgctgtagtatcttagcattaatatttggaattgttattctagaccttagcaaaaatatatgttttgattatgaattttctgaagctttccagttaagtgtaaaacaagtgaaaaatataacttcgtattttgtgtattttgctttttataggtgtctactgcagatatttcatcaaataaggatgatgaagaaaactctrtgctcgatatggttgtgttgttttctagcagtgacaagttcactttgaatcaggtttgaacttgacaatttactgtcttcctcattgaattcctccttgcacatttctgctttatctcatatacacagaagtgatccaatatttagctatagagctatattagttaagaaggtatttttaaagtaaaatttgtaggtttttagcttagtctccatttaaaatatgttctgttttcttaacttcaggatatatgtgtagtttgtggcagttttggccaaggagcagaaggaagattacttgc

SEQ ID NO: 115272 - DNA, 536 bp, Homo sapiens
atgagttgaataataaaatgtcatgactccattttgctgtagtatcttagcattaatatttggaattgttattctagaccttagcaaaaatatatgttttgattatgaattttctgaagctttccagttaagtgtaaaacaagtgaaaaatataacttcgtattttgtgtattttgctttttataggtgtctactgcagatatttcatcaaataaggatgatgaagaaaactctgtgctcgatatggttgtgttgttttctagcagtgacaagttcactttgaatcaggtttgaacttgacaatttactgtcttcctcattgaattcctccttgcacatttctgctttatctcatmtacacagaagtgatccaatatttagctatagagctatattagttaagaaggtatttttaaagtaaaatttgtaggtttttagcttagtctccatttaaaatatgttctgttttcttaacttcaggatatatgtgtagtttgtggcagttttggccaaggagcagaaggaagattacttgc

SEQ ID NO: 115273 - DNA, 623 bp, Homo sapiens
ttgctttttataggtgtctactgcagatatttcatcaaataaggatgatgaagaaaactctgtgctcgatatggttgtgttgttttctagcagtgacaagttcactttgaatcaggtttgaacttgacaatttactgtcttcctcattgaattcctccttgcacatttctgctttatctcatatacacagaagtgatccaatatttagctatagagctatattagttaagaaggtatttttaaagtaaaatttgtaggtttttagcttagtctccatttaaaatatgttctgttttcttaacttcaggatayatgtgtagtttgtggcagttttggccaaggagcagaaggaagattacttgcctgttctcagtgtggtcagtgttaccatccatactgtgtcagtattaaggtaaacatccttaaactgagttaacaaatatgtattgaatttttatttggttttagtagtaacatgagctcccagttctcacaattaagtattatgattattaaacatatgtgaccgtatttaagtactttaaatactgcttttaagggtttcctatctcaagaaatttgctcctctataaatcttatattgtactaatatcctgcttttg

SEQ ID NO: 115274 - DNA, 536 bp, Homo sapiens
atgagttgaataataaaatgtcatgactccattttgctgtagtatcttagcattaatatttggaattgttattctagaccttagcaaaaatatatgttttgattatgaattttctgaagctttccagttaagtgtaaaacaagtgaaaaatataacttcgtattttgtgtattttgctttttataggtgtctactgcagatatttcatcaaataaggatgatgaagaaaactctgtgctcgatatggttgtgttgttttctagcagtgacaagttcactttgaatcaggtttgaacttgacaatttactgtcttcctcattgaattcctccttgcacatttctgctttatctcatatacacagaagtgatccaatatttagctatagagctatattagttaagaaggtatttttaaagtaaaatttgtaggtttttagcttagtctccatttaaaatatgttctgttttcttaacttcaggatatrtgtgtagtttgtggcagttttggccaaggagcagaaggaagattacttgc

SEQ ID NO: 115275 - DNA, 604 bp, Homo sapiens
gtcttcctcattgaattcctccttgcacatttctgctttatctcatatacacagaagtgatccaatatttagctatagagctatattagttaagaaggtatttttaaagtaaaatttgtaggtttttagcttagtctccatttaaaatatgttctgttttcttaacttcaggatatatgtgtagtttgtggcagttttggccaaggagcagaaggaagattacttgcctgttctcagtgtggtcagtgttaccatccatactgtgtcagtattaaggtaaacatccttaaactgagttaacaaatatgtattgaatttttatttggttttagtagtaacatgagctcccagttctcacaattaagtattatgattattaaacatatgtgacmgtatttaagtactttaaatactgcttttaagggtttcctatctcaagaaatttgctcctctataaatcttatattgtactaatatcctgcttttgtcttgaaaaagtaaaacataaaaatatatgcatttaatttaaaagacaatttatactattcacaaagattttaggtttagctgattcattttgtctgttgatttataaagctgagaa

SEQ ID NO: 115276 - DNA, 483 bp, Homo sapiens
tctccctccctgggcaggattctggaaaatgtttctaggcagaatatcataggactccctgagtgtttccttcctctcagagaccactgtctcctttactatgtgttgtccaatatctgaaaacagttgtttcatacactttgtccaattttctactatcttatgggaaaacagsctggtcccatatactccattatcgttgaagcatgtatccgtattagattataaaacatatctgtaacaactttggacatggtaccatggatggaatcctggatgacatcttatttgaaaaaacttttaaaactaaggctaaactggttcaacggaagaaaaaaatgatagtacaaccccagtacctaagttaaaaggaaatttcaaagacggagaaattgttgaagtgttgaagtactagaagtcaagaaacacaaacactaatgtttccattagatttgagaataagaaggtcttgacaagcctggc

SEQ ID NO: 115277 - DNA, 458 bp, Homo sapiens
gtttccttcctctcagagaccactgtctcctttactatgtgttgtccaatatctgaaaacagttgtttcatacactttgtccaattttctactatcttatgggaaaacagcctggtcccatatactccattatcgttgaagcatgtatccgtattagattataaaacatatctgtaacaactttggacatggtaccatggatggaatcctggatgacatcttatttgaaaaaacttttaaaactaaggctaaactggttcaacggaagaaaaaaatgatagtacaaccccagtacctaagttaaaaggaaatttcaaagacrgagaaattgttgaagtgttgaagtactagaagtcaagaaacacaaacactaatgtttccattagatttgagaataagaaggtcttgacaagcctggcttaagcagttatgagtggatgtgggtgtagagaccagac

SEQ ID NO: 115278 - DNA, 575 bp, Homo sapiens
tataatctggatgaatgaaataaaagatcaatgggaacactttcaaaacaaggaaaaagtataagggcagaggtaactgtttttaaatgaaagcaaaaacagttcaagactgttggagagaattgtgatctcttttagagccatattatgtgtgaaataatccagctaagaagaaatagggacagagtgagacaccagcttcctgacaaaattattaaacytaccttcaaaacaactgcagagcaaatctatgaactagtgatttctactatgcaaattctttgcatcattatacatggaaatattctttcaaccagacactcacacacacgccaaacaaaaaagcatgaacaaacattatatatttcagcatacactttttatctaaaatttcattctcagctaacttttataagcccatagtctgatatgcataatcattaagtcctcccatttcattttatgaagacatttgtactattttcttaagtaaactcagtatcatatctataatacaggttattaaattaaaaatgcatttttaaatttaatggtttcaaataataccctataaa

SEQ ID NO: 115279 - DNA, 586 bp, Homo sapiens
tgtatctctgaacttgatctatctctctctctatatatatttgttttttccaataaaatatttttacactttctgtatttttggtacaatgcagctcactgatagagagtaccacttataggatttgcagaaaatatgtattcacaggacagcaggcctcttaaagtctcatggttataktcatattcagtaaggaaaccagttaaagtctaaaataaaataaacaaaacttacttaaaaataggaatatttaacagagtctttatttagaaaatagtgttcattttaacgagcattgctatgcttaagaacacatacaatgatgcagccaaaggtcatgcaataaaatcacaaaatgccccacgtgatgggaaaagcacacatttaaaaataggcatcatcagcatcctgtattttgaaaggtcctaaatcatttcaaatcattctaaagaaggtgaatagagctgagctgctgctttgaagtagtttgtttttcagttcttatctaggaataaaaattagatctaaaaattccatagcaggaggctttatgacacctataaaactcacagcaattaaattgcca

SEQ ID NO: 115280 - DNA, 629 bp, Homo sapiens
attttctatgttgatagtctgttttactgtgcagaatctctttaatttaatgaggtaccacttgccaattatcatttttgttgcagttgctttggaggacttartgataaattctttgtcaaagccagtgtccagaagggtattttctaagttttcttctaggattttttatagttttaggtctttaatttaagtctttaatctatcttgagttaatttctttagatgatatgtagaggtcgatttcattcttctgcatatggctagcaagttatcctagcaccatgtattgaaaagggagtcctttccccattgcttatttttgtcaactttgtctaagtgtgtggctttatttctgggttctctattctgttccataagtctgtgtgcctgttttggtgccagttgcatgctgttttggttaccatagcctcgtagtatggcttgtagtcaggtaatgtgatgcctctaactttgttctgttttgttaggactgctctggctattggggctttttttttttttcattccatatatattagtatagtttttttctaattccgtgaaaaatgaccttggtagtttgatagcaatatcattgaatctgtaaattgctttgggcagcatgg

SEQ ID NO: 115281 - DNA, 526 bp, Homo sapiens
gttctaaaggtctaggtctgattacctggacccacagaggctctgccttttccagtgactgtttagcggggtcagatggggtgttagtgccccatggggtggattttgatcaaggagactgaaggaagaaaggaactggtcgataaattgcttttccttcctctctttccaatacaaccagatggttcagagaagcaatgattccacatatcctttcatgcattcatagtcttgtaacttttcatgcatttgttaactactaagtaaacgtggaattagggaatttgtttgttttgagttttgaccaacaaataaataatggccttatttcagaataatcctgacaaactggggcatgttttgctgaggcataactcttcctgtcccatgctttgagacagattrgtggagtcacttagctagagaatgacagcacactgcctacagcaaagccagtttggataaattatgctatgggtgggatttttaaaatacttataaaagaagatttgtattttttgtttgt

SEQ ID NO: 115282 - DNA, 544 bp, Homo sapiens
cctccttgtgaggacacagcatttgtctcctctggaggatgcagcaacaggcgccgtgttggaagcaaagaaagggccctcatcagacaccacatcagccagttattggactgtgaacttcccggcctcctagaactgtgagaaataattttccattctttataaattacccagtcttaggtattttgttacagccacacaaagacagatgccaataggaaagattatgtttctgctgtcctggaattgaagtaytatggaaatcacaaatgaacatttaacaatcctaataatattgtccattttgttcactgctctatcctcacactttcagtagtgatggatgtataactggtgctcaggaggtgttcattaagcgaatattatgaggccagtgttatgatggtggaaatgcaagggtgccatagggagtcagggatgttttcttgaaggaagccttatctccagtctgccctgaatgttaagttagagcagccaaatgacctaaaacagcaaaaacaaaaacactttttatataatatca

SEQ ID NO: 115283 - DNA, 577 bp, Homo sapiens
gtaaatggtaaaaaggattaaaaattatgtgagggtaaatgtcagtagaaaactgtcctaagggtaagtttcaaccaattagccatgtttattgagtttctagtgtggagagtgattagaagcccagattctggggccaagctgcctgggttgaatttcagtctctccatgtagtaagtggattcctcagctgtgccttccatttcttccttagaagaatgayaacaattgtacttgttttgaggattaaatgaatcaacaggtggattgccttagaatagtgcctggaacattgtaagaactatgtattaatcattatcattttttcctatattttgtatgcacgattatgtgccatatgtaagatgtacattccagcatgtacaactttgtcttgaagatcataatctagttgaggagaaaaaaactaaaatacatgaaataactaaacaaccataagtgttaaatgctgtgatataaattttaagggcaattgaagttgaggtaaggggaaagatctgtgtgggttaatagtaatgtagaaagtaaagaatttatacagtaaaacaatagtgag

SEQ ID NO: 115284 - DNA, 508 bp, Homo sapiens
agcacagccacttattcacccacgtagagagctctcaggccaccaccaatatcaaccttgggggtgacctttagatagaggagagttttttttaaatcacatcaaaacaaaatacatctaaaagtgcctcaaataactacgtgtgggtctgtgacaaaagagaaaaagagcagtgatggtcttctcaagcaaagagaggcttctgagaggaagatcacgcctttcactctacctcattatactgtatwgctggcggactgagaggagaaatgtttctctgtgtagcagctcattagcaaaagaagaactctgacattagttaaaatgttgatagatgtgacaggtggtgtgaagacaagatggtgttgtcaaattggagtgggagccctccagccttgtgacttgcttcataataaccagtttatgcagcatatattaagctgctaaaaagagagtctttgttgagtaaaacatactgggaaagtacagattactactttgtggtctg

SEQ ID NO: 115285 - DNA, 560 bp, Homo sapiens
gaaagtcagtgttgcccatgtttcagagctaaaatttactttgatgtgtcataaacaaataagtcaggatcaaaccagggtgggtttgaatgattacaggataaasagaaaggctaggccttattcatcttttatggctttcctaaaaaattaaggaaacaaaatctatatgttgaaggcttttcacttaattgatagtctgtgcccagtgtgtgagcatgtctcttacatataaagaaactcagacagactggcaatatattcctcaataagcagcagagtaacagagtctggtatcttccttcctgaaacaacaatgatgacaaaaacacaagaaacaaacaataacagaaaccaaaaacaagaaaaagaaaaaagacaagacattggacatcaaacaatgaagaaagtcatacctaagagatgtgaaacaaatgaaacaagccctgtaattgacccaataacaggttggagaggattttctggctacagtgcagagagagggagagaacctcaggtggagcttgatggcctccccacgttgacaatacaaggctggg

SEQ ID NO: 115286 - DNA, 560 bp, Homo sapiens
gaaagtcagtgttgcccatgtttcagagctaaaatttactttgatgtgtcataaacaaataagtcaggatcaaaccagggtgggtttgaatgattacaggataaagagaaaggctaggccttattcatcttttatggctttyctaaaaaattaaggaaacaaaatctatatgttgaaggcttttcacttaattgatagtctgtgcccagtgtgtgagcatgtctcttacatataaagaaactcagacagactggcaatatattcctcaataagcagcagagtaacagagtctggtatcttccttcctgaaacaacaatgatgacaaaaacacaagaaacaaacaataacagaaaccaaaaacaagaaaaagaaaaaagacaagacattggacatcaaacaatgaagaaagtcatacctaagagatgtgaaacaaatgaaacaagccctgtaattgacccaataacaggttggagaggattttctggctacagtgcagagagagggagagaacctcaggtggagcttgatggcctccccacgttgacaatacaaggctggg

SEQ ID NO: 115287 - DNA, 601 bp, Homo sapiens
gcttggtagtggtgaattctctcagcatttgtttgtctgaaaaagactgtctttccttctaaccttcatatgcaggttagttttgctagatacacaattcttgattgataactgttttgtttaargaggctaaagatagggcccctatcccttctagcttgtagggtttctgctgagaaatctactgttaatctgataggttttccttcataggttactcgatgcctctgcctcacagctcttaagattctttccttcatcttgactttagataacctgatgactatgtgcttaggtaatgatctttttgtgatgaatttcccaggtgttctttgagtttcttgtatttggatgtctagatctgtagcaaggccagggaagttttcctcaaataatccctcaaatatgattttcaaacttttaaatttcttttcttcctcaggaacaccaataatttttaggtttggtcatttaacataatcccaaatttcttggaggctttgttcatttttccaaatttgtttttgtctttgtgggtttggactaattcaaaaccttgtcttcaagctctgaagttcttctacttgttcaattctattgc

SEQ ID NO: 115288 - DNA, 601 bp, Homo sapiens
gcttggtagtggtgaattctctcagcatttgtttgtctgaaaaagactgtctttccttctaaccttcatatgcaggttagttttgctagatacacaattcttgattgataactgttttgtttaaagaggctaaagatagggcccctatcccttctagcttgtagggtttctgctgagaaatctactgttaatctgataggttttccttcataggttactcgatgcctctgcctcacagctcttaagattctttccttcatcttgactttagataacctgatgactatgtgcttaggtaatgatctttttgtgatgaatttcccaggtgttctttgagtttcttgtatttggatgtctagatctstagcaaggccagggaagttttcctcaaataatccctcaaatatgattttcaaacttttaaatttcttttcttcctcaggaacaccaataatttttaggtttggtcatttaacataatcccaaatttcttggaggctttgttcatttttccaaatttgtttttgtctttgtgggtttggactaattcaaaaccttgtcttcaagctctgaagttcttctacttgttcaattctattgc

SEQ ID NO: 115289 - DNA, 565 bp, Homo sapiens
acaatgagccagtcctaataggtctggcttttaattgatataaactaacaagagtagttatttatttgctcctttgaaatatcaaaatgcaaaggaaaaaagacattttctttatgatctttgaaacactaacaacagcaacaatagcactaacatcttgggttcagttcattagtggctcatttcatttggaagtgtattaatttttcataacaatgaagcatgcctctttttataccatgtaaagatttaaaagccatttgtgaggggaattcttaaaaatgtattatctatctctttgaagcagtaaatcaaatagatttgctaaacacaactagatctcttcctggtcacccagggtcatcataagtagcaagtttgtcctggaccgtgacccaacactgtctccagakctgctgttctaagtaagactgtgtgctctggactgaatggcctaagactgtgtgatgcttctgttattgtgcacctgatttttaatttttttatctgtgttaagtatcagatggtttgtcagcagttttgtttctcttagaaaatgtgttga

SEQ ID NO: 115290 - DNA, 529 bp, Homo sapiens
atcatgttcataagatggcacatggttaacatggatggaacccaggtcactgcaggaggaagatatatgtggcaagtaagactcaggttattgggagtcttgaatcccctgctgaagatttggattgtgtcttctagttggtgggcagtcactgaatggtgggaagcacaggggtcaaaattatgggagtgtttagaaagcatgctcaagcaacattacagatgatgataaggtgaaggtttataggtaagtcttgcagtcatagatgcaagacaggtcctaatttgtgcttaggacagtatgactagatatgttaagaaggttggaaggacgtaacttggtgaccacttggtgagagagaagwctcacacaggcagtatgcaagtgggatccaaagcaaagggctgtctatcatcagggtatctctgatttatttctactcttagtttttataagcaagaactctggattgtgaaccatgagcattcacactttttttggtaaaaaaaacttgtcaagttttcaagac

SEQ ID NO: 115291 - DNA, 596 bp, Homo sapiens
ctttatttttcaatgaggttaaagatcttatatttctgttgtattccatcttctacaaatctatggttttatagatttgatttttataatttttcttatcttgtagaaatggtttaatgcaatgcctctaatgatgcctaacgtttgtctttgatataaattgcaaaaagcttcccacatttttttattttgctttcacattttaatggcctatggttttattattttatgcagaaacatttaaatatttttatataatctaagtagttttctatatagtctctaggcttaatgtcacrctaagattgtccatatctatcttgagatcataaagtaatcctctagtattttattccagtatttttaatgcttttttttttttttgaaatctcacatctcaatggacttatttgtggtgtggtaaataatacaaatatctgaataatttttactcaaatattatgttgtgtctaaatgtaatctacactaaccccatctgttgctttttcacttcattatattttatttccaaactttaaaattactctactttaacagattattttaaaaagtgttgtagaagtactagttcattg

SEQ ID NO: 115292 - DNA, 594 bp, Homo sapiens
cctttgggggattataaaagaaaagttgaccaaaaataatctctacttctctagctgcattaagggacccaatttaagtggattgaggtgtcaaaattcacataacaattcacatcagaaaaggccttaaatgtcaatttatctttgcagtgagagtaccttggagcaaaaattgagtgaagacatcccagtgcaataacctcccttagccaagagctcctctgaagcactgttaatgtctccttcatttcacagacactaaagagcaaaattaattttgcagtcagtgggcatgctgtctcccctctctaaaggtactcagcctgtactagtttgctagggctgccataacaaagtaccaccgactgggtagcttaaacagaaatgtagtttttctcaattctggagactagaagtccaagattaaaatgttgcctgggttgaatccttacgaggactctctccttgmcttgtaggtagttgtcttctagctgtgtcttcatagaatcatccttcagtctgtgtgtgcacatgtcctaatctcctcttaaggacactctcaaaatgaagtaaaacaacctcattttactttag

SEQ ID NO: 115293 - DNA, 594 bp, Homo sapiens
cctttgggggattataaaagaaaagttgaccaaaaataatctctacttctctagctgcattaagggacccaatttaagtggattgaggtgtcaaaattcacataacaattcacatcagaaaaggccttaaatgtcaatttatctttgcagtgagagtaccttggagcaaaaattgagtgaagacatcccagtgcaataacctcccttagccaagagctcctctgaagcactgttaatgtctccttcatttcacagacactaaagagcaaaattaattttgcagtcagtgggcatgctgtctcccctctctaaaggtactcagcctgtactagtttgctagggctgccataacaaagtaccaccgactgggtagcttaaacagaaatgtagtttttctcaattctggagactagaagtccaagattaaaatgttgcctgggttgaatccttacgaggactctctccttgccttgtaggtagttgtcttctagctgtgtcttcatagaatcatccttcagtctgtgtgygcacatgtcctaatctcctcttaaggacactctcaaaatgaagtaaaacaacctcattttactttag

SEQ ID NO: 115294 - DNA, 557 bp, Homo sapiens
tctaacagtcatattctatgtgggagggtggacttgtgtcctgcctatggtgtctgccttaccactagtctgtgtcagaacctgttgggcaacaggctccagcccatygcagggacttctctttttctcacataatcttatcataaaccattagagggctgataacttgtaaatagagttttgctcactggtgtctaattttttcatgcacatatttcctgtttatcttctatcctagaaaacttgggaataaggtaatgagaagcgaaatagtatatgtttccaaaaatatatgcatttatattgagttgcaacaaaatgtttgtgattacaataaaataatgatcatcacacagaggtacatcttgtaaataattattaattattataacaatgctaacatgtctttaaaaaactgattttttattgtggaaagtaatgagatctattacttaatgtttacacatatattaaaaatacattgtactatctaaactgattgtactttgacagctttaaaaatatatgacaaaacatggtcctattaattaattttt

SEQ ID NO: 115295 - DNA, 466 bp, Homo sapiens
cactggtgaacttgactggagttattttgataaagtggtgtttaaatgagtacacaagagaataaagagaagaaagtatgagacaatgaatgtaggccccaaaatttaaaatattttcttttaaagcggagcagatacatggggcagtagttgaagggagaaatgggttaaagagaagatatttttaagtgtagagttaatggyaaatgcgtttgtaggctgattacaataactcagcagggaagaaaaactgactcagaagagaaagaggatgatttctggagcaaggttcttgtaggggtaactgggaatagaaccaagcacaagttacacacacacacatacacacacacacacacgtgcatacatttgtatttccaataaaaatgttttttgacagtgaaactaatgaataaaacctgaaaaaaaaccctcttcgaatatttcatacattgaattgtagtca

SEQ ID NO: 115296 - DNA, 466 bp, Homo sapiens
cactggtgaacttgactggagttattttgataaagtggtgtttaaatgagtacacaagagaataaagagaagaaagtatgagacaatgaatgtaggccccaaaatttaaaatattttcttttaaagcggagcagatacatggggcagtagttgaagggagaaatgggttaaagagaagatatttttaagtgtagagttaatggcaaatgygtttgtaggctgattacaataactcagcagggaagaaaaactgactcagaagagaaagaggatgatttctggagcaaggttcttgtaggggtaactgggaatagaaccaagcacaagttacacacacacacatacacacacacacacacgtgcatacatttgtatttccaataaaaatgttttttgacagtgaaactaatgaataaaacctgaaaaaaaaccctcttcgaatatttcatacattgaattgtagtca

SEQ ID NO: 115297 - DNA, 577 bp, Homo sapiens
tatacaccttgtttgttttaagatcaatgtcatgatcatatttatctcttaaattcaaaaacataattattttttctaccaatgcttgaatgaatatgtatttacagaacagggttaatctacactttttaaaaataaaaacagcatctattacaagcaagtgtttatagcaagtcttctcagataaatattacttgccacacttcattaacctacccattagaactgaataattgragaactagggacagtgactccatctttatcatccttgagagcactgggtttcattaagacatgaactaatggttgaataagaagaaaatccttgaggcagtttttggttgctgctgatataccttgacctctggtagtgtgttatattttctcttactcatattttcacaggtcgagtgtgtcatgcatatttatctatagcatcaatcttattgatttagaaacaagtaatccattgaacaacataactagtcatccttggaatagttcaaaaagaattatgtgaaatagaaagcacaccttcattctttaaaaatactgtcttctgcaagataagcaa

SEQ ID NO: 115298 - DNA, 477 bp, Homo sapiens
tttaaaagacaatatgattaggtttaaaattttggggtcacaccctttaaacgaaaacatgaacatcacagtattgagctgtagaaacctaaagataaattgtttcccctttcctagtaacttgtttattttacccagggggtttgcaatctcctttattttaaattcactaatatcacaaagataagtcctgtgttgacctaaattactttctcagtatatggtgtgtttttcaatcttcagatgcctatctatttcatcacagwcttaattacttatttatctgtttcctgttccatttctttctcttctcaactcaataatattatttatccacacttggatctcttttgtttcttatatttatcatctctttataactgattttgtctcttgtcctgtccaattcacaaacttttattttgtgacttagtcaagttgtattccattcttcctgaacttttcagatgcattaat

SEQ ID NO: 115299 - DNA, 597 bp, Homo sapiens
tctgtcttgttgcagttaaaatttctgtgatgctaaatctgttcatgcaaaatcatttatgaccccttatttttcacacttgatcttagccaaaagggtgagaagcaatacctcttatgttttaggtagatgaatgtgataggacaacagctttttaaagttattgaccaatttttttctccaaaatttatcttttatccctctcttccaccctctacttccagtcatgcagctaaagttttgtacattcattacctaaggaaatggctattatayggcagaaaactgggggagaaatcaatcattttggctgtggtttttaaaagcccatcccctcaaagaaagggtgaagactctgggcgtaaccccaattatagaaaaaacttatgagaaattagggatctaatttctgtattcagtagaaaaggattcctggactgggaatgcctccagtaatgtcaggaaacataaaatgactgagattaattttttgccaccttagctgtaaatgaagaattaaaaataaaaatagattcaatgatagaaaaataaagagaagtaatacgtcttgccagattgtatttgtggatgaatatt

SEQ ID NO: 115300 - DNA, 597 bp, Homo sapiens
tctgtcttgttgcagttaaaatttctgtgatgctaaatctgttcatgcaaaatcatttatgaccccttatttttcacacttgatcttagccaaaagggtgagaagcaatacctcttatgttttaggtagatgaatgtgataggacaacagctttttaaagttattgaccaatttttttctccaaaatttatcttttatccctctcttccaccctctacttccagtcatgcagctaaagttttgtacattcattacctaaggaaatggctattatatggcagaaaactgggggagaaatcaatcattttggctgtggtttttaaaagcccatcycctcaaagaaagggtgaagactctgggcgtaaccccaattatagaaaaaacttatgagaaattagggatctaatttctgtattcagtagaaaaggattcctggactgggaatgcctccagtaatgtcaggaaacataaaatgactgagattaattttttgccaccttagctgtaaatgaagaattaaaaataaaaatagattcaatgatagaaaaataaagagaagtaatacgtcttgccagattgtatttgtggatgaatatt

SEQ ID NO: 115301 - DNA, 525 bp, Homo sapiens
  misc_feature (1)...(525): n = A,T,C or G
nnncttggccaagcctgctgcaggtgttgactttttctgctaaaaaacctggtcatgacttcagggtgatgaagggcaacttgagaaacagacaaaaaggcaagaactccttaagtacatctgtgttaaatratttctggatttggtaatgaactcaaggtgtttctgaatcaggtgaaaatgggggaaaatgttgaggaacactttctgtttatgcccttttagtttctcccccacctcctatctccctccagggtacttctgatcacacatgtaagacttatctatgctggagccaagggtgatgatggctttgtgacggagatttcttaaaggaagatacgaattttaatgtctggataggtgctcagatggaaaagggtctgaaaggagagattgctgaaatagaatgtttctagattgaaaaatgccctggaagggaacatgggaatctcaccattccaggcacccccatggggctgctgggctttttttgtggcatgattaccatctccattcgtatct

SEQ ID NO: 115302 - DNA, 565 bp, Homo sapiens
tccctcattggcttattggaagactaagtgagacagttcataaaatgcatcgagcacattattagcacttagtaagatttcaggaagtgtcagyggctattattaatatctaagtctttattttgggattctgacattacaatttactttttaaaaatggccagcattgtttttacttcatttatccaggtacatatgaatgtcttgttttcctgaataagactttagcttctcaagatatgcacagtgcaaagattgagaaagtttgaaatagagagaaaaagaaacaaagtcctaacaacacaagttttcctgtattcatccttgtctttctttacttgcatgtgtttgcatagctataatgatcgtccatatgtaaatttatatcctaagttgtgcgtttatgttaatttttatattggtatttggtctttgtagttgccatttttggtgtctgcttattactcccttgagtgaatgtcctgaaatttctgtgatgattcctttattattggacatttgggggtatttctaattttttgttatcataagcagcatgattgta

SEQ ID NO: 115303 - DNA, 557 bp, Homo sapiens
gttctaaaaatcctgtgctccacctattcattcctcccttccatactaaaccatggcaagtactgatccttggactccatagctttgcctcttccaggacgtcatatacttggaattttatggtatgtaatatgttcagattggctttttcactaaataatatacatttatgcttcctccatgtcttttcatggcttgataacacatttctttttagtgccgtgttatattatactgtctgatgtaccagttcattcattcatacactgaacaagttttggcaatcatgaataagactgctataaacaaccatgtgcaggtttttatgtgaacataacttttcaattcctttgggtaaatatcarggaacaaaattgttggattgtatgctgcgagtatgttttaattttgtaagaaactaacaaactgtcttaaaaagtggatgtatcattttgcattcccatcagcaatgaatgagagctcctgttgcttcacaatttcatcagcatttggtagtgtcagtgttctgattttgaccatctaataggtctgtaagt

SEQ ID NO: 115304 - DNA, 616 bp, Homo sapiens
tttccattaaaaagaaaaaagaatttgttgccagcagatctgtattataagagatgctatagaatgtttttcagcctgaaggaaattaataccaaatggaaacctggactgacaagagggaatgaagggtacaggaaataataaatatgcaggttaatataaaagacaatatatttcttmttctcttactttaaaatacgtatgacagttcaaagaaataattgaactgcattgtgtattgtagactgtattgtgaaatttataactgatgtagatatgttaatatatgtcaatgatgacacaaaagatgggtatgggtaaataaaactaccctgtttcaaggttcttgcatttttttctcaagtgctacaatagtaactctaagtagaatattacaagttaaagtgtatactttaatttccaaaataaccacaaaataatgcaaaagggtgctgttgaaaatccaacactaattaaacactagaaaaaaaataattaaccaaaaaaaaagggctagaaataaggaacagaaggtcaatacacaaatgggacagataaaaaacaagtaaggaaatggtggattaaaatccaactataccaatgatttattacatag

SEQ ID NO: 115305 - DNA, 593 bp, Homo sapiens
tctactgccccttttacttcctctactcatagtcaggtttctgtctcttgaactgatctagctgttatgtatacgtctccagcaggacaaactctaggagaaacatgttaatgtgccacatgatacaattgagggtaaacatggaaaccatttaaccttggtacagttttcttcattaaacacaagagcattactggatgtttttcttattgcttgatgtcatttgaagttttgcactgctgccctcagctcatttgctttatttctagatttttttttttaactgagtgtttcctagctagattcatgactatggataaggttcaaactattagagaggcaaagttcctsagggaaagagccggcttctcattgttcttcattatttacatattctcctgtatgtttctgaagcacttaacccaatttacattttaatgagctaccgtactgtacttaccaaatgcttagtgggtcaatactagaggttccattttaggaatctggaacaagtaataatcagaatgaaaataacaagagcatctgcagaactggcataaccagaaaaaaaccttcaaatttcaattaggatt

SEQ ID NO: 115306 - DNA, 578 bp, Homo sapiens
gacaagctctgccataccaagagggggttctccctagtaaggaggttgatattcatcaatacctacctattttctgtcgggacagagtctctgactcatagcacatttgccctcatgactcatccatccatccatccatccgtccatccattcactcaytcttgtgttgctgctgtggttttctaggacatagaaaacacaaattcagccttcctggggttaatgatctaatgtagtgagtctcaaactgtacatgcaccacctatggagggacaactggatagccatatgcgaaaaaatgaagttgaacccttacttcacattatatacaaaaattaactaaaaatggatgtaagacctacatgtaggagccaaaactataaaactctccaaagaaaacatggataagtctctgagaccttgaatatggcaatgagccctcagacatgaccccaaaagcacaaacaacaaaagaaaacaatacataaattggactttatcaaaattttaaacttttgtgcttccgaggatactatcaagaaagaggaaggagaatgcacagaatgagaggaaatatt

SEQ ID NO: 115307 - DNA, 589 bp, Homo sapiens
caaagaagaaaaaaaaacagttgttttataggaatgagcttgaagaagccaaaatttgtaataatttaaatatcaagctgaaataataacaaaccaagtaaactgaagtccacaagccatagtgatcctcaaaaaggggaggggagggataagacaaagctcttttctcctcccttcaggttgccagttcacacaatataaagctcttttttacagaagaatactagttgatgaatgtagaaggactaatggaattagagtcactattttcaaatgtttaatataataatggatccaggcatgcattatcaatggttgttaaaatcagtaactgaaagttggttgcaaaagacgatattttcatggtgccaaagtctcagcttatagatttttgacaaatgtaaaagcaaaactatacctttgtaatgaaggaaactgatgcttactcccttaatccagtgataaaactcagatcactaactgggrtcacatgacatcctgggcctcctgatgaagcatacaactttgtctatgaaatgttcttgccaacaatgtttattctgattctaatcaagcctagaaactacac

SEQ ID NO: 115308 - DNA, 589 bp, Homo sapiens
caaagaagaaaaaaaaacagttgttttataggaatgagcttgaagaagccaaaatttgtaataatttaaatatcaagctgaaataataacaaaccaagtaaactgaagtccacaagccatagtgatcctcaaaaaggggaggggagggataagacaaagctcttttctcctcccttcaggttgccagttcacacaatataaagctcttttttacagaagaatactagttgatgaatgtagaaggactaatggaattagagtcactattttcaaatgtttaatataataatggatccaggcatgcattatcaatggttgttaaaatcagtaactgaaagttggttgcaaaagacgatattttcatggtgccaaagtctcagcttatagatttttgacaaatgtaaaagcaaaactatacctttgtaatgaaggaaactgatgcttactcccttaatccagtgataaaactcagatcactaactggggtcacatgacatcctgggcctcctgatgaagcatacaactttgtctatgaaatgttcttgccaamaatgtttattctgattctaatcaagcctagaaactacac

SEQ ID NO: 115309 - DNA, 600 bp, Homo sapiens
gacgctgtgaatcactgactcagaaagggaatgccaaatatgagtctcctttcaggtggcttgtaattgaaatctcacaaccatctgtcatcatgaaaagaagaagctgcctctgccggacatatccttgtcttctccatcctgccaatcaaccctttacacagtcaaaataacctcagatcgtgatggggcacacagcaaatgctactacctttgcagagtcttcctccaggaacttaatgacctgacagagtaatggctttcatagcaagccagtcattttggctaaaccgtagatagcttggcaaatcatctgggctttgtatgccatagttgacctcattcagataaccttatgcagttactataaaaamaagaccttgatcacagtcaaggctggaacatacatgaatttgcctgagagctgccatgttttagaaggatggagagaacattcaatgaggtgtcaggagatgaggctagggattcagctcagctaccaataaaccctgcaactttccttgaataaatccgtgcacatgtgtttgccttaggtttcctcagactgaaaataatgccaaatgcttgctcagttaattc

SEQ ID NO: 115310 - DNA, 622 bp, Homo sapiens
ttcagggagggatttcaaatctacatcttagatgcagtctcaatctaatttcatgcagttcacaaaaatctggcggagtaagttttagctgaaagaacagtttttctccctgatgagcatcttcagttcacacattcagagtgattgtataggttctttacagacttgctaaagcttacaaasaactatgaacagtctttgctgtaccaaaagtatttcctttcatttcattcctcaggtgttcactgagcatttactattaatatatgcttccatcatatcacatggctgcagaacatttttcagtggtgttctattgcctgtagaataaaattcaaacttctcagcctaatgttccaggccctgctacacttagtctgttacccctcctccccaatttccaccaaaacacacaagcagacagacagacacacaaacacacacacactccatatatgaatgctattccttcctttggactttgcttattctgtggcaactgcccagaatcctcctcccattcttatgtatatgaactcccaccatccttcaaagacacattttacatggactgtgtagtgtgctggtaaatatttcccaactaggtctccagaaaacaagc

SEQ ID NO: 115311 - DNA, 633 bp, Homo sapiens
tatcaggggcttcaggtttccagttcaatgtgtaagaacctagaagtttctaccccatcctggcaacaaggaaaaagccaaacgaactgaaaaatcgacaactctccttatctccattggggaaaaccactgtccccaaaattggaaggacagacagtcatattccaagaatcacggattgttggaacagaaatcactgagtaaaaacctctgcagaaaccggtgctgaggtggggaagcctgaagtatcattgatgacttgctggaggctcagtgtggacaagtytgagagataagaactctaggggagcatagttatcagtgtctccacacttctgtaatttttacttccaggatcttgaccagattctcatagtggattttggagaaaaatccccaatgctgctggtaggaggggaaaacatttaaaaatagctaaggcaatagagtgtgacgtctggcttcggagcaggaaccttcattgctcaagagacttaaaagagaattaaatatgggtgatgttgagaaaggcaagaagatctttgttcagaagtgtgtccagtgccacatcatggaaaagggaggcaagcacaagactgggcctaatctccatggtctcttcgggtagaagac

SEQ ID NO: 115312 - DNA, 633 bp, Homo sapiens
tatcaggggcttcaggtttccagttcaatgtgtaagaacctagaagtttctaccccatcctggcaacaaggaaaaagccaaacgaactgaaaaatcgacaactctccttatctccattggggaaaaccactgtccccaaaattggaaggacagacagtcatattccaagaatcacggattgttggaacagaaatcactgagtaaaaacctctgcagaaaccggtgctgaggtggggaagcctgaagtatcattgatgacttgctggaggctcagtgtggacaagtctgagagataagaactctaggggagcatagttatcagtgtctccacacttctgtaatttttacttccaggatcttgaccagattctcatagtggattttggagaaaaatccccaatgctgctggtaggaggggaamacatttaaaaatagctaaggcaatagagtgtgacgtctggcttcggagcaggaaccttcattgctcaagagacttaaaagagaattaaatatgggtgatgttgagaaaggcaagaagatctttgttcagaagtgtgtccagtgccacatcatggaaaagggaggcaagcacaagactgggcctaatctccatggtctcttcgggtagaagac

SEQ ID NO: 115313 - DNA, 477 bp, Homo sapiens
gggaagagatagtgtgtcacccctttgtagagtaataaaccaagtcttgtatgttaaatgctttggtggttatattgttagtaagagatgaagccagaaaccctaacttctattttatggacatgcttcagtgtaaagacagagaagtcatgtgttggggctttgaakcccggagttctggtataatgtctaatgaagacttggtgaattcgcagagtgttgtctttttacctgtggcttctgcaccttggtccagtcaggaatggccaggttagcaatgtgaagtgatgtgtgccagcctgtgtaactccaggttttcaccaggacagtgacctgctggaccgacggaaacagtgcttcaccgtgcagtctgagtctggggaggacctgtacttctcagtggagctggaaagtgacctcgcccagtgggaaagagccttccagacagcaacctttctagaagtagaacggatacag

SEQ ID NO: 115314 - DNA, 530 bp, Homo sapiens
gcatttttgagtagtaacacttgaaagtagaaattacctcttgttccatgggctgcagaatgggtattgtgttagcacacatgaagacaacattaatctccttgtacatctccatcagagctcttaggtgattaggtgcattttcaatgacaagcaktattttaaaaggaatgtgttttttttgagtagcagatctcaacagtgggcttacaatattcaatgaaccatgttataaacagatttgctgtcatccaggttttattgttccacttctagaatgcatgcagagttaatttagcataactcttaagggccctagggtttttggaatggtaaataagcattggcttcaacttcaagtcaccagctaccttagaccctaaaaagagagtcagcctgtcctttgaagctttgatatcaggcactgatgtctcatctttagctataaaagtcctggatggcatcttcttccaatagaagactgtttcacccacattgaaagtctgttatttagtgtagccaccttcatc

SEQ ID NO: 115315 - DNA, 530 bp, Homo sapiens
gcatttttgagtagtaacacttgaaagtagaaattacctcttgttccatgggctgcagaatgggtattgtgttagcacacatgaagacaacattaatctccttgtacatctccatcagagctcttaggtgattaggtgcattttcaatgacaagcagtattttaaaaggaatgtgttttttttgagtagcagatctcaacagtgggcttacaatattcaatgaaccatgttataaacagatttgctgtcatccaggttttattgttccacttctagaatgcatgcagagttaatttagcataactcttaagggccctagggtttttggaatggtaaataagcattggcttcaacttcaagtcaccagctaccttasaccctaaaaagagagtcagcctgtcctttgaagctttgatatcaggcactgatgtctcatctttagctataaaagtcctggatggcatcttcttccaatagaagactgtttcacccacattgaaagtctgttatttagtgtagccaccttcatc

SEQ ID NO: 115316 - DNA, 612 bp, Homo sapiens
ttcatttattataatatgttaagatcatatattgtacataattataccatagtattattaatattgttttaatcttgctggatctaaatttgtttctcacttttacttctaatgttatttattccttaatttgggaattctcctcctttttcttactttctgaacaagctcatcagagatttgtccatttatttttcttttcaatgaaataagttttagttttattgatactctctattgtatatttgttttcagtttaattaatgacttatttttatcatctttcaaattccttagaatctattctgataaatttttcaagcttcatatgttggactcttggctcattaatctttagcttttcttattttctagtctagacatttatgtaggttgctttctaaatgatgcccctcagtacaatcattgcttcctttaactctttataattgttattactcaatttttwaaaaaagaaagcacagtttctgaatagctaagcctggagaaaagttgtgtcagttctagttatatttgatttcttatgtactttctcagatcatctctgctcagtaagttttcaaatacaatgtagaaataatttaatagtat

SEQ ID NO: 115317 - DNA, 661 bp, Homo sapiens
ttaggtcctatattgtacattaaagttttaaacttaggcatgaatatatatgtttaagtaactctcaaatgtattcacttgagctctttttataaggattatttttcatttgaagtcacaagaaatagaaaaattcagccayctcggcctattataatatcatagggcataacctaattcctagatggttaagtggcaaaattgggtgaattattgtttgtttagaagtggcccagcccatagttgcttgttgggacaaagaaacaggagagaatgccaagcctgtgcatttgctgccttatggggctaaataatggttcagttgttggaggggcagtcaaagctaatatgtgctgtgttttactttttctgatctagaggtgtttcatctagatagcagtgacaggtgaaattagattagattagagtcagaattcctgcccctctggcctacagtacttagggaagccacactgttcaatagtattttccaatgttacttctactaccaaaagcttctgaaattacaatagttgtgaattattctactgttaaggcatattcctattttaaataaggttaattaatatattaggatatattaatcattgcttacatgatatataaaaattaaatagatatatttttgtgagttttaaga

SEQ ID NO: 115318 - DNA, 553 bp, Homo sapiens
atactttcttgtttctttgggtgtctcataatttttgaaaactggacatttaaaataatataatgtgtcaattcagattattacatattcccagggtttgttgttgttgctgctgcttctgctttttttgtttgtttgtttgtttagtagctctcctggactaattctgtaaagtctatgttccctcttgtatactgcaactgaagtctctagttgattagcttagtggtcagcaattgaayagagatatctttcaacactttggaccaatacattttcctttgctaagaaactctatgagtggattatgggatgttttcaatgctctggcagtttacaattttcccttagcctttacttcctgcttgtgcaacatctcaaagtcagccaaaggtgagagatttggacctcctcatgtctttcctaggcatccatacattcctacacatgcatatggcctcagagtccctaacagacatctcattcctaggtcttccttttaagtttttggccaggctcttctttgctccagctggttttactgtctcaggta

SEQ ID NO: 115319 - DNA, 427 bp, Homo sapiens
gaattcccagtattagcaggtaaagtcttgttctctttacttactttctcccaagcagtgtctctatgtctcttcgtactgagctgcctgaagttggagaaggggtgtcacaagccctcctgtgactaccattgctgggactcttcttggtcacagctgaggctagcacagtactgggtcttgcccaaggcctatggtgactagtgtctggctatggctgctgtatattcaatgctcaagggctctttagtcagaggtrctgaatcctgccacgcctaggtctttcatttcagggctgcaggttcccttctggcccagggtgagtctagaaatgtcatctgggagctatgtcctagtattggggtctttatggattagatttgtgctttattgtactacggctgagctgttaccgaagttgcaagac

SEQ ID NO: 115320 - DNA, 393 bp, Homo sapiens
gaaacattccaagatacttctggggtcaaagaacatgaaggctggaaacgacttcagggaatgtctaagagattagagtcagaaagaactaggttggaattctacctcaggtctttcctaacattgaaattgtatatagcttacaattatctcagatttatctaatataaaaagagaaagaaggatatcaactttataggattgttgtgagaactaagtgaattaatrtatgtcaagggatataacaacatcaaagtcaatcaatagatattagctatgattttattattattatccaccccaaaccattatttttccattgataaggaaaccgacataccagaaaatgacttgactaagctcacacacggatctcacaagttacccaatcca

SEQ ID NO: 115321 - DNA, 649 bp, Homo sapiens
tgactcgtctaaggacatacagcaagttactrtcagaatgagagcaagatttgacctcaaacccagggctgttttagtaaatggaactagtggttcttaaggatctgttttccagttaaatggcctattctaggtactagctggccaatggtggacatcaactgtcagaatttccagagccctggtaaaatttccaaagttccatgtcctcctgaattttacctggtcattttgggaaacagtgagatataatatatccatgagtagcatttagacattgtgattttaactttaggactccaaattcatctttttgattagctagagagtccactcaaaatgcaaataatttcaagtccctccgggttggaggaaaagatgaaggaggggagtaaatataggtacttcttatccactaagaaggccaatcaagacaactggttttgtcctggcctctagtccaatcaccctggacaaatcatctccatttgttttgatgatccaaaagtacagatgctcttctactttgtgaggtaaatgtgtgcagctcaacactaggataatgaggcaataatatttattatttaaatactatgaacagttttaaatttattttctgttaaagccgatttttcctcctttttcagaa

SEQ ID NO: 115322 - DNA, 649 bp, Homo sapiens
tgactcgtctaaggacatacagcaagttactatcagaatgagagcaagatttgacctcaaacccagggctgttttagtaaatggaactagtggttcttaaggatctgttttccagttaaatggcctattctaggtactagctggccaatggtggacatcaactgtcagaatttccagagccctggtaaaatttccaaagttccatgtcctcctgaattttacctggtcattttgggaaacagtgagatataatatatccatgagtagcatttagacattgtgattttaactttaggactccaaattcatctttttgattagctagagagtccactcaaaatgcaaataatttcaagtccctccgggttggaggaaaagatgaaggaggggagtaaatataggtacttcttatccactaagaaggccaatcaagacaactggttttgtcctggcctctagtccaatcaccctggacaaatcatctccatttgttttgatgatccaaaagtacagatgctcttctactttgtgaggtaaatgtgtgcagctcaacactaggataatgaggcaataatatytattatttaaatactatgaacagttttaaatttattttctgttaaagccgatttttcctcctttttcagaa

SEQ ID NO: 115323 - DNA, 601 bp, Homo sapiens
gtgggagctaaaaaatgttgatctcatggaggtagagaatagaatgagaaataccagagattgagaaggatatgtgagtatgtgtgtaagcaggagggggtaaataaaggttggttaagggctacaaacatacagttagatagaaggaatacttcttaatatttgatagcagagtagcgagactataattaaaaatgtatcacatatttaaaattagctagaagagagcacttgaaatgtttccaagaaagaaatgataaacactcaagtgatggacaccgtgaataacctgacttgatcattacatagtctatgaatataatcaagtattacatgtatccagaaacatgtayaaaaattatgtatcaacaaaaaagtgggcaaaggacttgagtagacatttccctaaggaagatacacaaattaccaataatcacttgaaaagatgctcagcattattcgtcattaaggaaatgcaaatcaaaaccataatgagataccataccttctatgatgtctataattaaaaaaagagaacaagtgttggcaaggatatgaagaaattagaaccatagtacatttctggtaagaacgtggaatt

SEQ ID NO: 115324 - DNA, 562 bp, Homo sapiens
ctcctcttgtgttgctgcttgttcttgatgtttcaatagagaatactgcattgccctgatgggggayggctcccagtcagctggtttggacatttgagacaatatgcatggcacaaagcagcagctcctcagtaatgagaaggaggaatggctaatgcttccctgtgttcagctgaacttctggataatggtttacctgtaccatttcatcttcccttttatacagcacaattatgatgtgctaatagttttaagaatgcaaatcctgcctttcaagcttgctcaagagcttttagagtttaaatgttttgtattctccatgtggcctactcaacagttgttgggtataaagaatttttaccacgttaaccagctatctagtcccatcttagtccctaaaagtatttttggtggttccaggtagtgtaggtattctgtaagtaagcccaatttgaacctgtctctgctcttcaataacagcgttaactaggtcttttcctagtacttcaacattttggctaaggcttcaaaactgagatcaatggatgataaacacacattc

SEQ ID NO: 115325 - DNA, 562 bp, Homo sapiens
ctcctcttgtgttgctgcttgttcttgatgtttcaatagagaatactgcattgccctgatgggggatggctcccagtcagctggtttggacatttgagacaataygcatggcacaaagcagcagctcctcagtaatgagaaggaggaatggctaatgcttccctgtgttcagctgaacttctggataatggtttacctgtaccatttcatcttcccttttatacagcacaattatgatgtgctaatagttttaagaatgcaaatcctgcctttcaagcttgctcaagagcttttagagtttaaatgttttgtattctccatgtggcctactcaacagttgttgggtataaagaatttttaccacgttaaccagctatctagtcccatcttagtccctaaaagtatttttggtggttccaggtagtgtaggtattctgtaagtaagcccaatttgaacctgtctctgctcttcaataacagcgttaactaggtcttttcctagtacttcaacattttggctaaggcttcaaaactgagatcaatggatgataaacacacattc

SEQ ID NO: 115326 - DNA, 564 bp, Homo sapiens
agcatctgggaagacttccacctatgcaggtgagttggaagacagctcacttctcagctctgaaaaaccaggaaaacacctggaatgacagatggcacctcaatataacaatcaggggcagttttaatttttttggattaaagatcccaggttttaatctackaaacacttatagacaaggagagcagttagagccattttatcagatgactaataagatttggtaaatagagtcatttttaccagataactacatataagatttaagctggcaacaaatttatctgttgttattgggtagttaaccattttaattatgttatctttttaatgaggtaggtagaaaaaatatgccattcagaatagggataggctttagcaaacatggatagagaagacaaatactgcatgtatctgattaacttttccatctgcaaaacaaaatctgttgaatgtgttgcatttgaaatcagaaaccaccacatacatatgaaaaatgttgagtcacaggccctattttcttcacagttacattgaaacaatcacagaaggacaaaatggtac

SEQ ID NO: 115327 - DNA, 576 bp, Homo sapiens
aaaaagatcaggtttcattagtggcctcagggacagcagcctatatgcaaaggaggtttgaggaagctgttgatagtctgcaaaacatgccattaacagatgtgccagattttgatatattgtcttagtctattccagctactatcacaaaatatcatagattgagtggtttctaaacagcaagaaattaatttatctcacagtcctcgaggctgggaagtccaagatcaaggtaccagcagattcagtatctggtgagaaccccatttcctgattcatagatggtgccttctcactggctctttacatggtggaaggggcaaacaagctcccttgcytctttcataaaggcagtaatctgattcatgagagattttccttcatgacctagttatctcataaagattccacctctgaatactatggcatttgggattaagtttcaacatatggattttggaggatgcaaacattcagaccatagcatttcacccctggcctcccatagtcgtgttcttctcacaaagatatgtccatgtcaaacccttacccccaaaaaatcccaacttgtgccag

SEQ ID NO: 115328 - DNA, 593 bp, Homo sapiens
cctaagcacatagtcatcatgaagtcgagatgaagggaagaatcttaacagctgtgaagcaaaagcatcaggtaatctataaagaaaaactcatcagattaacaaaagaaaccctacaagctagaagggattagggtcctatctttagctttcctaaacagaacaattatcaaccaagaattttgtatccagtgaaactaagcttcataaatgaaggaaagatagttgttttttttttttccagacaaacaaattctgagaggattcrtcactaccaaaaaacccgacgtattcaggcaacaattagcatgacgaatggaatagtacctcacttctcagtactaatgttgaatgtaagtggcctaaatgctctacttaaaggaaacagaatgtcagaatggataagaattcaccaatcaaatatctgctgtcttcaacacataaggactcacataagcttcaggtaaaaagatggaaaaaggtattccaggcaaatggacaccaaaagtgagcaggagtagctactcttatatcagacaaaacagactttaaagcaacaacagttaaaaaagacaaacagggacattatataa

SEQ ID NO: 115329 - DNA, 548 bp, Homo sapiens
aggattcgtcactaccaaaaaacccracgtattcaggcaacaattagcatgacgaatggaatagtacctcacttctcagtactaatgttgaatgtaagtggcctaaatgctctacttaaaggaaacagaatgtcagaatggataagaattcaccaatcaaatatctgctgtcttcaacacataaggactcacataagcttcaggtaaaaagatggaaaaaggtattccaggcaaatggacaccaaaagtgagcaggagtagctactcttatatcagacaaaacagactttaaagcaacaacagttaaaaaagacaaacagggacattatataatgataaaaagactagtcccaaaggaaaagatcacaatcataaatatatatgaactgaacactggaggtcccaaatctataaaacaattactaccggctctaagaaatgagatagacagcaacacaataatagtgggagacttcaatactccactgacagcactagacaggtcattaaaacagaaagtcagggattgttggcaagatggccaaata

SEQ ID NO: 115330 - DNA, 561 bp, Homo sapiens
caagggagttcattttgaggtgctttcctctccagctatgcacttgtgaaattaaacaagttgyatgcttccaaaatacaatggtaggacagacactcccatttcaaaagtgagaaacaggaaagaagggaggagtaacagatcttaaacaagtccaggacccaagagggcaagcaacatccaagagggcaagcaacatcaactctaatggctccagaataatcttctttgacttgatgctctgcccttcagtctccactgaggcagaggtcctgcctccacaggtttactgggcagggactgggccctcacggctctgtgtagccttgctcccatggctttggacccccaccacaactttgctggagaccgctcatactgttgctctcatgggttggagtagcaaacctatggctctcccaggatggaactgaccattggtagctctacgaatctgaggtattggaggcaaccacagttccactgggcatcaccctctgcctgagtcatgtgtctgaggctctgggtacctccatccttcaaaatctaggtggaggtaca

SEQ ID NO: 115331 - DNA, 561 bp, Homo sapiens
caagggagttcattttgaggtgctttcctctccagctatgcacttgtgaaattaaacaagttgcatgcttccaaaatacaatggtaggacagacactcccatttcaaaagtgagaaacaggaaagaagggaggagtaacagatcttaaacaagtccaggacccaagagggcaagcaacrtccaagagggcaagcaacatcaactctaatggctccagaataatcttctttgacttgatgctctgcccttcagtctccactgaggcagaggtcctgcctccacaggtttactgggcagggactgggccctcacggctctgtgtagccttgctcccatggctttggacccccaccacaactttgctggagaccgctcatactgttgctctcatgggttggagtagcaaacctatggctctcccaggatggaactgaccattggtagctctacgaatctgaggtattggaggcaaccacagttccactgggcatcaccctctgcctgagtcatgtgtctgaggctctgggtacctccatccttcaaaatctaggtggaggtaca

SEQ ID NO: 115332 - DNA, 561 bp, Homo sapiens
caagggagttcattttgaggtgctttcctctccagctatgcacttgtgaaattaaacaagttgcatgcttccaaaatacaatggtaggacagacactcccatttcaaaagtgagaaacaggaaagaagggaggagtaacagatcttaaacaagtccaggacccaagagggcaagcaacatccaagagggcaagcaacatcaactctaatggctccagaataatcttctttgacttgatgctctgcccttcagtctccactgaggcagaggtcctgcctccacaggtttactgggcagggactgggccctcacggctctgtgtagccttgctcccatggctttggacccccaccacaactttgctggagaccgcycatactgttgctctcatgggttggagtagcaaacctatggctctcccaggatggaactgaccattggtagctctacgaatctgaggtattggaggcaaccacagttccactgggcatcaccctctgcctgagtcatgtgtctgaggctctgggtacctccatccttcaaaatctaggtggaggtaca

SEQ ID NO: 115333 - DNA, 626 bp, Homo sapiens
agctaatatacggaatcaacctaaatctccatcaacagatgaacagacaaggaaaaagctgtatactttgttatgacattcgttattaggtcataacaatgaatgaaatcctgtctctatcttaatcatggcagtgagcttggctttcatttctagccaaaggtaatcaagagatgaatagaaaattactgcccattacaatagattggttagtcacatccttaaggtttcattttcagctggcctcaatctggttatccaaattataccagttgctttctctgtaagtatttataaaatgtcctgcaaataaaataattatgtagctaaattttcatttcttaggatcagcattacaagaatctactgaacagaccatattgttcaaattgatagttttataataaggattccaaagttcagggagttggagtgctttgtycaaagccactcaattagacttaggtagagtcaggtatcctgattcccagtccaggaggctttctcctaccctatgctaccatgtaccatgggtctagaatcaggtagtgttactatttatcactgatccaatttccctttctttacaatcttcttatggtcattttccacctatcaaacccttc

SEQ ID NO: 115334 - DNA, 530 bp, Homo sapiens
tacaggccaggtaaatacgattgagaaaaagacaaagaagaatttagatgcaaaggctatttcctgagcatactgaaaagcacatgttatgaaataaccacatgagaatacagggttctgggtcaggggagccaagagagttggggagacaactgttcactatgaaacaagtcatgcatgttggggagaaggcaaaattctttgcatacatttcttaattcttacaactctttgaagcagatataatttttctcgatttataagattaaaaaaaaaaaggtttgcatagtttaagtaacatgtccttscctaagtttatagatttttaagatgaaagccaggatttgaacccaggtctctctgagtctagagctcttgctccttttaccacagccttagaagaagagaaaaactggacagaccaccaacttctcaatttcaccataaattgtttctaaatagaaatacttcatcacttcttgaaagcccacagtcaaagtaagacttcttcctcttacactgtaagcata

SEQ ID NO: 115335 - DNA, 546 bp, Homo sapiens
gctgtttctgaaatggttgtaattgaaacaatgactggaaatcatacaaacccttgctttccacttttaattccctctcatttttcttccttcatccatctgcttttcccactttttcaaatttggtcgcactagctcagatgtcaccacctctatgaacatctcctctcctgttagtcagggatggaaattcaactcacaagagcttaagattttaaaaagaaggaaaaaggaaaaggaagggaaaagaaaagagttggggtgggggatgggggttattgactcccatagctggaagcccaggaggtagaccaggaggcagatctagcctcgggcttggctgagtgtagggcctgacatgatgtcatctgacttctgtctctctcacatcttttagcctggcttcacctccacagctctagcagcccttaatccacattctcttagattagctgtctcaatatatgtgtgtggtggggaagggaggcggggaggagaggttacttctcttccccagygcctacatataaattcagggcagaattc

SEQ ID NO: 115336 - DNA, 450 bp, Homo sapiens
ctggtattcacaaactctcaactgatgcaggccagccaaaagagaaagttaagaatgtttcacattttcttttcttttcttttgagacttagtttcattcttgttgcccaggctggagtgcagtggcactgtcttgactcactgcaatctctgcctcccgggttcaagcaattctgcctcagcyttccgagcagctgggattataggcgcctgccaccatgcccagctaagttttatattttttagtagagatgggatttcaccatgttggccaggctggtgtcaaactcctgacctcaggtgatctgcccgtctcggcctcccaaagtgctgggattacaggcgtaagccattgtgctcggtccacattttcatattaagataaattccaaattcattaaaaacctaaatgacaaaaagaaaacaactattctgagaatgctagaaata

SEQ ID NO: 115337 - DNA, 593 bp, Homo sapiens
cagaattaagaatataagaagtttattaggggtaatatctgtggatgataaaaaggagaggaagcaggattaggcagggaaaagactgcgaagcagatgtgacagaagattcagccaccccaacccaatagggatcttcagagcaaagatttcccatcacaagcatcatgcattggcagaaatagkccctagtgttcccaccatgcttggtcgttggctggcgggaactagaaacagtgtggcctctgctcaaaagtgaaggtggaccctgaaggctctgacagctagaagctgtcagctaaattcactcctcacagtgaaacagcaagttcttatttgaagggagatccaagccgctcagcatgctctgtaatgtacaatttctaaccatatttctcaaattaggaaacggaggttcaaaaatcaaactttgaaacattgccttgaatgggacaacatagactctggctctgctcctctaacatcatggtctctgctgaattatggtgagtacttgtggcagagactgaaaaagctggctccctcagcacccattccagtgccctcgaagcttgcctcacagcacaataggg

SEQ ID NO: 115338 - DNA, 592 bp, Homo sapiens
tactggaggtccactgtctccagctagctagaagtagtcctggaactaaaatctagttttcgtataaacctctgctcagtgctcttcctattgaatcaagatgttgcctgtggcatatagatgtgatgttaatgctcatacagcatcattcacctggttaaggtgcccagtaattgcaaacacatcaaaaatcctgtcctatttgacaggctcagggaaagtggccagttcagggggcaacagaggctggagacaaagtcacaattggccccaccaatcagcagggaaaccaaactcttggtaacaagcttctgaagtagggagagcaaagatggtttagaaagtgtccwcagaggtcatctagtccaccctctcattttacagctagggaaactgaggctcagagaggaaaagtcacttgtctaaaatcaggcagctgagtcagggacagggtttagtggttatgaacaaggggttcagtactaaataggccagtgtttaaatctgactccaccccttactaactgtatgagttagcactagttccctaacttcttggaacctagatgtccttttctgtgaaatggagaag

SEQ ID NO: 115339 - DNA, 503 bp, Homo sapiens
gtctcaaataaacaaagaaacaaacaaattaagctactataaatatctttgtggatattttggattggcatgcgtttttaattcatttggataaatattgactttgtcattttatcagatcagtgcagaacagccacccttgaggagattttcttctaccaagataatatctgcacttcagccaagtctttgtactctctgtgtttcatgcatgcacaatgagctaaaatggttttagaggcacagagtccaacctcctcattttatagatggggaaactgaagcacacaatttgaccctgccctgtccctggggccctgtccctcagcggggttaggggtcatttggattagattctgctttggtagggggacagaaaagacagacagtttcatgcccactctccattttgcctgctagctccaggaatagtcttggcactaactcctgttgtctagattggracccctgcacatgcacatacctgaaccaatcattgtgac

SEQ ID NO: 115340 - DNA, 467 bp, Homo sapiens
gataaatcccacttggtcatgatacataatttttttgattgttgttgaattctgtttgcaaatattttattgaggattttgtaccaatgtgcattagcgaaatcagcctgtaattttcttttcttgtggcgtctttctctggcttaggtatcaaggtgatgctggcctcataaaatgtgtttggaagtattccctctagctccattttttggaagagtttagtaacaaaccttcttctttgaatgtttggtagaagtcagctgtgaagccatctggtcttgttgggaagtttaaacagaaaaccagaaagtcagatagtccctgtctcatcttcaatctctttatttgttattagtctgttcaggctttccatttcttcctgatttcaatcttggtaggttgtatttttctagggatttctccatttcatctgggttatccaataygttggcaaataattgttcaca

SEQ ID NO: 115341 - DNA, 509 bp, Homo sapiens
gggagcgctgcttgagacaggctcataatgggtctttgggtcagaactgcaaggacgctgggaagtcgtctggtgcagctccctcctaggacagttggagaaactgagcccttactccgggaaggggtaagggcttgcctaaggtcatccagtgagttaatcggagacccggagacctgcgactagaatgcaaatgttcctaagcttcagcagctgtttgcttttcgccacaccgcctcctgcgggaaacttcacctgtgaaaaggcactcctttctgtccctttctcttttagtcctctccctttttagctgtctgcattttccaccgctggggttggattkgctctgggtgtggttccctgtttgttcattatttttctgcaaactcatccttctgtaggtttggtttctaaccttcctgcattctatgtaagtcacaccaaaatatgaaatatgaatcggaatgtgcttctgggaagataggtggctgagccgaggttgtggagag

SEQ ID NO: 115342 - DNA, 678 bp, Homo sapiens
aaatctagcctccacctagatttcaaaggatttatgggaatacctgatgtctaggcagaagtctgctgcagggtagagccctcatggagaacctctgctagggcagtgcagaggagacatgtggggttggagcscccacagacagtccccactagggcactgcatagtggagctgtgagaagagggccataatcctccagaccccagaatggtagacccaccaatagcttgcaccatgagcctggaaaggctgcaggcactcaatgccagcacatgaaagcagttgagagggctataccctgcagtgccatagggatggagatgcccaaggccttgggagcccacccttagcatcagtgtgccctggatatgagacacgaagtcaaaggagatttttctggggctttaaaatttaatgactgccttgctgggtttcagacttgcacagagcctgtagctcctttgttttgactaatttctcccttttggaatgggagcattaaccctatgcctgtacctccattgtatcttgaaagtaattaacttgtttttcattttacaggcttataggcagaagggacttgccttgtctcagattaaactttggacctgaacttttgagttaatgagttaagactttgtgggattgctgggaaggcatgactgtgttttgaaatg

SEQ ID NO: 115343 - DNA, 678 bp, Homo sapiens
aaatctagcctccacctagatttcaaaggatttatgggaatacctgatgtctaggcagaagtctgctgcagggtagagccctcatggagaacctctgctagggcagtgcagaggagacatgtggggttggagcgcccacagacagtccccactagggcactgcatagtggagctgtgagaagagggccataatcctccagaccccagaatggtagacccaccaatagcttgcaccatgagcctggaaaggctgcaggcactcaatgccagcacatgaaagcagttgagagggctataccctgcagtgccatagggatggagatgcccaaggccttgggagcccacccttagcatcagtgtgccctggatrtgagacacgaagtcaaaggagatttttctggggctttaaaatttaatgactgccttgctgggtttcagacttgcacagagcctgtagctcctttgttttgactaatttctcccttttggaatgggagcattaaccctatgcctgtacctccattgtatcttgaaagtaattaacttgtttttcattttacaggcttataggcagaagggacttgccttgtctcagattaaactttggacctgaacttttgagttaatgagttaagactttgtgggattgctgggaaggcatgactgtgttttgaaatg

SEQ ID NO: 115344 - DNA, 678 bp, Homo sapiens
aaatctagcctccacctagatttcaaaggatttatgggaatacctgatgtctaggcagaagtctgctgcagggtagagccctcatggagaacctctgctagggcagtgcagaggagacatgtggggttggagcgcccacagacagtccccactagggcactgcatagtggagctgtgagaagagggccataatcctccagaccccagaatggtagacccaccaatagcttgcaccatgagcctggaaaggctgcaggcactcaatgccagcacatgaaagcagttgagagggctataccctgcagtgccatagggatggagatgcccaaggccttgggagcccacccttagcatcagtgtgccctggatatgagacacgaagtcaaaggagatttttctggggctttaaaatttaatgactgccttgctgggtttcagacttgcacagagcctgtagctcctttgtttkgactaatttctcccttttggaatgggagcattaaccctatgcctgtacctccattgtatcttgaaagtaattaacttgtttttcattttacaggcttataggcagaagggacttgccttgtctcagattaaactttggacctgaacttttgagttaatgagttaagactttgtgggattgctgggaaggcatgactgtgttttgaaatg

SEQ ID NO: 115345 - DNA, 678 bp, Homo sapiens
aaatctagcctccacctagatttcaaaggatttatgggaatacctgatgtctaggcagaagtctgctgcagggtagagccctcatggagaacctctgctagggcagtgcagaggagacatgtggggttggagcgcccacagacagtccccactagggcactgcatagtggagctgtgagaagagggccataatcctccagaccccagaatggtagacccaccaatagcttgcaccatgagcctggaaaggctgcaggcactcaatgccagcacatgaaagcagttgagagggctataccctgcagtgccatagggatggagatgcccaaggccttgggagcccacccttagcatcagtgtgccctggatatgagacacgaagtcaaaggagatttttctggggctttaaaatttaatgactgccttgctgggtttcagacttgcacagagcctgtagctcctttgttttgactaatttctcccttttggaatgggagcattaaccctatgcctgtacctccattgtatcttgraagtaattaacttgtttttcattttacaggcttataggcagaagggacttgccttgtctcagattaaactttggacctgaacttttgagttaatgagttaagactttgtgggattgctgggaaggcatgactgtgttttgaaatg

SEQ ID NO: 115346 - DNA, 458 bp, Homo sapiens
gagactgacataatgttactaggttttagtctatgattaaatctaatatttacctaggtacagttggccctccatattcataggcttcacatctttttagtcaaccagtcacagataaaaaatatttgaaaaagtggatggtcgagtatgtactgaacatgcacaggcttttttcttggcattatttcctaaacaatacggtatagcaactatttacatagcatttacattgtattaggtattataagtaatctagagatgatttaatgtatcccagaagatgcgcakagatgataggcaactactacacctttttacatatgggacttgagcattcatggagtttggtatctgcaggggtcctggagccaatccccaacagatactgagggatgactgtagtctgttttaatcatcttgtgttgcaaatacagtgaattatatctcaacataaataa

SEQ ID NO: 115347 - DNA, 458 bp, Homo sapiens
gagactgacataatgttactaggttttagtctatgattaaatctaatatttacctaggtacagttggccctccatattcataggcttcacatctttttagtcaaccagtcacagataaaaaatatttgaaaaagtggatggtcgagtatgtactgaacatgcacaggcttttttcttggcattatttcctaaacaatacggtatagcaactatttacatagcatttacattgtattaggtattataagtaatctagagatgatttaatgtatcccagaagatgcgcatagatgataggcaactactacacctttttacatatgggacttgagcattcatggagtttggtatctgcaggggtcctggagccaatccccmacagatactgagggatgactgtagtctgttttaatcatcttgtgttgcaaatacagtgaattatatctcaacataaataa

SEQ ID NO: 115348 - DNA, 580 bp, Homo sapiens
ggaaccacctgtacttatgagagtgaggcggggaaaacacaagaacctatattatacttgccccttttttcccctaaagctcagttattcacatttattgaagatctrttgtgcactgaataccacgggatatttattccttcattcagccagtatcccaaacgtgtatcccatgctggtcaagggacacagtgataaatgagatagatgagtacttaggcctcaccaataaacaagtatccaactaagtcaattgccaatgtggtcagtattccaatggctgtaagcaagagccgagatgagaacataaccctgtggggtgatgatgggagttacttcagataacgtggtcagggaaggtctttcgagaaggtaatatttaagggagccctcaaggatgagaaagagccatcatgggaggagttggggacaggcatctgggaacatcgaaggcactgagactggaaagaaagagccccctaggcaggcagctgagtacataaatccagggcactcaggcaggctgtgccaaaataataaacacgggacttactattaagaccatctgagaaatacatca

SEQ ID NO: 115349 - DNA, 629 bp, Homo sapiens
ttagaaatatcctgtggagactgatgtagaatcatcaattcattagaatatgaataggaaggttcagcagatattctaaataactatgatttatgattaatctaagttacatattccattgtrtatatgttattgtccagcttagcttcaacccacattaagctatgacttcagtttctggagagatagtgagataaaggaatgagaaaaaacttcttacgttgtaggtctagctttcagataatatccctcatcttttctagcaatctagagtctgtgggccttgacctacttggacatttttaggagaatctttgagaagccaataattacatggtagcacatgatcatacgttggtcattccaagccatacgtagctctatgaacaatgatgtcagtgtttccagagcccattgcttcaagaccttaaagatacatctaggtggctcatggagaatcaaagtgagaaagtctttctgtggaccctgggtcctattatttagacagagccaaatgaatcttcattatgtggatcggagtgaacatggtggaggactaagaacagatcctcctaacccaatggctgtaactcttttgagatgtgtatttttattctgagttatttgca

SEQ ID NO: 115350 - DNA, 544 bp, Homo sapiens
gacatggaagtgtgaaatagttacaacgtggttgcgtttaattaaagttgctctttttgtgatgctgaggttaataattatgacgctgtgcaaatgtttaatactgctttattttwaaaaaaactcaatgttttgttgttttgtgcctagctctccactggcctaaagctgacttttcacttaagtttaccatcctctgaattatttccattacaacagattttaagaatgacagttggctgggggcattgtaattgtatacttcagccactagagggaagagactctagtatttattctggggaaagaaaacgtgcttcatctctctgattctgtcactgacctttaatctgaagggggttatccttagcattgggattacccttcttcctcttttagagaaaaaactttgggaaggaaaaggtagaattaaggatattggaccagggcttgatatatgggtgtatctgcctgaaatttggggttcaaccagttccttcaagacagcttccaatgggcaagcagctttgttgggggaagtgag

SEQ ID NO: 115351 - DNA, 553 bp, Homo sapiens
gctggcaatagaatttatatagagaggaaacttactttttcttcagaaaaagaccttaataggcttcttggtatagatgatggaacacttggggtgtgggtaaatcatactgcaatataataggatagctaaactgctctgtaggcaaaaataagatacttttttttttctcctgaaaaggaagggtatagaggataggctatgaggccaaggcatwatgggagatacataagcactggaaattctccagtgatgttgtagcttaaggatatctttagaataaaaatgtattatattcaatgtaaagtgcttatttttctgaactaggattctgtcctcgtttctgtagccccaaaatgtcagtagattttcccaaacttgtcaatgccttatatgaaatgtttgtacgtgtatttataattttaatggaaatggaatcattaggtggtccataaactaaatgaaatgagcagaagcagtagaataagccagagaggtataggaaaacatataatcattgggaatttgcagaaatctcaaggactttagtttt

SEQ ID NO: 115352 - DNA, 553 bp, Homo sapiens
gctggcaatagaatttatatagagaggaaacttactttttcttcagaaaaagaccttaataggcttcttggtatagatgatggaacacttggggtgtgggtaaatcatactgcaatataataggatagctaaactgctctgtaggcaaaaataagatacttttttttttctcctgaaaaggaagggtatagaggataggctatgaggccaaggcattatgggagatacataagcactggaaattctccagtgatgttgtagctkaaggatatctttagaataaaaatgtattatattcaatgtaaagtgcttatttttctgaactaggattctgtcctcgtttctgtagccccaaaatgtcagtagattttcccaaacttgtcaatgccttatatgaaatgtttgtacgtgtatttataattttaatggaaatggaatcattaggtggtccataaactaaatgaaatgagcagaagcagtagaataagccagagaggtataggaaaacatataatcattgggaatttgcagaaatctcaaggactttagtttt

SEQ ID NO: 115353 - DNA, 591 bp, Homo sapiens
gcatgactattagtaaaggatttttcattggtgctttttcatcactaatgacagtcagattgggccattactgattttggggttctgacctccctgcagttgtcttttcaattgcccacttctcacataatcaagagggattacacaaacttctccaaccacagctgtgcttgaaagagtaaagactctaatttcaatgtatggaggtgttttagttgaagaaactgcaattgcaaagttattttgaatttatttggcaccttggtaggtcttattgcagtttacccttttattttcccattttaaaaataatagaaacacagaccacacaacttatggagagttcaagccacagaagtgaaaggaaatatctgcattcagttctccaaagacctcttgttcaggaaagtgggaaatcttctmgcctggagtgagaataattgatgtccacaggggggttacaaaacaagagaaaggaaagtgtactcaataggaattgactcaaggatctttttcatccaccaatgagccacccacagttttttcttcagaggtttcttttggcatgctcccagagagtgctttgagctt

SEQ ID NO: 115354 - DNA, 508 bp, Homo sapiens
tgtctacaaagaaagaggctgccaagtggagacagaaaagcagttatgagactgatgatagattccaatttgttatcggtaggtgtgaagtggtatctaatctcaagaatgacctcaaggctgagagacacttgataccgccctcgcctttgcctttccccaaacagcacagggttgccatttaaaatccactaacatccaaatcgtagttggcaactgtacccgctatgttactcagaatctctaattaggaatttcttatcaaccayggacatgctgatattccacacatgtttaaatgagctaatcaatggactaggataattgaggggcaaaccttcagtctcaccagctcacttattagacacattttgaattgcccaaaccactaggtccctaatgaaggatgcctatctgtttttactgtaacttttcattacttacttgttacatactatgatgacttaaggggtaaacacacctttcactatccacaatataatccaag

SEQ ID NO: 115355 - DNA, 543 bp, Homo sapiens
caaaatgaaaaaataataggaccaagaaatcagtggtcaaataattacaagtacaaacatattaaatttttttttcttatcttcttgtatttcattgtcctatcatttcaaattgtctgagccacatgagaaggctcaggtagsggttgctccagaagcaagattaaactcaagcctgagaatgaactcaggaataaaaatagcgcatgtttgtcagaaatttatgtgacagaaatccggctgaattaggagtggggctggtttcaaaagaagaggataacttgggaggaggaagggattctctaaggtttggactcttgctatcgagttgttaatgcgctcttcagctgtcccagctgggtctgtccatcaatgaagaatgtgaggaatgcatgactggtgcagacttctatgtgaaatagatgaagtttccttttcccctggccctggggggtagggactagcagagaggatggggcttcttgcccctacatcccctggtaagcagtcagcatccagcatacttgctccctgtcaaaaaag

SEQ ID NO: 115356 - DNA, 543 bp, Homo sapiens
caaaatgaaaaaataataggaccaagaaatcagtggtcaaataattacaagtacaaacatattaaatttttttttcttatcttcttgtatttcattgtcctatcatttcaaattgtctgagccacatgagaaggctcaggtagcgkttgctccagaagcaagattaaactcaagcctgagaatgaactcaggaataaaaatagcgcatgtttgtcagaaatttatgtgacagaaatccggctgaattaggagtggggctggtttcaaaagaagaggataacttgggaggaggaagggattctctaaggtttggactcttgctatcgagttgttaatgcgctcttcagctgtcccagctgggtctgtccatcaatgaagaatgtgaggaatgcatgactggtgcagacttctatgtgaaatagatgaagtttccttttcccctggccctggggggtagggactagcagagaggatggggcttcttgcccctacatcccctggtaagcagtcagcatccagcatacttgctccctgtcaaaaaag

SEQ ID NO: 115357 - DNA, 547 bp, Homo sapiens
taaatacacatgcaggtcgggcacagtggctcatgcctgtaatcccagcactttgggaggccgaggtgggtggaccacctgaggtcaggagttcgagaccaggctggccaacatagtgaaaccccgtctctactaaaaatacaaaaaaaaaaaataaaaaagaaaaaaattaactgggcgtggtggcaggcacctgtaatcccagctacttgggaggctgaggcaggagaaatgcttgarcccaggaagcggaggttgcagtgagtcgagatcacaccattgtactccagcctgggcgatagagcgagactctgtctcaaaaaaaaaaaaaagttcattgattactgtttttccccaaggttttttgttcacctgtaaagtaatatgtagttgataagaggatgggggggatatttaagatctttattctgacaacactttctgttgtcctaaactgatgtggcagataggatagatttgagtcaaagaaagggatatggatttggtgaattattgtgccttattcattgaatattgactgccttca

SEQ ID NO: 115358 - DNA, 567 bp, Homo sapiens
aaatgatggggtaattatttaaatactttctactatgaagggagttgcgggcttgggttggagagacatagccaaaccagaaataggcaacaaaagactttccagaagaaaaatgtgacatagtccaataatatgagtgttacttaagaacacctaatacgctaaatactgatctgacaaagaagataaatkgagaaatgatgattcatattcccaaagatttttgttcatgttaatataagcatatttaatggagaaatccataacagattttaaagctttcattttctaaaagagtacgactcaaatttttataaacatatgtatgatatcaatagaggtaaatccatctcatttgagtgagtgcagctccagctttgtgtagatcttgagcatccttggtgagggtatgagaatgaagaacactccggagaccagaagcaacttatgactcaccaaagctctgactgccactcagtagcgttctaagccctccattcattcccattccacttcagtgccaagcatctgagatgggaaagtcatcttcagcccaccaacaagccc

SEQ ID NO: 115359 - DNA, 562 bp, Homo sapiens
actgagagacccttgatgggcctagggcactagagctgacataacaatagatgctgggtctgatgtgtgatagggagggctctatgaagctcacatctgcccctaaaatgccacatcccctggccaaccacagctatgctcttaatgtctacaaaatrtcttcattgatgttcattatatctgggaggaacaaggggcttcatcaatgaaagagcatccaggaatttatcagatggttgagaggaatgaaagcctgatttcttccttgatgatgatacttacagaaaacagattcaaatttgctagtaaaatcatagcagtgagtaagagtaggaaaaaaataggtggtgcatcttcctattgctgggtggggtgggggcaaaggaaacaaaaactagatctgcagataatagggaaatgaaagaaaagaaagaagaaaacagaaagcaagaaacaagaaggcaaaactaacaggtaacatcagttacaacaacaaatgtgagctgaattcaattacaaaacaaaagattcacagcatcataaaggaaattctattatatac

SEQ ID NO: 115360 - DNA, 553 bp, Homo sapiens
acaaggtatatgtaatgtttgccttcaaggagctaacagtctggtgatagtgacaggctttaaacagataagccataaaaagattatttgcaatttagataagtttcaccagaagaaatgaagatttatgaaattatatattcgagggacttgatctagtttatgatatcaaagaaagtgtccctgaggaagtaacatttgaaaacaaggcctaacagacagagtaaagttgagcatctctaatcctaaaacccaaayactacaaaatccaaagctttttgaccaccaacatgacatcacaagtggaaaattccacacttgacctcatgtgataggccacagtcaaaatgcagtcaaactttgtttcatgcacacaattattaaaattattgtccaaaaattattgtatgtgtataaggtatacatgaaacataaatgaattttgtgtttagacttaggttccatccctatgatatctcattatatgtatgcagatattccaaaatctgaaaaaaatccaaggtctaaaacattttgggtcccaagcatttca

SEQ ID NO: 115361 - DNA, 672 bp, Homo sapiens
attttatatgatctgtctgctgtcatatatccagtgcatagagcagtgcctggcatataataggtgctcaataaaatatgtgttgagtgaaagggagaggggaattaagcagaggttctggctgagggagcaccatcatatccagactagatcacagaaagctttcatacaagtattcactggggaagtctttaagtaatatcttttggcactcaaacatcgccagtctcactgttatcttttccctccaaaaaaccatacttttcaatgtttatggtagtatattgcattaggaagtaaattataagtaacagccaaacagttctaagattaagccaatctaaataagaatagcttcaagttaattcaaagtaaacttttcagagccatgagtaccaacatggatgtaaggaaagaaaaggttgcttttgtcctaattgacattaaaaactattgaatgacagacaactccaaaaaattttttttttattttcccctcttactcaaccaggctgtttgggactctcagttcaagatgcacaatgagttcaagcaggaaagtccactctaaatrcataccaatgatggattaaaaaaataaggttggggagtaaaaatgatgccaaggacaaatacaagcaaacattttttgtgaaccagaaacggaacaaa

SEQ ID NO: 115362 - DNA, 619 bp, Homo sapiens
tatttgggaattctgctctgtagttaaaaatatacgtgtatgtagcagggaaatgataactctctcaataattaaggacaagcaatcatatcctcgatgtaaaatgggaggaataacaattttttttaatttataagaaacagctagtgtcactgcacttagagaaaacacattaatttcttttatgttgtcaggcagagaaagtataaactttggaggttgcacagtaaggttaggcaatggcctgtgagttaataaacactattgttagatttatatagaattttattagtcttgctcagtttctcttcaattccatctaacaaggtttcctttccagcttatatgtatgcttatctaagtccaaggaattccataagaaagttgaatcaaaatattttcaattgataacttatgaagcaaaaacagcaatttcccattatatatttcaaataagtttactgtacaattttgaagtgactgtagagtctgaattgtattcagacyatgtatcagttgtattcagattctggccatgtatccactaccaaaataaaatgaaaaaatgaacatggttttgtcacaagttaattgttcaacaacaataatgacaacaaca

SEQ ID NO: 115363 - DNA, 572 bp, Homo sapiens
tgctcaaacaattatacagggagaaagcatgagacctgggggtggaagacagacagagagtaggaaatagttaaacaaatgtatgaaaaatgttctgcaccagaataattagatttcgctctacatatatttaaataatcatagtgaatctgaagagctaacgatgtggagaaatagaaaataatcattttttaagggtcatgtgctcagatagcagtattttcactaacaaccagtttgtttgaatgacatctatcaccgaaatcccaggaatttaaggattaaaaaataattacaaaacagtttccaartcatcagacttttatgaaaaaagagggatcaagtggcatcatatccatttttttcccacagaagagaaataaccaagtaaattaatgtacagcaatgttcaaagctattacatctgttgctgttagccaagggcaagaagagctgtcttaatgttggtctcactttgctctaaagtataacagactcatcaaatagtataagtcttaaggtaagaaaaagtggttaaaggtgttctggctaaaatgatcatccataccaga

SEQ ID NO: 115364 - DNA, 602 bp, Homo sapiens
gggcaacaagtgtccaggtatggccatttagtgtaaaattcgtgtatttagttaagtatttaatcatttattccaaatgggctaacttgttccaagtagatcaccatatggaaagttttaagactttttttaaaatgctgaaataatctgctgttatcctaactgtaaggtccactgagcctagacttaactatttcaaaagaatgaagtagacatcctggatcatcagacaatgcatttaaacagagacttggcctgacaaatccataaacaaacatgtgaatttatggggataaaccagtgacaaatccataaacaaacacaagctttatgagaataaaccagtgctgtgtcacataaactctagggtaaaggagaaaggtttactagtttacctagaaattattcttaaatctttaaaccatatcactttttaagatatattttgttaacatggataattatcaattggttcagttcagtggtcttggtttatttwttttttttaaggaaaagcagaatgcatgataaatataggctgcaatatgaaagtcacaccaataggcctgggtttttagataaattggttataatccggtcac

SEQ ID NO: 115365 - DNA, 537 bp, Homo sapiens
tggcccaggcaggccattgggcgttgttcacactgacccactatgaacaccaatcactggggctctcactttgcacccactggaaggaacccatcatctttggagacggaactggaggcctcggtggctgctgaggaaagcactacgtaagttcggggggatggaggtgggatccagaaagagggtcagccccctctgaggctctgttggttttgtgcttttcgaaaacagtagtggcggaatctggagtagcaccctttttttggataggaaacttcagttattctcacagtgttgatggtaaacakggagaaagaaatgggaagaaaaaagtgctggtacacaagaagaccctgcagtgcacagagaggactttcaataatggagggcacgtgtgtcctctgcctggtgcccacactcctgctgccacaagtgccctcgagtgggaggtggggataagggcagcccagagccccatgtgcgggatcactagcttccagggctggggctccttcttcaaccaaggctccatgccaa

SEQ ID NO: 115366 - DNA, 236 bp, Homo sapiens
attaatcagtctgggagaacagacacagatactaagtcagctgcaaagttaacaggaaacattatttttcccctaggcaagttatattgcagctggagaatgccaaaacaatcccctcttkgagtgattattgctttattatcaatgatgccaccaaattcgtttttctatacccatctattactggggatactcagttgctaagctggcccctaccacattctaatactcaatcc

SEQ ID NO: 115367 - DNA, 477 bp, Homo sapiens
ttttatagttttcatttctctgctgagatagctcatctgttcatttattatctctatcttgtaatttaaacttctttaacatatttataatagctatttaaagtcctcatctgctagttccaatatctgtgttacctctggatctatttctgttgattattttttgtcctggttatgaatcatattttcctgcttcttcatatgtttagtaatgtttgactgtatattaggaattgtgaatacttcattgttaagagtttggatcatrtttaaagagtgttgagtttgttttattagatagtaaattcactagaggctcaatttgagcctgaggcttggttttaggctttattatggcaggtctaagatactgcgtattacaggcacagagtagccctattcttaaagcgtggactttcttgggttttcattgagtgctcagggtgttcaacaaagtcttttcaccttgttgatcag

SEQ ID NO: 115368 - DNA, 641 bp, Homo sapiens
atctcttgggagctctatggccctgcccaccgtcttaaccaggtgtccctagggcaaatttgcattctccttataggactgcagcagatgtgctcttgaaagcaccacctcctgcatggaggccaaccaacacaaaaccaagtaccctcacagagtccatttcactcccctgctacctccacaggagcaggtgctggtatccatggctgcaatacctgaagatggatcatatcacaggactctgcagacactccccagtaccagcctgtagcccagtagctcagctaggtggctagacccagaagagcaaaaacaatcwctacagttcagctctcaggaagccccattcctaggggaagggggagaacaccacatcaagggaacaccccatgggacaaaataatctaaacaacagcccttgaattccagacctgccctctgacatagtctacctaaatgagaaagaaccagaaaaacaattccagtaatatgacaaaacaaggttctttaacacccccaaaagatcataccagctcaccagcaatggatccaaaccaagacaaaatctctgaattgccagaaaaagaattcagaaggtcgattattaaattaatcaaggaggtaccagagaaaagtgaagt

SEQ ID NO: 115369 - DNA, 555 bp, Homo sapiens
tttgtccactagaggtcaccagaggcctaaggattccgttgttcargggctgtcttcccattactctcaatgcacacaatgccttctgagtttttaacctactcctagtacctggctaggtccccacaattctattcccccaaattcaactccactgcagccttcccatctcacctcatggcaggctcaccttacagatcctcagcccaaaactaacgcagcgatctttgacttctctcacaaactccacattgaatctatcaggaaatcctgattcccccttcaaagcctattcaaaatctggccatttctcactctctccttggtactctgcactatcttgccagggtactgcaaaccctccctgcttcccctcccacacaacatggcagccaaagcaagccatataaaatgtaagtcagaacatatcactgctcttgctcacacccttgtgatggtactttcattcagagtaaaattaaaggtctccggagtggcctgcaaggtcccatgtgatcagttgccctttgatgtccccaacctcactccacccat

SEQ ID NO: 115370 - DNA, 675 bp, Homo sapiens
tcatattttagaactgttttagatttacagaaaaatggcagagttcccttttgcctcctctccccatttcccctccccactcagtttytgcttttattaacatcttgcattaatgtggtatgtttgttacaactgatgagcaaatattgacacattattaactaaagtcatagtttacattagggtgacacattattaactaaagtcatagtttacattagggttcaccctgtgttgtaaagctttatgtgttttgacaaatgaataatgccatgtatccaccattagagtatcatacagaatagtttcactactctaaaattccccatgtgccacctctcttatctccctccctcctttcaaaacccctccaaaccactgctcctgttactgtctctacaattttgccatttccacaatgtcctacagttggatccaaacagtacacagccttcttaggctggcttctttcagcaatatgcctccatgcctttttgtggtttgattattcacttcttttagttacggaataatattccattgtaagggtataccatagtttgtttatccattcacctatccaaggacagctgggtttcttctaagttttggcaattatcagcaaagctgctataaacatttatgtacaggtttttatgtagatataagttttca

SEQ ID NO: 115371 - DNA, 675 bp, Homo sapiens
tcatattttagaactgttttagatttacagaaaaatggcagagttcccttttgcctcctctccccatttcccctccccactcagtttttgcttttattaacatcttgcattaatgtggtatgtttgttacaactgatgagcaaatattgacacattattaactaaagtcatagtttacattagggtgacacattattaactaaagtcatagtttacattagggttcaccctgtgttgtaaagctttatgtgttttgacaaatgaataatgccatgtatccaccattagagtatcatacagaatagtttcactactctaaaattccccatgtgccacctctcttatctccctccctcctttcaaaacccctccaaaccactgctcctgttactgtctctacaattttgccwtttccacaatgtcctacagttggatccaaacagtacacagccttcttaggctggcttctttcagcaatatgcctccatgcctttttgtggtttgattattcacttcttttagttacggaataatattccattgtaagggtataccatagtttgtttatccattcacctatccaaggacagctgggtttcttctaagttttggcaattatcagcaaagctgctataaacatttatgtacaggtttttatgtagatataagttttca

SEQ ID NO: 115372 - DNA, 555 bp, Homo sapiens
tgttctttaagtccaacatctgagcctctttgaagacagcttctattgactgcttttttttcctatttaagagccatatttcatgtttctttgcatattgtataatttttgtcataaactggaaattttaaataatatcatgtggcaactctagaaaccagaccaccaccccccaggattgtctcttattgttattttgtgttatttctggattttattgttgctgtcrttgttgttactacttgcgtgtttagaggcttttgtgtgtgtgtgtgtgccaagcctttaggtctgtactcctcacaatgtacagatgctgaagtcttttcctggttggcttagtggtcagctagcacttagaaagatattttcttaaatactctaaaccaataaatcttaagctctttgccaaggaattccatgtgtttgttggggcacaccttcagcattccagcaatttgccttatccttcactttctgctagcacacagcctcagcatcagagtagagagatgctggacctttttgattctttactgggcattcacatagtcc

SEQ ID NO: 115373 - DNA, 569 bp, Homo sapiens
tttggcctgtccagtctcagctcagccacttactaggtatagaaccttgggcaagttacctgatctctctgcctcagttgcttcatttgtaaagtgggaataataatagctatgtcctcataatgctgccgtgaggattacattatatatatatatatatatatatatatatatatatatatatatagcacttactacagtgaacataatcccaaataactgttgacactttattttaattattaccttggaatatcataaggcacaaaaatctctccttcatgaggggcctaacctaagtaatcaagacatgagggacccagaaaaaaggaggccagaggtatttttcaacaaaaattataatttttttctccagttaaggataattaatagcacctaatataataccttgaacatattaggtgctcaagaaattgytgaactagtgaatattaagaaattatattgtctttctgtctatgcagggctcaggatttcatatgcagtgaataaaaacctcactaataatattccttaagaatataattaataaaatagtattaaaattt

SEQ ID NO: 115374 - DNA, 445 bp, Homo sapiens
tttaaaagtgattataatttctttaagtttttttcctttcaaatgaaattgtttaatctctgacaactgcattccttagtttacaagtgaatartctcagactaagaagatatcccggggtagggttgccagattgagcaaataaaaatacatattcaaacattgcatgagacatatgcatacaaaacaattattgattgtttatctaaaattcaaatttttgctgggcatcctgtgttttatctggacctacccctaggtcctctacctaatgaatgggaaagctgatgatagaacccggtgccctgactgacagcccggaaaactactagcaatgaataggttcctctttctgatgcaaatacattcacaattatcccttgaaaattagatgctgtggaaaaccaaatgctatgtaaggtgatcccacccctcaggaagccta

SEQ ID NO: 115375 - DNA, 445 bp, Homo sapiens
tttaaaagtgattataatttctttaagtttttttcctttcaaatgaaattgtttaatctctgacaactgcattccttagtttacaagtgaataatctcagactaagaagatatcccsgggtagggttgccagattgagcaaataaaaatacatattcaaacattgcatgagacatatgcatacaaaacaattattgattgtttatctaaaattcaaatttttgctgggcatcctgtgttttatctggacctacccctaggtcctctacctaatgaatgggaaagctgatgatagaacccggtgccctgactgacagcccggaaaactactagcaatgaataggttcctctttctgatgcaaatacattcacaattatcccttgaaaattagatgctgtggaaaaccaaatgctatgtaaggtgatcccacccctcaggaagccta

SEQ ID NO: 115376 - DNA, 535 bp, Homo sapiens
tattttgacatcttctccttatttaaactacaaggtgctgagaaagacccagaaccccaaactggatgaaggatatgtgataggcaattcacggagcacagatacaaatggacaaaagtgagaaaaaatatctcaccttattagtaatcaagaaaataatagaataaaataacaaggtcactgttagcctctaaaacggcaaagattaaaarcaatgaaaatatgtagtgagggtgtggggaaatgttcactcttaagcacctgctgaagaaagcagaaattcatacaactctcctggagtcactttggtagtatctagcaaaatttttctagtacctacctttggctacacttcatgtatatacacacacacacacacacacacagacacacacacagacacactcatgtgaatttaaaaattatttatagtggcattacttgtaaaagccaaaaattagaattagcctatcaaaagagaaatggttacataaactctggtttacctacccaatggactagtttatctacccaa

SEQ ID NO: 115377 - DNA, 526 bp, Homo sapiens
ttttgtttataaagaaagcctctttacacacactgattgactaatcggttaccaggataaatgtaaactttcaaaagagaacatttaaaataaatgcttgcctaccggtgctttagataaaataagacttctcttgaaaaaaaattccaargttaaaaaaaaaagtttgaaaaccactgaatcttatccatctccctcagcctattggtgagaaaactgaagcatgaggaccagaactcttggctcttttggttctagttcctttccactatatactatagtgattaaattaatcagtaaggatttattgtacataattatgtgcccagcagtgtgtttgattctgtgggatttagaaaagtaggctaaaatatggtgcccgtctcattccagacaactagccccagagacgagtttctgatcctgatgaagaagagagacatgggtaaaacaatgcagggatggcatgagttctaaactgcacagattacagaagcatgacttgaatccagaggaggagggaact

SEQ ID NO: 115378 - DNA, 539 bp, Homo sapiens
ctggcccaggcaggccattgggcgttgttcacactgacccactatgaacaccaatcactggggctctcactttgcacccactggaaggaacccatcatctttggagasggaactggaggcctcggtggctgctgaggaaagcactacgtaagttcggggggatggaggtgggatccagaaagagggtcagccccctctgaggctctgttggttttgtgcttttcgaaaacagtagtggcggaatctggagtagcaccctttttttggataaggaaacttcagttattctcacagtgttgatggtaaacatggagaaagaaatgggaagaaaaaagtgctggtacacaagaagaccctgcagtgcacagagaggactttcaataatggagggcacgtgtgtcctctgcctggtgcccacactcctgctgccacaagtgccctcgagtgggaggtggggataagggcagcccagagccccatgtgcgggatcactagcttccagggctggggctccttcttcaaccaaggctccatgccaa

SEQ ID NO: 115379 - DNA, 422 bp, Homo sapiens
ggtctgttaggtgctttggaatggcagaataaagaggaagctagatatactttcagagtttgacatgacaaagatttgtgcataatgccaataggccaaatatggattccatagaagggggctaattatgatcatcttgaaagggattatgcccaatatgacttcctgcaaaggatgaagtaacctcactcaaaagcagctggaggttccatcatcaaaggcaaaagctgaggagatgataaaaagcagcaagtgagagagctccggtgataggtagagctccagtgataggtaaacctccaacgaacccttcagaatacttcaagtttaaaagrgtccacatttgattatgtgtcatatccagagataccaatggcacataactatatcagtcaagattgagaaagactttcctgtacatt

SEQ ID NO: 115380 - DNA, 351 bp, Homo sapiens
gtgagtctgagatgaggggatgtgatgttgtggacttcagccaggtttttggcagctagtgtctgtccctttttcagtagctccagtcttcttatgaagaatgagttctttctgtggtgtgtgactttagtgggagggcagctcttgctctatgcctctcagttgccttccactgtarccagtcctgtaactggtctgggcacactcggagggggatccatggtagctccttgccatgaagatgtgggtagaggagggttctgtggggcctcggaggtgttcaacattttctagaagtgttcctggtgggtttatagaggcattgatatggtttggctgtgtccctaccca

SEQ ID NO: 115381 - DNA, 643 bp, Homo sapiens
tgcttctttttcatgttctcactcataagcacatcaatttcagtttccgttgctcttttaaattcgttatacacatacatctgctttctggcttyaaatattttgttgatatctctgttcagctgtcattgccttccccactgtccttgtgtatttatgaccttaaaaatgtctttattgtccctatagtggagttttaatagcaaatcaagataaataaatctgtttaattcacatgtttaactgggaactcccatcctttttaaaaatggcagtattagtaactttgaggtaattaatgattaaatttattgacattatcaatttctgttccttgtatacaaggctttctctgtgggttcatttttttttcctgcttgaatacatagctcttcaggaagagttacctgatgtgtaacaaggtggtaaaatggaacatttcccagccatgaagatgacacaagctatattccaaaggactgtaaaacaaaatggcagaaaaccaacttttctactcattcagatttgactctattcaaatttgattactaatcaatgtcttataaagaagttggagagaacaagaaacggaagaataaaaatcaaatgaagagttttgaagatcataatttacttttggaaa

SEQ ID NO: 115382 - DNA, 611 bp, Homo sapiens
cgaactgatcatttgccttttcacagatactttctcagaaagaaaaattctaattttacctggaattttctacattattccagcaatctctcctccagatccagaaacactttaattctcataggatgacagggtatgttgcagcctcacctgaacccacaggtatcatacctgaggcatccaggttactcaccaggaacttctaccactgtgattgctgtctggattgcaattgttttactggcttatttctctcataccattcttcttgatgaagcctgatagaactgctgtgaacattttctcatatacatatgtcaggttcatgactacaccaaaggtcatgttgcagtctgaagggagtgggtggatgagcagaaagaacactcgggggccacaggctggtgaaagattattttattcagcagcaactctcatcagcagctttttcacactgtccgccccatctgggctgcttagtcyggctcccacacacagctgcatggctggctttcccttgctttcagggtcagcaggttaactctttctttctctctgggcatgagtgagccgagctgtgtcctggctcccctctgtccatctttgcagat

SEQ ID NO: 115383 - DNA, 575 bp, Homo sapiens
ataaacaagccaacaattaggaaaaacagaactgatgtctaaagagagaaaaatattccatacaggacattttcccccttgttttttgtattactctaactacagtgtgtccttgttattgagaagtggcttatgttcttaaaattgatgaactctctctctctmtatatatatacatatacacttcctttcatatatatatatatatatatatatacacacacacacacacatatgacatatatctagatgacagcatatagcatactgcagagttccttaaaacttaatgtgaataggaatcacctgggaatcttgtcaactgcaagttctatttcagcagatctggggtagtgttggagcttctgcatttctactgagtttccgggagaggagaatattgctgggttgtagatgtagtgtcagagcacctgagttcaaattctgcctccaacacttgaagctgtgtaaacaagggcccattaattaacctatctcagttttctcatctgtgagatggggatgatagcagcatacaggtgctccctaggtgtgttgtgaggactacatgagta

SEQ ID NO: 115384 - DNA, 539 bp, Homo sapiens
acaaccttcctaactttaacaagatccaaagagacattttccccagagatgcctttaacttggcagagaatgtgggaccatcacatttgtagcatagtaattgttttgttcttgtagttttagcaaatgttcaagagtctatctatgtatggcccactggcttcatcctctttcctttctatccaggcttcttaaaaatgcagctggtcacaagaacaaataattgatgtgcccaatatccttactttctttcacaatttttaaactggtgacattgctttaaagtgtaaaactccattggtaaacaacacgaaaaagaataaaaacaaaaattatacccygcaaagtaggaaataaaaatgttacatgatggagacgtggctgtggctgactcctctataagtactaatgctaaataaaatcaccttatactgggagctgaaatagtattctggtaagcaatacctcaaaatgtcaaaggcaaaatttttagactcatgaataccattgcatatttcttttgattctaattacaatac

SEQ ID NO: 115385 - DNA, 541 bp, Homo sapiens
gattataattttattcaagtttaaggaatgaaaagctgattgggctctgacttgcactttgctttggagtcatggggctatgaattaacagttttcctgggggggatcagaacatgccagatgatggaagtcttttgtctggagctattattttgatttagaaaggttttattttagtgaagttataaagaatcctcaaatatttctctaagctggagaggcctgtctcctgggtgtcctctttcctgcagggttggatagtggctatttctacccatagakacttgtaattgtcagttccccatgtcactcctgtaccctttcctgtcttcattgcatgtggtgttttggaattcttagcctttctggaaagcaatttctctctctcagtctgtcatatttatatcccttctagataatctaacctgtggttgactctatttcatgtgctatctcttctttatctgcttgtcatctatacatctgttgacatattttgtattctcatgactctctttcagttccttactaccattaggtt

SEQ ID NO: 115386 - DNA, 625 bp, Homo sapiens
accttttcaaaaatacaactcataacaccttcacagtagaacagcagcttgttaaaacagtaaccacagcaaaccagaagtagtagtacccagacaataagggctattcttcttggagcctttcaattggaggattggagcagcccagtgagagcttgttcagtaagtgctaagaaagatgctaacagcttcaggaagataaagctagagagtttcctactgtagcccctccctggatacttataacttccaaagccagcaactttttaattatttcataaaccagaccctatatcatatagaacttcttaaaattacttggctgcagtaagaattttcttataatccttcttccttacatgaaggatagtatcctataaatactctttgtattctgctttttaaatttaacaatatattttggaaattgtcttatataactcyatagagatctcccttactgttttctatttttttacagctgcgtagtactacatgtactatgtactacggtacttggggatgtactatagttttttcaaccactctcctgtgtatgggcatttgaatatttcacagctataaacagtgctgcaatggataagcttatgaattgtgtcacttc

SEQ ID NO: 115387 - DNA, 360 bp, Homo sapiens
cttttgaaaatgtccccgtatgccctagaaagtcatcctagcaatatttctcttgttccaatctggctttgactgaaagtcgatccttcaggtggctgagttctgaattggagaccccccgcgtggaggccagtcccgggtagggagtagctccgaaatgcatcccagggcactgaaggggagtgccggatctactttgggttctcactgyggtttgagacactacatgggcttctttagctaacagccgaggaagggcctctactccttcatccttacccacatcaaatgctaattctgatgtgcatccccatcagatttggaaagctgagtggcgttttgcggttttaaaaagaattc

SEQ ID NO: 115388 - DNA, 360 bp, Homo sapiens
cttttgaaaatgtccccgtatgccctagaaagtcatcctagcaatatttctcttgttccaatctggctttgactgaaagtcgatccttcaggtggctgagttctgaattggagaccccccgcgtggaggccagtcccgggtagggagtagctccgaaatgcatcccagggcactgaaggggagtgccggatctactttgggttctcactgtggtttgagacactacatgggcttctttagctaacagccgaggaagggcctctactccttcrtccttacccacatcaaatgctaattctgatgtgcatccccatcagatttggaaagctgagtggcgttttgcggttttaaaaagaattc

SEQ ID NO: 115389 - DNA, 580 bp, Homo sapiens
ggattgttggattgtatgatagttttatttttaatgttttaaggaacctccatactgtttttcataaaggctgtaccaatttacattcccaccaayactgtacaatggtttctttttctctgctgtcttcctaacacttgctgtctcttgtctttttgataataggtattttaacgatgtaacgtcatgttgtattatgcttttgatttgcatttctttgatgattaatgatattgaccactcttttatatacctgttgatcatttttatgcctttttttggtggggagaatgtctgttcagttcctttgtccagtttttaaatgggttattagttttcctgctattgagtttgtgagttccttatgtattttgtatgttaacctcttatacatggtttacaaatacaggttgggtatcacgtatctgaaatgcttgggaccagaagtgttttggattttggattttttgaattttggaatatttgcatatacataatgagatgtcttggggatggtaagcaagtctaaacactgaattcatttatgtttcaaatacaccttatatacatagcctgaagg

SEQ ID NO: 115390 - DNA, 580 bp, Homo sapiens
ggattgttggattgtatgatagttttatttttaatgttttaaggaacctccatactgtttttcataaaggctgtaccaatttacattcccaccaacactgtacaatggtttctttttctctgctgtyttcctaacacttgctgtctcttgtctttttgataataggtattttaacgatgtaacgtcatgttgtattatgcttttgatttgcatttctttgatgattaatgatattgaccactcttttatatacctgttgatcatttttatgcctttttttggtggggagaatgtctgttcagttcctttgtccagtttttaaatgggttattagttttcctgctattgagtttgtgagttccttatgtattttgtatgttaacctcttatacatggtttacaaatacaggttgggtatcacgtatctgaaatgcttgggaccagaagtgttttggattttggattttttgaattttggaatatttgcatatacataatgagatgtcttggggatggtaagcaagtctaaacactgaattcatttatgtttcaaatacaccttatatacatagcctgaagg

SEQ ID NO: 115391 - DNA, 626 bp, Homo sapiens
ctggcacccatcctgcaaattttaatgtgcacatgtagtcagtgacaattacatcatgatgattacatctcatcttcattgatgttaacatgtgaagatgtgtattagtgaaataagctaaaaattcatgagcgtaatataaataaaaatcctaggtcaatccctcagagacagactttttctgtcagaagtcttcagagtaacgttaagtactaattcactaacctgaagagatgtgactgggaaaaactgttagtttagaggttcctcaaatttttgggtttgtcagaatcaactggcttatttgttaagaatgttaactcccakacctaccccaacccatcagattggaatccctggctgtggcatttctgacaaacttcccaggacactctcatgcaggtggtgtggagaattgttttgagacacacttgctgagacccgtcacaggcaccctcagctgtgctgcactaagctctcagatcacaggcttggagacttcatgaagtccgtggcagccaaaaaaaaaaaaaaaaaaaggcttcatcaggaactgcctaggaagaaagaagccaaaatattttgacgccaaattagagtgagtctgaaactgccaaatcctgaaa

SEQ ID NO: 115392 - DNA, 606 bp, Homo sapiens
gtaaataaactcagtttaaagctttcaatactcaactgcatagttccatataaacatgaaaattaggaagattgctattagcacacattcctaaatccacaggagttatttagcaaaacatccaatgcatgaatgtagagaaaacacaatgacccaaaagttaagactggtgaatctccaggttcacatgagacggtaacccaaattcatcacttaaccaaatttagacagagtcaccatttcctaattctaggaaatctgactagttaaggtggcataactagtgataaagttcatcatgagctttatcatcacaatgctaagaaacattattttagaaaatctagagaatcattaacaagcaaataacagagtaggggatgagctgggccactctggggtcagactgcctgggattgacctggccctactacttgctggtggtgagatgctggccaattatgagtactcacctgtaagatgtgagcagtaagaaagtgtatctgcctcactgggttgtcagaacagacaatcccggtasagttctcggagcgtcttggcccatcactgttagctagttaatactttagtaagtacaattaattt

SEQ ID NO: 115393 - DNA, 570 bp, Homo sapiens
gtaggagaattatgttaataagctctgcttttaactctatcaagtataggaatgtgttcctttgtgcaatttaaaaccaccatcacctatgccctctagtgcttatgggatgagtttgacaatagaattgtgttctctgtttcctgcttctgccctggttactgctgatattcctggtgtgagagttctcttagtctctctgatcccagcttccctggcattgggaaaagggtggctttgcctattcctccatgtggtcctgctatggggckgtggtgctggagaaacaataagtgcatctgggcaaacacggcagactactggcagtcagctcctggaagccagggcagtttatgccctagcactgcccaggtgtagaatcctgtcctgaggatgtttatctgtagcaagccaaggacattatagttgacccttgagcaacatgggtatgaattgttaaggtctacttatatgtggatttcctcccacctgtgatacttatatgtggatttcctcccacctgtgataaccctgagacagtaagactgactccttttctttctcttcctt

SEQ ID NO: 115394 - DNA, 430 bp, Homo sapiens
taataataggcatccccttgctttgtttgtactaactattcttaatatgtaagaaggccaaaacattactggataatcaattaccaagcctcagaaacaagtgaaataggtgaagtacacagtccaatttttttgaaagtgtttcctttacaaaattgctttcgctcatgctctgatgtttttaattctgtaattagaaatatgccaccttgggttaacgtgttgatgtttatttaaaagtaaacagaataactawtacagtatattaagccttttctgtcaattgaaatatgacttaatgtattactgcagtaaactgttgcagttactgaaactcaggaggatgaatttaccagatcccttcctaaaaccaggctttgacatggaagggggtagagtgatcttgaggaccgtgaatggtgaggaattc

SEQ ID NO: 115395 - DNA, 570 bp, Homo sapiens
atccaggatgtattaattacaagtcaaatgcatacactagtatgaaaaatatatcggagaagaaattgcatttaatcaccagaatcaacagactgtgtttgaagtgtgagctgactccactttccccatagctttgttatacatctgggaaatagaccagcattcattatccacatggatactcttgtacttgagtcctgtgagagattctcctgtgtcaggagcacaacttaactctgaaatgytggccaaaatttgacatagatttaccaaatagtctcataatattaatatcatgttgactctgcagaaatctgcaactagactatgtgaacttttttcttttagatgtctcaattttgagaaatacataaaaagatgagtgatattcttttaaatattattgagaatttaattggattatagtggactaagacaagcaaagtattttacttacaataatgatcaatgtatatacgtaagaaatagttttattagaaggaaaaagtcttggcaatttcctttgactattactctcaagaacttaattctgaaaacttttacattatt

SEQ ID NO: 115396 - DNA, 584 bp, Homo sapiens
attgcctttgctgtatcccagaagttttgataggttgtgtcactattatcgttcagttcaaagaatttttaaatttccatttttctttcattgttggatcaatgatcattcaagagcaggtcatttaatttccatgtatttacatgattttgagggctcatttggagttgattttcagttcttattctgtagctggtctgagagagtacttgatataacttcacttttcttaaactttatagagacctgtttgtggtctataatatrggctatcttggagaatgttccatgtgctgatgaatggaatatatattctgtagttgctgagtagaatattctgtaaatacctgttaagtccatttgttctagggtatagtttaagtccattgtttctttgttgaggttctgtcttcgtgacttgtctagtgcttttagtggactatcaaagtctccactattcttgtgttgctctctgtctcatttcttagctctggtagtaattgttttataaatttgggatccccagtgttaggtgcatatatatttaggattgtgatatttttcttttggactagtccttttat

SEQ ID NO: 115397 - DNA, 592 bp, Homo sapiens
atatccacaatcctgtctcctaggctatagtaatatcctcctaattacactccttgtaawtgctcttgcatgacttctagtccattttttatacatcaaggtaatcattttataaagggaacatgatcatgtgatcatgcttaaagcatattacaacccttaaggaaaaagaaaacccaaatctgtttattagcccctcctcatttcttggctaacagttactcacctttcaggtctcacatttcctctgggaaacctttcctctctggcagttaaattcctaccaggcattcccaaagcaggctgctttctccattgaaggtggttcttgttaacactgatgattacttattcaatgtttgccttcctgaccagactgtaagctccaagaaggcaggggcttctttagtcttgtcactgctctgttttcagcccttccggcaattcttggtgctcaataaatatttgttgatttgattcattgaattatgtatatacttacagtttatagaaatctgagaattcagaaattctcagatttctgaaacatattctgaaacaataattcagaaaatataaaactggagaattc

SEQ ID NO: 115398 - DNA, 622 bp, Homo sapiens
gtttgttgtctttaaatgattgttagcaggacttctttgaggcctgcgatgaaggtgtatctttacaggaaagatttacatttgcttctattggttacctagaagtgctaccaagcaggttaatcttaaattacattcatagctttaagtgttccttgcaaattctcatgaggtgcagtttatggtaacaaaaaagctcatacacacacatgatgtggtcagtagttttgggtgtttttttatttatttttttgagatgagtctagctctgtcacccaggctagagtgcagtggcacgatcttggctcactgcarcctccacctcctgggttcaagctattctcctacctcagcctttcaagtaactgggattacaggagcgtgccaccatgcctggctatttttctatatttttagtagagacagggtttcaccatgttggccaggctggttttaaactcctgacctcaagtgatccacccacctctgcttcccaaagtgttgagattatagacgtgagccaccactcctggccagtttgtttttttgttgttttttgtttgatttgagacagggtctcactccatcatccaggtggctggagtgcagtggcgcaatcata

SEQ ID NO: 115399 - DNA, 622 bp, Homo sapiens
gtttgttgtctttaaatgattgttagcaggacttctttgaggcctgcgatgaaggtgtatctttacaggaaagatttacatttgcttctattggttacctagaagtgctaccaagcaggttaatcttaaattacattcatagctttaagtgttccttgcaaattctcatgaggtgcagtttatggtaacaaaaaagctcatacacacacatgatgtggtcagtagttttgggtgtttttttatttatttttttgagatgagtctagctctgtcacccaggctagagtgcagtggcacgatcttggctcactgcagcctccacctcctgggttcaagctattctcctacctcagcctktcaagtaactgggattacaggagcgtgccaccatgcctggctatttttctatatttttagtagagacagggtttcaccatgttggccaggctggttttaaactcctgacctcaagtgatccacccacctctgcttcccaaagtgttgagattatagacgtgagccaccactcctggccagtttgtttttttgttgttttttgtttgatttgagacagggtctcactccatcatccaggtggctggagtgcagtggcgcaatcata

SEQ ID NO: 115400 - DNA, 622 bp, Homo sapiens
gtttgttgtctttaaatgattgttagcaggacttctttgaggcctgcgatgaaggtgtatctttacaggaaagatttacatttgcttctattggttacctagaagtgctaccaagcaggttaatcttaaattacattcatagctttaagtgttccttgcaaattctcatgaggtgcagtttatggtaacaaaaaagctcatacacacacatgatgtggtcagtagttttgggtgtttttttatttatttttttgagatgagtctagctctgtcacccaggctagagtgcagtggcacgatcttggctcactgcagcctccacctcctgggttcaagctattctcctacctcagccttycaagtaactgggattacaggagcgtgccaccatgcctggctatttttctatatttttagtagagacagggtttcaccatgttggccaggctggttttaaactcctgacctcaagtgatccacccacctctgcttcccaaagtgttgagattatagacgtgagccaccactcctggccagtttgtttttttgttgttttttgtttgatttgagacagggtctcactccatcatccaggtggctggagtgcagtggcgcaatcata

SEQ ID NO: 115401 - DNA, 622 bp, Homo sapiens
gtttgttgtctttaaatgattgttagcaggacttctttgaggcctgcgatgaaggtgtatctttacaggaaagatttacatttgcttctattggttacctagaagtgctaccaagcaggttaatcttaaattacattcatagctttaagtgttccttgcaaattctcatgaggtgcagtttatggtaacaaaaaagctcatacacacacatgatgtggtcagtagttttgggtgtttttttatttatttttttgagatgagtctagctctgtcacccaggctagagtgcagtggcacgatcttggctcactgcagcctccacctcctgggttcaagctattctcctacctcagcctttcaagtaactrggattacaggagcgtgccaccatgcctggctatttttctatatttttagtagagacagggtttcaccatgttggccaggctggttttaaactcctgacctcaagtgatccacccacctctgcttcccaaagtgttgagattatagacgtgagccaccactcctggccagtttgtttttttgttgttttttgtttgatttgagacagggtctcactccatcatccaggtggctggagtgcagtggcgcaatcata

SEQ ID NO: 115402 - DNA, 378 bp, Homo sapiens
agtcgatatatcccaaatactgtcatttcaacatgtagtcaaatgtaatgattattgaggtattttacatttatgtactaaatctttgaaacccagtacttattttgcctaygcttacatctcaatttggacactaagttatcattggaaatacttgatctttatttagagtgtatgaaatgtgtagttatagagtagattcacacacccaagttgtccaaacatacttgaaagttttccaacagctgaatcaagtctcaatttttaaatttaaatttagactaagaaacattaaataaaattaaaattcaatttcttattgcattagccatgtttcaagtgctcaatagccacatgtggctagtggctaccacactg

SEQ ID NO: 115403 - DNA, 603 bp, Homo sapiens
gaagtggttaagagtgtgcacccagtgaccagccagatggcttcaaaccatcaccatctaatactgagcaagttacataatgttcctgagcctcaactttctcatctgtaaaatgggtatgccgtcattcattaatcaaattctaggtaagcatatactaaacaccagagacacaaatgagaatcaggaacaggcatggccctggtcctcacggtgaccacagtcttgaaggggaaggatgacatgcacagaaataggaagccgtagctgagctcatgacacctggtgtcatgaaagcagacaacagggggttgctgtgactgagtcagtgtggccaggcgtccctgaggatgtagtgactccactgtcagatgagaccatgaccaggtgaacaggtaaggagagggaaaatctttccaggcagaaagagcaggatgtgcaaaggccccgtggcaggaaaagagcaaaggaagtgcaagagcctgaaagaggccagrgagaacaagtgaacatgtggataatcacagcacccacctcatacaggagttgcaagaaattgagacactgtctgtaacagattcagcaatgactaaatagaaacta

SEQ ID NO: 115404 - DNA, 563 bp, Homo sapiens
aaaactaatcataatcataatatctattggtgttgggatagcccagtggttgacacataaggactcaaaaatatatatatattttttgaaacagagtcttgctctgttgccaggctggagtgcagtggtgcaatctcagctcactgcaaactctgcctcctgggttcaagcgattctcctgcctcagcctcctgagtagctgggattacagatgcctgccaccactcccagctaatttttgtatttttagtagagatggggtttcaccatgttgtccaggatgctctcgatctcttgacctcatgatcygcccacctcagcctcccaaagtgttgggattacaggcatgaaccacagtgcccggctcaaaaatactattattaattttggggggtagttactatattttgtgaaaatcagagttcagtaccttgtaacactgggttgggatctatccctgaaggaacaggcttctaaagaggaaggcatggagagaggggcaaattttcagtggatgttgtaatgactttaggtatatggacctggggctgagttctagctgg

SEQ ID NO: 115405 - DNA, 555 bp, Homo sapiens
aaaatatatagaagtcttcacaaagagtgaataagcaggcagaaaccatataatgaaaagtcatatgccatgccctcacactgggaatgtgaatcaaaggcaagagaggtctgagtctttgactgcagctccccacagagactgcaatgcaccggctgtacagcatgtctgctgtgaggagagtagtttttttctgtgaggcctaccaggtaactttgttattgcctagggtctgtcctgaaaatcacacataggattttggccaggagctgaactcttcaaatatcatttgatttattgactgccacataaaggaatcattctttatcttcccattcttttaacarattgtctttaaaattatatttggtatttgttcctctctttattatacagtatcaatatttgtataagtgccaaagaaaatttgaaaagtggcacttattcaaaaatggtcatgtcatgtgtactatggagctatacttaatatgcagaagtttaaattcactatgccgtcaaaacatccagctcaaacagtaaaattctcttcaatat

SEQ ID NO: 115406 - DNA, 544 bp, Homo sapiens
aaagattatagaggctcaggagaaagtcaaaacccaatccaaggattctaaggaatacaataaaatgatacagaagctgaaagacatatggctttttttaaaaaaataaaaaaaacttatctgatagagctgaaaaactcacttcaagaatttcagaatatagacacaagtattaacagcagaatcagccaagctgaggaaagaatctcagagcttgaagactgtttctccaaaataattcagtcagacaaaaataaagaaaaaataaagaagaataaaaaatatccaagaaataygagattatttaaagagatcaaatttatttctcattggcatccctggaagaggaggagagaaagcaagccacctggaaaacatatttcaggatatcatccatgaaaatctctccaacctcattagagaagcaaacattcaaattcaggaaatgcagagaagccacatgaaatactacattagagaccatccccagacacatagtcatattctccaaggttgaaataaaaggaaaaaaaaagttaaaggc

SEQ ID NO: 115407 - DNA, 597 bp, Homo sapiens
cttcctgtgaccttactgccatcttcagcccttgtactgagcctgctaacgaggatatccttttggcgaggtggagacctcctcactcagaaggtgaaagggtgctccagtacatttcacatccattaaatgaagatgatttctagctgctctgagctggatggaacctagtggaacaccagcatggcctggacatattgtatcctgtttttgaatacccattgtgaactactataagatgcatgaatcaatagtgttgcaactgggaaattgaattaaaaaaccctccatatgaccagaaagactaccaaatgttgactcatgatccctctgtgttatgcagtacttgggttagcttaattccagtagaacaaaagagctcagaacaaggtgaccaatasagcataatgtaaaggaatgaacctggtcaccaggaagcctgcattttggtgctagctatttctgtaactagtaatcagagttccttttttttttttttttttttttttcaccatttgccacatgtacgtactttacatgaactaaattagaggtagtggactgagtgatgaagaacttgaactcgggtcagctgtc

SEQ ID NO: 115408 - DNA, 580 bp, Homo sapiens
cccaactgtgcacattctttgtgccccagcaaccgaacacatcttttgttgagtgagatattattgcttcacttcactcatcctgagattcaccccatggaaaatgtaaacttgcaagtcaggatcagaaacaatggctgtaccaccaatgctgtgtgcatgtgggagaggcagatggggtctartagcaggaggaggagatgtcccaggaatacaagagactgaaagcttaggccaagaacacatcgcaacccacagtcaaagaggatggcttcagggaggcactgggagtgactgaagctaggaaacactaactgctgcaggagtggggatgctcaattttcaggaaagaaaggcttgttcgaaaaatagagagaaaggacttatttgctagaaatgtggagttatgttgggggacagcaaaagacaaggcatgtccaggagatcaggcaaggctgtggcaagcaaacaaagccaggtgcggaaacatccaatttggggatttaggttccaggactatccgtcccacttccaatagccacttgccttcatcttctaacttactataacaactgaatta

SEQ ID NO: 115409 - DNA, 513 bp, Homo sapiens
gctgagagaattcaccactgccaagccaacactacaagaactgctcaaagaagttctaaatcttgaaataaaacctcaaaatacaccaaaatagaacctgcttaaagcataaatcccacaaggcctataaaacaataacacaatgaaaaaaaaaaccaaggtatttaggcaacaactagcaagatgaagacaatagtacctcacatctcaatatgaacattgaatgtatatggcctaaatgttccacttaaaaggcacasaatggcacaatggataagaattcacccatcaagaatctgctgtcttcaagagactcacctaacacaaaaggactcaaataaggtaaagaggtggaaaaagatattccctgcaaatggacaccaaaaatgagcaggagtagctattcttatatcagacaaaacagactttaaagcaacaacagttaaaaaaaaaaaaagacaaaggtggacgttatataatgataaaaggactagtccaacagaaaaatatcac

SEQ ID NO: 115410 - DNA, 513 bp, Homo sapiens
gctgagagaattcaccactgccaagccaacactacaagaactgctcaaagaagttctaaatcttgaaataaaacctcaaaatacaccaaaatagaacctgcttaaagcataaatcccacaaggcctataaaacaataacacaatgaaaaaaaaaaccaaggtatttaggcaacaactagcaagatgaagacaatagtacctcacatctcaatatgaacattgaatgtatatggcctaaatgttccacttaaaaggcacacmatggcacaatggataagaattcacccatcaagaatctgctgtcttcaagagactcacctaacacaaaaggactcaaataaggtaaagaggtggaaaaagatattccctgcaaatggacaccaaaaatgagcaggagtagctattcttatatcagacaaaacagactttaaagcaacaacagttaaaaaaaaaaaaagacaaaggtggacgttatataatgataaaaggactagtccaacagaaaaatatcac

SEQ ID NO: 115411 - DNA, 552 bp, Homo sapiens
atgattctgagagcatctacttattttagaaaatacatattaaaaagggggtatttatacctaaattcaggtcttttactttttttktgtgtttttaaaaaatcgttattggataatacattcacagggttcagaattcaaaaagtactacagaatttgcagtgaaaagctttttttcaggtaatttgtgttagcattgacttgtgtatcttttcagagatacctgtatatattcaagcacataagcactaactctactacctccacactttttcgagaatggcatattttaatccttttttttgcattctggaattatcatgtaaaatttattgtggagattgctccatattagtacattaaacattcgctcatttttataacaactttttaaaaattttaaaatgtagcacatagaggtaagactacttaacatataaatttatagtttcaataataataataacacaagcacttaccacccaggtgagtaaaatagtaacccaggttaagaaatagtataattctagggatttagaacccccgggtgat

SEQ ID NO: 115412 - DNA, 561 bp, Homo sapiens
atgtcttaacgacactgctgtttgtaagattagtctcattaaacatattttagtatctgctctttctcttctattgaattgctctttctcttgtggtattgaacaggttagatgcaaaggtgaaagaagtcaatataatagatggaagctgaacagaagaattggtaaattttaaatccactgtcaggaatgatagcttgcaaagtacaatttaagtgaacatttcagaagttaagatacattagacatagtcattacctttgaggacattacggtctgctgttcacatacagataaagagctaaatttgaacattattaaatgtctgacattattttttaagataatgtggtccttgaaggattcagaaaaacaatatgagatttctttatgatggctctttaagctaatactttatagtatgtggcaaggatagaaaagtaaaaattcaaagaacacagaygatatctgaaataagccaatggtctctataaacagaaatggaacagaaaagtgaagcaggacaaaaatcaagagatggctacaagtctgccacaagcc

SEQ ID NO: 115413 - DNA, 567 bp, Homo sapiens
tgactacagctgcacaaaaacaagtccaaaatgcgtcttctaaaatagaygtttgtgttccgtaatttttcagttccatcagacacaagcacctttcaactaataaataaattgacattttcccttttactatactaaaatgaaattcagagataaaaataaacctttatgaatcttatggcatggtcaccctaaaatgtttaattgattagatgctttcaccggtttacagtgaatatattttttatttaagttaaaatgcctagaaattagtcttcatggaaacaaaggaaaatgaaaagcaaaggtaggtgggcattgaaacataaacatttattaggataagtaataataaattagacttacttgtctatgatgagaaaaagggtaaaataaaaaaaggccatgccaaaatgatatattattgactaccaaagtgaaaaaattaaggtgtgaaatacctagctcatgttgtcaacaaaggtgttaacatgttaaactgagtatataccataaattgcatatagatacagacataggtataaatgtatagagatatataataaa

SEQ ID NO: 115414 - DNA, 567 bp, Homo sapiens
tgactacagctgcacaaaaacaagtccaaaatgcgtcttctaaaatagatgtttgtgttccgtaatttttcagttccatcagacacaagcacctttcaactaataaataaattgacattttcccttttactatactaaaatgaaattcagagataaaaataaacctttatgaatcttatggcatggtcaccctaaaatgtttaattgattagatgctttcaccggtttacagtgaatatattttttatttaagttaaaatgcctagaaattagtcttcatggaaacaaaggaaaatgaaaagcaaaggtaggtgggcattgaaacataaacatttattaggataagtaataataaattagacttacttgtctatgatgagaaaaagggtaaaataaaaaaaggccatgccaaaatgatatattattgactaccaaagtgaaaaaattaaggtgtgaaatacctagctcatgttgtcaacraaggtgttaacatgttaaactgagtatataccataaattgcatatagatacagacataggtataaatgtatagagatatataataaa

SEQ ID NO: 115415 - DNA, 528 bp, Homo sapiens
attcttttccaagatacagatcttcacacacatctgaagatagttacccagagatatactaggtatcttctcaagtaagaaacttgtcaatttgtatcttggaaacgacaacaaataaaaatgcaaagaattgcttcactgcatatgcacaatatgtagagttttgctaagcttcttttgagaaagttcagaaacattgcaaagcagactatcagtagagcaaaattctccacagtgtaattatggaaaatacaggctagaattacactgtattgtctcttgtgttgcttgtgacacactctctgaaagcccactctatatatttatcttctgataatgcataaaatattttagttagtgactgctatgacaactatttagtaatttgataagatacacaakttttaaattttttatttgtcaatttaaaacagcttagatctaagctagaagttttgaatctactggtactctagttacctcctgtactatataatttcatacttaattttatatgatgggctaaaa

SEQ ID NO: 115416 - DNA, 640 bp, Homo sapiens
  misc_feature (1)...(640): n = A,T,C or G
acttggcctttgttgatgaaggaagtactggtgcatccctgatgatgtgcagrgcatggggttctcagggtcctatcctgtgatctcctgccaagccagctggaggagggaaagctggttcagcccggaccaggcaagctggcaaccaggctctccatggcgggtcaaacattggcctttgttgggatctaggggcagctctcaggcaactgcaactacccaccagggtggagtggaggcacctctgctgcaccacagagttaactcaggtgaagaaaggtggctggggtttttagcccagcagtttgccatggggccaaaccagctcccactatcctgacctagcaggtctcctttcagcatctggtccccagcagtgggtccaaccagttaggctagtcccaagccatctatgcccacatcatgaggccttccagttgttccagactgtgagactctctgtggaagaaaccacagctatcaggccacatccctctctgtccagcctcacaaaagacctaaattcttgaatgctatctttgggaccagattccacatccccaaatgccctctttccctgaaaagagccaggggaggttgggggctattttntgagcaatcccaaacatcacaagagaca

SEQ ID NO: 115417 - DNA, 640 bp, Homo sapiens
  misc_feature (1)...(640): n = A,T,C or G
acttggcctttgttgatgaaggaagtactggtgcatccctgatgatgtgcagggcatggggttctcagggtcctatcctgtgatctcctgccaagccagctggaggagggaaagctggttcagsccggaccaggcaagctggcaaccaggctctccatggcgggtcaaacattggcctttgttgggatctaggggcagctctcaggcaactgcaactacccaccagggtggagtggaggcacctctgctgcaccacagagttaactcaggtgaagaaaggtggctggggtttttagcccagcagtttgccatggggccaaaccagctcccactatcctgacctagcaggtctcctttcagcatctggtccccagcagtgggtccaaccagttaggctagtcccaagccatctatgcccacatcatgaggccttccagttgttccagactgtgagactctctgtggaagaaaccacagctatcaggccacatccctctctgtccagcctcacaaaagacctaaattcttgaatgctatctttgggaccagattccacatccccaaatgccctctttccctgaaaagagccaggggaggttgggggctattttntgagcaatcccaaacatcacaagagaca

SEQ ID NO: 115418 - DNA, 502 bp, Homo sapiens
tgggttcatcaggtctgagttggggccttagagtcgacatttctaacagatttccaggtgcttctcatgctgtagtgagcagatcacattcgcagcagcaaggctgtgtttctatatttggtactaataaatgacaagctcccagcatctggctgtaattttctattaattagaaatggccatcaaacagttggagggaggagagtaaggttggttagaataagggtggttagagcattgacataatttttcagaggccacgtgagttgattggaccagagacatgataaaattataagcagtacattgagggcctcccagtatgtgttgtgaccaatttataacagaacttgcctctgctgatgggyctctttccacattctctgtccagagaaaatgcacggttggtttcatccaagattagggttgtgtgtggagatacaatgcaaaaacaacagagagtcaagaatgtatgttattactgaaaaggtgctccatgtaa

SEQ ID NO: 115419 - DNA, 447 bp, Homo sapiens
tttctcactccttctctgggattgaaatgaaattcgacaagtaagtttacctctcaagctttattttctaagaatctcagtttagatacacatttttaaacttgtttttggctataaactacattaatttaaaacataaaaccaacttaaatttctaatatatatgatattataaaatattctgtacataatgattacattactcaatatcaattcctgccatacccagttttatctcactyaagggcaaaaatttatgcaccactcagttattgaccaagtgagaaactgtattaggaagtttaccctcttcagtggctgatcctagttgtgtttctggaggtcagactagagctagaatcaataataggtgcatatctctgcagtgtctgtcctgtgttccaccttcttttgaagaatttatgactgcccttctcccttggttcc

SEQ ID NO: 115420 - DNA, 447 bp, Homo sapiens
tttctcactccttctctgggattgaaatgaaattcgacaagtaagtttacctctcaagctttattttctaagaatctcagtttagatacacatttttaaacttgtttttggctataaactacattaatttaaaacataaaaccaacttaaatttctaatatatatgatattataaaatattctgtacataatgattacattactcaatatcaattcctgccatacccagttttatctcacttaagggcaaaaatttatgcaccactcagttattgaccaagtgagaaactgtattaggaagtttaccctcttcagtggctgatcctagttgtgtttctggaggtcagactagrgctagaatcaataataggtgcatatctctgcagtgtctgtcctgtgttccaccttcttttgaagaatttatgactgcccttctcccttggttcc

SEQ ID NO: 115421 - DNA, 589 bp, Homo sapiens
cacccgcctcggcctcccaaaatgctgggattataggtataagccactgagccggccaattttttacactcttaagggcatttgagatcaattgactgatctttgagagagaagtccagctgatgaataaaacagacatattttgaaattggaactcctattaacacctacttatcccttcctccaaataagaaagttatatttaaatacacacacacacacacacacacacacacacacacasagagagagagagagagagagagagagagagcgaatagtaagaatttgtattcttgttttgtcactcttttaattctcaaatataagatcttttcttttaattgttcgctcaaagtttcagttagccaaatttctaaaatgtgataatcacgctgccaaaaaccagccacagttttgattgacaggtctaacaccatgttatgagtgtgtatggtgtctatgctttctgttagaggtattaatattatttgagatattacttttttgcatagtgactttgagctgctagcaccttgccattctccatgagagtttgatttgatgaaaacataaaatttggttataa

SEQ ID NO: 115422 - DNA, 545 bp, Homo sapiens
tcaggtatttctttatagcagtgcgagaatggactaataatacaacctgattttcaaactttattatgktcttttttgagacgtaattcacatatcataaaattcaccactttataggataaaattcagtagttttaattatattaacaaaattgtgcaatcgtcaccactacctaattccagagtattttcaccaggccaaacagaacccacttacccattagcagccatttcctttctctccctccccacttcaaactctggtaaacactgatgtactttttatctctattgatttgtctgttttgtatgtttcatataaagtgaattgtaccatatgcggtcttttgtgtctggcttctttaacttggcataatgtattcaatgttcatctatattttgatatgtatcagcattttgttcctttgttgttgaataatattccattgtatagatatgctgcattttgtttagtcattcatgaatggatgggcattttggttgcttacacttcttggctattttgagtaatgcttcaatgattc

SEQ ID NO: 115423 - DNA, 634 bp, Homo sapiens
ttactatgcattgcttgcatgcctgtgtcaaagtatctcatgtacctcataaatatatacacctaccatgtgcctgcaaaagttaaaaataaaaaaacagatataacatgtatggayacagggacagaatgattcaggggctgtaatagtgttccattgtgtacatatcctacattttctttgtccactcatctgttggtgtcacttaggtgattccatacattagtgattatgaataatacttgcccttttctttcatttatttttatatttttctttcttttcctttccttttttattcctagaagtattttaattttaaaatataaattatgattgtgttaattaccttcattttgatgccttttttgattaatatttttggggattgaagaaatgagtattttttaatgtatctaacatcaaggctcttatttgtttctccattattagtgacaaaatagtgaccaaaatcaaccttgatcagtgaaacaattgtgtagcccccaatccttccctatcctacacaacatgaaagctacatctttgtgtcagctctctaagttggatggaagaagcttctgataaaattgatcagcatggaattttgtaaaatttaactattttttggcct

SEQ ID NO: 115424 - DNA, 634 bp, Homo sapiens
ttactatgcattgcttgcatgcctgtgtcaaagtatctcatgtacctcataaatatatacacctaccatgtgcctgcaaaagttaaaaataaaaaaacagatataacatgtatggacacagggacagaatgattcaggggctgtaatagtgttccattgtgtacatatcctacattttctttgtccactcatctgttggtgtcacttaggtgattccatacattagtgattatgaataatacttgcccttttctttcatttatttttatatttttctttcttttcctttccttttttattcctagaagtattttaattttaaaatataaattatgattgtgttaattaccttcattttgatgccttttttgattaatatttttggggattgaagaaatgagtattttttaatgtatctaacatcaaggctcttatttgtttctccattattagtgacaaaatagtgaccaaaatcaaccttgatcagtgaaacaattgtgtagcccccaatccttccctatcctacacaacatgaaagctacatctttgtgwcagctctctaagttggatggaagaagcttctgataaaattgatcagcatggaattttgtaaaatttaactattttttggcct

SEQ ID NO: 115425 - DNA, 634 bp, Homo sapiens
ttactatgcattgcttgcatgcctgtgtcaaagtatctcatgtacctcataaatatatacacctaccatgtgcctgcaaaagttaaaaataaaaaaacagatataacatgtatggacacagggacagaatgattcaggggctgtaatagtgttccattgtgtacatatcctacattttctttgtccactcatctgttggtgtcacttaggtgattccatacattagtgattatgaataatacttgcccttttctttcatttatttttatatttttctttcttttcctttccttttttattcctagaagtattttaattttaaaatataaattatgattgtgttaattaccttcattttgatgccttttttgattaatatttttggggattgaagaaatgagtattttttaatgtatctaacatcaaggctcttatttgtttctccattattagtgacaaaatagtgaccaaaatcaaccttgatcagtgaaacaattgtgtagcccccaatccttccctatcctacacaacatgaaagctacatctttgtgtsagctctctaagttggatggaagaagcttctgataaaattgatcagcatggaattttgtaaaatttaactattttttggcct

SEQ ID NO: 115426 - DNA, 619 bp, Homo sapiens
gtttctgttatagctactgaactctgctgttatagcaggatagcagccacagacaaaatgtaagcaaatgatgatagctgcgtttcaataaaactttatttacaaagtaggtagtgggctgttttgacacatgggctgtgctttgcaaacccctgccctagcccctagcaactgctttttgctttgtctgaggaaaaaaaccctatctatttcaaaaatcaaaatcagcaaggcacagcggctcacgcctgtaatcccrgcactttgagaggctgaggcaagaggatcgcttgagtgcaagaattcaggaccagcctgggcaacatagtgagacactgtctctacaaagaaaaaaaaataggtggatgtggttgcacctgcctatagtcccagctgctcaggaggctgcggcaggattgctcgagcccaagaggtccaggctgaagtgagctgtgattgtccattgcactccagcctgagtgacagagcaagaccttgtctcaaaaaagaaaaataaaataaaaaagcattaagtgggccccaatatgtacaaggcatggtgctaggccctcaatcatgaataacacatagtttgccttccagaacctcacagtctaga

SEQ ID NO: 115427 - DNA, 619 bp, Homo sapiens
gtttctgttatagctactgaactctgctgttatagcaggatagcagccacagacaaaatgtaagcaaatgatgatagctgcgtttcaataaaactttatttacaaagtaggtagtgggctgttttgacacatgggctgtgctttgcaaacccctgccctagcccctagcaactgctttttgctttgtctgaggaaaaaaaccctatctatttcaaaaatcaaaatcagcaaggcacagcggctcacgcctgtaatcccggcactttgagaggctgaggcaagaggatcrcttgagtgcaagaattcaggaccagcctgggcaacatagtgagacactgtctctacaaagaaaaaaaaataggtggatgtggttgcacctgcctatagtcccagctgctcaggaggctgcggcaggattgctcgagcccaagaggtccaggctgaagtgagctgtgattgtccattgcactccagcctgagtgacagagcaagaccttgtctcaaaaaagaaaaataaaataaaaaagcattaagtgggccccaatatgtacaaggcatggtgctaggccctcaatcatgaataacacatagtttgccttccagaacctcacagtctaga

SEQ ID NO: 115428 - DNA, 619 bp, Homo sapiens
gtttctgttatagctactgaactctgctgttatagcaggatagcagccacagacaaaatgtaagcaaatgatgatagctgcgtttcaataaaactttatttacaaagtaggtagtgggctgttttgacacatgggctgtgctttgcaaacccctgccctagcccctagcaactgctttttgctttgtctgaggaaaaaaaccctatctatttcaaaaatcaaaatcagcaaggcacagcggctcacgcctgtaatcccggcactttgagaggctgaggcaagaggatcgcttgagtgcaagaattcargaccagcctgggcaacatagtgagacactgtctctacaaagaaaaaaaaataggtggatgtggttgcacctgcctatagtcccagctgctcaggaggctgcggcaggattgctcgagcccaagaggtccaggctgaagtgagctgtgattgtccattgcactccagcctgagtgacagagcaagaccttgtctcaaaaaagaaaaataaaataaaaaagcattaagtgggccccaatatgtacaaggcatggtgctaggccctcaatcatgaataacacatagtttgccttccagaacctcacagtctaga

SEQ ID NO: 115429 - DNA, 595 bp, Homo sapiens
taattgactcacagttccacatgactgggaagtcctcaggaaacttacaatcattccagaagatgaaggagaagcaaggcacatctgacatggtggcaggagaaagagcraggggaggaagtgccacacttttaaactatcagatcttgtgagaactcactatcatgataacagcaaaggggaaactgtccccatgatccagtaacctcccaccaggtcccttccttgacacttaggggttaaaatttgaattacaatttgagatgagatttgggtggggacacagagacaaaccatatcattctgcccctggcccctcccaaatctcatgtccttttcacatttcaaaacacaattatgccttcccaacagcctgccaaagtcttaactcattccagcattaacccaaaagtctaagtccaaagtctcatcagagataagggaagtcccttccaactacgagcctgtaaaatcaaaaacaaattagctacttccaagatacaatggaggtacagacattgggtaaatgtttctgttccaaataggtaaaactggccaaaacaaaggggccacaggcactttgtttataagtctg

SEQ ID NO: 115430 - DNA, 495 bp, Homo sapiens
tcattgatctggacaaaaatttttgtgtaaggcctcaaaagcrtaggcaaccaagccaaaaatgaacaaatgagattatatcaagctaaaaagcttttaaaagcaaataaaataatcaacacagtgagagacaacccacagaataagaagaaatatttgcagactatccatctgacaagagattaataaccaggacatatagtaaactcaaacaacttgataaaaaatttaaaaacctaataatttgcttaaaaatagggcaaaataatcaaatagaaacttctcaaaagacatacagccaacaagtttattaaagaaaagtcaacattactaattatcagagaaatgcaaatcaaaaccacaatgagatataatctcatgccagttaaaatggctttcatcaaaaagacagggaataatggatggtagaaaggatgtggaaaaagtagaaccatcatatgctgtttgtgggaatgtaaattaatatagccactt

SEQ ID NO: 115431 - DNA, 476 bp, Homo sapiens
caccaacttgcatctttctagttaactttttttggtgccctaacttctataacccacctttaagacatacaacttatcccccaatatttttatatctctaagtacgttcacatttacattctcctygctttgacaccttttccctttacattcttaattaatgaccttcctatttttctgagaaaatctaagcaaatatctatatttcaagttataaaattgatcacagaaaccttaaataatttctcatggtaaacataattcaaattgaagttctgtgttcttaatatttgtattatccagctacagccaaaataatgctgacaaaaaatgacccctaaactcagtggctagttgttttaaacagtgttttttttttcatgtttctgggcgtccaggtgtgctgcaattaagccagtttaggtgactaggatgggcaactatatattacatgatgatttgtacctgggctgcta

SEQ ID NO: 115432 - DNA, 610 bp, Homo sapiens
atgtgcctataatcccagctacttgggaggctgaggcaagagaatcacttgaacccaggaggcagaggttgcagcgagccaagatagcactcctgcactccagcctggatgacagagcgagactccatctccaaaaaaaaaaggaaaagaaaaagaaaaagaaaattgctgtgaacaatttgaattttttgaactatatgacctgcctaggtgatttgtcggaggttataacaatcytgcttctctgcacatcctagggaagttatctgaataagatcgtgtagtgtgtagtaaaggaaaatattgacagtttaccctcatggttgaattaatttttcaattatgttgtcaaatagtcactttttctgtcaagtggaatcttctctctttcaatgtcgtctgaattttttaccggacatggtaaccttatagtatcttttcagtgtcttccaattcataaactaggcagcagaatgatatagtgacatattttgctaacagcttctaatttggaaaacaagtgacattagctttaaaattgcacatctggaaaagttcacagatgaacagttttttttttttttctttaagtggccagattaaggagaca

SEQ ID NO: 115433 - DNA, 610 bp, Homo sapiens
atgtgcctataatcccagctacttgggaggctgaggcaagagaatcacttgaacccaggaggcagaggttgcagcgagccaagatagcactcctgcactccagcctggatgacagagcgagactccatctccaaaaaaaaaaggaaaagaaaaagaaaaagaaaattgctgtgaacaatttgaattttttgaactatatgacctgcctaggtgatttgtcggaggttataacaatcctgcttctctgcacatcctagggaagttatctgaataagatcgtgtagtgtgtagtaaaggaaaatattgacagtttacccycatggttgaattaatttttcaattatgttgtcaaatagtcactttttctgtcaagtggaatcttctctctttcaatgtcgtctgaattttttaccggacatggtaaccttatagtatcttttcagtgtcttccaattcataaactaggcagcagaatgatatagtgacatattttgctaacagcttctaatttggaaaacaagtgacattagctttaaaattgcacatctggaaaagttcacagatgaacagttttttttttttttctttaagtggccagattaaggagaca

SEQ ID NO: 115434 - DNA, 610 bp, Homo sapiens
atgtgcctataatcccagctacttgggaggctgaggcaagagaatcacttgaacccaggaggcagaggttgcagcgagccaagatagcactcctgcactccagcctggatgacagagcgagactccatctccaaaaaaaaaaggaaaagaaaaagaaaaagaaaattgctgtgaacaatttgaattttttgaactatatgacctgcctaggtgatttgtcggaggttataacaatcctgcttctctgcacatcctagggaagttatctgaataagatcgtgtagtgtgtagtaaaggaaaatattgacagtttaccctcatggttgaattaatttttcaattatgttgtcaaatagtcactttttctgtcaagtggaatcttctctctttcaatgtcrtctgaattttttaccggacatggtaaccttatagtatcttttcagtgtcttccaattcataaactaggcagcagaatgatatagtgacatattttgctaacagcttctaatttggaaaacaagtgacattagctttaaaattgcacatctggaaaagttcacagatgaacagttttttttttttttctttaagtggccagattaaggagaca

SEQ ID NO: 115435 - DNA, 524 bp, Homo sapiens
gcactcctgcactccagcctggatgacagagcgagactccatctccaaaaaaaaaaggaaaagaaaaagaaaaagaaaattgctgtgaacaatttgaattttttgaactatatgacctgcctaggtgatttgtcggaggttataacaatcctgcttctctgcacatcctagggaagttatctgaataagatcgtgtagtgtgtagtaaaggaaaatattgacagtttaccctcatggttgaattaatttttcaattatgttgtcaaatagtcactttttctgtcaagtggaatcttctctctttcaatgtcgtmtgaattttttaccggacatggtaaccttatagtatcttttcagtgtcttccaattcataaactaggcagcagaatgatatagtgacatattttgctaacagcttctaatttggaaaacaagtgacattagctttaaaattgcacatctggaaaagttcacagatgaacagttttttttttttttctttaagtggccagattaaggagaca

SEQ ID NO: 115436 - DNA, 559 bp, Homo sapiens
agcaaaccaactctaaagctagcagaaaataagttaagcaaaagcagagctgaactgaaggaaattgagatgtgagcatgcctatcaaagaatacaaaaccaaaagtttgttatttgaaagaataaatcagatttgatagctagctagatagatttttaaaaagagagagatccaaataaacacaatcagaaatgcaaaggtgacattaccactgaccccacagaaaagcaaaaatagtcagagaccattcaaacacctctgcacacaaactagaacacctacaagagatggataaattcctataaacatacaacctaagattgaaccaygaaaaaagtgaaatcgtgaacagatcaataacagttccaaaattgaatcagttatgaaaaaaaaaagaaaagaaaagaaagaaactaccaaccagaaaaggccctggaccagataaatttacagttaaattctaccagatgtgtaaagaagagctagtaccagccctactgaaaatattcctaaaactgaaggaggggggactcctccccaactcattctatgaggcta

SEQ ID NO: 115437 - DNA, 567 bp, Homo sapiens
atttcttttcttctactaactttagatttggttttttcttgtttttctagttctttaagatgcatcattacgttgtttatatgaagtttttcttcttttctgatgtaggctcttaccataataaatttcccttttagtacttttttgctgtttccctcccttaggttttgttatgttgtgtttccattttcatttgtttcaagaaatttttcaattttcttcttaattttttcattgatccactgrccattcaagagcatattgtttaatttccatgtgtttgtatagtttccaaatttcctcttcttattgatttcaagttttatcccatgtggtcatagaaaatgcttgatattatttcaaatgttttacaacttgttttgcaacctaaaatatggtctatccttgagaatgactatgttctgatgaaaataatgtgtattctgcagtagttggatgaaatattctgtaaacatctgctagatccatttggtctatagtacagattaagtctgatgtttctttgttgattttctgtctggatgatctatccaatgctaaaagtgt

SEQ ID NO: 115438 - DNA, 567 bp, Homo sapiens
atttcttttcttctactaactttagatttggttttttcttgtttttctagttctttaagatgcatcattacgttgtttatatgaagtttttcttcttttctgatgtaggctcttaccataataaatttcccttttagtacttttttgctgtttccctcccttaggttttgttatgttgtgtttccattttcatttgtttcaagaaatttttcaattttcttcttaattttttcattgatccactggccattcaagagcatattgtttaatttccatgtgtttgtatagtttccaaatttcctcttcttattgatttcaagttttatcccatgtggtcatagaaaatgcttgatattatttcaaatgttttacaacttgttttgcaacctaaaatrtggtctatccttgagaatgactatgttctgatgaaaataatgtgtattctgcagtagttggatgaaatattctgtaaacatctgctagatccatttggtctatagtacagattaagtctgatgtttctttgttgattttctgtctggatgatctatccaatgctaaaagtgt

SEQ ID NO: 115439 - DNA, 405 bp, Homo sapiens
ttttagaagaaagtctacaaaaataattgattttcccccttttatcagttttctttttttctttgttcttttttttttttgagacagagttttgctcttgttgcccaggctggagtgcagtggtgcgaacttggctcactgcaacctccacctcatgggttcaagtaattctcctgcctcagcctcccgaagtagctgggattacaggcgcctgcccagctaattttttttttttttttttttttttgkatttttagttgagacggggtttcaccatgttggccaggctgatcttcaactcctgaccttaggtgatccacccgcctcagcttcccaaagtgctgggagtacaggtgtgagccaccgtgcccggccaccagttttcagataatgcattggctccct

SEQ ID NO: 115440 - DNA, 402 bp, Homo sapiens
ttagaagaaagtctacaaaaataattgattttcccccttttatcagttttctttttttctttgttcttttttttttttgagacagagttttgctcttgttgcccaggctggagtgcagtggtgcgaacttggctcactgcaacctccacctcatgggttcaagtaattctcctgcctcagcctcccgaagtagctgggattacaggcgcctgcccagctaattttttttttttttttttttttttggatttttagttgagacggggtttcaccatgttggccaggctgatcttcaactcctgaccttaggtgatccacccrcctcagcttcccaaagtgctgggagtacaggtgtgagccaccgtgcccggccaccagttttcagataatgcattggctccc

SEQ ID NO: 115441 - DNA, 617 bp, Homo sapiens
tatccatacttagttactttttattccctaatagaatgccattgyatgaatagacattttatttacccattcaccaattaatgtatgtttgagttgcttccactatttggctattatgaataatgctgctatgaacactcacatacaaatctttgcatatacccttttttgtatgtgatatggtttggttccctgtccccgttccaatctcatgttgaatttgtaatccccaatgttggagatggagccagatgggaggtgactgaatcatgggggtggatttccccttagtgccattcttgcaatagtgagttcttgtgagatctggtcatttaaaagtgtgtggcacctcttcccttttgctcttcctcctgctccagcaatgtgaagtgctggctcccccttgccttctgccatgattataagtttcctgaggcttccctagaatctgagcagatgccagaatcatgcttcctctacagcctacagaaccatgagccaattaaacctcttttctttataaattacccagtctcaggtatttctttatagcagtgcgagaacgaactaatacagtatgtcattcttaagacttcacagcatagatatatagcatg

SEQ ID NO: 115442 - DNA, 617 bp, Homo sapiens
tatccatacttagttactttttattccctaatagaatgccattgtatgaatagacattttatttacccattcaccaattaatgtatgtttgagttgcttccactatttggctattatgaataatgctgctatgaacactcacatacaaatctttgcatatacccttttttgtatgtgatatggtttggttccctgtccccgttccaatctcatgttgaatttgtaatccccaatgttggagatggagccagatgggaggtgactgaatcatgggggtggatttccccttagtgccattcttgcaatagtgagttcttgtgaratctggtcatttaaaagtgtgtggcacctcttcccttttgctcttcctcctgctccagcaatgtgaagtgctggctcccccttgccttctgccatgattataagtttcctgaggcttccctagaatctgagcagatgccagaatcatgcttcctctacagcctacagaaccatgagccaattaaacctcttttctttataaattacccagtctcaggtatttctttatagcagtgcgagaacgaactaatacagtatgtcattcttaagacttcacagcatagatatatagcatg

SEQ ID NO: 115443 - DNA, 612 bp, Homo sapiens
tactagtcacacaattaatgactatttcactctcaaacgtacaacctgttctataaataaaatagcactctgctgtaattattcaaatggggatatttaggttgtaaaaaataatataccctttatgtcttgttaaacaaccttgcccgtgatggacaaagtttttggtttctctagatataaaatgaaaatgttattcagaattttcacttatatagtactcttaatgaaatgcacatttctttcaaaaatactatggcagggaataatcytaaatgagaagctcaaaccaagaatggaattttataatagagtgctgagaggtataaaatagtaattttaatggtgtggtatttaatggtgtcttaataacaattcgttggttaatggctataaaaatgaatattaattactcggttcaatactctgcataactgagctcctatcgttccaatggacaagtaatttgtctccatctccaacactgactttttgcttgagttcacacaaactcaaataccacctatccaataactgatcattgtttctaggtatatgtggaaatgatattaaaccctgcaagttacacaaaagaaggaataaagaatatgg

SEQ ID NO: 115444 - DNA, 502 bp, Homo sapiens
tgatcatcataggtacaggtagaaggagggagttaaatacgtgaaacacaggattttgtgtggtgaaaacaatacatatggtattgtaatggtggatgcataaaattatrcatttgtcaaatgtcacaaaattttacagcacaaagaatgacacattgtatgcaaattaaaacaaatcatttggtagatgggagaatcttaggaaggaatgaagatggttacaaataaatcaaactgtattacaaatgtatgaaaaaactttggtgaagaggcttggcaggtggggggaaatggttaactatctagctttggatatgagtagagtcagtaagactgaatacaaaaggaactgcacataagcagtggcaaaaatctaaagaaatctaaataaactctgggggcctggcacggtggcttacatctgtaatcctagcactttgggagaccaaggtgggcagactgcttgagcccaggcatttgagaccagcctgggcaagatggc

SEQ ID NO: 115445 - DNA, 601 bp, Homo sapiens
ttcactgttttttttttctgtcaatgatttatatcacagatcttagcatcaaaatagatgggtctgaattctcattatgttacttacagctttggaatcaaggcaagttatctagcctctttgaacctcagtttacacatacaaaaaatgatgatagtagttcctacttcataacattattttgaatattagacgagctaatttaggacagaattagcacatagcaggtcattaatgaatgtcagggatcattattgacaaatgtgcaattgttacaaacttccacatgaaatgttaacatctacataaataaatgagaaggtcagatataattagtgctattaaaaatataaaggaggtagaaagtcaggccaaaggttgaaggaagctgctttgattaggatcgcttgggactgggagggcctctgcaaaggggttatatccatgatgagaagaaacatccccatgaagatmtgagagaaaagaatccaggaagaaaaaacagcaaatccggtgtcccagaagttaggagaagagcacctttcaaaaaagaagtaggcccatcaggcatataaagtgagcctaaggggtcaagtttcat

SEQ ID NO: 115446 - DNA, 475 bp, Homo sapiens
ggaattctcattgttcctgctggcaccctcttggttgaagtacctgcagtgatagcccaaggcctgtttccctctgagtactcacttggcccaagggaaacatatcatccttgccataccccatagtgggagttcagactgactcactgctgccttctctttctgtgttattatggattgtggtctcccttcagaattttccagaaaaggggctcatragtctctatgttcatatatgcctcactctactgaggatacatgtcaggtttgctcaagaaccctgttgctgtattctgctctgacgacacagtgaggtgggctaaccaggttctgcatttctgcaagtgtacagtttaagaatgagaggccagtctcctttgttcactctccattctccttcagtgtttctcctgatcaccatccgtttagcttgaaggagtaggtgcaccttccactccatttataaggccaccac

SEQ ID NO: 115447 - DNA, 487 bp, Homo sapiens
gaattctcattgttcctgctggcaccctcttggttgaagtacctgcagtgatagcccaaggcctgtttccctctgagtactcacttggcccaagggaaacatatcatccttgccataccccatagtgggagttcagactgactcactgctgccttctctttctgtgttattatggattgtggtctcccttcagaattttccagaaaaggggctcataagtctctatgttcatatatgcctcactctactgaggatacatgtcaggtttgctcaagaaccctgttgctgtattctgctctgacgacacagtgaggtgggctaaccaggttctgcatttctgcaagtgtacagtttaagaatgagaggccagtctcctttgttcactctccattctccttcagtgtttctcctgatcaccatccrtttagcttgaaggagtaggtgcaccttccactccatttataaggccaccacactttccctttag

SEQ ID NO: 115448 - DNA, 510 bp, Homo sapiens
gggaatcatttcttttctcagcaaaagagaagattctgagagccgtcatgtaggtttacattctagatgagtcggaaggaaagcgacacctttatctagggggaaaggatgattgattctaaattgggaagaaaggatttaaggaagggagcctacactaagagaatatcctaatacggttttaaaagcgtgtatcttcttcagttgtcctgcaatgyccttttaagctggcttacacataaagaaaccagaaagatgaatatattacacatcataaaattagaggctaataagcataataagaaaattatgtccattgcaaaatagccaactagaaaccaggggctgccaagtgttttctttaagtgcacaggaatattttccagtctaagtgatataataaagtcctgccttggttatactcaaataacaaaatccagtattgaatttggtgatatctaaagacctagatccactgtccctccagggccggatgaaagaaaagaattc

SEQ ID NO: 115449 - DNA, 592 bp, Homo sapiens
aatctaccttctgtctctacaatttgcttattctggatatttcacataatttgaataatataatatgtggctgagttctttcacttagcataatatttttgggtttatttatgttgtagcatatatcaacacttcaatcctttttattgccattattattttgttgtataggtataccacatgttatttctccattcatcagyttcttgacatttgtttttttctaatttttggctattgtaaataatactgctacaaatggttgtgcacagagttttgtatggacatatgttttcatttatcttgggtatattcctagggggaatttgctgagtcatacggcaactctatgtttatcttttgaggaactgccaaactgttttctgaagcagctacattattttgctttcctacctgcagtacactagagcttcaatttctttacatcctagccagctgtgctattttctatcttatatgatagctccagtaaaattttaataggaatggtaaaagtggacatagctacctgtttctcttcttagagagaaagtattcagtctttcaccatcaagtgttatattacctatag

SEQ ID NO: 115450 - DNA, 592 bp, Homo sapiens
ctatgaccttaatcaccatatttgattaattattttatcyattttaatggaaataaatgggctgtggataatgtaaagctttggaagctgcacacaaataaatgaaatggggcaatcagtcatagagagtttcatttagttttctctagatgagtgctccaggaggatggctgtctagagcaggggaagggtctggggcaacattcagaaggctggtgaaaatgaaagtcacagtgacacaagaaaacaccatcttgtggtaagtcagttggagcagaagaggtagccatttatcttttagatgaaatctgtggctggagtatcggattccaaactccacagcgttgtccctagccagccaatcttccccaccacatgaaatgtgtggaaatatacgcacagggggccagccagagcagaggaaccctttattaccaggggggctttcacccagaccctaacaaggaacttgagtgagctagactgcccatgtgggtcacagaaattcgattcaggaacattgggctaggctgcagaggaccactgtgcccaaaggcatgccctgctcccgggaggctggttgcagaaagga

SEQ ID NO: 115451 - DNA, 592 bp, Homo sapiens
ctatgaccttaatcaccatatttgattaattattttatctattttaatggaaataaatgggctgtggataatgtaaagctttggaagctgcacacaaataaatgaaatggggcaatcagtcatagagagtttcatttagttttctctagatgagtgctccaggaggatggctgtctagagcaggggaagggtctggggcaacattcagaaggctggtgaaaatgaaagtcacagtgacacaagaaaacaccatcttgtggtaagtcagttggagcagaagaggtagccatttatcttttagatgaaatctgtggctggagtatcggattccaaactccacagcgttgtccctagcyagccaatcttccccaccacatgaaatgtgtggaaatatacgcacagggggccagccagagcagaggaaccctttattaccaggggggctttcacccagaccctaacaaggaacttgagtgagctagactgcccatgtgggtcacagaaattcgattcaggaacattgggctaggctgcagaggaccactgtgcccaaaggcatgccctgctcccgggaggctggttgcagaaagga

SEQ ID NO: 115452 - DNA, 536 bp, Homo sapiens
tataccgaagggatgtctgcacttgcatgtgtattgcagcaccattcacaatagcaaagatgtggaatcaatctaagtattcatcagtggacaaatgaataaagaaaatgtgtcattgatacacaatggaatatcatttagtcataaaaaaatgaaatcctgtcattttcagcaacatgaatggaactggaggtcattatgtcaagtaaaataagccaggcacaaaaaggcaaatgccatatgttatcactaatatgtgagagctaaaaaagttgatctcatggaggtagtgagtagaatgataaatacgagagtctgggaagagtatgtgggtgggagaagagggtgaagagaagttggttaatgggtacaaatatacagttagaagaaataagttctaatgtttaatagcagagtatggtcayggtagttagtaacaatgtattgtatattacaaagtcgctgtaagagaggacttgaaatgttccaaaaacacaaaaataattaataccccaggtgatggatatcccaaatac

SEQ ID NO: 115453 - DNA, 635 bp, Homo sapiens
tcaaaataaaaaaaataagaaagtattaaggcgaagattaaaaaaattttgcattccataatttacacgaaagcaatgctatcacctcccctgtgtggactcggtagacgactgggccattctccttagacagaagtggggtggcttttaggatggcaagggacttcctgtaacaatgcatcccatgatatttggaatgactattaaaaaaaagaacaatgtacaatcaaagtcctcggccacactgtagaactttgggggatgctcgctccaaccgactgctgtcaccttcactgttccagtttttaaatcctgagtcaagccaaaaaaaaccaaaaaaacaaaacaaaacaaaamaacaaataaagccatgccaatcttatcttgtttcctgcacaagttaggttttgtcaagaaaaggtgtaacacaactaagtcacagtccgcctagaagcatttgcggtgaacgatggagggccagactcctcatactcctgcttgctgatccacatctgctggaaggtggacagcgaggccaggatggagcctccaatccacacagagtacttgcgctcaggaggagcaatgatcttgatcttcgtcctgctgggcgccagggcggtaatctccttctg

SEQ ID NO: 115454 - DNA, 636 bp, Homo sapiens
ttctggtacccacccatcttcagctgtttgtaaatacctacggttgatgaggaaatgcatttgttgaaatatactgaagcctgtggattattgtaataatccttttatgctatcaaagatttactgctctttgagcttaccttagttgggtcttgtaaattgagtgttatttgagaacagaacacaggagggcaccagaggacaagaaaacgacaaccaaaaaaaaaaaaaaaaaaaccccaaaaccaaagcactgaacttctggctctagaatagagaccctgctaaatgtatcatctctcagcagtccatttctattaagtcttattctttaaaggccatgaggtatttktaaacacgagagctttccaaactttcattaaaggaaagtgtccctttcccagacaatgcttccagctcagtcagatgcccaagcatgaccagaaggagacatggatgaagagaacccagggggtgtctttgcacacatgatgctctaaagcattttcagatctcctctatgggcccagcaagagtgctgtttctgaggaagaaggcagattgctggacggattcacaaaccacggcagctccaactctcctaccgatgcctttactccaggtgcctcagccagt

SEQ ID NO: 115455 - DNA, 545 bp, Homo sapiens
aatgatgaaggggcaggcatgacagtagttcatgacagcaaacatataggggctgaatctatgacagattctgttctaagtgctttttacatatactatctaggtaatcttccmacagccctatgagttaagtagtattatcactctcactctatatggaaggaaaatgaagtatagggagaataaggggcacataaacaggacagccagggtcccaacccaagcagactggcaccagagcctacctttctaaccacaggctaaggtgagaagagctgagtggaatgctaagtgggagggggtggctagacaggtgtccaggcagaaagaccagaacagaatatgcaggagccctggggaagagaagtcaccctgaagccagaagggagaccaagcatactggtgaaactggagagcatctggtggattggaaatatattttggaactgaacaggatgtgcgcatggatgtagagacgctgatggatgaatggggtataagcaaggaggaggtctcaaggatgactgccagttttctgattccct

SEQ ID NO: 115456 - DNA, 445 bp, Homo sapiens
tggcgcgagctctgcgagaccggagccgcggaggcgggctcggcctgtcctgagggaccccgcgggaggcgtgcccgggagaatgcgcccgcacttggccaagaatgatggctgccatttatggagccttcgctacgtgccaggatcttgatagtcagaatctctggtccttacaaccttccacggtcttactgtaccctttttatggatggagaaattgagccagctcagagaggaccactcacttgccgaaagccacgaaacgagtcggaatttgaacccacgactgattctaaktttctgacctgttttccctgacttggacttggagggactgggttcctaacctgtccttgcctgatggactcacgttctccacggcttgaggcattctcggccttccctctctgtaaggtggtaaaggcagattctaaccggaagcctt

SEQ ID NO: 115457 - DNA, 341 bp, Homo sapiens
gtaatgaattgggaagtatttccttctctttccttccgttttctgaagatattttatataactagttttaattcttttttttgtttgtttttttsaaataggatcttactctgtcacccagactggagtgcagtgatgtgatcatggcttcctgcagcctcaccctcctgggctcaagcaatcctccgtccttggcctcccaaagtgctgggattatcggcatgagccactgagcctggccctgtgttaattcttttgtaaaagtttggtagaattcttcagggaaatcacgtggggctggagattttttttttttcctgagaaatattgtgatacatctt

SEQ ID NO: 115458 - DNA, 341 bp, Homo sapiens
gtaatgaattgggaagtatttccttctctttccttccgttttctgaagatattttatataactagttttaattcttttttttgtttgtttttttcaaataggatcttactctgtcacccagactggagtgcagtgrtgtgatcatggcttcctgcagcctcaccctcctgggctcaagcaatcctccgtccttggcctcccaaagtgctgggattatcggcatgagccactgagcctggccctgtgttaattcttttgtaaaagtttggtagaattcttcagggaaatcacgtggggctggagattttttttttttcctgagaaatattgtgatacatctt

SEQ ID NO: 115459 - DNA, 555 bp, Homo sapiens
tatctcatcaaacctattccattaatttattttagaacttttcatgagagaaaatatacacattcacctagaaaacatggcatcgataatataacacaaaggaaataataactcagtgagaatgcaacaactaataactgctattaatgtttaatctttatttctttttgtatgtatcttgtgttttttgagatgtatgaacaatagaatgtgcattctggctttttcatttatcataaaataatcactgttgtccttggaacaattgatttacttcatggaaagtaatttatgttttcttccaaatatgaacgtgctacttttccaagcttataataataaaatcaagtcttgaaatatcatttttgtccataccttcttaaaaataacatatgtattttaraagcacatttaactgtctaaaactattgggggtcaaccaatcaattgcttccactacacctaaatatcctgtaattatatccacttaggctctctctggacttgtgaaaacttggctaaatttgtcagagtctccacctgggaccactaaca

SEQ ID NO: 115460 - DNA, 607 bp, Homo sapiens
ttgtttggcttcctgaattcaattcatttgcttactctgaaaaaattatcaaacattctacccttgaatatatactctcctcatcttctctacttagctctactgtgtgctacagccaatcacacattatgctgtttataaaggacatacaggatactctcatcctccttatgtcactatcactctcctagtttacctctatttgtccatctgtgaagccttcatgacatatctttatatctattatccaattcacactttctgcagcttcatttcacttgctacacaaagttttcactaaacagcaaattttacttatttcactaatataaattagaatttatatggtaaaagaatttcttaaatgactgccaaatgtgaaaaaattcatgtatatattatatatatttacatatgtatgtgttatatagacatacacaaaattgctattggtaayggccattttcacaggagtctataactactgaagattttatttttcctaaaagatataatatttccttaaagatattctgtttcttaatttataataaagataattcttatgcttttatcaacaatataaattaataggctgggtgcagtg

SEQ ID NO: 115461 - DNA, 630 bp, Homo sapiens
tgtcagtagattccaattctgatgcaagatgccacattatctgcaaattagccctgcttatgaytttccaattaaactggttgcgttccatgttgtggttctacagtctgagatcttcccaaatctcttttatatctcatcccttgatttccttatcaatgggggtctgacacccaaagcgatttgtttctctgatgttcaaattcatagttcttttataggagacgataatgaagcaagtgagatctttttgggcaaaaattcaagaaaaccaagaaagttaaatgaggagagcaggaaaaccaaccagtggattgtaagtattaggccttttccctcagattcagcctcagacagacatgctacaaatgtatccacttaccacttgagtggaaaccatcttggttaggctgtgaggaaggtttttctcatggcttccaatcctgagggtacaatgcagcattgattactgctcagagagagtggtcaggctatggagtagggaggtttggtactaaagactaattgaaaaacttaatactgcaaaaaattatctgtgaaccaccataaattccaatgactctcatgtaggttgtccaatatcaaagggtgtatattgaagaaatgatg

SEQ ID NO: 115462 - DNA, 600 bp, Homo sapiens
tgactcagactctcccactatgctttaaaatttggaaactgtaaatagaaattaattccaaaaaggaagtaataatttttgaataatccaatttgtggattcaaaggattctcatgaactggcttttaaatagaaatagtgatttttatttattttatggctgtagatgttgtaactgcaggtttttccttccaggagtgagtccgtgctgctgcacgtgtcccagcctctgaatctagagctcagtgcagggcccatcactggactgagggacaggctcatccaattctgaggtaagtctccacccatagacagcacttccactatctaaatattattactgttaggaccacataggtaatatttcaccctttatcaratattttacttccttatagacataagtgaacaacataatcatgcaacccttttgtatctgtgtctgtatagtcagatttatagcactaagtttgaaagatagtgaaaaacaaatacattttggcctcatatatactgagtaatgtaatgggaaaaaccagtagtgtagcaaattttaaaaaggagcaaatggaacaatgctcagaatgaaggtgagttagt

SEQ ID NO: 115463 - DNA, 628 bp, Homo sapiens
cataaaactgaatactgtttagctatttaaaagtgcagtgaaacaaggccaatctgcaccactaattctcmagtgtgccatcacacaacaagaataaataggggaatataaaattgtatttctcgccccagggaaacactatattgagagtaacgagatctggttctgtgattccctgggccagcagatctattctatatgctctggagaccaccaagcctcaggatctcttttctgaaaagcaagaaaaagtttggagagccccagtatctcataaccttgatcacatgtctattctttgcactaaaacaagatgaaaacaacaaatcactctaacctagaatagcctttgttttctggcccactttaggtcaaagagataagagactttacatattgatgtagagatatatggtggatttttcctgttttatgcaagcatcacttcctttgttggccctctttccctacttgaagctagccaatagaattctccctcctgttggacagaatgatagatacagtaatggacaaatttcccaagctgaattccactctgagatgttctcctagaacttatataggaaaagatattcccctctcagctacaggaagaaaattattttta

SEQ ID NO: 115464 - DNA, 493 bp, Homo sapiens
aatatcatttggttggaggtaagtaacaatacaatcataaaactgaatactgtttagctatttaaaagtgcagtgaaacaaggccaatctgcaccactaattctcaagtgtgccatcacacaacaagaataaataggggaatataaaattgtatttctcgccccagggaaacastatattgagagtaacgagatctggttctgtgattccctgggccagcagatctattctatatgctctggagaccaccaagcctcaggatctcttttctgaaaagcaagaaaaagtttggagagccccagtatctcataaccttgatcacatgtctattctttgcactaaaacaagatgaaaacaacaaatcactctaacctagaatagcctttgttttctggcccactttaggtcaaagagataagagactttacatattgatgtagagatatatggtggatttttcctgttttatgcaagcatcacttcctttgttggc

SEQ ID NO: 115465 - DNA, 493 bp, Homo sapiens
aatatcatttggttggaggtaagtaacaatacaatcataaaactgaatactgtttagctatttaaaagtgcagtgaaacaaggccaatctgcaccactaattctcaagtgtgccatcacacaacaagaataaataggggaatataaaattgtatttctcgccccagggaaacactatattgagagtaacgagatctggttctgygattccctgggccagcagatctattctatatgctctggagaccaccaagcctcaggatctcttttctgaaaagcaagaaaaagtttggagagccccagtatctcataaccttgatcacatgtctattctttgcactaaaacaagatgaaaacaacaaatcactctaacctagaatagcctttgttttctggcccactttaggtcaaagagataagagactttacatattgatgtagagatatatggtggatttttcctgttttatgcaagcatcacttcctttgttggc

SEQ ID NO: 115466 - DNA, 628 bp, Homo sapiens
cataaaactgaatactgtttagctatttaaaagtgcagtgaaacaaggccaatctgcaccactaattctcaagtgtgccatcacacaacaagaataaataggggaatataaaattgtatttctcgccccagggaaacactatattgagagtaacgagatctggttctgtgattccctgggccagcagatctattctatatgctctggagaccaccaagcctcaggatctcttttctgaaaagcaagaaaaagtttggagagccccagtatctcataaccttgatcacatgyctattctttgcactaaaacaagatgaaaacaacaaatcactctaacctagaatagcctttgttttctggcccactttaggtcaaagagataagagactttacatattgatgtagagatatatggtggatttttcctgttttatgcaagcatcacttcctttgttggccctctttccctacttgaagctagccaatagaattctccctcctgttggacagaatgatagatacagtaatggacaaatttcccaagctgaattccactctgagatgttctcctagaacttatataggaaaagatattcccctctcagctacaggaagaaaattattttta

SEQ ID NO: 115467 - DNA, 617 bp, Homo sapiens
aaagacatgatttcactcctttttatggctgaatatcacaytttcttattttcagtcacctattgatggacacttgattacctatctttgctattgtgaacagtgctgcaataaacatactagtgcaggtatttttttttcaatataatgatttcttttccttaggctatatacctagtaatgagaatgctggatccaatggtagttcctagttctttaagaaatctccacactgttttccatacaggtagtattaatttacattcccaccaagagcctgtaaacgttcccttttctctgcattctcaccaacatctgttatttttggacatctaaatcttaatattagtcattatgacttttgtaagatgacatctttttgtggttttaatttgcatttttctgatgatatggtttggatttgtgttcccacccaaatcgcatgttgaaatgtaatctccagttctggaggaggggtctggtaggatgtgattggatcatggggatggactttccccttgctgttctcatgataatgagttctcatgagatctggttgcaaaaatgtttgtggcactttcccctttactctcttcctcctgctctggccatgtaag

SEQ ID NO: 115468 - DNA, 617 bp, Homo sapiens
aaagacatgatttcactcctttttatggctgaatatcacattttcttattttcagtcacctattgatggacacttgattacctatctttgctattgtgaacagtgctgcaataaacatactagtgcaggtatttttttttcaatataatgatttcttttccttaggctatatacctagtaatgagaatgctggatccaatggtagttcctagttctttaagaaatctccacactgttttccatacaggtagtattaatttacattcccaccaagagcctgtaaacgttcccttttctctgcattctcaccaacatctgttatttttggacatctaaatcttaatattagtcattatgacttttgtaagatgacatctttttgtggttttaatttgcatttttctgatgatatggtttggatttgtgttcccacccaaatcrcatgttgaaatgtaatctccagttctggaggaggggtctggtaggatgtgattggatcatggggatggactttccccttgctgttctcatgataatgagttctcatgagatctggttgcaaaaatgtttgtggcactttcccctttactctcttcctcctgctctggccatgtaag

SEQ ID NO: 115469 - DNA, 574 bp, Homo sapiens
ttatatttacctttttggggatctgacgtatttggaaagagttttgaattattggtgaattttaaggtaggctgtagagttgttttttcttgataagggrtaaacccagtgaagctatcactgtttgtggtaagccatccacttggttccactatcaagggggtcacagatggagaagttggttctgaagagaggatgctaactgtaatggaactgttatcaggagttttcacggtgtcattgaccaaagaccaagtgaagttttctgaagacagagcaggtgtagcattgggatgtgctgagatgggcaaaagatcttcatctgctataggtgcattccaaggcactttagaaacaaagctatggatcaagggagggcttgtggaaatggtagatgtgggttttagactgcccaaagaatgctctgctgatgagttactggagaaatctgttattccgtggctgttgttgggtagattcaaaggaggggaatgactcgccttgagatttgaggtggttatattttctttatctgagtttaagtttgcttcactttccaaagaaataggtttat

SEQ ID NO: 115470 - DNA, 574 bp, Homo sapiens
ttatatttacctttttggggatctgacgtatttggaaagagttttgaattattggtgaattttaaggtaggctgtagagttgttttttcttgataaggggtaaacccagtgaagctatcactgtttgtggtaagccatccacttggttccactatcaagggggtcacagatggagaagttggttctgaagagaggatgctaactgtaatggaactgttatcaggagttttcacggtgtcattgaccaaagaccaagtgaagttttctgaagacagagcaggtgtagcattgggatgtgctgagatgggcaaaagatcttcatctgctataggtgcattccaaggcactttagaaacaaagctatggatcaagggagggcttgtggaaatggtagatgtgggttttagactgcccaaagaatgctctgctgaygagttactggagaaatctgttattccgtggctgttgttgggtagattcaaaggaggggaatgactcgccttgagatttgaggtggttatattttctttatctgagtttaagtttgcttcactttccaaagaaataggtttat

SEQ ID NO: 115471 - DNA, 629 bp, Homo sapiens
acagctgctttttagaacttcttcctaccatagtttttttttttaatacagcctctccaaatttaattattttaaccagagcagtttataatcccatttttacaaaacactgataatataagtctttctatcttcaaaggacccattaaatacactaaatatgcttttgctgtaatttaagaaaatcacgayaactgtctattatggtttctagatggacatctttaccatgaagtttacagattagcatttacaaagcatgaatgattatctctggcacctgtagttgaccaatatttacttaaattgatgcctcacctagtgtgtttaaaatataattcagtttagtttaaaaatagttatgtgtaccttttcagaaacatctctctcctgtgaactctgcaaagttcacagcaaacataatgctccttttcattatctacggcatgtgatctaatttgtcaattgtacttagccactattttcagcattattatggcattcgatttattttctctatatctagttgttttgctatttttctcttcctaataaagtggtcaccagtggggggaaaaatgtccttagctgttcttctatttttcttataatattatgtgagagacatg

SEQ ID NO: 115472 - DNA, 629 bp, Homo sapiens
acagctgctttttagaacttcttcctaccatagtttttttttttaatacagcctctccaaatttaattattttaaccagagcagtttataatcccatttttacaaaacactgataatataagtctttctatcttcaaaggacccattaaatacactaaatatgcttttgctgtaatttaagaaaatcacgataactgtctattatggtttctagatggacatctttaccatgaagtttacagattagcatttacaaagcatgaatgattatctctggcacctgtagttgaccaatatttacttaaattgatgcctcacctagtgtgtttaaaatataattcagtttagtttaaaaatagttatgtgtaccttttcagaaacatctctctcctgtgaactctgcaaagttcacagcaaacataatgctccttttcattatctackgcatgtgatctaatttgtcaattgtacttagccactattttcagcattattatggcattcgatttattttctctatatctagttgttttgctatttttctcttcctaataaagtggtcaccagtggggggaaaaatgtccttagctgttcttctatttttcttataatattatgtgagagacatg

SEQ ID NO: 115473 - DNA, 587 bp, Homo sapiens
  misc_feature (1)...(587): n = A,T,C or G
acataatcaaacttcttcttctgatgctctttggttctgtttaattgataccgtaatggcttataattaaactaccaaagacagtgaatgttttttggaatcgttttgcatcgctctctccactgctactccaccctcatttggtttgcagattcacaaactacgcccaacaatttacacatttctaaaatccctatatctgaaattttatctcyacctgttactgtcttttatcctttcattgggatctgcaaatcaggggttgaggcacccctataacatttgctatatttgaggacttatttgcttggttgatttacgagacttggttttattactttaatggcttgttgcagcatacacatgtaaacatcacctgataaatgcttcttttgtagcaaattaggaagttaccaattcattgtatcattaaatttttcctgcatgtttttgttcctttaagaaaaatgagagaatgtttatagtttgcagtctttaccattgcttttgcattcaataataaaacaaatattgaaaatcactaactcagctattatttgnnnnnnnnnnnnnnnnnnnnnnnnnnn

SEQ ID NO: 115474 - DNA, 554 bp, Homo sapiens
ctgcatggttgtggttcatacatcggggtgtgaccacagaaaacacatcctcttggttgcccacaggattgagttgggtcgtgctcagccacaggaccaggggtgagtaagtctggttatagatctgatgactrctaatgcttgatctgctactggcagcttagttcttcattaataatagctgtggtgtaaatggctgaaggagcccaagtagcacacgtgatgtgcatcactctcaaaaggcagaatatcataggtctaaagaagctgttcctttggaactttgatttatatttgtgcaacatatatatcgctgttgtgagggaaaaaggcttaaaagttttttaaaataaaaaacaaagtaaagtttaaattctatgttgctggctcaggctttgttgacaaccaaaattagttttttgaggagaaagtagctaaaatactttatttggggttattaaaaattgaattatatatgaagtgattcaccttggaatcaaactttattcccaggtcatccaaacaagtatctaaaattgccaaagaaacatgat

SEQ ID NO: 115475 - DNA, 554 bp, Homo sapiens
ctgcatggttgtggttcatacatcggggtgtgaccacagaaaacacatcctcttggttgcccacaggattgagttgggtcgtgctcagccacaggaccaggggtgagtaagtctggttatagatctgatgactactaatgcttgatctgctactggcagcttagttcttcattaataatagctgtggtgtaaatggctgaaggagcccaagtagcacacgtgatgtgcatcactctcaaaaggcagaatatcataggtctaaagaagctgttcctttggaactttgatttatatttgtgcaacatatatatcgctgttgtgagggaaaaaggcttaaaagttttttaaaataaaaaacaaagtaaagtttaaattctatgttgctggctcaggctttgttgacaaccraaattagttttttgaggagaaagtagctaaaatactttatttggggttattaaaaattgaattatatatgaagtgattcaccttggaatcaaactttattcccaggtcatccaaacaagtatctaaaattgccaaagaaacatgat

SEQ ID NO: 115476 - DNA, 504 bp, Homo sapiens
agaagagaaaaagaatttaatatcagtgatttacagttctttgtatcaaggattttagatgttaaaactattatatactgcagaagatttattggttgaatgtttttttttttttctgagtttatcacttaggggtcagtcgggggaaaaaatagaaactgctctaggtgtttcaacagaaagaatttaattttgaaaattgctttcacagattatagaagggctcaaacatcacacaagcgatgktgtggcatcccaagtagtaatacgaacaaggagctactactgtctctaggcctgggacaacagaagaagttggtgttaccaggatctagaagctgggctatctagtggaagatgaaaccatagcaaggagggactatctagtagaatctagcttctccagagccacagataagacttagtccccgttagagattctatcaaaaggagtcttagaaatgttgtttgctgtgatttcaagaagagcaggaaaaaggtagt

SEQ ID NO: 115477 - DNA, 599 bp, Homo sapiens
aaattatactttctcaaaattaaaaaacttttacttattaaaagacaacagtaagaaaataattaggcaagctacaggttgtgataaaatatcatacagttatattaaataaaacccttaaattcagaacatatagaaaattcttccacttagtaataaaaaatttgggaaaagatttgaatagtttagacactgcacaaagaaacatggttaataaacacatataaaactcattgacatcattagtcgtcagggaagtaaaactataaatcacaattagatactactccacacccattagaatgactaaaattacaaagactatcaacaataaatcttggcaaggatctagagcaactgaaacccatatacattgctcgggaggggcggtataaaatggtacaaacacctagagtgtamtctggcagtttcttataaagttaaacataacctctatgactcagaaattatactgctagatatttacccaagaaaaatgaaagtatatgtctagaaagacttgattgaaatttcatagcagttttattcacaatagctaaaagctggaaacaactcaaatatccatcaacagaaaagtg

SEQ ID NO: 115478 - DNA, 599 bp, Homo sapiens
aaattatactttctcaaaattaaaaaacttttacttattaaaagacaacagtaagaaaataattaggcaagctacaggttgtgataaaatatcatacagttatattaaataaaacccttaaattcagaacatatagaaaattcttccacttagtaataaaaaatttgggaaaagatttgaatagtttagacactgcacaaagaaacatggttaataaacacatataaaactcattgacatcattagtcgtcagggaagtaaaactataaatcacaattagatactactccacacccattagaatgactaaaattacaaagactatcaacaataaatcttggcaaggatctagagcaactgaaacccatatacattgctcgggaggggcggtataaaatggtacaaacacctagagtgtactctggcagtttcttataaagttaaacataamctctatgactcagaaattatactgctagatatttacccaagaaaaatgaaagtatatgtctagaaagacttgattgaaatttcatagcagttttattcacaatagctaaaagctggaaacaactcaaatatccatcaacagaaaagtg

SEQ ID NO: 115479 - DNA, 629 bp, Homo sapiens
tatttatttgcggtttatctttttcattttttgtgtgagcttgaggcaggtgtggaaaaagaaatgatgtcttaccaaggaagtaacattcaaagtcgttttgaaaaagtgactattcgggaagacttaaaggaaggcagggtggtagctgggccaacaggctggtggcaggcaggtggcctcaggtatagggggagacagaggaaagaagggagtgaatgcaggaaatatacgcagtggttagtggacaggtctgggcagatgaggtgggagtgggaggaaatgagagctgacactaacagtcttgctaaatatagattttacaggtgtgaatggcaggcaggagaagggagccagtgtcggatgctgtggctcagaggcggaaaatggaaaagtagacagtgacagggagagatactgacttgcaggaagcactgagtgcctagaagggagatgacgttcccaagaacataggagtctagggagaagtaaaccactgtagatcagtttagcccatttgaatccatttcagcaaacatttattgagtgtsatagatagaataatgatcctcttgaccctaccaagatgcctgtgccctaaatcttggaacctgccccttacatgacaa

SEQ ID NO: 115480 - DNA, 629 bp, Homo sapiens
tatttatttgcggtttatctttttcattttttgtgtgagcttgaggcaggtgtggaaaaagaaatgatgtcttaccaaggaagtaacattcaaagtcgttttgaaaaagtgactattcgggaagacttaaaggaaggcagggtggtagctgggccaacaggctggtggcaggcaggtggcctcaggtatagggggagacagaggaaagaagggagtgaatgcaggaaatatacgcagtggttagtggacaggtctgggcagatgaggtgggagtgggaggaaatgagagctgacactaacagtcttgctaaatatagattttacaggtgtgaatggcaggcaggagaagggagccagtgtcggatgctgtggctcagaggcggaaaatggaaaagtagacagtgacagggagagatactgacttgcaggaagcactgagtgcctagaagggagatgacgttcccaagaacataggagtctagggagaagtaaaccactgtagatcagtttagcccatttgaatccatttcagcaaacatttattgagtgtcatagatagaataatgatccycttgaccctaccaagatgcctgtgccctaaatcttggaacctgccccttacatgacaa

SEQ ID NO: 115481 - DNA, 621 bp, Homo sapiens
tttacctttgcaagtgagagttgtcccagagtttcatataaaacagtgctgtatcacccaagaacgttctggcctcttttacatgacttgagtggagtctgagtggtactgtaaagctgagtttatagcacggatgagtcaggagaaggagaggtctggatgtcagctggagccagcatcagaaccaaagagaaaggcagaaggtggagaccacagtttaggggtcacagaggtttaggagtcatgaattgctacccacatcagggcaccccgggggaatcacagcatcctaagaaagtcaagaacaaggccgacagyccaatctgactgtcttacaggacaaacactgatataaagccagggctgcatcatttggctagagccagaccagagatatgtgcctttactttgatagttcggtctctgaaatccaaaagtcagggtatgataaacgtctgagattttgcttttaaatatagcaagtgcctttttaaatgtactttttcttcttcccagcttatattagagtaactcagcaccaattgattagattccccagcctcgctttgtagccagaatggcctatcctccctgccccatgatgtttttgctgcaaaacga

SEQ ID NO: 115482 - DNA, 621 bp, Homo sapiens
tttacctttgcaagtgagagttgtcccagagtttcatataaaacagtgctgtatcacccaagaacgttctggcctcttttacatgacttgagtggagtctgagtggtactgtaaagctgagtttatagcacggatgagtcaggagaaggagaggtctggatgtcagctggagccagcatcagaaccaaagagaaaggcagaaggtggagaccacagtttaggggtcacagaggtttaggagtcatgaattgctacccacatcagggcaccccgggggaatcacagcatcctaagaaagtcaagaacaaggccgacagtccaatctgactgtcttacaggacaaacactgatataaagccagggctgcatcatttggctagagccagaccagagatatgtgcctttactttgatagttckgtctctgaaatccaaaagtcagggtatgataaacgtctgagattttgcttttaaatatagcaagtgcctttttaaatgtactttttcttcttcccagcttatattagagtaactcagcaccaattgattagattccccagcctcgctttgtagccagaatggcctatcctccctgccccatgatgtttttgctgcaaaacga

SEQ ID NO: 115483 - DNA, 512 bp, Homo sapiens
agcaagaacattcctacagttcttgcaaattgctagagaaaatggccttgcagagacagcacaatttcaggataggtgtagtacagacagcttatgtatgtgcttctggaacaatcttaccatgggatcttggacaagtaatttattgtcttttgacctgctttcccaactgtaaagcagtgagacacaatcatcccaaaggtcacctttcctccaccatgataggtgcgtctaaaattatggcatctccatgcaaggattcttgttgtaaccacagttgacctgacgatttttactcttgtgaggcccatctaattggcaactgctgggtaagtacagcaaaaacagtaggaagaagatagtaaggcaagtttctcacaggtaatggtgatcacacagcatccctccccacggctcaggtaatacacacagctggattgccctgtgggcttctgtgtttatgtagcctggaaaggatgcaaatcaacyggctcacacaaagaaagaccagg

SEQ ID NO: 115484 - DNA, 535 bp, Homo sapiens
tgggactcgaatagagaagtatatggccagataaatgaaagcaagtgatagaccttggatctcaagaggatgaacctcaaatagctttgatctgccaggagtgggtataaaaggattgtctcaatggaaaaccatatggcattttcttaaaaggttaaaaatrgaactaccatataatccagcaatcccgcttctgtatatttatccaaaagaattgaaatcaggatcttgaagaaatatctgcactttcatgttcattacaacattattcacaatagccaagatgtgaaaacaactcaaacgtccatcagtagatgaatggataaggcagatgtgatatacacatacaatgaaatgtttgttattcagccataagaaagaaggaaatcctgccatatgtgacatgaatgcaccttgaagatattatgttaagtgaaataagccagtcacagaagtacaactactatacaataccactcatacaaggtagctaaaatagtcaaactcatagaaactaaaagtagaatggtggttg

SEQ ID NO: 115485 - DNA, 590 bp, Homo sapiens
ctctacttttctttcttccaagaatgctcatcctatcccacctccttcatctggctaacaattgctcatccttcaaagacaactcaagcacgctctgttccaaaaagccttctcaggggttgtttgtaggtttaagatatgcaccaatatgtcaccaaagcatcctattcttatctatattcagacattttcatactgtaaattttactttgaatttgcgtgttttctctctggactgtgagttcttgtgggcagaactttgttttttcagttgaactttctatagttcttaayactctgggcacaaaataggcaatcaatgtgcattttcaaaataaatgattgacgcaattctacaatttatagtgttttagtgatatgggttcacatactgggatctcaattacatgaaaattcaaggggaggacaattctttcatattttgctttattgtgttttgcagatactgaatttttgcaaattgaaggtttgtttcaaccctgcatttagaaagtttatcagcaccattttccaacagcatgtgctcactccatgtctctgtcatatcttgatcattctcacaatatccc

SEQ ID NO: 115486 - DNA, 576 bp, Homo sapiens
gattgcatcttgagctacctggtatattggtgtatctctagcaactagatcacagtatgagatttgagaaacacataatggttgctgaatgaataaagatagttctgaaagcctttgtcaagaggagttgttggatttattaattaaaattaaactataaaatttgttatggtttcacttacttattctctttattccaataaaaatataattgagaatctgctgttcggtgaaaggagtggtaatgttgaagtgawtttactcatagataatctttgtgctcttgcaagagtagtcatctgttaatggtaagcaataagggcacaatttaggctgtcagggtacttcagcgtacttcacctggctctgaatggggtcatgcatgaaacaatatatttgaggcatttatttaccttgagtgaaaatgagagtatacattactttgaaactttctcctagatcaaaaagaagttcaagacaattcagaaagttttatatctctgcaaatgctaaagaaaaccatacccattttacagaagttagcctagcaacttaaaggagggggaggaattaaga

SEQ ID NO: 115487 - DNA, 622 bp, Homo sapiens
acatgttttaataagcccttcaggctattctgctgctgctcaaatttgagaaccacttatctagaagaagcaaacatttgccaaaggaaatagtggagattaggctgtaagttctgtggggaaggagttagggaagtggtgggaaatgcaggatcgtgcctcgtggtaatgcaaagtgcacagatgctgaccgtgcgatccccagctaacccagggtcttatttcactaatccctgtctttggcagtaaagttttccaaatttgaaaaagaaaagccactgtgattggtacagatgataaggaacatttgagatctctttctgatgaaaccatgtccatatatatggccatgatatatgttgggacaaaagacatacactaagtatttaaaacactggctgtaatttgagcaatcttaggcatttacactaaatttggcatagtacctgtatttgtcataatatgagctctggacctacaactaagagactcctgtcagggcctacttaattctagaagagcctctaaaattagccatacaatttaataatatttcaaagggttatcttktctcattgacataatgagagcaaatcaaaaaaaggctacagcataaatgtat

SEQ ID NO: 115488 - DNA, 626 bp, Homo sapiens
aacaaactgtatgatactccaagtttcttaaccttcctgatcacagtcttcccaactataaactaagaagaagatataattatttaggtttcctacagtttgaaaatgctggcttttaatcttgcactaaactggatggaggtgggtaagataagtatatataaagaaaacacctcacactgggttagtgcacagtatgtcctcaatacaaagtttgggaattaagggaattattaccctttgtttcctgccctcccttcctcccttmcttccttccttcctgtacgagagggaagatgcagaatggggaatgatggggagcctgggtgggcaggtgagcatcagtgttagtgagcagactgcgttagactctagaccacttacttgattagaatgttaggatacactacttgggttctaagggaaaacagtataaaatcagctaaaaattttaactaagagaaggaatattctccttaacaaatccccaatgtaatcagttttatagctttaattttcaagattcaaatctagacatattctcttaaaaaaaatcctaaacttcatgtagatctgatatatcaaatatctaacaggagcatatcgacatgaagtattaatggaga

SEQ ID NO: 115489 - DNA, 626 bp, Homo sapiens
aacaaactgtatgatactccaagtttcttaaccttcctgatcacagtcttcccaactataaactaagaagaagatataattatttaggtttcctacagtttgaaaatgctggcttttaatcttgcactaaactggatggaggtgggtaagataagtatatataaagaaaacacctcacactgggttagtgcacagtatgtcctcaatacaaagtttgggaattaagggaattattaccctttgtttcctgccctcccttcctcccttacttccttccttcctgtacgagagggaagatgcagaatggggaatgatggggagcctgggtgggcaggtgagcatcagtgttagtgagcagactgcgttagactctagaycacttacttgattagaatgttaggatacactacttgggttctaagggaaaacagtataaaatcagctaaaaattttaactaagagaaggaatattctccttaacaaatccccaatgtaatcagttttatagctttaattttcaagattcaaatctagacatattctcttaaaaaaaatcctaaacttcatgtagatctgatatatcaaatatctaacaggagcatatcgacatgaagtattaatggaga

SEQ ID NO: 115490 - DNA, 626 bp, Homo sapiens
aacaaactgtatgatactccaagtttcttaaccttcctgatcacagtcttcccaactataaactaagaagaagatataattatttaggtttcctacagtttgaaaatgctggcttttaatcttgcactaaactggatggaggtgggtaagataagtatatataaagaaaacacctcacactgggttagtgcacagtatgtcctcaatacaaagtttgggaattaagggaattattaccctttgtttcctgccctcccttcctcccttacttccttccttcctgtacgagagggaagatgcagaatggggaatgatggggagcctgggtgggcaggtgagcatcagtgttagtgagcagactgcgttagactctagaccacttacttgattagaatgttaggatacactacttgggttctaagggaaaacagtataaaatcagytaaaaattttaactaagagaaggaatattctccttaacaaatccccaatgtaatcagttttatagctttaattttcaagattcaaatctagacatattctcttaaaaaaaatcctaaacttcatgtagatctgatatatcaaatatctaacaggagcatatcgacatgaagtattaatggaga

SEQ ID NO: 115491 - DNA, 581 bp, Homo sapiens
aaaatgatatatcagaccaataaaatgcatgaaaacaattattcttaacaaaagatttgcgaaactaatccaaatctttatttgacaaaaaggtgtcaaagcagttcactagagaaagaaagaaacaaacaaaaaaacccataggatgcctgaaaaactggatatctggatgaaagaaagtaatgaaactcaattatttacttagcatcatatacaaacattaatttcacactgatcatagatacatttaaacataaaggctaaagctataaagcttcttgaacgaagtatagaagaatattacataactttggggtagagatattttgcagaagaaaatagagggtttttgcagaaaagagaaaaatgaagtaagctcaaaagaaaaaaaaataagctagaatacataaaaattaaatatatctgctattccaaataaaycattaagaaaatgaaactgcagaccagattgggagaaaaacagtattcttaaatatatgtgatgaaggattttttacatcagaatatactgttaattgctacagctcaatacaaagacaaaaatccaaaaatgcaaaaca

SEQ ID NO: 115492 - DNA, 172 bp, Homo sapiens
gaattccaacagcaggtataaaagaggtctttacctgggaaaaactgtctagaacagtggratagaaaaattacaattagaaagaacagaaaaatgtatgcttttatgcctacttacagcatcatgttaccatttctgactgaatgttaattatcttaaataggtgtggagg

SEQ ID NO: 115493 - DNA, 581 bp, Homo sapiens
gtctcctgaagacagcagaaacttggttggtgaattcttattcattctgccattctgtattttttaagtggagtatttaggccatttacattcactattagtgttgagatgtgaagtcctattctattcatccttctaactgttgcctgaatacctccctttttttaaattttattattattatataggtcctgtgagatttatgctttaaggagtttctattttgcatattttgaggatttgtttcaagatttagagctccttttagcagttcttgtagtgctggcttggcagtggcgaattttctcagcatttgtttgtctgggaaagactttatctttccttcatttatrgagcttaatttcactggatacaaaattcttggctgataattattttgtttaaggaggctaaaaataagaccccaatcccttctagcttgtagggtttctgctgagaaatctgctgttaatctgataggttttcctttataagttatccgatgcttttgccttacaggtcttaagattctttcctttgtcttgactttagataacctgatgaccatgtgcctaggcgac

SEQ ID NO: 115494 - DNA, 581 bp, Homo sapiens
gtctcctgaagacagcagaaacttggttggtgaattcttattcattctgccattctgtattttttaagtggagtatttaggccatttacattcactattagtgttgagatgtgaagtcctattctattcatccttctaactgttgcctgaatacctccctttttttaaattttattattattatataggtcctgtgagatttatgctttaaggagtttctattttgcatattttgaggatttgtttcaagatttagagctccttttagcagttcttgtagtgctggcttggcagtggcgaattttctcagcatttgtttgtctgggaaagactttatctttccttcatttatggagcttaatttcactggatacaaaattcttggctgataattmttttgtttaaggaggctaaaaataagaccccaatcccttctagcttgtagggtttctgctgagaaatctgctgttaatctgataggttttcctttataagttatccgatgcttttgccttacaggtcttaagattctttcctttgtcttgactttagataacctgatgaccatgtgcctaggcgac

SEQ ID NO: 115495 - DNA, 180 bp, Homo sapiens
gagagaagcattgtcagaaacttgtttgtgatgactgcattcaactcacagagttgaaggttccttttcaaacagcagtttccaaacactctttctgtggcatctgcaagtggatgtttgggcctctttgaagwtttccttggaaacgggataatcttcacagaaaagctaaacagaagc

SEQ ID NO: 115496 - DNA, 180 bp, Homo sapiens
gagagaagcattgtcagaaacttgtttgtgatgactgcattcaactcacagagttgaaggttccttttcaaacagcagtttccaaacactctttctgtggcatctgcaagtggatgtttgggcctctttgaagttttcsttggaaacgggataatcttcacagaaaagctaaacagaagc

SEQ ID NO: 115497 - DNA, 186 bp, Homo sapiens
gcttctgtttagcttttctgtgaagagtatcccgtttccaacgaaatcttcaaagaggcccaaacatccacttgcagatgccacagaaagagtgtttggaaactgctgtttgaaaaggaaccttcaactctgtgwgttgaatgcagtcatcacaaacaagtttctgacaatgcttctctctagttt

SEQ ID NO: 115498 - DNA, 394 bp, Homo sapiens
ttgcagattctgcagaaagtgtgtttctaaactgctacatcgcaaggaatgttcagctctgtgagttccactcaatcatcccaaagaattttctgagaaagcttctgtcttctttctataggaagttatttcctttactacggtaggcctcaaagaagtgcaattatccccttgcagtttctacaaaaagagtgtttcaaacctgaactatcaaagaaaggttccacactgtgagttgaatgcagacatcacgaagaaggttctgagaatgcttctgtttagttctgtgcggtttatcccgtttccaacgaaatcctcagagaggaccaaatatccacttgcagtttctacaagaagaktgtttcaaagctgaactatcaaagaaaggttcagc

SEQ ID NO: 115499 - DNA, 590 bp, Homo sapiens
ccaaatatctacttgcagtttctacagaaagaccgtttcaaacctgaactatcaaagaaaggttcaacactgtgagttgaatgcaaacatcacgaagaaggttctgagaatgcttctgtttagttctgtgcggtttatcccgtttccaacgaaatcctcagagagtcccaaatatccacttgcacattctacaaatagtgtgtttcgaaactgctccatccaaaggaatgttcagctctgtgagttaaactcagtcgtcaccaagagttttctgtgaatgctactgtctagcttttatatgaagctatttcctttactaccataggcctcaaagcggtccatatctccacttgcagattctacacaaagagagtttccaaactgctctgtcawagggaatgttcaactctgtgacttgaatgcaatcatcacaaagtagtttctgagaatgcttctatctagcttttacgggaagttaattccttttccaccacaggcctcaaagccctccaaatgtccacttgcagattctggaaaaagagtgtttcaaagcttctctctcgaaaggaaagttcaactctgtgagttga

SEQ ID NO: 115500 - DNA, 590 bp, Homo sapiens
ccaaatatctacttgcagtttctacagaaagaccgtttcaaacctgaactatcaaagaaaggttcaacactgtgagttgaatgcaaacatcacgaagaaggttctgagaatgcttctgtttagttctgtgcggtttatcccgtttccaacgaaatcctcagagagtcccaaatatccacttgcacattctacaaatagtgtgtttcgaaactgctccatccaaaggaatgttcagctctgtgagttaaactcagtcgtcaccaagagttttctgtgaatgctactgtctagcttttatatgaagctatttcctttactaccataggcctcaaagcggtccatatctccacttgcagattctacacaaagagagtttccaaactgctctgtcaaagggaatgttcaactctgtgacttgaatgcaatcatcacaaagtagtttctgagaatgcttctatctagcttttacgggaagwtaattccttttccaccacaggcctcaaagccctccaaatgtccacttgcagattctggaaaaagagtgtttcaaagcttctctctcgaaaggaaagttcaactctgtgagttga

SEQ ID NO: 115501 - DNA, 446 bp, Homo sapiens
gcattctcagaaccctcttcgtgatgtttgcattcaactcacagtgctgaacctttctttgatagttcagctttgaaacactcttcttgtagaaactgcaagtggatatttggtcctctctgaggatttcgttggaaacgggataaaccgcacagaactaaacagaagcattctcagaaccttcttcgtgatgtctgcattcaactcacagtgtggaacctttctttgatagttcaggtttgaaacactctttttgtagaaactgcaaggggataatggcacttctttgaggcataccgtagtaaaggaaataacttcctatagaaagaagacagaagctttctcagaaaattctttgggatgattgagtggaactcacagagctgaacattccttgcgatgtagcagtttagaaacacactttmtgcagaatctgcaagtgcata

SEQ ID NO: 115502 - DNA, 404 bp, Homo sapiens
agtttagaaacacactttatgcagaatctgcaagtgcatatttggacctctstgaggaattcgttggaaacgggataatttcagctgactaaacagaagcagtctcagaatcttctttgtgatgtttgcattcaaatcccagagttgaactttcctttcaaagttcacgtttgaaacactctttttgcaggatctacaagtggatatttggaccactctgtgtccttcgttcgaaacgggtatatcttcacatgacatctagacagaagcattctcagaagcttctctgtgatgactgcattcaactcacggagttgaacactccttttgagagcgcagttttgaaactctctttctgtggcatctgcaaggggacatgtagacctctttgaagatttcgttgg

SEQ ID NO: 115503 - DNA, 555 bp, Homo sapiens
agtggaactcacagagctgaacattccttgcgatgtagcagtttagaaacacactttatgcagaatctgcaagtgcatatttggacctctctgaggaattcgttggaaacgggataatttcagctgactaaacagaagcagtctcagaatcttctttgtgatgtttgcattcaaatcccmgagttgaactttcctttcaaagttcacgtttgaaacactctttttgcaggatctacaagtggatatttggaccactctgtgtccttcgttcgaaacgggtatatcttcacatgacatctagacagaagcattctcagaagcttctctgtgatgactgcattcaactcacggagttgaacactccttttgagagcgcagttttgaaactctctttctgtggcatctgcaaggggacatgtagacctctttgaagatttcgttggaaacggaatcatcttcacataaaaactatacagatgcattctcaggaactttttggtgatgtttgtattcaactcccagagttgaactttcctttggaaagagcagctatga

SEQ ID NO: 115504 - DNA, 603 bp, Homo sapiens
gcatatttggacctctctgaggaattcgttggaaacgggataatttcagctgactaaacagaagcagtctcagaatcttctttgtgatgtttgcattcaaatcccagagttgaactttcctttcaaagttcacgtttgaaacactctttttgcaggatctacaagtggatatttggaccactctgwgtccttcgttcgaaacgggtatatcttcacatgacatctagacagaagcattctcagaagcttctctgtgatgactgcattcaactcacggagttgaacactccttttgagagcgcagttttgaaactctctttctgtggcatctgcaaggggacatgtagacctctttgaagatttcgttggaaacggaatcatcttcacataaaaactatacagatgcattctcaggaactttttggtgatgtttgtattcaactcccagagttgaactttcctttggaaagagcagctatgaaacactctttttctagaatctgcaagtggacgtttggagggctttgtggtttgtggtggaaaaggaaatatcttcacctaaatactagatagaagcattctcagaaactgctttgtgatgat

SEQ ID NO: 115505 - DNA, 495 bp, Homo sapiens
cacgtttgaaacactctttttgcaggatctacaagtggatatttggaccactctgtgtccttcgttcgaaacgggtatatcttcacatgacatctagacagaagcatyctcagaagcttctctgtgatgactgcattcaactcacggagttgaacactccttttgagagcgcagttttgaaactctctttctgtggcatctgcaaggggacatgtagacctctttgaagatttcgttggaaacggaatcatcttcacataaaaactatacagatgcattctcaggaactttttggtgatgtttgtattcaactcccagagttgaactttcctttggaaagagcagctatgaaacactctttttctagaatctgcaagtggacgtttggagggctttgtggtttgtggtggaaaaggaaatatcttcacctaaatactagatagaagcattctcagaaactgctttgtgatgattgcattcacctcacagagttga

SEQ ID NO: 115506 - DNA, 603 bp, Homo sapiens
gcatatttggacctctctgaggaattcgttggaaacgggataatttcagctgactaaacagaagcagtctcagaatcttctttgtgatgtttgcattcaaatcccagagttgaactttcctttcaaagttcacgtttgaaacactctttttgcaggatctacaagtggatatttggaccactctgtgtccttcgttcgaaacgggtatatcttcacatgacatctagacagaagcattctcagaagcttctctgtgatgactgcattcaactcacggrgttgaacactccttttgagagcgcagttttgaaactctctttctgtggcatctgcaaggggacatgtagacctctttgaagatttcgttggaaacggaatcatcttcacataaaaactatacagatgcattctcaggaactttttggtgatgtttgtattcaactcccagagttgaactttcctttggaaagagcagctatgaaacactctttttctagaatctgcaagtggacgtttggagggctttgtggtttgtggtggaaaaggaaatatcttcacctaaatactagatagaagcattctcagaaactgctttgtgatgat

SEQ ID NO: 115507 - DNA, 603 bp, Homo sapiens
gcatatttggacctctctgaggaattcgttggaaacgggataatttcagctgactaaacagaagcagtctcagaatcttctttgtgatgtttgcattcaaatcccagagttgaactttcctttcaaagttcacgtttgaaacactctttttgcaggatctacaagtggatatttggaccactctgtgtccttcgttcgaaacgggtatatcttcacatgacatctagacagaagcattctcagaagcttctctgtgatgactgcattcaactcacggagttgaacactccttttgrgagcgcagttttgaaactctctttctgtggcatctgcaaggggacatgtagacctctttgaagatttcgttggaaacggaatcatcttcacataaaaactatacagatgcattctcaggaactttttggtgatgtttgtattcaactcccagagttgaactttcctttggaaagagcagctatgaaacactctttttctagaatctgcaagtggacgtttggagggctttgtggtttgtggtggaaaaggaaatatcttcacctaaatactagatagaagcattctcagaaactgctttgtgatgat

SEQ ID NO: 115508 - DNA, 579 bp, Homo sapiens
cttctttgtgatgtttgcattcaaatcccagagttgaactttcctttcaaagttcacgtttgaaacactctttttgcaggatctacaagtggatatttggaccactctgtgtccttcgttcgaaacgggtatatcttcacatgacatctagacagaagcattctcagaagcttctctgtgatgactgcattcaactcacggagttgaacactccttttgagagcgcagttttgaaactctctttctgtggcwtctgcaaggggacatgtagacctctttgaagatttcgttggaaacggaatcatcttcacataaaaactatacagatgcattctcaggaactttttggtgatgtttgtattcaactcccagagttgaactttcctttggaaagagcagctatgaaacactctttttctagaatctgcaagtggacgtttggagggctttgtggtttgtggtggaaaaggaaatatcttcacctaaatactagatagaagcattctcagaaactgctttgtgatgattgcattcacctcacagagttgaacattcctattgatagagcagtttggaaac

SEQ ID NO: 115509 - DNA, 579 bp, Homo sapiens
cttctttgtgatgtttgcattcaaatcccagagttgaactttcctttcaaagttcacgtttgaaacactctttttgcaggatctacaagtggatatttggaccactctgtgtccttcgttcgaaacgggtatatcttcacatgacatctagacagaagcattctcagaagcttctctgtgatgactgcattcaactcacggagttgaacactccttttgagagcgcagttttgaaactctctttctgtggcatctgcaaggggacatgtrgacctctttgaagatttcgttggaaacggaatcatcttcacataaaaactatacagatgcattctcaggaactttttggtgatgtttgtattcaactcccagagttgaactttcctttggaaagagcagctatgaaacactctttttctagaatctgcaagtggacgtttggagggctttgtggtttgtggtggaaaaggaaatatcttcacctaaatactagatagaagcattctcagaaactgctttgtgatgattgcattcacctcacagagttgaacattcctattgatagagcagtttggaaac

SEQ ID NO: 115510 - DNA, 563 bp, Homo sapiens
atttggacctctctgaggaattcgttggaaacgggataatttcagctgactaaacagaagcagtctcagaatcttctttgtgatgtttgcattcaaatcccagagttgaactttcctttcaaagttcacgtttgaaacactctttttgcaggatctacaagtggatatttggaccactctgtgtccttcgttcgaaacgggtatatcttcacatgacatctagacagaagcattctcagaagcttctctgtgatgactgcattcaactcacggagttgaacactccttttgagagcgcagttttgaaactctctttctgtggcatctgcaaggggacatgtagacctctttgaagatttcgttggaaamggaatcatcttcacataaaaactatacagatgcattctcaggaactttttggtgatgtttgtattcaactcccagagttgaactttcctttggaaagagcagctatgaaacactctttttctagaatctgcaagtggacgtttggagggctttgtggtttgtggtggaaaaggaaatatcttcacctaaatact

SEQ ID NO: 115511 - DNA, 683 bp, Homo sapiens
tcagaatcttctttgtgatgtttgcattcaaatcccagagttgaactttcctttcaaagttcacgtttgaaacactctttttgcaggatctacaagtggatatttggaccactctgtgtccttcgttcgaaacgggtatatcttcacatgacatctagacagaagcattctcagaagcttctctgtgatgactgcattcaactcacggagttgaacactccttttgagagcgcagttttgaaactctctttctgtggcatctgcaaggggacatgtagacctctttgaagatttcgttggaaacggaatcatcttcacatmaaaactatacagatgcattctcaggaactttttggtgatgtttgtattcaactcccagagttgaactttcctttggaaagagcagctatgaaacactctttttctagaatctgcaagtggacgtttggagggctttgtggtttgtggtggaaaaggaaatatcttcacctaaatactagatagaagcattctcagaaactgctttgtgatgattgcattcacctcacagagttgaacattcctattgatagagcagtttggaaacactcttgttgtggaatgtgcaagtggagatttggagcgctttgaggcctatggtagtaaagggaatagcttcatagaaaaactagacagaagcattc

SEQ ID NO: 115512 - DNA, 589 bp, Homo sapiens
acaagtggatatttggaccactctgtgtccttcgttcgaaacgggtatatcttcacatgacatctagacagaagcattctcagaagcttctctgtgatgactgcattcaactcacggagttgaacactccttttgagagcgcagttttgaaactctctttctgtggcatctgcaaggggacatgtagacctctttgaagatttcgttggaaacggaatcatcttcacataaaaactatacagatgcattctcaggaactttttggtgatgtttgtattcaactcccagagttgaactttcctttggaaagagcagctatgaaacactctttttctagaatctgcaagtggacgtttggagggctttgtggtttgtggtggaaaaggaaatatcttcacctaaatactagakagaagcattctcagaaactgctttgtgatgattgcattcacctcacagagttgaacattcctattgatagagcagtttggaaacactcttgttgtggaatgtgcaagtggagatttggagcgctttgaggcctatggtagtaaagggaatagcttcatagaaaaactagacagaagca

SEQ ID NO: 115513 - DNA, 589 bp, Homo sapiens
acaagtggatatttggaccactctgtgtccttcgttcgaaacgggtatatcttcacatgacatctagacagaagcattctcagaagcttctctgtgatgactgcattcaactcacggagttgaacactccttttgagagcgcagttttgaaactctctttctgtggcatctgcaaggggacatgtagacctctttgaagatttcgttggaaacggaatcatcttcacataaaaactatacagatgcattctcaggaactttttggtgatgtttgtattcaactcccagagttgaactttcctttggaaagagcagctatgaaacactctttttctagaatctgcaagtggacgtttggagggctttgtggtttgtggtggaaaaggaaatatcttcacctaaatactagatagaagcattctcagaaactgctttgtgaygattgcattcacctcacagagttgaacattcctattgatagagcagtttggaaacactcttgttgtggaatgtgcaagtggagatttggagcgctttgaggcctatggtagtaaagggaatagcttcatagaaaaactagacagaagca

SEQ ID NO: 115514 - DNA, 603 bp, Homo sapiens
agacagaagcattctcagaagcttctctgtgatgactgcattcaactcacggagttgaacactccttttgagagcgcagttttgaaactctctttctgtggcatctgcaaggggacatgtagacctctttgaagatttcgttggaaacggaatcatcttcacataaaaactatacagatgcattctcaggaactttttggtgatgtttgtattcaactcccagagttgaactttcctttggaaagagcagctatgaaacactctttttctagaatctgcaagtggacgtttggagggctttgtggtttgtggtggaaaaggaaatatcttcacctaaatactagatagaagcattctcagaaactgctttgtgatgattgcattcacctcacagagttgaacattcctattgatagagcagtttggaaacactcytgttgtggaatgtgcaagtggagatttggagcgctttgaggcctatggtagtaaagggaatagcttcatagaaaaactagacagaagcattctcagaaaatactttgtgatgattgagtttaactcacagagctgaacattcctttggatggagcaggtttgagacac

SEQ ID NO: 115515 - DNA, 603 bp, Homo sapiens
agacagaagcattctcagaagcttctctgtgatgactgcattcaactcacggagttgaacactccttttgagagcgcagttttgaaactctctttctgtggcatctgcaaggggacatgtagacctctttgaagatttcgttggaaacggaatcatcttcacataaaaactatacagatgcattctcaggaactttttggtgatgtttgtattcaactcccagagttgaactttcctttggaaagagcagctatgaaacactctttttctagaatctgcaagtggacgtttggagggctttgtggtttgtggtggaaaaggaaatatcttcacctaaatactagatagaagcattctcagaaactgctttgtgatgattgcattcacctcacagagttgaacattcctattgatagagcagtttggaaacactcttgttgtggaatgtgcaagtggagatttggagcgctttgaggcctatggtagtaaagggaatarcttcatagaaaaactagacagaagcattctcagaaaatactttgtgatgattgagtttaactcacagagctgaacattcctttggatggagcaggtttgagacac

SEQ ID NO: 115516 - DNA, 623 bp, Homo sapiens
ttttgagagcgcagttttgaaactctctttctgtggcatctgcaaggggacatgtagacctctttgaagatttcgttggaaacggaatcatcttcacataaaaactatacagatgcattctcaggaactttttggtgatgtttgtattcaactcccagagttgaactttcctttggaaagagcagctatgaaacactctttttctagaatctgcaagtggacgtttggagggctttgtggtttgtggtggaaaaggaaatatcttcacctaaatactagatagaagcattctcagaaactgctttgtgatgattgcattcacctcacagagttgaacattcctattgatagagcagtttggaaacactcttgttgtggaatgtgcaagtggagatttggagcgctttgaggcctatggtagtaaagggaatagcttcatagaaaaactagacagaagcattctcagaaaatactttgtgatgattgagtttaamtcacagagctgaacattcctttggatggagcaggtttgagacacactttttgtagaatctacaagtggatatttggacctctctgaggatttcgttggaaacgcgataactgcacctaactaaacggaa

SEQ ID NO: 115517 - DNA, 623 bp, Homo sapiens
ttttgagagcgcagttttgaaactctctttctgtggcatctgcaaggggacatgtagacctctttgaagatttcgttggaaacggaatcatcttcacataaaaactatacagatgcattctcaggaactttttggtgatgtttgtattcaactcccagagttgaactttcctttggaaagagcagctatgaaacactctttttctagaatctgcaagtggacgtttggagggctttgtggtttgtggtggaaaaggaaatatcttcacctaaatactagatagaagcattctcagaaactgctttgtgatgattgcattcacctcacagagttgaacattcctattgatagagcagtttggaaacactcttgttgtggaatgtgcaagtggagatttggagcgctttgaggcctatggtagtaaagggaatagcttcatagaaaaactagacagaagcattctcagaaaatactttgtgatgattgagtttaactcacagagctgamcattcctttggatggagcaggtttgagacacactttttgtagaatctacaagtggatatttggacctctctgaggatttcgttggaaacgcgataactgcacctaactaaacggaa

SEQ ID NO: 115518 - DNA, 532 bp, Homo sapiens
ttgtggtttgtggtggaaaaggaaatatcttcacctaaatactagatagaagcattctcagaaactgctttgtgatgattgcattcacctcacagagttgaacattcctattgatagagcagtttggaaacactcttgttgtggaatgtgcaagtggagatttggagcgctttgaggcctatggtagtaaagggaatagcttcatagaaaaactagacagaagcattctcagaaaatactttgtgatgattgagtttaactcacagagctgaacattcctttggatggagcaggtttgagacacactttttgtagaatctacaagtggatatttggacctctctgaggatttcgttggaaacgsgataactgcacctaactaaacggaagcattctcagaaacttcttggtgatgtttgcattcaaatcccagagttgaaccttcctgtgatagttcaggtttgaatcactctttttgtaggatctgcaagtggatatttggaccactctgtggccttcgttcgaaacgggt

SEQ ID NO: 115519 - DNA, 511 bp, Homo sapiens
tagcagtttagaaacacactttctgcagaatctgcaagtgcatatttggtcctctctgaggaattcgttggaaaccggataatttcagctgactaawcagaagcagtctcagaatcttctttgtgatgtttgcattcaaatcccagagttgaactttcctttcaaagttcacgtttgaaacactctttttgcaggatctacaagtggatatttggaccactctgtgtccttcgttcgaaacgggtatatcttcacatgacatctagacagaagcattctcagaagcttctctgtgatgactgcattcaactcacggagttgaacactccttttgagagcgcagttttgaaactctctttctgtggcatctgcaaggggacatgtagacctctttgaagatttcgttggaaacggaatcatcttcacataaaaactatacagatgcattctcaggaactttttggtgatgtttgtattcaactcccagagttgaactttcctttggaaagag

SEQ ID NO: 115520 - DNA, 529 bp, Homo sapiens
gaattcgttggaaaccggataatttcagctgactaatcagaagcagtctcagaatcttctttgtgatgtttgcattcaaatcccagagttgaactttcctttcmaagttcacgtttgaaacactctttttgcaggatctacaagtggatatttggaccactctgtgtccttcgttcgaaacgggtatatcttcacatgacatctagacagaagcattctcagaagcttctctgtgatgactgcattcaactcacggagttgaacactccttttgagagcgcagttttgaaactctctttctgtggcatctgcaaggggacatgtagacctctttgaagatttcgttggaaacggaatcatcttcacataaaaactatacagatgcattctcaggaactttttggtgatgtttgtattcaactcccagagttgaactttcctttggaaagagcagctatgaaacactctttttctagaatctgcaagtggacgtttggagggctttgtggtttgtggtggaaaaggaaat

SEQ ID NO: 115521 - DNA, 511 bp, Homo sapiens
tagcagtttagaaacacactttctgcagaatctgcaagtgcatatttggtcctctctgaggaattcgttggaaaccggataatttcagctgactaatcagaagcagtctcagaatcttctttgtgatgtttgcattcaaatcccagagttgaactttcctttcaaagttcacgtttgaaacactctttttgcaggatctacaagtggatatttggaccactctgtgtccttcgttcgaaacgggtatatcttcacaygacatctagacagaagcattctcagaagcttctctgtgatgactgcattcaactcacggagttgaacactccttttgagagcgcagttttgaaactctctttctgtggcatctgcaaggggacatgtagacctctttgaagatttcgttggaaacggaatcatcttcacataaaaactatacagatgcattctcaggaactttttggtgatgtttgtattcaactcccagagttgaactttcctttggaaagag

SEQ ID NO: 115522 - DNA, 213 bp, Homo sapiens
cttctctgtgatgactgcattcaactcacggrgttgaacactccttttgagagcgcagttttgaaactctctttctgtggcatctgcaaggggacatgtagacctctttgaagatttcgttggaaacggaatcatcttcacataaaaactatacagatgcattctcaggaactttttggtgatgtttgtattcaactcccagagttgaacttt

SEQ ID NO: 115523 - DNA, 225 bp, Homo sapiens
ttctctgtgatgactgcattcaactcacggagttgaacactccttttgagagcgcagttttgaaactctctttctgtggcatctgcaaggggacatgtrgacctctttgaagatttcgttggaaacggaatcatcttcacataaaaactatacagatgcattctcaggaactttttggtgatgtttgtattcaactcccagagttgaactttcctttggaaagag

SEQ ID NO: 115524 - DNA, 570 bp, Homo sapiens
agctgaacattccttgcgatgtagcagtttagaaacacactttctgcagaatctgcaagtgcatatttggacctctctgaggaattcgttggaaacgggataatttcagctgactaaacagaagcagtctcagaatcttctttgtgatgtttgcattcaaatcccagagttgaactttcctttcaaagttcacgtttgaaacactctttttgcaggatctacaagtggatatttggaccactctgtgtccttcgttcgaaacgggtatawcttcacatgacatctagacagaagcattctcagaagcttctctgtgatgactgcattcaactcacggagttgaacactccttttgagagcgcagttttgaaactctctttctgtggcatctgcaaggggacatgtagacctctttgaagatttcgttggaaacggaatcatcttcacataaaaactatacagatgcattctcaggaactttttggtgatgtttgtattcaactcccagagttgaactttcctttggaaagagcagctatgaaacactctttttctagaatctgcaagtgg

SEQ ID NO: 115525 - DNA, 427 bp, Homo sapiens
gacctctttgaagatttcgttggaaacggaatcatcttcacataaaaactatacagatgcattctcaggaactttttggtgatgtttgtattcaactcccagagttgaactttcctttggaaagagcagctatgaaacactctttttctagaatctgcaagtggacgtttggagggctttgtggtttgtggtggaaaaggaaatatcttcacctaaatactagatagaagcattctcagaaactgctttgtgatgattgcattcacctcacagagttgaacattcctattgatagagcagtttggaaacactcttgttgtggaatgtgcaagtggagatttggagcgctttgaggcctatggtagtaaagggaatagcttcatagaaaaaytagacagaagcattctcagaaaatactttgtgatga

SEQ ID NO: 115526 - DNA, 639 bp, Homo sapiens
gtgacatggtgagccactacagggttaagcagaagagtcacatgatctgacttacatttaaaaaggaacactatgactgcttttgtgagaacagactataaaatagcagtaatccaggcaggagatggtactggctcagacaaaactaggaaaagatggtcagattttggatgtattttgaaggtaagccttcagaatgttctgatgggttggggtgagatgtgagtaaggaggtgaagaaagacgaagggagaggagatgtgaggagtcacggctgattccaaggtttctggcctgagcaaytggaaggatggactgtatcaactgagatgagaaagactgctggtagaaaaggtttctttcaggaagattagcagtttagttttcagcttgattattaatttgagatttctactaaatatccaggtggaactgtagaacaggcagctgaagtttaggaaagaagtctgggatagagaaataaatccgacagtcagcagcatgtagacagtctttaaagccaggaggttgggtgagatcaccaagggagtgagggtagatagcgaaaggtaaggtagagaaggaacagtgcaagtcctggggcactctaacaggaagaagactgggacaagaggaaaa

SEQ ID NO: 115527 - DNA, 565 bp, Homo sapiens
gaagagtttaacaaacacatattagcaaaggcacataaggcaattccaagaatctaggcagcaagcatcaaagggcagtttcttcaaaatgttacctgtagatgagtgaaatttagttttttttkttgtttttttttttttttttttttgagaggcagtcaggctggagtgcagtggcacgatctcagctcacttcaagctcactccaccttccaggttcatgtcattctcctgcttcagcctcccgggtagctgggactacaggcgcccaccaccatgcctggctaattttttgtatttttagtagaaacggggtttcaccttgttagcccggatggtctcgatctactgacctcgtgatctgaccgcctcagcctcccaaagtgctgggattacagccatgcctggctggccatttttaaactctgtgtagctcaattcaatattaaaatttctggaagaaaacttagtcatggcctagcttgaacttttacatatcctttaccaaagggagggcagagacacatgattgggtagtttaacaagactaaaaccaatgaggaaa

SEQ ID NO: 115528 - DNA, 581 bp, Homo sapiens
aaagcttttacttagaaggaaatacactaagtgcttatatataaaaaagaaaagctgtgcaacttttcttttttgttgcataaatgtgcaacaaaatgtgctaagtgtgcaactaaagaaggtaagccataatcaacctaacagcagaattaataaaatataaaattattttaaaatattttttaaatataaaaatgttattttttgaagacattaataaaatrgataaatctcccggaggatttatcaaagaaaaaaaaagtctaaataaataataatataaatggaaagggtgatataactgcaaatgcacgaaacttaaaaaggtattaaataagaaagaagtgttgggaatgaggttcttaataagtatgccattcaatgagttaagaaacacattacgaaaaagagacttgggaaactatgttcagacattggatttgtgggctttctgggtcaatcaaatagcggtatcaaatagccagtttacatacaagtttgaaattcaagagaaagagctacaggtagaggcaataaaaaacaggtaaaatgtattaagcactttttaacatgtcactgat

SEQ ID NO: 115529 - DNA, 609 bp, Homo sapiens
aactataaaacgtatgtaatacctgaaggtgaatgcattcattgtccaattaaccccttactgacttctgggcattagatattttggttcctagaggtatgttgtcatgtgctacagaggatgatgacaagcaactgcatttaaaaaaaggcatatatgcccacaatatagcaatcaaatagaaaaaaatatgtaaatcttatgagaaatgtaatataatttacaaaattattttactacaaatttatatgcaatacataacaatcacatataaactagtatatgggaagacactatttcatggaactatcaataaaataaaatgagaaagagaaatagatccatgggagatgcayagatagaatttattagacacacacttaaaaatatctatgtttactacattcaagtaattatataacaagatggaactttttttaaggagacataaaatgtataattgacaataaaataaaaattatagaactgaagataaaataactgaaataattcagtagatgcttttagaaggttagataactgaagagaaaattagtgaactggaagacaagtcaggaaaaatagacagactgaaatgtgaagagacaa

SEQ ID NO: 115530 - DNA, 609 bp, Homo sapiens
aactataaaacgtatgtaatacctgaaggtgaatgcattcattgtccaattaaccccttactgacttctgggcattagatattttggttcctagaggtatgttgtcatgtgctacagaggatgatgacaagcaactgcatttaaaaaaaggcatatatgcccacaatatagcaatcaaatagaaaaaaatatgtaaatcttatgagaaatgtaatataatttacaaaattattttactacaaatttatatgcaatacataacaatcacatataaactagtatatgggaagacactatttcatggaactatcaataaaataaaatgagaaagagaaatagatccatgggagatgcatagatagaatttattagacacacacttaaaaatatctatgtttactacattcaagtaattatataacaagatggaactttttttaaggagacataaaaygtataattgacaataaaataaaaattatagaactgaagataaaataactgaaataattcagtagatgcttttagaaggttagataactgaagagaaaattagtgaactggaagacaagtcaggaaaaatagacagactgaaatgtgaagagacaa

SEQ ID NO: 115531 - DNA, 609 bp, Homo sapiens
aactataaaacgtatgtaatacctgaaggtgaatgcattcattgtccaattaaccccttactgacttctgggcattagatattttggttcctagaggtatgttgtcatgtgctacagaggatgatgacaagcaactgcatttaaaaaaaggcatatatgcccacaatatagcaatcaaatagaaaaaaatatgtaaatcttatgagaaatgtaatataatttacaaaattattttactacaaatttatatgcaatacataacaatcacatataaactagtatatgggaagacactatttcatggaactatcaataaaataaaatgagaaagagaaatagatccatgggagatgcatagatagaatttattagacacacacttaaaaatatctatgtttactacattcaagtaattatataacaagatggaactttttttaaggagacataaaatgtataattgacaataaaataaaaattatagaactgaagataaaataactgaaataattcwgtagatgcttttagaaggttagataactgaagagaaaattagtgaactggaagacaagtcaggaaaaatagacagactgaaatgtgaagagacaa

SEQ ID NO: 115532 - DNA, 566 bp, Homo sapiens
tactgcttttcttatttttaaatccatgattgcaattgaggcataaaaacactagtatattttgtaaaggattgtcaatatttagccttatttattggtggagtcttactccttaactttccatatttwaaaaattaaaattaacttgctttttgttatggttttaagttctaatattctaaaaagttacttataaaatttcacaaccagtccatgcttgttgtcttgaaatttaatattgttgcattacaatttgggcatattaaaatcctctgcatttagtataaacaagaaataagtcttctttcttctattaaaaagcagaggctctgaatgtctggacaagaaataattatcctacacaagcaaagatacaaaataaaattaattactagctttatcaaatctttgtaagtgaggaaagctttttcttataataaaaaaatttaagaagataagacagtggggcaagaattggatgagggcagggtagaaaggaaagaggaagggcaacaaaacaaacaaacaaacaaacaaaaaactactttcaattttcccttcagcaa

SEQ ID NO: 115533 - DNA, 580 bp, Homo sapiens
ttgcatttgcaggtagtacaacttctctatttatccgttacttttcaaatgattctttaaagctgaacagcactgatttttcttttgcattgyttttcaatattgtcagaaacatttctataatgaagagaaaattacttcagtaaaatttatatctttattacatttcatatacagttcactttaataaataactatttaactattagtttcaaagacttttagctcagcaacagttcttttctcattatagctgctatataactgcatcattgtagctaacgctttttgcttcaccattattcctctttaaaaactattttcctttcagataaactctaacaattgctgcaataaattctaacccaagaaaacagtcattcacaggtggagatagtatttcatctacattgtaaatgtcatatgctatagtatctaaggtcaaccattctatggacactgaaataacagctatatttgctttcatctgctcatatcaaattcaaattcaacaatacataaaatcagacttttttataaaatagaaactttggatgaataactagtttgaataatgaaa

SEQ ID NO: 115534 - DNA, 560 bp, Homo sapiens
tcatataaccttatttacctctataaaagacctctatccaaatacagtcactttctgaagtacactagggattaggatttcaatgtataaatttagggggataggactgggcacaattcagtccatacatgagggaatttgtagaacaatttatagttgattatactaataatattttctctctgatttagccatgatactcttcactgctacaggttaaaataaaggacaatattctctgggcctgtaaatttttaatgaacaacttaggtgaaatttacgtaaacttagacatctaacaagcacgaccttgaaggaatgacatatccaacaatattttstggagaagagggtcgagaaaactctggagcatagatgctaaacgtgaaatgtgagtcctagatgggactgacattttagaagaacgctatcagctatcaagatatagaaaatggtactgggcatctaagaaaggagaggttcctcagaagatactgaggtcgcaccaaggttagctctaatgatataagctcccagaagaaggaagagtttgtacactt

SEQ ID NO: 115535 - DNA, 560 bp, Homo sapiens
tcatataaccttatttacctctataaaagacctctatccaaatacagtcactttctgaagtacactagggattaggatttcaatgtataaatttagggggataggactgggcacaattcagtccatacatgagggaatttgtagaacaatttatagttgattatactaataatattttctctctgatttagccatgatactcttcactgctacaggttaaaataaaggacaatattctctgggcctgtaaatttttaatgaacaacttaggtgaaatttacgtaaacttagacatctaacaagcacgaccttgaaggaatgacatatccaacaatattttctggagaagagggtcgagaaaactctggagcatagatgctaaacgtgaaatgtgagtcctagatgggackgacattttagaagaacgctatcagctatcaagatatagaaaatggtactgggcatctaagaaaggagaggttcctcagaagatactgaggtcgcaccaaggttagctctaatgatataagctcccagaagaaggaagagtttgtacactt

SEQ ID NO: 115536 - DNA, 560 bp, Homo sapiens
tcatataaccttatttacctctataaaagacctctatccaaatacagtcactttctgaagtacactagggattaggatttcaatgtataaatttagggggataggactgggcacaattcagtccatacatgagggaatttgtagaacaatttatagttgattatactaataatattttctctctgatttagccatgatactcttcactgctacaggttaaaataaaggacaatattctctgggcctgtaaatttttaatgaacaacttaggtgaaatttacgtaaacttagacatctaacaagcacgaccttgaaggaatgacatatccaacaatattttctggagaagagggtcgagaaaactctggagcatagatgctaaacgtgaaatgtgagtcctagatgggactgacattttagaagaacgctatcagctatcaagatatagaaaatggtactgggcatctaagaaaggagaggttcctcagaagatactgaggtcrcaccaaggttagctctaatgatataagctcccagaagaaggaagagtttgtacactt

SEQ ID NO: 115537 - DNA, 615 bp, Homo sapiens
gattaaataatatttttcttgtagagttaacctcacagtgatccttaaacagagctcatttaactctgaacaaaattttcattaccagtttaaatacagtgatgctaacctatttgtgaaccctggtcagggctactaatctcattgtcattgcttgttaagaacttactttattcctattacttagcatgatgacacaagctattttaatccattcacattttaacttagcagagcatacaagcaaagctaacttgaattccagaaaaagatcccaagtaccttattaatgtatttttctcttaattgtacaaaaataaaaaagtcatggaaatcaaaagtaggacctttttaccttcgaggtatttactgtagtttcagcatgtattaggcatcaatacagaaagattyctggacaatacttgatgaagtctaccccctcccattccccatgttcataggagcatgaccagcagactaacgcagcaagcagatgatgctcctgatgaaaagggcagacccagttgagcctgggctacgctgacacagactttgttgctcttcatttggcaaaggtaaatctgagttgagacttttctttgaaatggttgtgtg

SEQ ID NO: 115538 - DNA, 598 bp, Homo sapiens
cttcttttcctttgggtaggtacccagtagtgggattgctggatccaatggtagatctacttttagctctttaagaaatcccatactgttttctatagaggttgcactaatttacattcccagtagcagtatataagtgttcccttttccttacacccactccaacatccattttttttaactttttactaatagccattcttgcaggaataaggtggtatgtcattgtggttttaatttgcatttctctgatgattagtgatggtgagcattttttcatgtttcttgaacatttgtgtatcttctactcatgtccattccccactttttaatgggaatattttttktgtgtgtggtaatttgtttgagttccttatagatctggacactagtcctttgtcaggtgtgtagtttgcaaatattttttcccattctgtgggttgcctgtttattgtttatttattttgctatgcaggagctttttagtttaatttggtccctattatttatttttatttttgttgcatttgcttttggggtcttactcatgaattctttgcctaggctggcatctggaaaagttttccaacattgtttt

SEQ ID NO: 115539 - DNA, 596 bp, Homo sapiens
gtcttacgctctctgctaaggaatttagatttttatcttgtgtactgttgctgtaaacatttgtattttcaaagggactatgctgtctcatattaaaattactggagtttataccttattttcctcctgaattataaggtccttaaggacagagactgggtctttattcatcattccatgtcctacttgactttcaaagtccacctaggtcatgcattttgtcaaatggagcactacatcatatattgaaatccatagagacaatagagatctatctcccttgagaatctaactgaagctttggagagctaatgggaacaatggttaagtaaacacttgaaactaatacatccaaatgaattcacatagattctatgtaaattttgcttaatgtcaagtcaaggaagtccagcgaacatgattggtacaagttgccttagcaatgtgaactcacccaygtcactcatgcatagggttttcaacaataattagtgtattaaaatgagcccttaataagatagagtgtgttcaacctaatgttgccatgagaacttgcctttcaaattttcataaatgtaattttatcacagaatcat

SEQ ID NO: 115540 - DNA, 574 bp, Homo sapiens
ctgggtttctccatgttagccaggctggtctggaactcctaacctcaagtgattcacctgccttggcctcccaaagtgctgagattacaggcatgagccaccacgtccagccaatgagaaaatcttaaaagcaccaagtaaaaaagacayatttttttaaaaaagaacaataaaaagtcttacaactgacatcccaacaaaaattttggaagttcaaaaacactggaataactaccaacaaaattacagaaatagaaaatatatattcccttatatgtattaagaaaattactcaaaaattttaaacattcccacagacttctgatttctgtcaagatgaagtaagcccactgaatcttatctcctcccatgattacaactaaaatatctaggcaagatatggaaagcaactacatgagggctctgaaaagtcagcaatagcaaaagaattgaaaagtaagtcaaaacttaaagaacaaccattatggaggtgaggttacagtattgtttttgttttttctctctgctctttatcttttggagggctgcataggatacaaaactgcacagcagg

SEQ ID NO: 115541 - DNA, 521 bp, Homo sapiens
agcaagttgctctttatcatatatactaataatctcccatatttcttcctagcccagttatgtatttaaagaatactgattatatttcattcaacatttccatttattttgtatcaaggctattttaggatatttaatcaatttgatattgctggaaacacaaccaaatcttattttcctgtactcattattaatcttgttcacatttttttgctacctggaagaacctataagaacatcaaaccctttgaacctgtattgatcaggacaggttgttcttacagagaactcctcttctccttctgactacaagtacrtaccttcatttgagaggccaagcaaatacaatcaggaacaaaaagagagcagatggaaaataattccttttgtttatttttgtaatcctgctgtcttggtgcaatttatgttgctgtaacaggatacctcaaactgggtaatttacaatgaacagaaatttatttgctcatggttatagaggctgggaagttccagaatatggt

SEQ ID NO: 115542 - DNA, 521 bp, Homo sapiens
agcaagttgctctttatcatatatactaataatctcccatatttcttcctagcccagttatgtatttaaagaatactgattatatttcattcaacatttccatttattttgtatcaaggctattttaggatatttaatcaatttgatattgctggaaacacaaccaaatcttattttcctgtactcattattaatcttgttcacatttttttgctacctggaagaacctataagaacatcaaaccctttgaacctgtattgatcaggacaggttgttcttacagagaactcctcttctccttctgactacaagtacataccttcatttgagaggccaagcaaatacaatcaggaacaaaaagagagcagatggaaaataattccttttgtttatttttgtaatcctgctgtcttggtgcaatttatgttgctgtaacaggatacctcaaactgggtaatttacaatgaacagaartttatttgctcatggttatagaggctgggaagttccagaatatggt

SEQ ID NO: 115543 - DNA, 571 bp, Homo sapiens
ccaggtttccagcagtaattcagcctccaactccctgactctcttggagtaattcttttcctcctcattctgtaagatatgtggctccagccacttttgcaggctttcagtgcttgttaagtgaagtttcagccccacttacccactttactttttgttttgtttttaaaaatgtgtggtctccaaagatgtrtgttttgccttataaaatgaaaacaggcttttctttgaatacagacattagattatatattttttggaacagcagaatagttcaaaacatgaaaacctaaagcaagccgtcttgatcagaaatcatagcccttttagtataacattagtagcccctcactgttaaatgtgtttttaccacgaataaagggctacaaaaattcctgcaatttaggtacagagggtactgaaaaagagagagagatattaacttacccaaaataaataaatcatgttactcatttacctgagattcaaagccagatattttgatctcttaccttttacttattttaacccacgacacttgcttccaaatatagctggaaaaacaaatagg

SEQ ID NO: 115544 - DNA, 547 bp, Homo sapiens
atttcagagcgactcgaaaaacagtgcccatagagagctgtgctttgaaacaaggtttaattaatgctttcatttttagagctgccaaaacaccatgacttaggacactaatgtcactgaaactcatttgtgcctcccatcatggtcttcagcatcatttttaaagctttgagtgacaggcttccacatatcataatgttactgataatctgattgctcaccctccataacttagaatcctccataactctattgggcagaatcttcacacatctgatctgcatatttcttatttaatagaaattagggttagacttctgttatttatacttatactaataattccaagtcctggtttccccctgaccctgattttcaaggctgatggcatcaggaacttatagtttggctccctggaaccaggacttkgttcttgagcagcctgcacatttagaccaatgcttcactgaatactgagccaccttctagtgaaagctcctcctaacagactcactcacccatgtctatcagaagagaagtggttgga

SEQ ID NO: 115545 - DNA, 625 bp, Homo sapiens
actatttgctataagactttacaaggaagtattattagaagtaatacagaataagagatagaattgattgtgtggaagaaaccatacattmtacatatttccctaataatgtgataatcagattgttttcctaaagcactcactctccttctttcctactatctccttatctctcacttttactttaatgatcttgttttgtgttttcttgaaatgatctgaagcctcagaagagaactattactatcaaatctcttcacccacgtacatgtagccccatatacttgccatctcttctgttgctatatatgaagtactgatgttccaatttacagcaaagcctcttcatgtgcactctgtcccaccaactttcaccagtcaagggaactgacattctcttgtattagcttgaaataatagtttcaattctagtgccctcagcaacacaaagaggaattcaagtcttagtcaaattgccaaactttcttgtacatcatcaagatttccttctctcctgaatgtctccataacatgttataacttattatatctttgaaagaagaaaacaaaacaagacaaaaacaaatcctgcagacactactttccttttcatttgccacttcaa

SEQ ID NO: 115546 - DNA, 625 bp, Homo sapiens
actatttgctataagactttacaaggaagtattattagaagtaatacagaataagagatagaattgattgtgtggaagaaaccatacattatacatatttccctaataatgtgataatcagattgttttcctaaagcactcactctccttctttcctactatctccttatctctcacttttactttaatgatcttgttttgtgttttcttgaaatgatctgaagcctcagaagagaactattactatcaaatctcttcacccacgtacatgtagccccatatacttgccatctcttctgttgctatatatgaagtactgatgttccaatttacagcaaagcctcttcatgtgcactcygtcccaccaactttcaccagtcaagggaactgacattctcttgtattagcttgaaataatagtttcaattctagtgccctcagcaacacaaagaggaattcaagtcttagtcaaattgccaaactttcttgtacatcatcaagatttccttctctcctgaatgtctccataacatgttataacttattatatctttgaaagaagaaaacaaaacaagacaaaaacaaatcctgcagacactactttccttttcatttgccacttcaa

SEQ ID NO: 115547 - DNA, 603 bp, Homo sapiens
ctaactctggcctgctcgcatattcagaggccaaacaacctggtattgacagcctcaatttgggaggggaacatgcagcagcattgtgccatggtttgttgaggaaaaacaagggaagatttaaaacaaagctgtgaataggaacagtagcccttgtgtcttgaagctgattgacttttcctttttagacctttgtgaaagtgttaccctctcctttaaataagggctatactgtggtaagagraatatttaagatataattcagtgactctaggaatgggagcatttacacttcttgaaagaaatcaggtgagagctattaattgcaaatgccatatgaaagcatcagcctgagcggtaggctcagtgctaggcaaggcatatataagaatactaatactaataggcattttttccaaaccatagatatatattaccaatcatatgttataaattatatattatcataatatataatatatggcatatattatgtctatgtatttcaatcatataacctatttacatattttatatacagaaacatacacatgtagataaaaagaccaatcaattaatggtactaacaaaagaaagaagata

SEQ ID NO: 115548 - DNA, 458 bp, Homo sapiens
aaaaaaaaaaaagacacaactgctgctgtaccaacacttatagactgagacttgcatttttataaattagggtttctgaaagtgaaatccttctatcatagaacatgcactttttcagtttcttaaatatcctacattgcttttcagaaatgtaattaatacttctattaaaatgtgttaatatttctatttctcatgtatttctgcaaattttaaagatattrtaataattgcacactcttcccagcctctgtatctatcattctattctctatttccatgagatctagtttttaatgttcttatataagctatcatgtggtttttgtcattctgtgcctgagttatttcacttaatatattgaattccagttccatgcatgttgctgcaaatgacaagatttcctttttttaaaatgactgaattatctttgaacttcctgtatctacaggtaact

SEQ ID NO: 115549 - DNA, 602 bp, Homo sapiens
taaattagggtttctgaaagtgaaatccttctatcatagaacatgcactttttcagtttcttaaatatcctacattgcttttcagaaatgtaattaatacttctattaaaatgtgttaatatttctatttctcatgtatttctgcaaattttaaagatattgtaataattgcacactcttcccagcctctgtatctatcattctattctctatytccatgagatctagtttttaatgttcttatataagctatcatgtggtttttgtcattctgtgcctgagttatttcacttaatatattgaattccagttccatgcatgttgctgcaaatgacaagatttcctttttttaaaatgactgaattatctttgaacttcctgtatctacaggtaactatatttcttgcaagacttggaaatttttcaactattgttttgttaaataggttttctatgtctttgcccatctctcctccttctggaccatacaaaatataacgatttaatccttttgttttgagacagagtctcactctgtcacccaggctggagtgcaggggtgtgatcttggtccactgtgacctctgcctcccaggttccca

SEQ ID NO: 115550 - DNA, 490 bp, Homo sapiens
aagtgaaagaactctagtgtttcaagaacaaggaatggctctatgagctatccctaggaaagcatrtttaaaatgaactaaaataaggatcttttgcttagcacagaatgtatgaggtgtttttaaaagaggtggcctgaggcagtggttatatgggaattcatacaaatgttagagatttgttagtttttacattatacttctattaactgtagaattactattagtatagagacctcaagtgtttcttatttctgaagtcttcttagtagtgaaatgatgaggggtatagtaatgtccatttgtaataaaaatgattaatgaaaaatagaattttttattttttaacttttaggattcatcatatgctgaacatctttttaaagttctgactgtattgtgcaatgtcttttaattcatgtgtgttcttccttatctaaaaatcatttacatttacaaataagaatatttttacctgcaccaatcaaga

SEQ ID NO: 115551 - DNA, 571 bp, Homo sapiens
tataagacttgcctctcaggggtggagactaagtagtcacacaggggctgcatgcctacatatctcaccttccagtaaaatccctgaacatcaagactcaagtgagctaccttgttgacaaaatttcatgtgttatcaaacatcattgttgggagaattaagtattctccacatgacttcactgggagaggaaacatggaagcttctgccttgtttctcctggacttcctccattcatgtttttcctttgctgattttaatctgtatcctttttactgtaataaaccataagtgtgagtatgacmgttattctaagttatttgagtctttctagtgtgaaaattttcagaatcaacatggaatttttaaaaacctgacagatagaaccaggaaagattacgaagagaagattcttatgcttatatgcctattaacaaaaagtattgtaaaatactctgcaaaaatcttaactttgcacagaggccactgcaacctttcacaaaaaaataccactgcaagcatgtccgcttctgtgcttctgcacagcaaaggaaactattaactaagtaaa

SEQ ID NO: 115552 - DNA, 508 bp, Homo sapiens
agaaagatgtgattattcaacacacatgtaaggaagaagtgacagctggttagagaaaataaatttgattagcaattggccaaatctagactagcagtagactaccacaayatattatgagatcttatcacatgatatttgatacttgaataaatattaaaagaaagcaacatatttttaaaaatacataatagtgaatttttagtaaagtatgctaatggaaagaagacaaacattttatattctagggcagatgtcgccaacccccaggccacagaccactatccatctgtggcctgttaggaaccgggacacacagaaggaggtgagctgtgagcaaatgagcaaagcttcatctgtgtttacagccactcccaattgttcccattaccacccaagctacatcttctgtcagatcagtggtggcattagactctcataggactgcagacactattatgaactgtgcatgtgagggatctaggttgcatactccttatgagaattc

SEQ ID NO: 115553 - DNA, 621 bp, Homo sapiens
gttatgtatgagaatgccctacatagacatttatgcatttgctcttaattcaaagaattaaagttttaagatgtttccaagttatttgcaactaaatcagataaattataacattcataaatggaaagcaaatattttaaaatatcaagaattattgaatgtcggtaagtgaggagtaaacagatgttcattgtgtgaaattgtttatagtaagaacttggaaaaaaacaaacaataagatgaagcattaatatggaacagtatttttagtggtggaattacaggtactttatttttacttttcagcrctgttcatttttatagtacttttaaattatcattcaatcactttaaatttagtttatcttcattcaacatattagtcattcaacattttaatacttttatcccttccaccataaatatacaataaataatttgctttgaaaagatgatgaatcagtgctctcattttttctcatgcaactaagatgtgcttcagtgatactaatttgtaaatcaatatgacaggagacttcaggtagatcctaaaataattctccccttcaacatgggtttctattctttggaatgttagctagataatgaccctaaagacct

SEQ ID NO: 115554 - DNA, 621 bp, Homo sapiens
gttatgtatgagaatgccctacatagacatttatgcatttgctcttaattcaaagaattaaagttttaagatgtttccaagttatttgcaactaaatcagataaattataacattcataaatggaaagcaaatattttaaaatatcaagaattattgaatgtcggtaagtgaggagtaaacagatgttcattgtgtgaaattgtttatagtaagaacttggaaaaaaacaaacaataagatgaagcattaatatggaacagtatttttagtggtggaattacaggtactttatttttacttttcagcgctgttcatttttatagtacttttaaattatcattcaatcactttaaatttagtttatcttcattcaacatattagtcattcaacattttaatacttttatcccttccaccataaatatacaataaataatttgctttgaaaagatgatgaatcagtgctctcattttttctcatgcaactaagatgtgcttcagtgatactaatttgtaaatcaatatgacaggagacttcaggtagatcctaaaataattctcyccttcaacatgggtttctattctttggaatgttagctagataatgaccctaaagacct

SEQ ID NO: 115555 - DNA, 528 bp, Homo sapiens
tttgctgctgtaacaaattaccacaaacttggtggcttaaatcaacataaatttatgtttcagttctagaagtcagatgcacaaataggtctcactgggctaaaatcaaggtgtctgccaggctgtgttccttctggaggctgtgggggagaatctgttttcttgccttttccagcttctagaggctgcaacattcyttggcttttggctccttcctctgtcttcaaagccagcaatggcaggtgaagctcttctcatcctgtttcactctgacctcttctgcctccctcccactgtaaagaactcttgtgaataattatgcccacccagatagtccagggtattgtccttattttaacgtcagctgattagcaaatttaattccatctgtatctttaatttccccttgcaattcccatgtaatatagcatattcacaggttctagggattgggacatggatatctttgagggactagtattctgtctgccatagctggaggtctgcagaatcagctgggttctaggt

SEQ ID NO: 115556 - DNA, 552 bp, Homo sapiens
tgtcggcagggctgcgcttcctttcaaggctccaggggaggatccttctctgcctcttcccatgtctggtggcggcgggcaatccttgacgtactctggcttctggctgtgtcactccaatctctgttctcatttctcatggtgttttctcttctgtgtgcctgtgtatctaaatctctcttttttaattttgatttttattgttttttgagtccggtctcactctgtgccccaggctggagagcagtggtgcaatcatggctcactgtaacctcaaactactgggttcaagcgatcctcctgcctcagcctcccaaaatgctccttaggcagacgccagtaattgaatctaggacaygtgcagttcggtgtaacctcatcttaacctgattacatctgcaaagaccgcatttccaaaggaattcgcatacaggggtaccaggagctaggacctcagtatgacttttggggggtgcccattccacccacaaaagtttctaatcatgtttgacatttatggagctatgactttgttacaggactgtagcaggc

SEQ ID NO: 115557 - DNA, 552 bp, Homo sapiens
tgtcggcagggctgcgcttcctttcaaggctccaggggaggatccttctctgcctcttcccatgtctggtggcggcgggcaatccttgacgtactctggcttctggctgtgtcactccaatctctgttctcatttctcatggtgttttctcttctgtgtgcctgtgtatctaaatctctcttttttaattttgatttttattgttttttgagtccggtctcactctgtgccccaggctggagagcagtggtgcaatcatggctcactgtaacctcaaactactgggttcaagcgatcctcctgcctcagcctcccaaaatgctccttaggcagacgccagtaattgaatctaggacacgygcagttcggtgtaacctcatcttaacctgattacatctgcaaagaccgcatttccaaaggaattcgcatacaggggtaccaggagctaggacctcagtatgacttttggggggtgcccattccacccacaaaagtttctaatcatgtttgacatttatggagctatgactttgttacaggactgtagcaggc

SEQ ID NO: 115558 - DNA, 552 bp, Homo sapiens
tgtcggcagggctgcgcttcctttcaaggctccaggggaggatccttctctgcctcttcccatgtctggtggcggcgggcaatccttgacgtactctggcttctggctgtgtcactccaatctctgttctcatttctcatggtgttttctcttctgtgtgcctgtgtatctaaatctctcttttttaattttgatttttattgttttttgagtccggtctcactctgtgccccaggctggagagcagtggtgcaatcatggctcactgtaacctcaaactactgggttcaagcgatcctcctgcctcagcctcccaaaatgctccttaggcagacgccagtaattgaatctaggacacgtgcagttcggtgtaacctcatcttaaccygattacatctgcaaagaccgcatttccaaaggaattcgcatacaggggtaccaggagctaggacctcagtatgacttttggggggtgcccattccacccacaaaagtttctaatcatgtttgacatttatggagctatgactttgttacaggactgtagcaggc

SEQ ID NO: 115559 - DNA, 459 bp, Homo sapiens
tatgaaatttaagacctgtttaatgaaaatgtctttaaatagtaagtacaatgtttttctttttataaattactattctgtcacttttcctaaatatattcttttcttgtacatattcctttattgacttttctcggtagattagtggcctttgggggaaagaaggcttgmaaagtttctcttgaaagatgtttctcccaaattaaaattttaagccataagaaatgaagtttttctagttctgcattcacagtctggctgttatttgtgctttcaattcataattgttgttgactgaagacagaatgacttatgaggaagattttcccttttgcttttggaaacgaaattgttttaatgacatgccatgattttacataccctagtgtgtcttttccacaattatatttcttttgagcataatagtttcagtattttacagactatggatgggaagca

SEQ ID NO: 115560 - DNA, 539 bp, Homo sapiens
cttttgctagttctcaaaatatgtctacctaattaatatataattttatagctctttatcatatgaagtgggctaataactacaactaaaatattctacctaagcattcttatctggacagtatatgtatatggtagtaggaaatgaaaaccagcttagaaaaccggcttggaaagtatagaacatgcgctatgctacagcctgtgtcctacataaccttttaaatgcatgacctttaagttgctgaaggttgcctcagaatttggctcagtttgatcgaaacatctgttccccttgcaggtatactgtaaggacttttttctcagttggattcagaacacagcaagtgagcccttgtctgtccaatcacacacaccccaacacttgtaaatcaagttctgggaggacaacagcaggtccatattccgtcaccctttctcagccagctaggccaactgactgctgtgagaactgctcttatcatgtcatcaaatcaaaacatgttgagatgagggactayaagaggcatctgcagaatt

SEQ ID NO: 115561 - DNA, 617 bp, Homo sapiens
atcttctttcacttcagaattttcagaatacttactaaatagatttccccaagattctgtcatttctatttcctacttggctaaaataattaagatactgctcataatttaacatgattcaaaggacaatgagtcaattacaaatcaaagctaaactgatattcctgctacctgtcctatgatgaaaatatcctactatgaatcagttaaattatggaatatacaaataattaaatattactcagaaattaaaaatcattctctaaaagaatattaatagaaatggaaaaaccctcaaaaagtaaagcttttttaaaaatgaagttatgacactgtatcataagcaaagtacagtgtcacttctgtgagttttcttgcaaaagatgcacaagctgaatctaatcatgaggaaacatcagacaaatcaaaactaagggatattctacaaataactagcctgcaatcttcaagaakgccaagatcatgggcaagaaaagactgaggaactcttccatactggagactaaaaaaacatgactaaatgcaacacataattctaaactagatccttctgctatataaagaacatagtcgggacaactagggaaagtttaatg

SEQ ID NO: 115562 - DNA, 578 bp, Homo sapiens
ggctggggctaggcatgctaatgattaggtggtgaccctaaggactagtggaaaacagaagtttacagaagttcatcttttctctacaatttcctcactagaactcgtctccccaagggccaggtgacaaacagggctccctctgatattacccccacccctactcttatctcaattattggtgattttatcattggtcargatgaccctacaatctcctccattctaacctcaaataaaccttttctgctcttctcctcagctattcactcccacagtcataccaaaacaatgctattctatggaacttctgtgatgatggaaatctctctctatgctgtccaatatagtagccactagccacatatagttgtgttgcacctgaaatgtgcctagtgcaactgaggagttgaattttttattttatttaatttaaatttaaataatcattggacaatgatgctctagacctcatcatcaccaataattgtactattgctcaaattgctttttctaattttccattctttgattactttcttctttcagttcaccttttcaataaccccaatatttct

SEQ ID NO: 115563 - DNA, 578 bp, Homo sapiens
ggctggggctaggcatgctaatgattaggtggtgaccctaaggactagtggaaaacagaagtttacagaagttcatcttttctctacaatttcctcactagaactcgtctccccaagggccaggtgacaaacagggctccctctgatattacccccacccctactcttatctcaattattggtgattttatcattggtcaagatgaccctacaatctcctccattctaacctcaaataaaccttttctgctcttctcctcagctattcactcccacagtcataccaaaacaatgctattctatggaacttctgtgatgatggaaatctctctctatgctgtccaayatagtagccactagccacatatagttgtgttgcacctgaaatgtgcctagtgcaactgaggagttgaattttttattttatttaatttaaatttaaataatcattggacaatgatgctctagacctcatcatcaccaataattgtactattgctcaaattgctttttctaattttccattctttgattactttcttctttcagttcaccttttcaataaccccaatatttct

SEQ ID NO: 115564 - DNA, 578 bp, Homo sapiens
ggctggggctaggcatgctaatgattaggtggtgaccctaaggactagtggaaaacagaagtttacagaagttcatcttttctctacaatttcctcactagaactcgtctccccaagggccaggtgacaaacagggctccctctgatattacccccacccctactcttatctcaattattggtgattttatcattggtcaagatgaccctacaatctcctccattctaacctcaaataaaccttttctgctcttctcctcagctattcactcccacagtcataccaaaacaatgctattctatggaacttctgtgatgatggaaatctctctctatgctgtccaatatagtagccactagccacatatagttgtgttgcacctgaaatgtgcctagtgcaactgaggagttgaattttttattttatttwatttaaatttaaataatcattggacaatgatgctctagacctcatcatcaccaataattgtactattgctcaaattgctttttctaattttccattctttgattactttcttctttcagttcaccttttcaataaccccaatatttct

SEQ ID NO: 115565 - DNA, 488 bp, Homo sapiens
gaattcaagatgagattagggtggggacacagcccaaacatgtcaggtaacttcagtggaatgatgactgcataagtcatactgtactgaatggaagagagagttggaacagtgaacatattctactttttcaagaatttctcttttraaggtatgggaaaaagatggcacaaaattcatttgaggatagcatagatctaaaggcatttaaaaccttgagtcttgaacatatttataggcacggaaaaaattctacagaaaggaaagattgtaattataggagagagaaaaacagtgatatttctgaggatattgtggggagtgggtgctaaaggaccattggatatatcattcttaaacagaagggaaagatgggtacgtgaaacagaggggcaaggtaattggtagttggcagaggagtggttgaatttaaggatttagggtgaagggagaaaaagccccaggagtgccaagaagattaataaatg

SEQ ID NO: 115566 - DNA, 647 bp, Homo sapiens
tagtcataccccctatgctgtctctttgttctcttccagcaacatacagagtgctctcattccatctcagagtagtcttactcatctagtgtcagtgtgtccaatatagatccatgacatttggggcagacactgccctaacacaaattgtaattgcagccatttgctatcactagatgaagctcattaccttatgcaagtccatccagttacaaaaagaaaatatctttgrcctttgtaaagagatgagaatatttgctcacaagtgatcctccgtgatctatttaggaatcttatcaacagttgtgactgttatgtgaaatgatatctgtgggtgcacaactggaacaataggaataattattttttcttctattagctcctgtaatgagcagttttctccagaaagcagagagtatatcaaactccacactgccctggaattttaaaaagctaaatatgacttcatttatactaaaatctttaattttcactggtgattgaaacagaatcaatagatttgagtaacaaggaaaaaaagtattttctttccagctactgtaatttctactcagagtataatggctttgaactttgctaggtaatcaaaaatattaaatttgctttgtctagtttcttttaagatt

SEQ ID NO: 115567 - DNA, 599 bp, Homo sapiens
agggatgacaaagcaattagtggagccatcttcctctcagttttcaagtcaattttcctattggaaccaggaaacctcttaaacttgctcacctaccaggaaaacgtaatggtggttgataaagcattctttggaggaaccaaggtttttagcaacctcagtaattatggtttcctttgctgctgacactttccttgaaaaacagagaacttccaggatcaataaaacattctggacaaaatgtaatcttccaatcatgaagaatgagttcaacgaatgccacatttttcatccttccattcagtcattcaatgattgtttattgagcatctatctggtatcaggcactgttctagctgttttgcataggtaattgagrcacatgccctgccctcaaattattcacaacctaataagaaacactaaaacataagcagatggttatgttacagaggggatagaaatttgtacaagaaattgtagaaatacaaaggaccctatgatctattctaatagtgcgttcatgaacagttcaatccatgggttatatttgagcaactagtgctcaaatgaataataagaggggtaagtgactgata

SEQ ID NO: 115568 - DNA, 576 bp, Homo sapiens
acatccttgtgaatcactggtgataaccacgtggattatccttatattatgacctgaaaattaaagagagaataaggcttataaktaaggaaactagcagactcagaaaatgatacatatgggaaaccaacaattctacactcaaactttgaatggaaaaagttcttaatgatgctattaggaaaaccttagatttatcactagagaacaaattataaagcatcttgcattactgtattatgagggaaaaaaaagcctatttaggcaataggctaagtcccatccacaaaaccagtaagcaggagggtaacagcctttctgcacttggcctttgtcatacggcatagcaggagacactgcagtatgtgctgggtggaaatctccatccactgtgggtgagtactatgccttggagagtatactattctatgaaaacatgacaaaggacccttatctagaggcaagatacctggattgtgttctctcctttgttttctatgatatctttctgctgcccttattacaacattcattgttatgtaataacaacaactcttatgtagttgcttatttatt

SEQ ID NO: 115569 - DNA, 613 bp, Homo sapiens
tcatttcaatggctatatttgttattggttgaattttttgckcctaatatcctcttttttggttaataggctctattttcttaatcttattaaaaattagaaacatacttttccattttctctttattgttgttcctttagctctggtgtttgcttgtaaattttcctattaattgaatctattactttttgcccaaaccaatggtattctcatatgtttctaattttttctcatgagcttttcttggtagaagatatcttacttgagaataggattccaaagcaaatcctatacttgtcctttcaagttttgaatcctggagaaaaagtacatttgttttaacacaagtaacttattttccattcttggcctaggccatgtgacttacttttacagtgtgttcaaatctcaatgggcaatgtttctttatgctacagtatcaaaagggctataatttatacagtaagccttgttcccacttcttccttcatacagtgcctgcagctttgacatccacaccaacataggcagacatccttaagtatgaacctatagtcctcttggtgccaatgtctaatcttcatggatttaagtttcttcttcatttctggc

SEQ ID NO: 115570 - DNA, 504 bp, Homo sapiens
aatctatttatgccctgggtcagccaaggcagggttggaatgagaaaactgggatagctaagcccttcgggggcaagttattttagtaagaaacccattttgtagaatttaataaattctargttttgtcacatgctttttttcctttctattttttccctgttttcataaaaaaaaaaaaaaaaaaaaaaaaaaaaaaaaaaaaggcttttttatttttagaggacaaatggaaaagtctctctctttccatgactcagccaaaaaagtttgaaggattatggtgttttacaaggccaaatgtgaggcatcagggatggaaagcttggtgaggtgggggcttggggagggatgcctactgcctcacatcctttcaggctaaggaaaaaatgtatttggcatccaaagtgcatgacaaatttgtgtaacttcacatacatcctactggtagggacaagagaagatgtctaatagtgagacatagagtcagcaaggtaggcaaaa

SEQ ID NO: 115571 - DNA, 617 bp, Homo sapiens
tggacatttctgccttgaaacttgatttcaataaatgcatctatatgtgttgttatggcaattagtgtgcagtagaaatgtgttgaactctagggccttttatttgaacagcttcatgaaacttaacgttattttccagatacctaatcttgttgacaatgtkttcagcctcatttctgaacagaatattcatcttcaggacaagtaacagcacaacatttacctctttatgaaaaaaatgacaaaagaataaaaaatgaaatagaaaaaggattcttataggaaatcatgtgaataaaacagagaacataggacaaattactttttatcatgtactagtccagcaaatacgtattatatattttttgttttcctaagtgttctgtttttggtcctcatcttttttctcattcaagctttgcctaggtttgcaatctgtcccactaatctgattaaactaccatgtacatgctgatgactcaaacctgtgtctccaacccagttgcctgctgggatccagcttaagatatacccaaattcttacaggtcccctgttcacaatgtaccacagggtttttaagctcaacacatttgtaactatgtttatcttctcccca

SEQ ID NO: 115572 - DNA, 528 bp, Homo sapiens
taagacactgttgatgccagtgttagaaatgaggtgtctctytatttcacagccaaatgttttcactggaaatagcaatgaactaaaaactagaagctgccctcaaggaggttgcaatctggttggagtggaaggagaaggagcacagacattttggcctgtggcaggtggggggatttcagagacaattccatggaggagaggatcctaaattggagcctgaaagtgggatggctatgggtaagatggagtggagccgggcacggtggctcacacctgtaatcccagcacttcagggaggcccaaggcaggtggatcacttgaggccaggagttcaagaccagcctgggtaacacgacaagacctcgtctatataaaaacttaaaaaattagctgggcatggttgcatacacctgtgatcccagctactcaggaggctgaggtgggaggaccgcttgagcccaggaggtggaggctgcagtgaattgtgataatgccactgcattccagcctggacagcaaagtgag

SEQ ID NO: 115573 - DNA, 421 bp, Homo sapiens
tggccaaatgctgatttttaaattttgttttgttttaagcaagctattaacttggttggatcaagctgtaaaccatctcttgagcaccagtttaaatctcagtttagtttgtacattcttatctgggctgcttgagcctgcctcatgcatgcatggactaggaattggccagagatttggacagtttatacacagaatttgtggttcttcttctctgcgtctctctrtttatggattctccctctcactttccaatggctgtggttgcctcgaactctatcctttgattctttaggccagaaggactgcagactttctatcatcattttatctgccctgtgtgactctaccatggcctgccttttggataaaagccataaaaactgtgaaactcatcgcatatgcatcttccttttccaag

SEQ ID NO: 115574 - DNA, 421 bp, Homo sapiens
tggccaaatgctgatttttaaattttgttttgttttaagcaagctattaacttggttggatcaagctgtaaaccatctcttgagcaccagtttaaatctcagtttagtttgtacattcttatctgggctgcttgagcctgcctcatgcatgcatggactaggaattggccagagatttggacagtttatacacagaatttgtggttcttcttctctgcgtctctctgtttatggattctccctctcactttccaatggctgtggttgcctcgaactctatcctttgattctttaggccagaaggactgcagactttctatcatcattttatctgccctgtgtgactctaccatggcctgccttttggataaaagccataaaaactgtgaaactcatcrcatatgcatcttccttttccaag

SEQ ID NO: 115575 - DNA, 579 bp, Homo sapiens
gctatccagtgtgctagccatagacaccaaatgtcttggttcccaatcttttgcattagagatatgtgcgacatatttaggggttaaatggtatgatgtctggaatttgcttgagaatagtggggagygggaggtgaaaaataaagcaagttggccgttaagtaaggccatagaagctgcatggtcgttcttatttactattctcggtacttttgtacatattagatattttccataataaagctgaaaaaaaaacccacttccttcttcatgtttgtttggttatctctggaaattccaacaagtatttattcagtaacagctctaatgtgcacagcactatttcctggtgtggacttcctcttgattttttacgtcactgccttcttttctggagtgtcacgtcctgtacccacccccttccttttgcccattttctttgctataataaacttgtgaataatttctagaacattcacagcagcacagggattttaaaaatttatccctcattagtttaaaaactcagaaatattccattgcaacccctatgaatcatatttcgcaaatcacagaatt

SEQ ID NO: 115576 - DNA, 521 bp, Homo sapiens
cttcttttaacatttgactataatggcaaaaatgatataggtcatataacatctgttttcctggcacaaccagacagaaggttgaattggaataaggaaaaattcattctgtgggcatcctaaacgtaccgcattctattttcaaggtatgtggcaatacagattacttactctttctctataaataaacttgakagacaggcttagaattaatacttccaataaggttatatagagaggacaaaaaaaccaaagtgattcctcaaaaaaactccaaaccagcatttggccaacaaattgtcatgtggtgttacatgcttgattatgaaagcatactgtgcaaccatctttaacttttcaaattttctttccatgtatagaggctatatcatagtttatgtactgaacaagtaaatttaagtactctgttaatgtgcaaatgacttgggaatccaaaagtcagttataaaggaaaaattcaaggttttccctggaaggcatatcatcattcagtttaaaat

SEQ ID NO: 115577 - DNA, 585 bp, Homo sapiens
cagcccggcgtggtggtgcacacctgcattcccagctactcgggaggctgaggtgggaggactgcctgggcccaggtcaaagctgcagtgagccctgactgtgccactgcactctagcctgggcaacacagcaagagctctctcacacaaacaagcaaacaatcaaagacacagatgtcatcaaatcaacaactgacagacaattattgtcctagaaggaaaatgaagagaggccaggcatggtggctcacgcctgtaatcccagcactctgagaggctgaggcaggcggatcgcttgaggtcaggagttcaagaccagcctcgtcaagatagtgaaaccctgtctttattaaaaagacaaaatgagccaggcgtggtggcgggcacctgtaatcccagctactcaggaggctgaggcaggagtatcgcttgaacctaagaggcagaggtcacagtgagctgagatcgtaccactgcactccagcctgggcgacagagrgagacatggtctcaaaaaaaagaaagaaagaaagaaaaagaaaagaaaagaaagaaaagaagcaaaaaaatgaagagaaaccaggt

SEQ ID NO: 115578 - DNA, 499 bp, Homo sapiens
ttattgttataaccttactcataatacagaaggtaacatgaaatattgggtcatattattaaggaatagaaattgtgaacaatttaacaatgatggccactgagttaaactagtgttaaaggagtcatcattgccagtggttcaaatgttgcagttttacattgctggtcaycagtgccgaggttaaagatttattctgttttgtggtcacgatttgacttctgtgtctgtgttcagggagtgaatggggtcataaaagtcaacccagttgcctattaagagaatcctaccttgtggaatgggacctttggtgtcagggtacaaacaataactttattttgacataaatacatagtaaatgttactaaaatttaaaaaatccatccactatcactagtggaacttaaaatatattagaagtggatataagcagataatccatctagatacataacactatcatagtatattatttgaattagaatttaaaattttgctt

SEQ ID NO: 115579 - DNA, 590 bp, Homo sapiens
ggaattgaggcaagacattttcagaattatcttgctcttttattgttataaccttactcataatacagaaggtaacatgaaatattgggtcatattattaaggaatagaaattgtgaacaatttaacaatgatggccactgagttaaactagtgttaaaggagtcatcattgccagtggttcaaatgttgcagttttacattgctggtcatcagtgccgaggttaaagatttattctgttttgtggtcacgatttgacttctgtgtctgtgttcagggagtgaatggggtcataaaagtcaacccagttgcctattaagagaatcctaccttgtggaatgggayctttggtgtcagggtacaaacaataactttattttgacataaatacatagtaaatgttactaaaatttaaaaaatccatccactatcactagtggaacttaaaatatattagaagtggatataagcagataatccatctagatacataacactatcatagtatattatttgaattagaatttaaaattttgcttccctttcttattggtgttcagtttggctcttaataattcagtgtttgcctag

SEQ ID NO: 115580 - DNA, 590 bp, Homo sapiens
ggaattgaggcaagacattttcagaattatcttgctcttttattgttataaccttactcataatacagaaggtaacatgaaatattgggtcatattattaaggaatagaaattgtgaacaatttaacaatgatggccactgagttaaactagtgttaaaggagtcatcattgccagtggttcaaatgttgcagttttacattgctggtcatcagtgccgaggttaaagatttattctgttttgtggtcacgatttgacttctgtgtctgtgttcagggagtgaatggggtcataaaagtcaacccagttgcctattaagagaatcctaccttgtggaatgggacctttggtgtcagggtacaaacaataactttattttgacataaatacatagtaaatgttactaaaatttaaaaaatycatccactatcactagtggaacttaaaatatattagaagtggatataagcagataatccatctagatacataacactatcatagtatattatttgaattagaatttaaaattttgcttccctttcttattggtgttcagtttggctcttaataattcagtgtttgcctag

SEQ ID NO: 115581 - DNA, 534 bp, Homo sapiens
gtctattagtatgttcacagcattttcgtcaccctgaaaagtgaccccacatctcctaggcatgactgcagccttcctccatgtccctccacctacccctgttgtaggcaaccaccrtctacttttgtctccatatgtttgcctgttctgcatatttcatatacatagagttatacaatatgtagtcctttgtgactggctttttcacttagcataatgttttcagaattcatgcatgttttagcacacattcgtagtttatttcttcttatagttaaatgatattctattccatggctatactggttttccattcgttcatcagttgatggacctttaggttagtttccactttttagctattatgaaaaatgctgctgtgaacattcacttacaggttattatgtggacacgggtttttatttccctgccattggactttatcctcagagttaattgggcagatttcagcacttgtcttgctcatgctattctttctgccttctcagtttctgttcatctagcctcattcat

SEQ ID NO: 115582 - DNA, 588 bp, Homo sapiens
aagatttctgaatgagaccatgtgtcatagagtccaatggaaggggagaaacaggataatagaaaagccacaaaaagtagacgaaagttgtttttgtttattgtagaaaagataaactttatttaaagagaaatggttaagagaaagggaaaaactgaaacctgtgggtgaatacttagaatgacagtatttagctcagcctgaagacagatgaggatgaaaaatgtaatgggaactagataagagttttctaaaatttgtcttagtaagatgtaatttaagaraacttggaatatcttaaactgttaaaaacaatatttctagagcatctttaaaaactaaaatgtaaatataactactcttttttttaaactaacccttagtattttgtgtgtaaaaaccctcatttgtaacaaacattgttggcagtttaaatttcagaaaagataatgatgaaaatttgaatcatttttagcagttttaagaaaagtgactattattgaaatctgaccttattggcgtcaggtttataaaatgcactttatacacctgcataaatacgtattactaatccacttatgagaaata

SEQ ID NO: 115583 - DNA, 586 bp, Homo sapiens
aaagggaaaaactgaaacctgtgggtgaatacttagaatgacagtatttagctcagcctgaagacagatgaggatgaaaaatgtaatgggaactagataagagttttctaaaatttgtcttagtaagatgtaatttaagaaaacttggaatatcttaaactgttaaaaacaatatttctagagcatctttaaaaactaaaatgtaaatataactactcttttttttaaactaacccttagtattttgtgtgtaaaaaccctcatttgtaacaaacattgttggcagtttaaatttcagaaaagataatgatgaaaatttgaatcatttttagcagttttaagaaaagtgactattattgaaatctgaccttattggcrtcaggtttataaaatgcactttatacacctgcataaatacgtattactaatccacttatgagaaataatatttttgagatgagggtttccagattttacaaaaataattttaaacactttttttaagcctaaaaaagaaaatgaagaattaagaaaactttttgagttaatatcatcactgaaatataatgtgaatcgaataagaaag

SEQ ID NO: 115584 - DNA, 545 bp, Homo sapiens
aagctggtgtgatcagaccagaatgagccagagggaagttttaagatacaataaaatattaggctagactattaaagtactttgtcattagaaattatatctttcagatgaaatctacccaatccttgcttgtacatcttgctaaagttttaacttttccattgatttcattatatttgtcatgtctttcctatcaatttaattttcaattatcttcacttcttatacatactgctatatattatttaatcattctgccttaaattattttgtgtacrgttataatacttcagcctagtttactaggaactcattacagttgttcctctgtatttgtggggtactggttctaggaaccctcagacacaaaaatctacagatgctcaagacccttccataaaatgatgtataatagtattttatacacctacatccacactgtcacatactttaaatcatctctagatttcttatgataccaagtacaatgtaaatgttatgtagttagttatagtgtgttctttaggggataatgacaaggcaga

SEQ ID NO: 115585 - DNA, 545 bp, Homo sapiens
aagctggtgtgatcagaccagaatgagccagagggaagttttaagatacaataaaatattaggctagactattaaagtactttgtcattagaaattatatctttcagatgaaatctacccaatccttgcttgtacatcttgctaaagttttaacttttccattgatttcattatatttgtcatgtctttcctatcaatttaattttcaattatcttcacttcttatacatactgctatatattatttaatcattctgccttaaattattttgtgtacggttataatacttcagcctagtttactaggaactcattacagttgttcctctgtatttgtggggtactggttctaggaaccctcagacacaaaaatctacagatgctcaagacccttccataaaatgatgtataatagtattttwtacacctacatccacactgtcacatactttaaatcatctctagatttcttatgataccaagtacaatgtaaatgttatgtagttagttatagtgtgttctttaggggataatgacaaggcaga

SEQ ID NO: 115586 - DNA, 545 bp, Homo sapiens
aagctggtgtgatcagaccagaatgagccagagggaagttttaagatacaataaaatattaggctagactattaaagtactttgtcattagaaattatatctttcagatgaaatctacccaatccttgcttgtacatcttgctaaagttttaacttttccattgatttcattatatttgtcatgtctttcctatcaatttaattttcaattatcttcacttcttatacatactgctatatattatttaatcattctgccttaaattattttgtgtacggttataatacttcagcctagtttactaggaactcattacagttgttcctctgtatttgtggggtactggttctaggaaccctcagacacaaaaatctacagatgctcaagacccttccataaaatgatgtataatagtattttatacacctacatccacactgtcacatactttaaatcatctctagatttcttatgataccaagtacaatgwaaatgttatgtagttagttatagtgtgttctttaggggataatgacaaggcaga

SEQ ID NO: 115587 - DNA, 479 bp, Homo sapiens
gctggagcagagaaaatacaacattagcttagaacatcttgttcctgaaactaaaaaagtgctgacagagtaacgaagacaaataaaaaagacaagaagtcagcttgaaatgtctaccactggcctaatcttggggaattggagcaccagaatcatgagctttcccttctcagttatttattggttttacttctccakgtacagcaaagaagagaagaaaataatcatctggaaaccatcatagtaataattgttcaaacacaagtcatccatgaaatgctaaatctagtgggttctgggagtaactggatatttacagagcctcaaagtatctccccacaaaatacggttcaactacaaaaagaaaattgtcacattagcatggacaagcctggcaggtactccttaactcccctaagtagtaaaagctgtaaaatgcaaagaagccttcgatgacctttactaaagtatcaatgatg

SEQ ID NO: 115588 - DNA, 479 bp, Homo sapiens
gctggagcagagaaaatacaacattagcttagaacatcttgttcctgaaactaaaaaagtgctgacagagtaacgaagacaaataaaaaagacaagaagtcagcttgaaatgtctaccactggcctaatcttggggaattggagcaccagaatcatgagctttcccttctcagttatttattggttttacttctccatgtacagcaaagaagagaagaaaataatcatctggaaaccatcatagtaataattgttcaaacacaagtcatccatgaaatgctaaatctagtgggttctgggagtaactggatatttacagagcctcaaagtatctccccacaaaatacggttcaactacaaaaagaaaattgtcacattagcatgsacaagcctggcaggtactccttaactcccctaagtagtaaaagctgtaaaatgcaaagaagccttcgatgacctttactaaagtatcaatgatg

SEQ ID NO: 115589 - DNA, 535 bp, Homo sapiens
tttctcttttaatgtttttgaatagcatgaagttttcagtataaaatttttatacctgtcagggattcaaagaagtgaattttgagactctgagatatttccratgagttaagtgctacttggagttctgaactttacctagaggaaagctttacttattaacatgtcagattctgttttaactttagaggcttgctgctagtgttattacactgatgatctgaagccaatcagatgttctaatgagcaagactgtgtgtgtaggtgtatatatagctgtgtgtatgtgtgtgtttgtggtatctttgactattaaaaatgaggaaagtaatgattcatttataactggtagacacagtcttttaaaatggtgattttgagactttttggtgttaaggtttttaaaacatgattgcatagaggctaccgacatcataagttggttgtttttcatttcaatgcccttttgaaatctttaactatattgtgatgctcagaaataatatgcagaattttttatttgtgtcccaaaatg

SEQ ID NO: 115590 - DNA, 535 bp, Homo sapiens
tttctcttttaatgtttttgaatagcatgaagttttcagtataaaatttttatacctgtcagggattcaaagaagtgaattttgagactctgagatatttccaatgagttaagtgctacttggagttctgaactttacctagaggaaagctttacttattaacatgtcagattctgttttaactttagaggcttgctgctagtgttattacactgatgatctgaagccaatcagatgttctaatgagcaagactgtgtgtgtaggtgtatatatagctgtgtgtatgtgtgtgtttgtggyatctttgactattaaaaatgaggaaagtaatgattcatttataactggtagacacagtcttttaaaatggtgattttgagactttttggtgttaaggtttttaaaacatgattgcatagaggctaccgacatcataagttggttgtttttcatttcaatgcccttttgaaatctttaactatattgtgatgctcagaaataatatgcagaattttttatttgtgtcccaaaatg

SEQ ID NO: 115591 - DNA, 573 bp, Homo sapiens
gaattttttatttgtgtcccaaaatggtatgtgagtggttatacactttacatacctttctgccactttctttggtgtattttgtattatattttccagatgtatccacattgatatgattatctctggtttaattcattttacacttttcattgtattcccttataccactttaccacatttagttagactctcctgttgctgataaatgaagaaagaaagaaaaakaaaaataatgtcagattaagtgggcttttctttaatcagtttgtatctattaatatttactatatgagagtttaaagttgaaaagttcagaatacaagcatgcaccaccatattttataaatgcccttagaactgtgactcatgagcctttagcctatgaagttaggacaattcatttctctgaagaagtttgttgtgctgttctcagaaaagaaaactgaaaatagcaaatgatattgtcttatttgacctcttggacatctttgaatgaaactgcaactccagggatactcagatcaaaattcagaactaatgttttgaacaatatagtttgtgaatgtccag

SEQ ID NO: 115592 - DNA, 590 bp, Homo sapiens
ggtgtattttgtattatattttccagatgtatccacattgatatgattatctctggtttaattcattttacacttttcattgtattcccttataccactttaccacatttagttagactctcctgttgctgataaatgaagaaagaaagaaaaagaaaaataatgtcagattaagtgggcttttctttaatcagtttgtatytattaatatttactatatgagagtttaaagttgaaaagttcagaatacaagcatgcaccaccatattttataaatgcccttagaactgtgactcatgagcctttagcctatgaagttaggacaattcatttctctgaagaagtttgttgtgctgttctcagaaaagaaaactgaaaatagcaaatgatattgtcttatttgacctcttggacatctttgaatgaaactgcaactccagggatactcagatcaaaattcagaactaatgttttgaacaatatagtttgtgaatgtccagtggatcatgagcccttgatgggaaaatgacctttcaagtttcacttttgcatttttttgctcttttccttgacttgtcttaaaagcttaa

SEQ ID NO: 115593 - DNA, 590 bp, Homo sapiens
ggtgtattttgtattatattttccagatgtatccacattgatatgattatctctggtttaattcattttacacttttcattgtattcccttataccactttaccacatttagttagactctcctgttgctgataaatgaagaaagaaagaaaaagaaaaataatgtcagattaagtgggcttttctttaatcagtttgtatctattaatatttactatatgagagtttaaagttgaaaagttcagaatacaagcatgcaccaccatattttataaatgcccttagaactgtgactcatgagcctttagcctatgaagttaggacrattcatttctctgaagaagtttgttgtgctgttctcagaaaagaaaactgaaaatagcaaatgatattgtcttatttgacctcttggacatctttgaatgaaactgcaactccagggatactcagatcaaaattcagaactaatgttttgaacaatatagtttgtgaatgtccagtggatcatgagcccttgatgggaaaatgacctttcaagtttcacttttgcatttttttgctcttttccttgacttgtcttaaaagcttaa

SEQ ID NO: 115594 - DNA, 543 bp, Homo sapiens
gatgggaaaatgacctttcaagtttcacttttgcatttttttgctcttttccttgacttgtcttaaaagcttaaattcaaccgttttatttttacagaaaccrggaatataacttttaaaatttatgtctgtcctgtctcacggtgttgtgtactcttcagatcttgtgtgaatatagacttatgtgggaacaattaggtgttttgtttgtttgtgtttttgagacagagtcttgctctgtcaccaaggctgcagtgcagtggctcggtcttgactcattaccacctctgcctctcgggttcaagcaattctcctgcctcagcccctcgagtagctgatactacctgcatgtgctaccataccctgctaaattctctatttttagtagagatggggtttcaccatgttggccaggctgctctcaaactcctgatctcaggtgatctgcctgcctcagcttgccagtatgctgggattacaggcaggagccactgtgccaggtacaaataagatttttaaggctattatattttatacaattct

SEQ ID NO: 115595 - DNA, 543 bp, Homo sapiens
gatgggaaaatgacctttcaagtttcacttttgcatttttttgctcttttccttgacttgtcttaaaagcttaaattcaaccgttttatttttacagaaaccgggaatataacttttaaaatttatgtctgtcctgtctcacggtgttgtgtactcttcagatcttgtgtgaayatagacttatgtgggaacaattaggtgttttgtttgtttgtgtttttgagacagagtcttgctctgtcaccaaggctgcagtgcagtggctcggtcttgactcattaccacctctgcctctcgggttcaagcaattctcctgcctcagcccctcgagtagctgatactacctgcatgtgctaccataccctgctaaattctctatttttagtagagatggggtttcaccatgttggccaggctgctctcaaactcctgatctcaggtgatctgcctgcctcagcttgccagtatgctgggattacaggcaggagccactgtgccaggtacaaataagatttttaaggctattatattttatacaattct

SEQ ID NO: 115596 - DNA, 586 bp, Homo sapiens
cttctgtgctgtaagatcatcaaactgcatgaataaaataatatagcttgataatgaagtaggctgagaataatctaatacaaaaccaatagcaaattttgaaatgcatttacttgcaataaaatgttatcygtaatgcagtggattcttcaaatgtgaacccttaaattactcagaattttaagaacaaagttaaagctaccatgagtcacaaaaatatattatttgctatcatcatctttgccacagaacttttgcacttcatcttacttttatttttctgataattcatttttgttcctccttagatggcactaagttatctcttagtaaaaagtgtctaaccaccttccctcattatcattccccataatatgtcaaaaaaaaagtttcagagatatcatattgagttatttaggccaaagtcaataaatggctctcagaataagactttgaaaataatataacactctatactaggcatggtggctcattcctgtaattgtagcaatttaaaagcctgtgccagaatgatcacttgaggccagaatttgagatcagccagagcaacatagtgagaccccca

SEQ ID NO: 115597 - DNA, 620 bp, Homo sapiens
tcaaaaaatgaaaaatggttgaagtagtaaatgtgctagttagctcgatcattacacactatatatatatgtatcaaaatatcactctattggccaaaattatgtatatacatgtcaattaaaacaaaagagaagctatatttatcccattaaaaaaacagaatatgggcaatccttactgacttccttctaatgaatagaatgcagtaaaagggatatcatgtggcttccctatctcagactgctttccctttgaactcagcccccagattgtgagtgagatcaggccagagagacagcctgggagtgtcagtgtcaatattcatgctgcctgctccaaccaaggttccagccaatggccagcatcaaccatcaaacacatgggtgagcaaagcttcagaggattccatttccccaactgatmagctattcctagggaagctgaggggagcagagatgacctgtcctggctaagcttttttcaaaccacaggttcatgaacaaaataaatgtttttcttttaagccacaaaaccctggataattgttagaaaaataagttttaaaaagagacaacaggaaacataacttatgcagagaaaagagtctcctttaaagtag

SEQ ID NO: 115598 - DNA, 620 bp, Homo sapiens
tcaaaaaatgaaaaatggttgaagtagtaaatgtgctagttagctcgatcattacacactatatatatatgtatcaaaatatcactctattggccaaaattatgtatatacatgtcaattaaaacaaaagagaagctatatttatcccattaaaaaaacagaatatgggcaatccttactgacttccttctaatgaatagaatgcagtaaaagggatatcatgtggcttccctatctcagactgctttccctttgaactcagcccccagattgtgagtgagatcaggccagagagacagcctgggagtgtcagtgtcaatattcatgctgcctgctccaaccaaggttccagccaatggccagcatcaaccatcaaacacatgggtgagcaaagcttcagaggattccatttccccaactgataagctattcctagggaagctgaggggagcagagatgacctgtcctggctaagcttttttcaaaccayaggttcatgaacaaaataaatgtttttcttttaagccacaaaaccctggataattgttagaaaaataagttttaaaaagagacaacaggaaacataacttatgcagagaaaagagtctcctttaaagtag

SEQ ID NO: 115599 - DNA, 620 bp, Homo sapiens
tcaaaaaatgaaaaatggttgaagtagtaaatgtgctagttagctcgatcattacacactatatatatatgtatcaaaatatcactctattggccaaaattatgtatatacatgtcaattaaaacaaaagagaagctatatttatcccattaaaaaaacagaatatgggcaatccttactgacttccttctaatgaatagaatgcagtaaaagggatatcatgtggcttccctatctcagactgctttccctttgaactcagcccccagattgtgagtgagatcaggccagagagacagcctgggagtgtcagtgtcaatattcatgctgcctgctccaaccaaggttccagccaatggccagcatcaaccatcaaacacatgggtgagcaaagcttcagaggattccatttccccaactgataagctattcctagggaagctgaggggagcagagatgacctgtcctggctaagcttttttcaaaccacaggttcatgaacaaaataaatgtttttcttttaagccacaaaamcctggataattgttagaaaaataagttttaaaaagagacaacaggaaacataacttatgcagagaaaagagtctcctttaaagtag

SEQ ID NO: 115600 - DNA, 620 bp, Homo sapiens
tcaaaaaatgaaaaatggttgaagtagtaaatgtgctagttagctcgatcattacacactatatatatatgtatcaaaatatcactctattggccaaaattatgtatatacatgtcaattaaaacaaaagagaagctatatttatcccattaaaaaaacagaatatgggcaatccttactgacttccttctaatgaatagaatgcagtaaaagggatatcatgtggcttccctatctcagactgctttccctttgaactcagcccccagattgtgagtgagatcaggccagagagacagcctgggagtgtcagtgtcaatattcatgctgcctgctccaaccaaggttccagccaatggccagcatcaaccatcaaacacatgggtgagcaaagcttcagaggattccatttccccaactgataagctattcctagggaagctgaggggagcagagatgacctgtcctggctaagcttttttcaaaccacaggttcatgaacaaaataaatgtttttcttttaagccacaaaaccctggataattgttagaaaaataagttttaaaaagagacaacaggaaacataacttakgcagagaaaagagtctcctttaaagtag

SEQ ID NO: 115601 - DNA, 632 bp, Homo sapiens
taagactttttcttggaatgagttaaactttatatcccaagaatcctctactgagctagaaagcagagctgtgcatctctgtttcagtaaaaggaggtcaatacagggaactgtggtttctgagaatgcaagatctgcaccaagtaaaggattagatgcagagctacccaagagaaccagctaccaggtggagaggatctgcgaactacaacatgatgayttcacatgatttccactgaggaaagctggcagctcagacttctccttcctggatggtaaacatctatggaagattctatgaattataatgagttaacaaaacataatacactaaatattagactacatcagcagatcctgtgatgaaaacttactgaaaatataactatagagggaggcaatggaaaagagactaaaggtttgaatagagaaaaaaagaaagagtgtcttgtaagcctgacttgccatcatgtcttagagtaagtaaggtataagctggccagagattcctttgaggcacaaaaggtgaagttaaagatattccactaaatttaatttttattatgatataagacaactggtaatatgcaacatgcttgaaaaaatcttctcattaaattcaatttggcctt

SEQ ID NO: 115602 - DNA, 632 bp, Homo sapiens
taagactttttcttggaatgagttaaactttatatcccaagaatcctctactgagctagaaagcagagctgtgcatctctgtttcagtaaaaggaggtcaatacagggaactgtggtttctgagaatgcaagatctgcaccaagtaaaggattagatgcagagctacccaagagaaccagctaccaggtggagaggatctgcgaactacaacatgatgatttcacatgatttccactgaggaaagctggcagctcagacttctccttcctggatggtaaacatctatggaagattctatgaattataatgagttarcaaaacataatacactaaatattagactacatcagcagatcctgtgatgaaaacttactgaaaatataactatagagggaggcaatggaaaagagactaaaggtttgaatagagaaaaaaagaaagagtgtcttgtaagcctgacttgccatcatgtcttagagtaagtaaggtataagctggccagagattcctttgaggcacaaaaggtgaagttaaagatattccactaaatttaatttttattatgatataagacaactggtaatatgcaacatgcttgaaaaaatcttctcattaaattcaatttggcctt

SEQ ID NO: 115603 - DNA, 564 bp, Homo sapiens
tcactcaagtggattgtgctaaaccaagcttgtccaacccacagcttgtgggctgaatgcaggtcagaacagctttgaatgtggcccaaatttgtcaactttgttaaaacaaaagagagtttgtgtatgtgtgtgtgtgtgtgtgtgtgtgtgtgtgtgtgtgtttatttttatttatttatgtatttatttattttagctcatcagctatttttagtgtattttatgtgtggctcaagaaaattcttcttccaatgctgtccagggaagccaaaagttggacattcctgtgctaagctattcataaggcatccaccccatgatccaatacctctcactgggccccacctccaacattggggatcatattttarcatgagatttggaggggacacacatccaaactatatcagggatatgtacccatcatcgagacaggttgtagagtatgcatactttcaaatgggtcctgtcatgttattttctgaaatggttaaaaccatttaatttcccatccattgcccataaaggttgttttcctcatatcctcatcactcaatgtta

SEQ ID NO: 115604 - DNA, 609 bp, Homo sapiens
cactgagaagaactcactcaagtggattgtgctaaaccaagcttgtccaacccacagcttgtgggctgaatgcaggtcagaacagctttgaatgtggcccaaatttgtcaactttgttaaaacaaaagagagtttgtgtatgtgtgtgtgtgtgtgtgtgtgtgtgtgtgtgtgtgtttatttttatttatttatgtatttatttattttagctcatcagctatttttagtgtattttatgtgtggctcaagaaaattcttcttccaatgctgtccagggaagccaaaagttggacattcctgtgctaagctattcataaggcatccaccccatgatccaatacctctcactgggccccacctccaacattggggatcatattttaacatgagatttggaggggacacacatccaaaytatatcagggatatgtacccatcatcgagacaggttgtagagtatgcatactttcaaatgggtcctgtcatgttattttctgaaatggttaaaaccatttaatttcccatccattgcccataaaggttgttttcctcatatcctcatcactcaatgttatctaggattcttatattttctaagcaagtggt

SEQ ID NO: 115605 - DNA, 609 bp, Homo sapiens
cactgagaagaactcactcaagtggattgtgctaaaccaagcttgtccaacccacagcttgtgggctgaatgcaggtcagaacagctttgaatgtggcccaaatttgtcaactttgttaaaacaaaagagagtttgtgtatgtgtgtgtgtgtgtgtgtgtgtgtgtgtgtgtgtgtttatttttatttatttatgtatttatttattttagctcatcagctatttttagtgtattttatgtgtggctcaagaaaattcttcttccaatgctgtccagggaagccaaaagttggacattcctgtgctaagctattcataaggcatccaccccatgatccaatacctctcactgggccccacctccaacattggggatcatattttaacatgagatttggaggggacacacatccaaactatatcagggatatgtacccatcatcgagacaggttgtagagtatgcatactttcaaatgggtcctgtcatgttattttctgaaatggttaaaaccatttaatttcccatccattgcccataaagsttgttttcctcatatcctcatcactcaatgttatctaggattcttatattttctaagcaagtggt

SEQ ID NO: 115606 - DNA, 578 bp, Homo sapiens
tagagtatgcatactttcaaatgggtcctgtcatgttattttctgaaatggttaaaaccatttaatttcccatccattgcccataaaggttgttttcctcatatcctcatcactcaatgttatctaggattcttatattttctaagcaagtggtgaaaatacagatctcattttatttgtgtacatttgcatttgtcagattgttaacaatgtattgaattttttggcccatttttctattgagtttactatcttctttgttcatctgaatatcaatcatattcactttgccctaagcagtgtcaacattttctattactctgtcatacatctgataactttgtatgccaacctttactgaaatgagcctttatgatttttatacwtctagagtttatgtatttaattaaatttattggtttagtatatattttattaaactgtaacaacagtcccaaatctatgttttgctgggttcattcagatttagaactcagataactttttggaggataaattctttttatcataatgaagaatggctatcataatgcaatatgattacttctgccaatgct

SEQ ID NO: 115607 - DNA, 517 bp, Homo sapiens
accctgtgccacagagaaagcagaggtctagagaacagcatgaagacaataagagacttcagattcactttccctttgccttgaggccacagaaagcccaaagcatctgaacatcttcctggaggcatttaactaaaagagagctattgaaacttgaagaaaaatgtgaatcaagaagctaaatttaaagatatgttactttctccaaccmtcccccaccaattaaccataggatgagtctagtgagataaagcatatcatttatacaaaatacaaaagttatatgtcctttatgtgggcagaaatatgttcaagctttactcaataaaggtaacttgttttactactagaaatggtaattttcacttggtcattactttattttataattatctctatttaaattagtatcagctcactcctgggtatccacctagaggaaaagaagtcatatgaaaaagacacatgtatgcacattcatagcagcacaactcacagttgcaaaaatgtgtaacaa

SEQ ID NO: 115608 - DNA, 389 bp, Homo sapiens
cataattttgtagtttttcctttcttaaaaaatggtacaagatgacagatatctgtcttagcaacctttccgctctgccacattaatgttgctatgtagtagytttgttacaattcatttacatacacatggtttcattttcagtgagaagcccttctgagctccattcaatttagatttagaattcgtatgctccatgataccttttttgtcagtttgtttttcgttggtcacaatttgactgcattatggtcacattatgtggttttaatggtactgatttggggtacctgttatgactttcattttggtctaatgtggccaatgctgtccatttccctgctatatccattattctcatcttcttcactaagggaacatagattcac

SEQ ID NO: 115609 - DNA, 389 bp, Homo sapiens
cataattttgtagtttttcctttcttaaaaaatggtacaagatgacagatatctgtcttagcaacctttccgctctgccacattaatgttgctatgtagtagctttgttacaattcatttacatacacatggtttcattttcagtgrgaagcccttctgagctccattcaatttagatttagaattcgtatgctccatgataccttttttgtcagtttgtttttcgttggtcacaatttgactgcattatggtcacattatgtggttttaatggtactgatttggggtacctgttatgactttcattttggtctaatgtggccaatgctgtccatttccctgctatatccattattctcatcttcttcactaagggaacatagattcac

SEQ ID NO: 115610 - DNA, 389 bp, Homo sapiens
cataattttgtagtttttcctttcttaaaaaatggtacaagatgacagatatctgtcttagcaacctttccgctctgccacattaatgttgctatgtagtagctttgttacaattcatttacatacacatggtttcattttcagtgagaagcccttctgagctccattcaatttagatttagaattcgtatgctccatgataccttttttgtcagtttgtttttygttggtcacaatttgactgcattatggtcacattatgtggttttaatggtactgatttggggtacctgttatgactttcattttggtctaatgtggccaatgctgtccatttccctgctatatccattattctcatcttcttcactaagggaacatagattcac

SEQ ID NO: 115611 - DNA, 573 bp, Homo sapiens
gtcttagtctgaatttcctggaagtagatcccgaggcaaagattcaaatacaaaaattttgtttggagataacgctaggatattaattcgactgccagttcttccttagggtgytaatcccaggaaacatcagtggaggagtggggaactgagacaggaaaggaatgcagcagttaaagggaccttcatcaagaaagtttccactgtggcagccaggactcagccctgccaggtacctctgagagacagcacagaacatgtgcttcagagtcatcatacccagagcaagggaccaggggtatttatccaccaatacccaccagtcactcctcagggatcctcccaagggcatgattcctccagaatgtcctgcctgcgctgcaagggtcagacctggggttgagggcaggacccctgacagcgcttccagcaatgagcagaaccacagcctgatgtgtacagtttcagtcacccagtaactccaacacacacacacacacacacacacacacacattcacacaccacactccaacaccaacaaagtatatacgtacatacacatacatgcata

SEQ ID NO: 115612 - DNA, 645 bp, Homo sapiens
  misc_feature (1)...(645): n = A,T,C or G
agggcaggacccctgacagcgcttccagcaatgagcagaaccacagcctgatgtgtacagtttcagtcacccagtaactccaacacacacacacacacacacacacacacacattcacacaccacactccaacaccaacaaagtatatacgtacatacacatacatgcatacatgactgttacccacttagatcctagtgactccatgggatagacgataaggtgggaatcagaggaaagagyaaaattaaggcgagtgaaagtcttaagaacaaaatgcaaatttaggctgaaaatgaagggggaggaggtgtggtctcgacaccaaatgcctgctgggtggcacatgctctacacacactgtcactaattctgccaagcagcctcgtggnnagtaaaagaaattcctctcaatgtacagatgacagaaacatagttcagaaaagaaaactgattttactaatgtctcagcaagttggtgggtgacatggagtcccagatctttctgtccacaaagcctacaaattctcccttgttaggcaggctgggtaccaggccctgcttctgggctctgcttcttttcctgctaggctaaaacagcagaactgacagagacatcatcccccttctccacctggagcagag

SEQ ID NO: 115613 - DNA, 553 bp, Homo sapiens
  misc_feature (1)...(553): n = A,T,C or G
ccacttagatcctagtgactccatgggatagacgataaggtgggaatcagaggaaagagtaaaattaaggcgagtgaaagtcttaagaacaaaatgcaaatttaggctgaaaatgaagggggaggaggtgtggtctcgacaccaaatgcctgctgggtggcacatgctctacacacactgtcactaattctgccaagcagcctcgtggnnagtaaaagaaattcctctcaatgtacagatgacagaaacatagttcagaaaagaaaactgattttactaatgtctcagcaagttrgtgggtgacatggagtcccagatctttctgtccacaaagcctacaaattctcccttgttaggcaggctgggtaccaggccctgcttctgggctctgcttcttttcctgctaggctaaaacagcagaactgacagagacatcatcccccttctccacctggagcagagctaatgagaggggctggagaacagccatgaggcccagcacccaccattcaatgtcttcagaattgccgtccctcagaactcttgcaccacg

SEQ ID NO: 115614 - DNA, 454 bp, Homo sapiens
  misc_feature (1)...(454): n = A,T,C or G
ccacttagatcctagtgactccatgggatagacgataaggtgggaatcagaggaaagagtaaaattaaggcgagtgaaagtcttaagaacaaaatgcaaatttaggctgaaaatgaagggggaggaggtgtggtctcgacaccaaatgcctgctgggtggcacatgctctacacacactgtcactaattctgccaagcagcctcgtggnnagtaaaagaaattcctctcaatgtacagatgacagaaacatagttcagaaaagaaaactgattttactaatgtctcagcaagttggtgggtgacatggagtcccagatctttctgtccacaaagcctacaaattctcccttgttaggcaggctgggtaccaggccctgcttctgggctctgcttcttttcctgctaggctaaaacrgcagaactgacagagacatcatcccccttctccacctg

SEQ ID NO: 115615 - DNA, 553 bp, Homo sapiens
  misc_feature (1)...(553): n = A,T,C or G
ccacttagatcctagtgactccatgggatagacgataaggtgggaatcagaggaaagagtaaaattaaggcgagtgaaagtcttaagaacaaaatgcaaatttaggctgaaaatgaagggggaggaggtgtggtctcgacaccaaatgcctgctgggtggcacatgctctacacacactgtcactaattctgccaagcagcctcgtggnnagtaaaagaaattcctctcaatgtacagatgacagaaacatagttcagaaaagaaaactgattttactaatgtctcagcaagttggtgggtgacatggagtcccagatctttctgtccacaaagcctacaaattctcccttgttaggcaggctgggtaccaggccctgcttctgggctctgcttcttttcctgctaggctaaaacagcagaactgacagagacatcatcccccttctccacctggagcagagcyaatgagaggggctggagaacagccatgaggcccagcacccaccattcaatgtcttcagaattgccgtccctcagaactcttgcaccacg

SEQ ID NO: 115616 - DNA, 553 bp, Homo sapiens
  misc_feature (1)...(553): n = A,T,C or G
ccacttagatcctagtgactccatgggatagacgataaggtgggaatcagaggaaagagtaaaattaaggcgagtgaaagtcttaagaacaaaatgcaaatttaggctgaaaatgaagggggaggaggtgtggtctcgacaccaaatgcctgctgggtggcacatgctctacacacactgtcactaattctgccaagcagcctcgtggnnagtaaaagaaattcctctcaatgtacagatgacagaaacatagttcagaaaagaaaactgattttactaatgtctcagcaagttggtgggtgacatggagtcccagatctttctgtccacaaagcctacaaattctcccttgttaggcaggctgggtaccaggccctgcttctgggctctgcttcttttcctgctaggctaaaacagcagaactgacagagacatcatcccccttctccacctggagcagagctaatgagaggggctggrgaacagccatgaggcccagcacccaccattcaatgtcttcagaattgccgtccctcagaactcttgcaccacg

SEQ ID NO: 115617 - DNA, 640 bp, Homo sapiens
aaccacattctaatgataaacttaaatgagagttcaaggtatttaaactctcattaatttagacattaatcaaattaatcaatctgactaatctgattcagacctataccttgatccaagggctgcasagatatctgtcaatctatgctgaggagcaagagacaggatttggaaggcaggcaggctgatggtcaaactgtaggccagctactttgttaactatgggatcatgaggcaattaatcagctctaatccatagttgtttatttaataaacagtaggttataggaacacagatgttgtgatggctttatgagatgatatatgcatagaacatattaggatgtctagcccagaatacaacactcaacagatactcatttcttccatctatattttcttagttaacataattttttaaatctataaaatcctacctgactgcagattcatcagaacttccaacatctattaaagaaaaaggtaaaatgcattttaaatcaataacaaatgtacagaatattaaaagcataagaatgcacagtgatgcatccctctaatccaaactacttgggaggctgaggcaggaggatcacttgaggagcccagaagtttgagaccagcttgggaaacatagtaa

SEQ ID NO: 115618 - DNA, 640 bp, Homo sapiens
aaccacattctaatgataaacttaaatgagagttcaaggtatttaaactctcattaatttagacattaatcaaattaatcaatctgactaatctgattcagacctataccttgatccaagggctgcacagatatctgtcaatctatgcygaggagcaagagacaggatttggaaggcaggcaggctgatggtcaaactgtaggccagctactttgttaactatgggatcatgaggcaattaatcagctctaatccatagttgtttatttaataaacagtaggttataggaacacagatgttgtgatggctttatgagatgatatatgcatagaacatattaggatgtctagcccagaatacaacactcaacagatactcatttcttccatctatattttcttagttaacataattttttaaatctataaaatcctacctgactgcagattcatcagaacttccaacatctattaaagaaaaaggtaaaatgcattttaaatcaataacaaatgtacagaatattaaaagcataagaatgcacagtgatgcatccctctaatccaaactacttgggaggctgaggcaggaggatcacttgaggagcccagaagtttgagaccagcttgggaaacatagtaa

SEQ ID NO: 115619 - DNA, 640 bp, Homo sapiens
aaccacattctaatgataaacttaaatgagagttcaaggtatttaaactctcattaatttagacattaatcaaattaatcaatctgactaatctgattcagacctataccttgatccaagggctgcacagatatctgtcaatctatgctgaggagcaagagacaggatttggaaggcaggcaggctgatggtcaaactgtaggccagctactttgttaactatgggatcatgaggcaattaatcagctctaatccatagttgtttatttaataaacagtaggttataggaacacagatgttgtgatggctttatgagatgatawatgcatagaacatattaggatgtctagcccagaatacaacactcaacagatactcatttcttccatctatattttcttagttaacataattttttaaatctataaaatcctacctgactgcagattcatcagaacttccaacatctattaaagaaaaaggtaaaatgcattttaaatcaataacaaatgtacagaatattaaaagcataagaatgcacagtgatgcatccctctaatccaaactacttgggaggctgaggcaggaggatcacttgaggagcccagaagtttgagaccagcttgggaaacatagtaa

SEQ ID NO: 115620 - DNA, 640 bp, Homo sapiens
cttccagtcaattgtgggctattagtagctaaggtgaaggaatcaaaagttatactcagattttcaactgcacagggatcagagtccctcacccccacattattcatgggtcaactgtagttatttgtttactaaatataaacaatttattataaaaatgaaatygaagatccatttgtataacaagtccaatttgttataatgtgactatagaggaaacatacaacatactaacttaaaaatcttttttcttatttatgcaaaaatattatataggattttagggatcataattaaataaatgaatgttttcagacaataatgtttgagattgtaaattagctacaactaccttcttaaataaatctgaatttcaaactaaagaagttaaattttaaaaattaatttacatatgtatatacatatatacacattcaatttacacatatttttaaactggtcttttttgactgaaactaccttaatcttacatcttactttgtattttcttatcaagagtaggaccaccaagacaagtaagaaattcacaatcagaagtcttacctgatttctcctttttaagtatcttctttttatgttccaaaatttgttgttgaattctatgtatacaaaagtaata

SEQ ID NO: 115621 - DNA, 640 bp, Homo sapiens
cttccagtcaattgtgggctattagtagctaaggtgaaggaatcaaaagttatactcagattttcaactgcacagggatcagagtccctcacccccacattattcatgggtcaactgtagttatttgtttactaaatataaacaatttattataaaaatgaaattraagatccatttgtataacaagtccaatttgttataatgtgactatagaggaaacatacaacatactaacttaaaaatcttttttcttatttatgcaaaaatattatataggattttagggatcataattaaataaatgaatgttttcagacaataatgtttgagattgtaaattagctacaactaccttcttaaataaatctgaatttcaaactaaagaagttaaattttaaaaattaatttacatatgtatatacatatatacacattcaatttacacatatttttaaactggtcttttttgactgaaactaccttaatcttacatcttactttgtattttcttatcaagagtaggaccaccaagacaagtaagaaattcacaatcagaagtcttacctgatttctcctttttaagtatcttctttttatgttccaaaatttgttgttgaattctatgtatacaaaagtaata

SEQ ID NO: 115622 - DNA, 591 bp, Homo sapiens
tatcccatgcatggggattatacttagaataaaatgaataacattgagatccctagggataaatgtctcaaaaatccagaaaaaatctcgcactctacttctaactaatctagacttctgcttgatttctggctaaaaggtagactaactcttcgctatttcaaactatctgaaccaaactatgaactctcacctaatgtataagatggagtagttgcaattattttaaacttcaatttagcattaactggccttttaacataaacacttactttgtcaaatgatgagaaatagcataatcttctgcatctcgtccacacatgtcttgagcgaagacatcaatattttgcttaagaaggatattgacaatacctggtgagtcatagtatacagcaagcatgagagctgacctaaaayaacaaagaaataactccactcaagaactttaataaagacttttttaaaaagctagtttgatacactttaccagtttaatatccgcctgtcagtatagatgtaataaccatttgcatgtactagcttgggtctataagcatctagggtgctcaagtgttcatctttgtaaattgt

SEQ ID NO: 115623 - DNA, 591 bp, Homo sapiens
tatcccatgcatggggattatacttagaataaaatgaataacattgagatccctagggataaatgtctcaaaaatccagaaaaaatctcgcactctacttctaactaatctagacttctgcttgatttctggctaaaaggtagactaactcttcgctatttcaaactatctgaaccaaactatgaactctcacctaatgtataagatggagtagttgcaattattttaaacttcaatttagcattaactggccttttaacataaacacttactttgtcaaatgatgagaaatagcataatcttctgcatctcgtccacacatgtcttgagcgaagacatcaatattttgcttaagaaggatattgacaatacctggtgagtcatagtatacagcaagcatgagagctgacctaaaacaacaaagaaataactccactcaagaactttaataaagactttttwaaaaagctagtttgatacactttaccagtttaatatccgcctgtcagtatagatgtaataaccatttgcatgtactagcttgggtctataagcatctagggtgctcaagtgttcatctttgtaaattgt

SEQ ID NO: 115624 - DNA, 576 bp, Homo sapiens
acataataggccaggtgcagtggctcacacctgtaaacccagcagtttgggaggctgaggagggcggatcacctgagttcaggagttcgagaccagcctgggccaacatggtgaaacctcatatctactaaaatacaagaaatcagccaggcgtggtggcgggggcctgtaatcccacctactcgggaggctgaggcaggagaatcacttgaacccaggagacggaggttgcagtgagctgagatcgcrccgctgcactccagcctgggtgacgagagtgaaactccatctcaggaaaaaaaaaaaagacataataaacataaaatatgattctattaactctattaatccaaataacattttctaattcagaagaaatatataacatgtctatttggtagcttaaaaacattcttttaaaatacaaatacagtagacccaagtaggcttggggacttaatattagttactctagctacatgataaaattactggatattggaatctgaagcagcacaattatgcttcaagtaccatgctcatctgtcactgacacacacacacaagtgtgaatgc

SEQ ID NO: 115625 - DNA, 576 bp, Homo sapiens
acataataggccaggtgcagtggctcacacctgtaaacccagcagtttgggaggctgaggagggcggatcacctgagttcaggagttcgagaccagcctgggccaacatggtgaaacctcatatctactaaaatacaagaaatcagccaggcgtggtggcgggggcctgtaatcccacctactcgggaggctgaggcaggagaatcacttgaacccaggagacggaggttgcagtgagctgagatcgcgccgctgcactccagcctgggtgacgagagtgaaactccatctcaggaaaaaaaaaaaagacataataaacataaaatatgattctattaactctattaatccaaataacattttctaattcagaagaaatatataacatgtctatttggtagcttaaaaacattcttttaaaatacaaatacagtagacccaagtaggcttggggacttaatattagttactctagctacatgataaaattactggatattggaatctgaagcagcacaattatgctwcaagtaccatgctcatctgtcactgacacacacacacaagtgtgaatgc

SEQ ID NO: 115626 - DNA, 603 bp, Homo sapiens
tttaccttagttgatgcattccaatccatcatagctgtaagaagctcaagcggtcccatctttgggcagcaggagtctgctgagtccttttgactggacctcaggagcctttggaaattttctcactatctggtgtggtaacatccaggctcaacctccctctccaaacctggtatcagccctttcttcctggacaccaatctgggtgtttttaccccagttcttatagtctagttcttttttttttctttttttaaatgatgacgcgattagatttattggttaaaaaaagttcacactasatcgttaaatttaaaatgcaggttataagatggtaatttgacaatatttttttttagttggaaattttattttattatattctagttcttaaccactttctaaacatgaaggagctcttcatgttctagagaagaataggttttaaaaacctattgttaagctccatctttccttaagacgtcctttcaagtttcagttcagcctcttggaaaatttgtatatgactgtgtgtgtttgcttataagaaaaggatctgccaaagttgtgcttgaaatctacttgctctaaatggctcgctgt

SEQ ID NO: 115627 - DNA, 574 bp, Homo sapiens
gaactaactggatatttgataattttaaaggattattacatttttagatgtgataatgatgttgttattacattttataaagaagtcttactttttagagatgatcatatctttttagagatgtttatrcataaaatgatgaggagtgagggggcatacaaatggaacatggttgactatgagttaatcagtgtgaagctgtatgacagtggcatgagagtttattatatttttctttctacttttgtatatattttaaattatccataatatatttttaaaatgtacaactctttccaatttgactccttaaatttagcagcattaatattgagagttactttaagatatcccctaaaattcctgggattttcatggtcacacatcaggtacccaatagctacatgttcctgtctctaaaatatggtgaaaaacatctgacctgtttggaggcatcacccagttgtttggaggcaaacttgtgcacagtagtgatctcctcggttcactctgagtcatcaattctggagctctcagtttgtggagaaattttctagaaactggagagagaggg

SEQ ID NO: 115628 - DNA, 523 bp, Homo sapiens
tttcctcatttcagagaaacatgtaatctgctcaaaaaaataaatctatgccaggcacagtggctcatgcctataatcccaacactttgggaggccaaggggggtggatcatttgaggtcaggagttcaagaccagcctggccaacatggcaaaaccctatctctagtaaaaaaaaaaaaacaaaaattagctgggcatggtggygggcacctgtaatcccagctactcagaaggctgaggcaggagagttgcttgaacccgggaggtggatgttgcagtgagccgagatcacaccactgcactctagcctgggcaacagagcaagactccatctcaaaataaataaaagaataaataaataaatatatgactcatattgacattagaaaacagatcatgccagtttcctgttatggatgcttcctccgataacattctcctttccctcttggagaaaaaacatgacatcatttattgctgccaatatccaacaatagctggtcaacattcactatgtattca

SEQ ID NO: 115629 - DNA, 576 bp, Homo sapiens
acactattccaggcgctcagatacagtaatgaataagacaaagtctctgccttcccagagtttgtgttccagcggggatagggagacaataacaaataggtagatacacagtaagccaggtggtaaatgcaacaagagaaaaatacagcaagttaaggaggatatggagtgtcattatatttgtgggaaggggtgtaacatattgatttctgtttcagatatccattgccacacaacaaaacaccctaaatcctattggttaaaaaatattagcttggtgtggtggcatgcacctatagtctcagctagtcagaaggctgaggcaggaagattgcttgagcccaggactttgagtttacagtgagctatgactgtgccactgcactccagcctgcgtgacagagtgagaccctgtctctaaaattwaaaaaaaaaaaaaaaaaaactttaagaaaaaaatgtatgatcttgtaggttccctggggtctttaaacagttgcagtcatatggcaaatcgggccagggttatctgaataattgaatgggccggacattccaaacggctttttcattcac

SEQ ID NO: 115630 - DNA, 590 bp, Homo sapiens
gcatgcaatcttctcactgtttacataaattctaggtttctcctatttacctcaagcacrtatggagcgaattcttaccttttaatattgccatggcattcacattgaacgtaagttgaactctcttatatggtagctgggttcagattcccttgacaatttccagttctaaccctcacagttcctcagtgtggctggcccagatattgatcctacacagctgcctcctcctggtgactagccactgtggaaccattggatacaacctacctgactcaccccacagacctcacagcccacttggacagcccccacaagccagagtgacctgctcagttgcagctgcagccaagaaatgtgcctgctggcactcaccccactgaccagagccccgtggaaaacttatttgggtaatgttctgggcccaataaaggctggagtcccacagaccccttttctgtctcttgctccccactcatcttccccattttcttcagccctacgagttgtgctactgtattagtccattttcacactgccagtaaagacatgcccaagactgggtaatttccagaacaaagaggtttaat

SEQ ID NO: 115631 - DNA, 590 bp, Homo sapiens
gcatgcaatcttctcactgtttacataaattctaggtttctcctatttacctcaagcacgtatggagcgaattcttaccttttaatattgccatggcattcacattgaacgtaagttgaactctcttatatggtagctgggttcagattcccttgacaatttccagttctaaccctcacagttcctcagtgtggctggcccagatattgatcctacacagctgcctcctcctggtgactagccactgtggaaccattggatacaacctacctgactcaccccacagacctcacagcccacwtggacagcccccacaagccagagtgacctgctcagttgcagctgcagccaagaaatgtgcctgctggcactcaccccactgaccagagccccgtggaaaacttatttgggtaatgttctgggcccaataaaggctggagtcccacagaccccttttctgtctcttgctccccactcatcttccccattttcttcagccctacgagttgtgctactgtattagtccattttcacactgccagtaaagacatgcccaagactgggtaatttccagaacaaagaggtttaat

SEQ ID NO: 115632 - DNA, 590 bp, Homo sapiens
gcatgcaatcttctcactgtttacataaattctaggtttctcctatttacctcaagcacgtatggagcgaattcttaccttttaatattgccatggcattcacattgaacgtaagttgaactctcttatatggtagctgggttcagattcccttgacaatttccagttctaaccctcacagttcctcagtgtggctggcccagatattgatcctacacagctgcctcctcctggtgactagccactgtggaaccattggatacaacctacctgactcaccccacagacctcacagcccacttggacagcccccacamgccagagtgacctgctcagttgcagctgcagccaagaaatgtgcctgctggcactcaccccactgaccagagccccgtggaaaacttatttgggtaatgttctgggcccaataaaggctggagtcccacagaccccttttctgtctcttgctccccactcatcttccccattttcttcagccctacgagttgtgctactgtattagtccattttcacactgccagtaaagacatgcccaagactgggtaatttccagaacaaagaggtttaat

SEQ ID NO: 115633 - DNA, 590 bp, Homo sapiens
gcatgcaatcttctcactgtttacataaattctaggtttctcctatttacctcaagcacgtatggagcgaattcttaccttttaatattgccatggcattcacattgaacgtaagttgaactctcttatatggtagctgggttcagattcccttgacaatttccagttctaaccctcacagttcctcagtgtggctggcccagatattgatcctacacagctgcctcctcctggtgactagccactgtggaaccattggatacaacctacctgactcaccccacagacctcacagcccacttggacagcccccacaagccagagtgacctgctcagttgcagctgcagccaagaaatgtgcctgctggcactcaccccactgaccagagccccgtggaaaacttatttgggtaatgttctgggcccaataaaggctggagtcccacagaccccttttctgtctcttgctccccactcatcttccccattttcttcagccctaygagttgtgctactgtattagtccattttcacactgccagtaaagacatgcccaagactgggtaatttccagaacaaagaggtttaat

SEQ ID NO: 115634 - DNA, 568 bp, Homo sapiens
tctatgcctgtacaccacatattttcttcgattgtggatatattttaggtagaattttatgtctggctttcactttagcctggtccctacctcaagcataaggtaaagattttccatagtttcttttctggtactactgcctgccagtgtggggtcatgtcctagtctatcttgagggaacccccttattcattattgtcagagtgagactgttaagtcttgatttccctggacaacttcattgcatgacttttaatatgatttttaaatataccctttactggacaataaattatatagttatctgagtaagagatatgatcagaaagaggcattgcctcattcagcttttctgtttggtgaactcrcatatgttctcctcacccaccagtcacctctaaactgtattgttccaagacaacaaacagaactcgagtgtgtatctttcaccactggatttgtctttgctccataaagcttaatgcttaatagggtttctgttagcattttctctatttattttcccataaaatatcacaggccttcttcatatggaattatgggtgat

SEQ ID NO: 115635 - DNA, 589 bp, Homo sapiens
caattttcaaaattttgctaaatactgacagggggtttcttgccgttgcttctgtatctctctctcctcctcagtgtttgttckgtaatatctgcctgctttggttttactagactctaagcttcatcagtgtaaccaagagagtctggtagatcccacctcagttttttcttcctgtgtcatgtctcggaatctctgccaagacaggaagctgaaacattcagaaggtttgctttctttcgtttttttattttctgtttttcagggattattatcttctttgcctaatgtccagtatctgaaaaattgtttaatgtattttgtgtgttttgtttttagttattttagctaagaagaaaaatcatacctgttgctctcccttggctagaggaagactacactagagtttcagcacatgccacagactggctaaaatgctttccttccctgtttgctcaactgcttccttttcattcttcattcctcagtgtagctatacatccctcgggggaattttccatgagcctagtatagatctaaatcttagcaatctgttttcttacagtatttatctgaatttataactgtc

SEQ ID NO: 115636 - DNA, 589 bp, Homo sapiens
caattttcaaaattttgctaaatactgacagggggtttcttgccgttgcttctgtatctctctctcctcctcagtgtttgttctgtaatatctgcctgctttggttttactagactctaagcttcatcagtgtaaccaagagagtctggtagatcccacctcagttttttcttcctgtgtcatgtctcggaatctctgccaagacaggaagctgaaacattcagaaggtttgctttctttcgtttttttattttctgtttttcagggattattatcytctttgcctaatgtccagtatctgaaaaattgtttaatgtattttgtgtgttttgtttttagttattttagctaagaagaaaaatcatacctgttgctctcccttggctagaggaagactacactagagtttcagcacatgccacagactggctaaaatgctttccttccctgtttgctcaactgcttccttttcattcttcattcctcagtgtagctatacatccctcgggggaattttccatgagcctagtatagatctaaatcttagcaatctgttttcttacagtatttatctgaatttataactgtc

SEQ ID NO: 115637 - DNA, 595 bp, Homo sapiens
taatttgcattcccactaagattatatcagggttctcttttctacacaattttaacatctgttttttttttttttttactttttcataatagccatttaractggggtgagatggtatcacattgtggtttggatttacatctctctaatcattaaaaatgttcatcaatttttcatgtttgttggctgctttttttgtctttcttttaaaagtataggttcacattttttgtcaacattttttcttaaattccttataaaacatatatattagttatttattgtatgcagtttacacatattttagcccatactataggttgtctgtttattttgttaatagtttctcttgctgtgcaggtcacaatttttaatttttatttttgttgctttcacttttgaggatgtagtcattaattctttacagagaccaatgccaaggagagaattttctaggtgttcttctaggatttttataggttgaactcttacagataagtctttaatgtatcttgagttaattttctatatcatgagaagtagtggtcgagttttcctcttctgcatatgactaaacagtttttccagcaccttt

SEQ ID NO: 115638 - DNA, 595 bp, Homo sapiens
taatttgcattcccactaagattatatcagggttctcttttctacacaattttaacatctgttttttttttttttttactttttcataatagccatttaaactggggtgaratggtatcacattgtggtttggatttacatctctctaatcattaaaaatgttcatcaatttttcatgtttgttggctgctttttttgtctttcttttaaaagtataggttcacattttttgtcaacattttttcttaaattccttataaaacatatatattagttatttattgtatgcagtttacacatattttagcccatactataggttgtctgtttattttgttaatagtttctcttgctgtgcaggtcacaatttttaatttttatttttgttgctttcacttttgaggatgtagtcattaattctttacagagaccaatgccaaggagagaattttctaggtgttcttctaggatttttataggttgaactcttacagataagtctttaatgtatcttgagttaattttctatatcatgagaagtagtggtcgagttttcctcttctgcatatgactaaacagtttttccagcaccttt

SEQ ID NO: 115639 - DNA, 595 bp, Homo sapiens
taatttgcattcccactaagattatatcagggttctcttttctacacaattttaacatctgttttttttttttttttactttttcataatagccatttaaactggggtgagatggtatcacattgtggtttggatttacatctctctaatcattaaaaatgttcatcaatttttcatgtttgttggctgctttttttgtctttcttttaaaagtatakgttcacattttttgtcaacattttttcttaaattccttataaaacatatatattagttatttattgtatgcagtttacacatattttagcccatactataggttgtctgtttattttgttaatagtttctcttgctgtgcaggtcacaatttttaatttttatttttgttgctttcacttttgaggatgtagtcattaattctttacagagaccaatgccaaggagagaattttctaggtgttcttctaggatttttataggttgaactcttacagataagtctttaatgtatcttgagttaattttctatatcatgagaagtagtggtcgagttttcctcttctgcatatgactaaacagtttttccagcaccttt

SEQ ID NO: 115640 - DNA, 595 bp, Homo sapiens
taatttgcattcccactaagattatatcagggttctcttttctacacaattttaacatctgttttttttttttttttactttttcataatagccatttaaactggggtgagatggtatcacattgtggtttggatttacatctctctaatcattaaaaatgttcatcaatttttcatgtttgttggctgctttttttgtctttcttttaaaagtataggttcacattttttgtcaacattttttcttaaattccttataaaacatatatattagttatttattgtatgcagtttacacatattttagcccatactataggttgtctgtttattttgttaatagtttctcttgctgtgcaggtcacaatttttaatttttatttttgttgctttcacttttgaggatgtagtcattaattctttacagagaccaatgccaaggagagaattttctaggtgttcttctaggatttttataggttgaactcttacagataagtctttaatgtatcttgagttaattttctatatcatgagaagtagyggtcgagttttcctcttctgcatatgactaaacagtttttccagcaccttt

SEQ ID NO: 115641 - DNA, 500 bp, Homo sapiens
tcttgaatgtaattataactctccaaaaaataatcttccactcctcttaaacttatatacaaataaattatccaacagttttagctttggattactttctatacagaacattctgatttagtgtaacgtyttaagtgccagtgccttaattcttcctattgtgaattttctaaagtttacaaagacttaattttgactaaatatttttacacatgtattccatctgcaaaaatatcttttattataaactgcatggtgttttttaagctgtagtttctgaacaaatgtttttccacatttattacatttgtatggtttccttcaacataaattctctgacgctgaacaagtttgagtaattcctttagagttttcttctagcataaaatctgtacattatatagggcaagtaaaggtattacaaccctctttatatttgtaatgtttgtctccagagtactcttttttaagggtttaaattttccaaggtctttcaaaag

SEQ ID NO: 115642 - DNA, 500 bp, Homo sapiens
tcttgaatgtaattataactctccaaaaaataatcttccactcctcttaaacttatatacaaataaattatccaacagttttagctttggattactttctatacagaacattctgatttagtgtaacgtcttaagtgccagtgccttaattcttcctattgtgaattttctaaagtttacaaagacttaattttgactaaatatttttacacatgtattccatctgcaaaaatatcttttattataaactgcatggtgttttttaagctgtagtttctgaacaaatgtttttccacatttattacatttgtatggtttccttcaacataaattctctgacgctgaayaagtttgagtaattcctttagagttttcttctagcataaaatctgtacattatatagggcaagtaaaggtattacaaccctctttatatttgtaatgtttgtctccagagtactcttttttaagggtttaaattttccaaggtctttcaaaag

SEQ ID NO: 115643 - DNA, 500 bp, Homo sapiens
tcttgaatgtaattataactctccaaaaaataatcttccactcctcttaaacttatatacaaataaattatccaacagttttagctttggattactttctatacagaacattctgatttagtgtaacgtcttaagtgccagtgccttaattcttcctattgtgaattttctaaagtttacaaagacttaattttgactaaatatttttacacatgtattccatctgcaaaaatatcttttattataaactgcatggtgttttttaagctgtagtttctgaacaaatgtttttccacatttattacatttgtatggtttccttcaacataaattctctgacgctgaacaagtttgagtaattcctttagagttttcttctagcataaaatctgtacattatatagggcaagtaaaggtrttacaaccctctttatatttgtaatgtttgtctccagagtactcttttttaagggtttaaattttccaaggtctttcaaaag

SEQ ID NO: 115644 - DNA, 393 bp, Homo sapiens
gaattctctgatgtatagtaagctcagaggaccacttaaaagctttgccacattcttcacatttgtacagtttctcttcagtatgaactatcatatgcttagtaaggcttgaggaacagtaaaagcctttgccacattcttcacatttgtaggattcctctccactatgasttatctaatgttcattcagttttgaggatagtttaaagactttgccacattcttcatatctgtagggtttctctccactatgaattatcttatgtacattaaggtctaaagacttcttaaaagctttgccacattcttgacatttgtagtgtttctcttcagcatgaactatgttattttgaataaggtttgaggaacagtaaaacgctttgccacattttt

SEQ ID NO: 115645 - DNA, 601 bp, Homo sapiens
gagaattccgcatggcagagaagaagccaagatgaagagaatgtcgagaagactctagtatatagaaaataatatatttcagagttgcttgactatcatgagaagaaaaaatgtttaaacaaacttatagggagaaacagcataaagtcaagaagtacaggtttgtaagttctaaacatatggcattccaggaggcagagtgaacactgctcctaatctgagacacagtcacctgagaaaaagccatttttctcttcatcatccttctctagcatttcttctcaggtgatattctctggacaagtcacacctgcatcttkggaatatgcctttaaaggaatcagcacaatctcttcacctgctaccaccacaaacacaggtagaaagatccaggcatgcagaacatgtccacccatttatgttctttataacaggtgagattcaaggacagtgagctgctccacaaagatcaaaatttatctttctcttttcctgccacagacgccacaatttctgctacagcaatggggatatgggccacattaacttgtacctaccaaatccaaccatagtagaccctgtgacctccctttggaataaa

SEQ ID NO: 115646 - DNA, 601 bp, Homo sapiens
gagaattccgcatggcagagaagaagccaagatgaagagaatgtcgagaagactctagtatatagaaaataatatatttcagagttgcttgactatcatgagaagaaaaaatgtttaaacaaacttatagggagaaacagcataaagtcaagaagtacaggtttgtaagttctaaacatatggcattccaggaggcagagtgaacactgctcctaatctgagacacagtcacctgagaaaaagccatttttctcttcatcatccttctctagcatttcttctcaggtgatattctctggacaagtcacacctgcatctttggaatatgcctttaaaggaatcagcacaatctcttcacctgctaccaccacaaacacaggtagaaagatccaggcatgcagaacatgtccacccatttatgttctttataacaggtgagattcaaggacagtgagctgctccacaaagatcaaaatttatmtttctcttttcctgccacagacgccacaatttctgctacagcaatggggatatgggccacattaacttgtacctaccaaatccaaccatagtagaccctgtgacctccctttggaataaa

SEQ ID NO: 115647 - DNA, 557 bp, Homo sapiens
agtcacacctgcatctttggaatatgcctttaaaggaatcagcacaatctcttcacctgctaccaccacaaacacaggtagaaagatccaggcatgcagaacatgtccacccatttatgttctttataacaggtgagattcaaggacagtgagctgctccacaaagatcaaaatttatctttctcttttcctgccacagacgccacaatttctgctacagcaatggggatatggrccacattaacttgtacctaccaaatccaaccatagtagaccctgtgacctccctttggaataaagtttgaactcaactctcatgaatgtattttgaattcctcgtgtttgaccctggcctcaacctggagtcacatgaggcacttaattatatcaacaaggatgcttccacccagaacaatatacagagcctgcgggaagggcacaagtgaaaagatttctgcaacctggccatggaatcttaattagaagcctgggccaagaaccacttagctaagcattgcctctcaaacttcaatgtgcatataaatcatttggtaacc

SEQ ID NO: 115648 - DNA, 557 bp, Homo sapiens
tccctaggccacgggctgcagtaatcctgcttgccctgtcctggtggcctgtgtcccatctcttcccctaccatctaccactgaggcacagctcacagcacacagctggcagcccacattccacatggactccaaccaccacagctgcactccagwgtcacattatggagcagggtccctgaactgcaggaggagaacctgcaggactcctgggtaggattgcacttttgcaataatggaaatgggagcaatgtttcagctacgtttctatttataatggtgacaaaaaaatactgctggattcccagcatgggtctggatagagtgccaaagagttctcattgtgacagcccaactcactcagaaacaccatgagacacttttgggtgtcccttctgaagacagacaccgaaagcattgaagagaaaaacagctctcagtctgaataaaattgtattaagaggttaaaggtatctgaaagaaaaattcagattacatataatattagccaagtcgaccagaaaatactcccctgagacagtttctctctaaacacc

SEQ ID NO: 115649 - DNA, 620 bp, Homo sapiens
catttcctgggatttcaattatgtgtgttgttaagctgcttaatattttctaatcccataatttctgtcttttcttggtctgtttctgttaatttttttttcttgttttggatgaattttkttgtttatatgcatttctgttatttttttaatgtctaagggaaattctgaattctacattgttaggatctggatttcgttttatttaaagagagatgaactttgttttcaaatgcagttatctgagatcagtggtgatattgtttacttttaaatgtgattataatggcttcagagccttgactctagagctgattcacccctctactaaggtgtgattattctgagaactctatctgatgttataagtttctcactctggctggagcacatactggttcttctaaggcccatatgacctccaggaatttctctggcccattgctaatgaagactcatttttctatctcatggagttttactttatgtaggcacagttcggttctcactcaaggactccagagaacctctacgtaaatctccacagttctctctctgtgcagccctcttctctctgtcagtctgccttgatgattctagtcaccttggcctccataaac

SEQ ID NO: 115650 - DNA, 620 bp, Homo sapiens
catttcctgggatttcaattatgtgtgttgttaagctgcttaatattttctaatcccataatttctgtcttttcttggtctgtttctgttaatttttttttcttgttttggatgaatttttttgtttatatgcatttctgttatttttttaatgtctaagggaaattctgaattctacattgttaggatctggatttcgttttatttaaagagagatgaactttgttttcaaatgcagttatctgagatcagtggtgatattgtttacttttaaatgtgattataatggcttcagagccttgactctagagctgattcaccccyctactaaggtgtgattattctgagaactctatctgatgttataagtttctcactctggctggagcacatactggttcttctaaggcccatatgacctccaggaatttctctggcccattgctaatgaagactcatttttctatctcatggagttttactttatgtaggcacagttcggttctcactcaaggactccagagaacctctacgtaaatctccacagttctctctctgtgcagccctcttctctctgtcagtctgccttgatgattctagtcaccttggcctccataaac

SEQ ID NO: 115651 - DNA, 435 bp, Homo sapiens
tcatttttctatctcatggagttttactttatgtaggcacagttcggttctcactcaaggactccagagaacctctacgtaaatctccacagttctctctctgtgcagccctcttctctctgtcagtctgccttratgattctagtcaccttggcctccataaactttgatatcttgctcttaaattcagcaaatcatgatattctctctcggattgtctcataccatgctggaggctggaaatcactttcagtaagtatgctggcactataaagggtatatattgttttctttctctgagaaatcacagttttgtgctgcctatttttttcatgcaatgaaaacagtttatatacttgttctggatttctaaacgtttacaaaagttgcataattctggtaatcattaattcttcatcagcaacagttgaattc

SEQ ID NO: 115652 - DNA, 435 bp, Homo sapiens
tcatttttctatctcatggagttttactttatgtaggcacagttcggttctcactcaaggactccagagaacctctacgtaaatctccacagttctctctctgtgcagccctcttctctctgtcagtctgccttgatgattctagtcaccttggcctccataaactttgatatcttgctcttaaattcagcaaatcatgatattctctctcggattgtctcataccatgctggaggctggaaatcactttcagtaagtatgctggyactataaagggtatatattgttttctttctctgagaaatcacagttttgtgctgcctatttttttcatgcaatgaaaacagtttatatacttgttctggatttctaaacgtttacaaaagttgcataattctggtaatcattaattcttcatcagcaacagttgaattc

SEQ ID NO: 115653 - DNA, 449 bp, Homo sapiens
tgtaacttaattccatcaaggagagagagtgcatttcttgttatgctaaatttttgaagaatgtattgattttttatgacctgatwtatggatgataggtagatattacatgtttgtattatcaaatttcagggcgataataaaataaatacttataatgtttatattgtcactgtatactagttatttctttcttcactacaggagtttttcaacctataggctatttttcaattcaaggttatccagtagattttgaaatgttatgattaaatatctacttctcaagcattcatctttgcaaaggaatcaatcccaagctcttataatgcacatcatataaagggcagattagtcaatatatggttcagaaataattatgtaatatttataagaaaattaaaaatttagatccttaactcagataacaataatccaaattaaaattt

SEQ ID NO: 115654 - DNA, 449 bp, Homo sapiens
tgtaacttaattccatcaaggagagagagtgcatttcttgttatgctaaatttttgaagaatgtattgattttttatgacctgatatatggatgatakgtagatattacatgtttgtattatcaaatttcagggcgataataaaataaatacttataatgtttatattgtcactgtatactagttatttctttcttcactacaggagtttttcaacctataggctatttttcaattcaaggttatccagtagattttgaaatgttatgattaaatatctacttctcaagcattcatctttgcaaaggaatcaatcccaagctcttataatgcacatcatataaagggcagattagtcaatatatggttcagaaataattatgtaatatttataagaaaattaaaaatttagatccttaactcagataacaataatccaaattaaaattt

SEQ ID NO: 115655 - DNA, 449 bp, Homo sapiens
tgtaacttaattccatcaaggagagagagtgcatttcttgttatgctaaatttttgaagaatgtattgattttttatgacctgatatatggatgataggtagatattacatgtttgtattatcaaatttcagggygataataaaataaatacttataatgtttatattgtcactgtatactagttatttctttcttcactacaggagtttttcaacctataggctatttttcaattcaaggttatccagtagattttgaaatgttatgattaaatatctacttctcaagcattcatctttgcaaaggaatcaatcccaagctcttataatgcacatcatataaagggcagattagtcaatatatggttcagaaataattatgtaatatttataagaaaattaaaaatttagatccttaactcagataacaataatccaaattaaaattt

SEQ ID NO: 115656 - DNA, 449 bp, Homo sapiens
tgtaacttaattccatcaaggagagagagtgcatttcttgttatgctaaatttttgaagaatgtattgattttttatgacctgatatatggatgataggtagatattacatgtttgtattatcaaatttcagggcgataataaaataaatacttataatgtttatattgtcactgtatactagttatttctttcttcactacaggagtttttcaacctataggctatttttcaattcaaggttatccagtagattttgaaatgttatgattaaatatctacttctcaagcattcatctttgcaaaggaatcaatcccaagctcttataatgcacatcatataaaggkcagattagtcaatatatggttcagaaataattatgtaatatttataagaaaattaaaaatttagatccttaactcagataacaataatccaaattaaaattt

SEQ ID NO: 115657 - DNA, 538 bp, Homo sapiens
ccctagcatctaatgagtttaaattttttagatttcacagataaaygagattatgcagtatatttgtctttctgtgtctggcttattttacttagcattttgttctctcagtccatcaatgctatcacaaattttaggatttctttcttttgtaaggatgaataatattccattgtatgtatatgccacattttctttatccactaatctgtaataaaggctattattcaaaatacacaagaaacccttcaaatttcacaagaaagcaaacaattcagttaaaaatggggaaacagtataaatggataagtcaccaaaggaaatataaaaatggcaagtaagtatttgaaaatatattcaacaacatatgactttagggggataaagcaattctatatattgaaatttcctttaacaaagaaagcaaatagaaaactttctcagaaaaacaaaactttagtgatacatcatcagctgacctgtcttgcaagaaatactaaaggaagttcttcaagtggagagaaaatgatgcaagtga

SEQ ID NO: 115658 - DNA, 480 bp, Homo sapiens
gcgtttctctatcacatgagattctggaacactgctaaaatgtaggaatgtttgtccctcacaaagagtccagagcaccgcttgtgggttctgagtgtttgtccctcacataggattgcagaacacagctgctaggttctgagtgtttgtcccaaacataggattccaaaacactgctcagagggtctgaaagtttmttcctcaccaaggattccagaacactgctgctgggttctgaaagtttgtccctcacatacgattccggaacactgctatgagggtctgagtgtttgtccctcaaagggattccagaacactgcttttgagttctgagtgtttgtccgacacaaaggattccagaacactgctgctggcttctgagtgtttgtccctcacataggatttcagaacactgctatgagggtctgcatgtttttcccctcagaaagcattctgtatcactgctacgagtgtctgaat

SEQ ID NO: 115659 - DNA, 480 bp, Homo sapiens
gcgtttctctatcacatgagattctggaacactgctaaaatgtaggaatgtttgtccctcacaaagagtccagagcaccgcttgtgggttctgagtgtttgtccctcacataggattgcagaacacagctgctaggttctgagtgtttgtcccaaacataggattccaaaacactgctcagagggtctgaaagtttcttcctcaccaaggattccagaacactgctgctgggttctgaaagtttgtccctcacatacgattccggaacactgctatgagggtctgagtgtttgtccctcaaagggattccagaacactgcttttgagttctgagtgtttgtccgacacaaaggattccagaacactgctgctggcttctgagtgtttgtccctcacatargatttcagaacactgctatgagggtctgcatgtttttcccctcagaaagcattctgtatcactgctacgagtgtctgaat

SEQ ID NO: 115660 - DNA, 591 bp, Homo sapiens
ttcaaaactgcatccctgaaattctaatttgtcaaatgttaatgtttgccacaaaaatatactgtcaaataaggattaggtaaagttcaattcatttcttgaataatgaacatttaattcacagttttataacatttcttgaacatagataatggtggaatctgttggggtacagtgcttctggtaaggtaattattctttggaataaagttgaagaaacactgttctagaagtaataatttagattactaatttagtaaaaaataaagtatttactactatgtcttagggtttaaggatatagaggtaaaagatacagcccctgccctcaagaagctcttggtttacatgggaaacaataaaatcattacaatgtaatgatttttggagataaccagagttaatgtggtgatgcagaggctgaatgtttacaagagaaggtgcagtgcatgggaaagcacagaaaagtgagaaagaagggattgctattgatttactttccattgtttaagttcataggatattatataargtattcaattcagctgagaaatatgtaatttcatgaattataaattgtttttgctgttt

SEQ ID NO: 115661 - DNA, 569 bp, Homo sapiens
ttcacccctgccagacttttccctttcaatcccacctttcaactccatatagttactgaaagtttaggacatctgatctcccattgggaactctcaaaggactcaggggctctaaaaacagctacaaatcagrgtaaaagaaaaccttaaaaggctcctccacaaatattggcaaaaagcattagtcctcatattgaacaagtaacctaaacttgttccatgtcagaaacacttttcatataaaaatataaaatgtagcaaagataagagacaactgttttatataaaccagtaagtttgtattattttgtttacctgattcatggctaagattttagaatggaagctataaggtccttgttttcatctatttgtatatttatgtatatacaggtgaatttttctacttccgtatagtattaccaaattaacttgtaaaatcctatacagaagcactattcaaattgctttagtgataagtatgtctttatataaattaaatattgggaaaatttccagaaatatggaaactaacccaaatgctttctaagttcatgtgaattgggtaa

SEQ ID NO: 115662 - DNA, 594 bp, Homo sapiens
ctgaactgggctgagatggctcaaaagactgaaatagaattcagaatatggataggaatgaagatcattgagattcagaagtacactgaaatccagtccaaggaagctaagaatcacrataaaacaatacagaagctgacagataaaatagccagtatagaagaaaaatgtaactgacctgatagagctgaaaaacacactaaaagaatttattaatgccatcacaagtattaataacagactagaacaagctgagagaagaatctaagagtttggagactggctttctgtaacgagacagacaagaatagagaaaaacaataaaaaatgaacaaaacgtccaagaaatatgggattatgtaaagagacaaaatctatgtctagtatattgactttggaaataaaagataacattctatttatagcattctgtttttaatagtggtatttccatttacaaaatatgataattcttgatggttgaaaattttaaatcctagaaaacatagcattcctacatgcaatgttaacattgtttatgaacagttgttggtcaaagattcatttgatgaatctgatttttccaaaatagat

SEQ ID NO: 115663 - DNA, 640 bp, Homo sapiens
gttcacaatgggtgtttaaaaattcatttgataaaatggccagagaataatgtctcartaatacatagtgcatttttaaaaccacttcttagaaaaactaagacttcaggaatgttattataaagtgatttaatttttgtttcccaggcttttcaaacctagttagtgggtttgtgctctctaacaaaaaattaagacaattcctagtcactgtcaagtgctaagtgttcctctttagtaactaatatgtcatttccctctttgaatctgctaatgagtaaaagggctttggttagatttttattttttccatcctgttacttttatttcttctggcctagcttgcttaccaaaatttctgacctttctgggaagggtcagggcatatgaaggagggcaaaggatgttgaaagttcctacttgattcatgcagtctaagtgagtctaagcagtttggtcctagagagttgccttctctcctcatttgcttttgtgggatctttgcagaattgctcttatctttggaactttcaactgcatttcctttgatgccagggctgcactctccctgagtagttgctgtggcctttattagcccttaatcatccatcagtatttttgtctacttctcttgctgtgc

SEQ ID NO: 115664 - DNA, 640 bp, Homo sapiens
gttcacaatgggtgtttaaaaattcatttgataaaatggccagagaataatgtctcaataatacatagtgcatttttaaaaccacttcttagaaaaactaagacttcaggaatgttattataaagtgatttaatttttgtttcccaggcttttcaaacctagttagtgggtttgtgctctctaacaaaaaattaagacaattcctagtcactgtcaagtgctaagtgttcctctttagtaactaatatgtcatttccctctttgaatctgctaatgagtaaaagggctttggttagatttttattttttccatcctgttacttttatttcttctggcctagcttgcttaccaaaatttctgacctttctgggaagggtcagggcatatgaaggagggcaaaggatgttgaaagttcctacttgattcatgcagtctaagtgagtctaagcagtttggtcctagagagttgccttctctcctyatttgcttttgtgggatctttgcagaattgctcttatctttggaactttcaactgcatttcctttgatgccagggctgcactctccctgagtagttgctgtggcctttattagcccttaatcatccatcagtatttttgtctacttctcttgctgtgc

SEQ ID NO: 115665 - DNA, 584 bp, Homo sapiens
tagtattccattgtgtattttactacattttctttatcttttcatccattgttgacactcagcttgatttcatatcttggttattgtgaattcttgtctgactcgcttagtctcctccctattataaatctttgtctccaagaattcgttgggtgataccatcttcatcaagaaatgaaaaagttcattggtaagattgatgataacatgcttagagaactctacagcacaagtcttttccagcctggaagaagccatcattaaaatgagtctctctaatttcaagaggatgataagatctcagaggagtcaagtgactctccctaaacacctgggacatagttaatgtggcaatcaaaaggtcaacagagcctaaataataataagaatacctaaccagtagagatcatgatgttccaaggaccaaaatatattagcagtttgctaagatcttaatggatatttataatttaaaagaaacaaaacagaataaaaacaggccaaacactatargtctgttgtactgtctactttctctaccacagaaggtcaccatttcccagtgatgtcccagacctagttca

SEQ ID NO: 115666 - DNA, 533 bp, Homo sapiens
tttgcagtttttagaattctatatttgtctttgacttttgatagcttgactataatgtaccatggagaagatataatttcattgtatctgtttgagaatctctgatattcttgtatctgaatgcctaaatcttttgctagatttgagcattttttaaatattattttgttaaataggctttataagtcttttatttttctctttactttctgggacactgaaaatttaaacgtatggttgtgttatggtgtcccatatgtcatataggctttgctctttcccatttagtcttttatttaattttgtctgagttgtttcaatatacctgtcttcacatcctgaaattatatcttttgcttgatytagatcattgttgaaactttcctatgtattctctatttcatttaatgaaatttttagttccaggatttgtttggttctttttatgatgtaaatcctccctaaattgtttttttgatttattgggattgtttttctgttttctgttgtgttttattgaatttctttaatat

SEQ ID NO: 115667 - DNA, 554 bp, Homo sapiens
tggtgcatggctggaggtcaggccagaacttatctaactatattaagcccatgtataagcttttattcgaattaaaagtgcaattgcaaaaaattcaaaagctggttttgaacacgttatagtttttaaagttaatttttcatgtcacatctctcttctatcacctttctatatcctctgtctttagtgtcttgatcttcatttcaatcaatcatcagtcaatcaattaattaacaaagcctctatggcctccttttagaaaggttaacttgtggtaggaatagatagttggaaggctctcttcactactccataatctytttttctctaccttccccactttgatttctgctttgttttctactctgttactctaacactcagttttcgttctacaattctctctctcctcctcctactttccacctttccatcctgacctctgtctccctcctactttcctccctctttttccccatcctcttcatatctcaagtgcgaccactaaagatagtgagggagagaagaggagtcagagacagaaaataatgtat

SEQ ID NO: 115668 - DNA, 622 bp, Homo sapiens
gcacaggctttgaagtcagttagaactaagatcaaattcctgctctcattcttaatgggtgaactctctgagccttagttcctcaaatgaagggtagttgtgctctgtcctatctcacagcagagttaaatatataaacagctatgaggaacaaatagacaaatgtgccrtataaaaattaaatattcataaaaacaatgtaccattttaaaaagtcaaaagacaacaaatgtgggagcattttaaaatttgcttccttcataataaacataaacttctaaaagtggaatttctgtataaaaggatacatgcatttaagtttataaatatgccaaactgttctgaaaataagttttacctatctatattctcaattgacattgaataaaaatgtctttgtctccacaccctgactgatcatgtgcactattgacacatttttccccaacttgataggttaaaaaaagttccttgctgtgatttacatttctttaacagtgaattaatttgaatatcttttcatatgtttataataatttatttttgtttttctatcaattttctgttcttaactatttttgaaatatttattttcctattgagctgtttctaaatcagtttt

SEQ ID NO: 115669 - DNA, 558 bp, Homo sapiens
gtaactgggacaatggatgtgtcctacttccagcttagaagtttttaaatatatatattttttgagatggagtctcrctctgtcacccaggctggagtacagtggtgtgatctcggctcactgcaacctgtgcctcctgggttcaaatgattcttgtgcctcagcctcctgaataagtgggattacaggcatgcatcactatgctcggctaatttttgtatttttagtagagatgaggtttcaccaggctggtctcgaactcctgacctcaagggatccacccacctaggcctcccaaagtgctgggattacaggcatcagccactgtgcccagcctagaagttttcagtgttaatgtacccctgattattaattatttctttcatgggttgtggctttggtgttatatctataaagtcatcaccaaattcaaggtcatctaaattttctcctatgttatcttctaggagttttatagtttctgtgatccattttgagttaattttcatgaaggctatttttgtgaatgtgtctagattttttttttttggcatggga

SEQ ID NO: 115670 - DNA, 564 bp, Homo sapiens
acttactcaagtcacgtcgtctstgaagttccctgatgttcagagccaagaaaagtttcataaatgcagcctcggcctctcagccccacctcccaccccatccagatgcctttattcccttaagggatgtggggctgggctgagctcgaggaggaggactggggccagagattgagggtgaggcggtggcctgggcagaggaatccagtatggggagagagcccagtgcctggcaggggagggtaatggggataatggggactttgaagtggccactacatcctgcaaagcccaggcctagagaatggggtttatgtggagcctctgtgtggagaggggccccgactggggatgtcagggtccccctgcccttcagggcagcagcaagccttcctcccagcacctctgctctcatctccacatgcgctcatgcagagggctttgtaacggcagtagtgttaacagcagcaattcattgagcacctgctataaaacaggcggatcactagatattttacctgctttctctcctttaattcactcagcaacacaatcaactccata

SEQ ID NO: 115671 - DNA, 564 bp, Homo sapiens
acttactcaagtcacgtcgtctctgaagttccctgatgttcagagccaagaaaagtttcataaatgcagcctcggcctctcagccccacctcccaccccatccagaygcctttattcccttaagggatgtggggctgggctgagctcgaggaggaggactggggccagagattgagggtgaggcggtggcctgggcagaggaatccagtatggggagagagcccagtgcctggcaggggagggtaatggggataatggggactttgaagtggccactacatcctgcaaagcccaggcctagagaatggggtttatgtggagcctctgtgtggagaggggccccgactggggatgtcagggtccccctgcccttcagggcagcagcaagccttcctcccagcacctctgctctcatctccacatgcgctcatgcagagggctttgtaacggcagtagtgttaacagcagcaattcattgagcacctgctataaaacaggcggatcactagatattttacctgctttctctcctttaattcactcagcaacacaatcaactccata

SEQ ID NO: 115672 - DNA, 643 bp, Homo sapiens
tgcttaaagttagaaagttaccttcagcattcttgccatatttttatcacctagtacgtgcaagttttgcacttgatgtttgtgaactggtaaccatagaaaaaaaaagcttattttttcaacgcaaagcaaagtataaagtgaataagacamctgtctgtttcagatgaaagtacattacttcagcttccacagtgttctatcttggttgagaccaaaacctctatgaggaatttgggaacagcacagccagcgcccacaaggggctatgttaatatcatcttggtcttcagagcttgggactggattccagagcttggaaattccagccacactgttgctttagtctgagagaggccaagggatttcactatgagctagagaagtatacgggggtgggttggggagctggtggtgatgcaggtgtccttaatcttgaactagattcatatggcctctgaaggagggttgttctcgtggatctctatagataacaatgaaaatcttttataaggtgcttactaaggacagggcattttttgagcatcaatttgtataggttggtgcaaaagtaattgcattttttgccgttacttttaatgacaaaaaccacaatcacttttgcaccagccattaacttgtt

SEQ ID NO: 115673 - DNA, 643 bp, Homo sapiens
tgcttaaagttagaaagttaccttcagcattcttgccatatttttatcacctagtacgtgcaagttttgcacttgatgtttgtgaactggtaaccatagaaaaaaaaagcttattttttcaacgcaaagcaaagtataaagtgaataagacaactgtctgtttcagatgaaagtacattacttcagcttccacagtgttctatcttggttgagaccaaaacctctatgaggaatttgggaacagcacagccagcgcccacaaggggctatgttaatatcatcttggtcttcagagcttgggactggattccagagcttggaaattccagccacactgttgctttagtctgagagaggccaagggatttcactatgagctagagaagtatacgggggtgggttgggragctggtggtgatgcaggtgtccttaatcttgaactagattcatatggcctctgaaggagggttgttctcgtggatctctatagataacaatgaaaatcttttataaggtgcttactaaggacagggcattttttgagcatcaatttgtataggttggtgcaaaagtaattgcattttttgccgttacttttaatgacaaaaaccacaatcacttttgcaccagccattaacttgtt

SEQ ID NO: 115674 - DNA, 643 bp, Homo sapiens
tgcttaaagttagaaagttaccttcagcattcttgccatatttttatcacctagtacgtgcaagttttgcacttgatgtttgtgaactggtaaccatagaaaaaaaaagcttattttttcaacgcaaagcaaagtataaagtgaataagacaactgtctgtttcagatgaaagtacattacttcagcttccacagtgttctatcttggttgagaccaaaacctctatgaggaatttgggaacagcacagccagcgcccacaaggggctatgttaatatcatcttggtcttcagagcttgggactggattccagagcttggaaattccagccacactgttgctttagtctgagagaggccaagggatttcactatgagctagagaagtatacgggggtgggttggggagctggtggygatgcaggtgtccttaatcttgaactagattcatatggcctctgaaggagggttgttctcgtggatctctatagataacaatgaaaatcttttataaggtgcttactaaggacagggcattttttgagcatcaatttgtataggttggtgcaaaagtaattgcattttttgccgttacttttaatgacaaaaaccacaatcacttttgcaccagccattaacttgtt

SEQ ID NO: 115675 - DNA, 599 bp, Homo sapiens
gtaatcatttcctagattttggacaaaaacgtgactatcaaagaattagctcatgacataatttagaagaggagaggtggggagggggttgaagtgaggatggcagacaaacttgctatccctcctcatttgttcacatgacctaatgaagaatcttggggatacgtgcttccagaattgctttcattttgacagcctgacatcctgaggaaataggcttgttgatgccatgaaagatgaatayaaaaatactacccactggaagaatcttaaagaacaagtattggatctgtggtgtttttttgttttttgttttttcaagagagaaagatagggggccgagagaggatacagtgattaatgattattaaaacatacacacatatacgcacatatatgtagctctatagtcttcatatgtaatacaattgtttatattctgttttgcaattttataattgtttgttatataatgaatgtctttaaaattcattatataagcatttcctaagtgtccatttcctccaaggccctattgagacagcacgcataagtgtaaaggccccagtttctccttaaaaagcctatgggctgctagg

SEQ ID NO: 115676 - DNA, 572 bp, Homo sapiens
ttttttgattgtgttggccctttgctttttattcaggattgattactactggatctttcctagagctctgttcacaatggttgtaaatgactcaagctttggcactccctcactgaagtatttgctttagtgaattctaaatttctctgacagagactacaactgtctcagaatcaaactgccttctgtagtarttactgagcacatggtacaactggagtccttgatattcattagaaaagtgcagagggtgggtgataaaagaaaagagtaaaaatctcaagaaattactaggtttaggtaaaatcatcacacttcttaggaagaatgatttgacagagatactcagaaggaatcagcccctgagttcagccacattggggtcttgctggctacttaatctcacatagaagaaaacatcaaactgtctttgcttacatgcttgtaggaaaggccagttttcttccctttgaaatgctctctgatgtcatgagaattctattaaatggccgcctactctcaaagagaaaatgcgttttaactttcagggagaaaacagtgatcacacactt

SEQ ID NO: 115677 - DNA, 504 bp, Homo sapiens
tccttccacttagtttttaagttcctcacaagttgcaattttgtagtcatcataatcttcagggtaaatgagtgccaaataatcagacatttacgttacagcaaaacgtaaaataccggcagattgtaaagtttgaaagatctaacaaagaaaaaagtgacattgctaataaaaatgctgtattgatgaatatcaatattgaaggttctggagtcacatcacaggttcagattcctgctctactacttatttgtggtgtatctttgaacatgttacttaacctctctgtgccttagttccctgtctcaaatggggaaaataaaaccactgacctcatagtggttgtaatgtagtgaggattaaatgagaaatacatgtaaaacacttagcacagctaagttaaaataagggttaatttttgccttaattccactattattatgatgtttattaaatgtgtttccaytgcatagaactcatgaatgtgcttgaaggctggaattc

SEQ ID NO: 115678 - DNA, 602 bp, Homo sapiens
tttccaattcatacacatatcctaaagttcaaaattaatataatgagttgctgaatgagtctgaagattaggaaatagatcttcatgtgaaatatatgctctctggatttaatcagatgggcaaataccaaatagattttttttccaccaaacataaatattttcacttactttgagtgaaatctaaaaagagagaatggtctcaagagttttacaatatctaggtgaaataatcctgtttgggggatttcatacacgattccactgagtaatttctgaagaagaagtgcaatataattttatgtgtctcaagactagtattagcttttgttcaatatctgaaataatgcaatttcctttctcagaccacactratttattttaacgaattcattctcctgttcaaaaatctttatgtgatgctgcctacactctagaaggctgaggacagtgtcatctaccccttccctctctctctcacaataattacccacagcagcaaggctcttaagaagtgcttgtggaatgaataaattaaggttctcatgattatacattgcagatattaacaaaggacaatgtattactctccttcacctgct

SEQ ID NO: 115679 - DNA, 562 bp, Homo sapiens
ttattgtcagcattcaaagtctgactgcaatttaataaaaasacttgcttaaaagccatatttagatttcatatgacattaccacctaagctcatgaaataactatactcaaagttctagtcttctcacatacttttactaaagtaaaataaaccaaacttctttttaaaaacaatgtcacatgaactataattatgaaaaataattgctacttcaattcctgaagtcataatctcattacactttaagaactatgttgggaattaaaagctctcaagaggttgaaaggaaaactataatagttgaacaactaagactctcatacattgctggtgagagcttaaattaatacaaccactttggaaaactgtttggcaatatctagtgaaagtaaatactaaactaaatatatggaataatatatgaacttccagagcagataaaactaatattcagagaaagaaatcggaatactgtttacctctgtagaaagtagtatgagagactgtattgacttggaagatgtacaatgtcttcttgacctgagtggcagtgacatggg

SEQ ID NO: 115680 - DNA, 455 bp, Homo sapiens
ggaatatggcaacaagtgaaagtatttgtgtgaagcagcccttacagaactacgctattatgacaaaagaatggacagctaagatgcttcycgtatcatccttttcacaaaaatccattacccattgaggcctatcgtaatcgtaagtttatttcaggaatcactgatttcttctcttccaacccaaatcttacatttcctttttggttcatttaaaattgtgcctttttcataatggcttccaaaattcccacaagcacataatgtcataaagctctttcctttctcagaatcgccaacatataaatcaaaaaacaaaaaccatcattatactataatgcctgttattagatacgggcttggtccatttttcagtaatttacattcagttatttattctaatatttgcgaatttgaaaagcatatgacatgattctgataaaatgattaagaac

SEQ ID NO: 115681 - DNA, 576 bp, Homo sapiens
ggtcaaaacgaatgataaatacattttacggcttataagttrtaaacaagcagtgagagatgttggtttcagtgatcatggaaagggctgggcctgaattatgcctagagaagaaactggatacaatgaaagaatttacttattcatgtaaaggcactcggtgctaccaaagagagttgtcttttcatattattcaaatcgtaattccaaaatggaagtcttggaagcccaaatgtttactcataatcttggccaaattccaccttggaggagtaagttaaaaaccacagccaattcaattatttaatttcactgtattaaacctcaaggttgccaaatgatctcattaccaaattatatcctaaggttgtcctgggaaaataagctcttctatgccagacaaactattcccaagggcaattcttggccagtgatattttcgaagttgcaaaatggctgtgtttttcattggaaaattccatcctccgcccctggtcctcttggagaattctgtagcttacctaacctagcacaacaaagcattgggccaaagagtatcatgcaaaacacactcag

SEQ ID NO: 115682 - DNA, 601 bp, Homo sapiens
ataaatacattttacggcttataagttataaacaagcagtgagagatgttggtttcagtgatcatggaaagggctgggcctgaattatgcctagagaagaaactggatacaatgaaagaatttacttattcatgtaaaggcactcggtgctaccaaagagagttgtcttttcatattattcaaatygtaattccaaaatggaagtcttggaagcccaaatgtttactcataatcttggccaaattccaccttggaggagtaagttaaaaaccacagccaattcaattatttaatttcactgtattaaacctcaaggttgccaaatgatctcattaccaaattatatcctaaggttgtcctgggaaaataagctcttctatgccagacaaactattcccaagggcaattcttggccagtgatattttcgaagttgcaaaatggctgtgtttttcattggaaaattccatcctccgcccctggtcctcttggagaattctgtagcttacctaacctagcacaacaaagcattgggccaaagagtatcatgcaaaacacactcagtaacatgtgaatgaccactagttgcagtctgaaaaacaa

SEQ ID NO: 115683 - DNA, 523 bp, Homo sapiens
attctgtagggcatattcatgatgaatcaagctcttaatagcaattacttacattgttgaggcttactcctactgagtgctttttatacattgttcatttaatcttaccaatgcaatagtacagcttaggtactattaatacctccacttgacagaaaagtaacccagggctcagaaaggttagacaacttggctgaggttacacagcatgtaaaaggtcaattgtgttccmaaactggacttttattgaactacagactatgctgttaaccattgaccaagttatttcccaaagtatgacccgcctatactcaaatcttaccccattctttaacagatgatactttatccattgcaaccacttcctgtcaggattctgagttgacatagagtgtttcagcagtgattatttaagccaattacatcaggatctttaggtgtagacctgggaactgatatttttatcaagctcatgaggtgttccatagcatgttaatgactgagagccactgtcaatagaatt

SEQ ID NO: 115684 - DNA, 528 bp, Homo sapiens
tctgcactgttgggataacataggcctcttccatgtggttccacaccaggaacatggggacaatcagacctctcccagtgtgggcataaggatacaagatcatgtcaatattgacattcataatggctgggygcagtggcacacgcctgtaatgccagcactttgggaggctgaggtgggcagattgcttgaaccccagagttcgaaaccagcctgggcgacttggcaaaaccagtctctactgaaaatacaaacaattggctgggcttggtggcgcacacctgtagtctcagctacttgggaggctgaggtgggaggattgctcaaacccagggaggttgaggcttcagtgagctatgatggcactgctgtactccaacctgggcaacagagtgaggccctgtctcaaaacaaaaacaaagacaaaacaacattcataatagtagcaatagctactatgtgccaagcccaggcacctcttcgagtctttgctgtcaccctatcaggtaagcgtgcttagaagttaca

SEQ ID NO: 115685 - DNA, 579 bp, Homo sapiens
agagggcagaggtgactggagaggcttcctctgaaggagaggcttcctctgaaaaagaggcttcctcaggatgcacattcatttcatgacaagagccaagtccatcaggcacttcagcaccttgtccaaaatgtctgctgatagcaccatcctgtgtgcgatgctgccaagctcctgggctttggggcagccccaggaggagggcgtcatttcttgttctgagaagtggtggtcaggcccaggtgacaccaggagtccrggccctgactcctttgtgtctcagcttgaccccttgagaccacccccttccttggaggtttatgccagcggtgagctgacatcctacctcctatatcctggtgggtcacaaatactaactttaaaagaagcaacgacacccccaccagacacccactcctgtcaatatggaaatatggcccgggaacctcactgccgggaatactcaccgggttatactcctcatatgccaggaggatgtggagtagttcccgctgcctaggaaacagagaaagggggctttggtttgttttgtgcagatgttgttaatttcactttgtc

SEQ ID NO: 115686 - DNA, 460 bp, Homo sapiens
caagcaggggtgggcgtcttcccaaggacttgagtacagtgggacctagacagagaatcctgttgtcccccaatgccatgaaatggggacacaccggccccagcaggttgaatggtttccacctgccaagggtgaagggcccatgatgggctattccagggatgtggaggcagactggggtcagcgaccagaggtctctgtgcaatcggcctcctgggatgctcagggcctcagcgatgcccagtttcctacagggaacaagatctctcccgactgctcggktctactccgctcatcactttggctaccgtggctcttcagtctgaacagtgaagccactttaggaataacgcctgttgagcaggagggtgttgggtttgggggatgaggaagatctattgtacgcatggaaaccacgtctctcgcggagggactgtggagtccaccattctgagccgtc

SEQ ID NO: 115687 - DNA, 552 bp, Homo sapiens
actgtttgccagccatgactagaaaaaaggactctgcctacaccttgactcgaaatagcagctgcaaaagtagacttacttggtgctgagagtgctrgagagcagaaggcagctactagcacgaggagagacaggacagtcacgcagagcttcatggtattggtggcaaagaggttttctcagaggtgaggctgcagaactcagaagcttcagaacctagctgtgtcctgtgctgatactgagttgggaatctctctttatagggactctgaggcctaggacaaatgtgggggcacaggagagtgagtggaatttccatggtagagatgatgtcatggctcctgaagctagctgagtgaggagttcctctcagcttctcttccccagggcgatgtcatcatagaggaaagatgagggaggtgcaggcgagaagaaaagggaagtggtacagccaaaagcagtgaccgagactggggagagagttgcaaaccccagaggaaaagatgaaatgttcacacctgctacaagtggcttgtagacaagaactgtgct

SEQ ID NO: 115688 - DNA, 552 bp, Homo sapiens
actgtttgccagccatgactagaaaaaaggactctgcctacaccttgactcgaaatagcagctgcaaaagtagacttacttggtgctgagagtgctagagagcagaaggcagctactagcaygaggagagacaggacagtcacgcagagcttcatggtattggtggcaaagaggttttctcagaggtgaggctgcagaactcagaagcttcagaacctagctgtgtcctgtgctgatactgagttgggaatctctctttatagggactctgaggcctaggacaaatgtgggggcacaggagagtgagtggaatttccatggtagagatgatgtcatggctcctgaagctagctgagtgaggagttcctctcagcttctcttccccagggcgatgtcatcatagaggaaagatgagggaggtgcaggcgagaagaaaagggaagtggtacagccaaaagcagtgaccgagactggggagagagttgcaaaccccagaggaaaagatgaaatgttcacacctgctacaagtggcttgtagacaagaactgtgct

SEQ ID NO: 115689 - DNA, 552 bp, Homo sapiens
actgtttgccagccatgactagaaaaaaggactctgcctacaccttgactcgaaatagcagctgcaaaagtagacttacttggtgctgagagtgctagagagcagaaggcagctactagcacgaggagagacaggacagtcacgcagagcttcatggtattggtggcaaagaggttttctcagaggtgaggctgcagaactcagaagcttcagaacctagctgtgtcctgtgctgatactgasttgggaatctctctttatagggactctgaggcctaggacaaatgtgggggcacaggagagtgagtggaatttccatggtagagatgatgtcatggctcctgaagctagctgagtgaggagttcctctcagcttctcttccccagggcgatgtcatcatagaggaaagatgagggaggtgcaggcgagaagaaaagggaagtggtacagccaaaagcagtgaccgagactggggagagagttgcaaaccccagaggaaaagatgaaatgttcacacctgctacaagtggcttgtagacaagaactgtgct

SEQ ID NO: 115690 - DNA, 552 bp, Homo sapiens
actgtttgccagccatgactagaaaaaaggactctgcctacaccttgactcgaaatagcagctgcaaaagtagacttacttggtgctgagagtgctagagagcagaaggcagctactagcacgaggagagacaggacagtcacgcagagcttcatggtattggtggcaaagaggttttctcagaggtgaggctgcagaactcagaagcttcagaacctagctgtgtcctgtgctgatactgagttgggaatctctctttatagggactctgaggcctaggacaaatgtgggggcacaggagagtgagtggaatttccatggtagagatgaygtcatggctcctgaagctagctgagtgaggagttcctctcagcttctcttccccagggcgatgtcatcatagaggaaagatgagggaggtgcaggcgagaagaaaagggaagtggtacagccaaaagcagtgaccgagactggggagagagttgcaaaccccagaggaaaagatgaaatgttcacacctgctacaagtggcttgtagacaagaactgtgct

SEQ ID NO: 115691 - DNA, 575 bp, Homo sapiens
ttattctatgctacctcttccctgtatgaatctctcattcctggatttcctgatgatgatgatttgtaccacatttcaaggtgtggcctgtcactctcatagctgggtatttgcaatcaagtctctgtctttccgtcccccgatccattcacttcacctgttcaaaaccactatcctcaaatccatcttaaccctgaaaccatggcttccttactttttttccctctggaattttcccaaacaaaatatcttccttcctcagatgctagctccctgattggcttctctgggccactttcctaagcttcacttgctcttagtctcggctcaagaacggtctttggtggattttaaatcccttgagatggtaagtgaagcattctttgcaccagctkaggtacaatcttctggggagagggtccatagtttactaaaagcatcaactttctttcttttctttttttcttatatttaagtttttttaatcataattaaagacatgcaggaaagttataatagtacaaaaaattctcatatactttttatccagatcctccaaatgttaacgttttact

SEQ ID NO: 115692 - DNA, 522 bp, Homo sapiens
ccctttgtggggttcctcatccatccttccattgcttctgctgctgccctgaaggcatcaccgctctcccgtctcctcttggggcacctaactctcttaacagtttatgactttgaggagttttgcctttcacaaaaagaaagaatgggggaaaaacggttatgcctcagcagctttcgctgtctaccctgcagcacaaattccacttgatggaggaacacaaaggtcggactccctgccgtgaagaggagaaagggaaattcgaatatggaaggagctctactctcccttgctctgtcctccgcaagagaatggggcagaacattctttagtctacacctctgtcccacatgagttgccaaagaccacagtgcctggtgggtgacatctctccaggsttttgaagacatctgagcctggattttgagcacattcctgacctccctactgggaggctcttctccttcaaggtctgccttctgacaagccctagctctttcccacctccagtggctgggtggg

SEQ ID NO: 115693 - DNA, 555 bp, Homo sapiens
ttctctcccctttgtggggttcctcatccatccttccattgcttctgctgctgccctgaaggcatcaccgctctcccgtctcctcttggggcacctaactctcttaacagtttatgactttgaggagttttgcctttcacaaaaagaaagaatgggggaaaaacggttatgcctcagcagctttcgctgtctaccctgcagcacaaattccacttgatggaggaacacaaaggtcggactccctgccgtgaagaggagaaagggaaattcgaatatggaaggagctctactctcccttgctctgtcctccgcaagagaatggggcagaacattctttagtctacacctctgtcccacatgagttgccaaagaccacagtgcctggtgggtgacatctctccaggcttttgaagacatctgagcctggattttgagcacattcctgacctccctactgggaggctcttctccttcaaggtctgccttctgacaagccctakctctttcccacctccagtggctgggtgggccggggggtggggtaagggtggagat

SEQ ID NO: 115694 - DNA, 588 bp, Homo sapiens
cccgtgagaaacaagactctgctagaaagcaaacagtgccatgcagttaaaatatccactaatgacaccgtgtgctgttctgcatccgggcaagcatggcttatcctggatggacttatgacccgccgccatcttcctaacctggcagtaaacatggaagagttgttttcctaaccttccagtaaacatggacaacaagcatggtggcatatgtctgtagttgcagcaatttgggaggctgaggcaaggggattgcttgagcccaggaagttgagactgcagtgagccatgatcgcaccactgcactccagcctgggtgacagagagaratcctgtctcaaaaaaaaaaaaaaagaaaagaaaagaaaagaaaaaagaaaaaaaggttttattgtggggaggtaagggtattgcctgggaattaataaatgcactcattaccgaatgacattttgttgcaatgatcacagaatcaggatgctcaatgaacatacacaataagcagcctttagtgtctaaaacaggagagtggtctacgggaaaataaaagccaagaatctatatcagagctgatatctgggaatagaa

SEQ ID NO: 115695 - DNA, 524 bp, Homo sapiens
agacctccaaaccttcagacctccaataaacttgtttgtggaggtctggagagtctcttcagacctccaataaaaatttgtttaatcctaaatgggtcctgttaagaattctttcattatcttgtcatgcttcaaggcccaggaaaggcctaggcaaaactcttggtgggcttttgttacattctagtctttgtataaggrgacttcttcagcttttaatatttaaccactcagtcagtgctgaaacagctgttacagaggcctgcctgatcagccaggagtgagatctggcctgtcacaaggtagaacagtctctggattgaccagggcactctaaccctttagccacaggcagatggaacattccaataaccaattaagaaaataagaggcatatcctgaaggaggacttgttctgcatttataattttgagtttaggtttaaatcagcacagttcagttccaagcagctgtaaaactcaagtggaggtttgaacttacaataatgtgaatatcagtctgga

SEQ ID NO: 115696 - DNA, 524 bp, Homo sapiens
agacctccaaaccttcagacctccaataaacttgtttgtggaggtctggagagtctcttcagacctccaataaaaatttgtttaatcctaaatgggtcctgttaagaattctttcattatcttgtcatgcttcaaggcccaggaaaggcctaggcaaaactcttggtgggcttttgttacattctagtctttgtataaggagacttcttcagcttttaatatttaaccactcagtcagtgctgaaacagctgttacagaggcctgcctgatcagccaggagtgagatctggcctgtcacaaggtagaacagtctctggattgaccarggcactctaaccctttagccacaggcagatggaacattccaataaccaattaagaaaataagaggcatatcctgaaggaggacttgttctgcatttataattttgagtttaggtttaaatcagcacagttcagttccaagcagctgtaaaactcaagtggaggtttgaacttacaataatgtgaatatcagtctgga

SEQ ID NO: 115697 - DNA, 615 bp, Homo sapiens
aaaatgagatttgtctgtattccctagttatcctaaacagtatcttgaacattataagcacttatgaagtatataaaaagataattgaaatatttcatggaaatccttttaatttcactaattgaaattctatctgcaatgactattccctgagccttctatttttaggcagagggaggcaatataaaaaacactaacctaagaatcaattttagctctggtactcaatttttgtttttgtggtatgattttggacaattcacttttacctttacaaccytcagtatattcatctgtaaaatgaagataagacccagcctacacagttcccagattgttctgaggatgggatgagatgctgtaattaaaaggattttgtaaataaaagagcctggtagaaacatattgaaataaatatattgtctacaatttttgatacaagttttgaaattaaaagataacattgcatgtttttattatgtactatatgatgtctaatataatgctttgaagtatattatggaatatcaattttattacattcaaatggaaataatgacttgcaggctcttttattgtggtggtcaaaccaattaggagtgtatagaaggtctt

SEQ ID NO: 115698 - DNA, 439 bp, Homo sapiens
gtggcaattcttggtgggacaagaatgcgagaggctgttataccagaatctgacactggaggatgaagggggcagagttgaggccttgactgggtatgatggcttctctcctaggcttggggtgggataagagagtttcaaaaaccctctcggcccttggatgtcactgttttccatgccttatgccagcaacggcaaagagaagagctactattccaggagggttttttttttttttttwaagcaaaaagaaagtcttttggtttgcataactgcataggtcaatgcagtttcaggcatggctggatctagatgcccatatgataatgtctgaactcagtccctctcagattttctctctgtcctccttcctttatctctacctctctccccacctctatgagttctgtaccttctgtgttggcttcactcacaggca

SEQ ID NO: 115699 - DNA, 525 bp, Homo sapiens
tttctgcttgagagctcttcaattgtttaaagagaactatctcaaagtttccttttccttagttctttcaactgttcttcacaggacctggaggatcctaaccactctagtccccatgcatccaacaaacagtaactgagcactgaatactgtggtggtggccctctagggtctttctggttggccagtgtcctcaaaaaatggtacccggaactgaaaacacttaagatgtggtccaaataagaaaaaaaattattacttcttttgatttgggccttgcatttttwaaaaattaacaaagctatttccattatgtgtatttttttttagggttacatatggagactctgaatgaaaacaaatgaaaaaccctagtccacaagaaaaaagacctgagaatttttttttggctcatggtctcctctagtttataatgacacacacaatagatattttaccctgaagggaggactccattgcccttattaattttatcttgttagttttagtccattgttccaactc

SEQ ID NO: 115700 - DNA, 593 bp, Homo sapiens
gtatgaagcaaataatgagaaattaatgtgtgacaattagaataaaggaagaaatctttaaaatgggttttaggttgtattctcttgaaattctatgaattaaaacattttgtcccccatgactgttcatcttcctcatctggcagagagtgagaggtatttaaagctcctgtattgtaccaaagcagttaaattataaaggtgttatagctgaggaataaaactgacattgaataatagtcatgtttacccatatctccttatttgcttaaagccttaagaagattttgatgaccagcatttcagttttcctgtcaactgagtattagacacagwgtaaaatttgactaaaaaagtttgaggacagttttgaaagcttaggcagacctgccgggacactataggaatggcagtttactcacaatttctgccctgtggaggtgtggacagtaggggagacagattgcatgcttgcaagtggtttctgaaaagcaaacttttaggaaacctgtagagttatttatgaaaaaaacaatgaacaacaacaacaaaaaaagcatttcctctttgcagttacacttggcagggctaaa

SEQ ID NO: 115701 - DNA, 526 bp, Homo sapiens
ttgtccatgtagaagggcaagctattgtatcctattagtatctgtctcatttattttttctcccctagttttttatttatcccaagagattaacttgtctttcattaccaagatcttccaggaggccctctgaccatgtgtgttaacatatctgtatttacaatcccattgtctaattataatacccatctcaatgcctgacacattgtagtccctcagtaggtgctattttcctttttcaatccaggctgctatttgaggtaactcacaagaatactatgaataataaaaktatattatattatattatattatattatattatattacattacattacattatattattttaaaatacctaggtcttttattattcactgttaaccaaatcttattactaagactaaattggtatgtgtgtataaacttacaaatgataatttcttgcacatggtcactaagcctttgggtagaaaactctccattatttaccttctctgaggcctggttctagaattttaata

SEQ ID NO: 115702 - DNA, 572 bp, Homo sapiens
attttatattttataaataatttaataaacaataaattcttaaatacatttacttaaataaattcttaatttattttaattcacaaaacaactcttttacattccrttttgtaaaagatgaccttgaaattgaccacaattaatttcctgtggtcatacagctcagaagtgatagcagcagaattcaaacctaagcctgactctgaatcatccactctttagggcatgtactgattcctctgaagaagtctaacagatgaaggtggaaaagtaaagagaagaaaatatgttttacatttggacatttttgctgaattatagctcaaattgaacttcaccagttgtcatcaaatgattaccatgaagtatatttttatacatattatgtgttgaacatctaacatagttcttaaaaagtataaaaatatttttccccaaatacgcttttacttattactttaaatttatacttttttattgtgccaccaagcattattgattacttactactctgctagtagcattgcacttattctcatcttatacagactattatgagataagttgatttt

SEQ ID NO: 115703 - DNA, 354 bp, Homo sapiens
caatttttattacaatgaaagtaaatcaatttcctaaaattcttcccttgccccatatcgaggtgcaattattcagtaattaaaaaaatatagctccaataaatgcagctggtcataaaaattatttcagtaatatcacaatctactagaagaaccaggaacgagyagctaattttccaattccagttatctatgttacggattacgctttgttatgactgcaattccttggatttctcccctcttccgcccccgggatcttatccaattgataaggttaaaataatggctattatccttctggcttaaaaagcctagtgctcttcgttccttaaatcatttcatgtgtaaatt

SEQ ID NO: 115704 - DNA, 594 bp, Homo sapiens
gcgggggtctgaccgcagccaaatttaaacggctaaacctaacagccttggcagctggggagggaaggggtctagggaggggtgggggcggacctggacgccggtcacgtggggggtggggcttggcagacctcccttttgttttggctggcgcgtgcgcagaaggcagaacacgtggtttcctggacccgcctcttgcctcatcggctgagcctcacccattgggggtgtggtgacggctcttttgaggcggctctgaggcggagcccactggatttgatgagacccctattttatttatttcacactttctttcaggaaaacgtagatttgggctttagagttagatgggatagagcagaatctaggggatttttgagggacggtgcttccaagtttgtgtcaccggtgtgctgaggaagggaccggtcttgctggaaaaagtcagattgcgtggtgtttggtagcaagaaataccaggcggtatcctggccgtttcagaaaccacaggaaaggaargaggctggctttgcagtcgggagggcaggcactggatggacgttcttgtaatgttttcttactctgggagagtcc

SEQ ID NO: 115705 - DNA, 620 bp, Homo sapiens
tttgtttttggttatattaaatttgttataaataaaattaatctaataaaaacaaggggggattgtaaagttaaatctacaccataaattctaatttttagactacaatttaatccaaagaacaatcactgtgaattaaggcattagttgctattagttgctctgaaattattataaataaaattaagttaatctgataaaaacaataggtagactgtaaagttaaatctataccataaattctaattttgggtctacaatttaatccaaagaacgttcattgtgarttaaggaaagcatgagttactattagttgttctgaaattgtgtaacagtagtctccccttatcagctgtttcacttccatggttcgagtaacctgtggtcaactgcagtccaaaaacaggtgagtacagtaaggtaagatattttgagagcgagcaagaagagcacattcacataacttttatgtatagttataactgttctactactgttgttgctaatcttttactatgcctaattcataaattcaacttgatcatatgtatgtatggttagaaaaaaataaagtatatatagggttaagtactgtctgcgatttcaggtaccactgggga

SEQ ID NO: 115706 - DNA, 596 bp, Homo sapiens
catcactgaccaaaatgtccatatgcactgcatgactgtatataaaacctaaatgttgtgaagagcttaatggattactgtaagtgatcatctgtgcaaccacctccaggtcaagaaacctgcagaacaccatctggactcaaggagccctatcaggctttttcctgattataactcattccttcctcactaaagacagtggtatcctgacttttatgagaaccacctctttgcgtttattwaaaaaaaaatagtgtagcttcttttgtgtaattatatatatatatatatatatatataaaaatatgtaacttttgccttttcttattgagttatacacatacttggcattttcagtctctgtaacctttctgatgggcatatagtggtacattattgtggtattaatttgtgtttcctctcagcggcattgaatcttaacatgtacgacttaaagggcccttaaagactatttactttaatctctcccttcggaggagggaaaaaaccaacagcacagatggagagaggagtgacttccagtgtctcccggttagttggcatcagagctcagtggagaagcgcaggagagctgc

SEQ ID NO: 115707 - DNA, 596 bp, Homo sapiens
catcactgaccaaaatgtccatatgcactgcatgactgtatataaaacctaaatgttgtgaagagcttaatggattactgtaagtgatcatctgtgcaaccacctccaggtcaagaaacctgcagaacaccatctggactcaaggagccctatcaggctttttcctgattataactcattccttcctcactaaagacagtggtatcctgacttttatgagaaccacctctttgcgtttatttaaaaaaaaatagtgtagcttcttttgtgtaattatatatatatatatatatatatataaaaatatgtaacttttgccttttcttattgagttatacacatacttggcattttcagtctctgtaacctttctgatgggcatatagtggtacattattgtggtattaatttgtgtttcctctcagcggcattgaatcttaacatgtaygacttaaagggcccttaaagactatttactttaatctctcccttcggaggagggaaaaaaccaacagcacagatggagagaggagtgacttccagtgtctcccggttagttggcatcagagctcagtggagaagcgcaggagagctgc

SEQ ID NO: 115708 - DNA, 624 bp, Homo sapiens
ttctttttactgttcttcaagtaggcccaatagaggataatttactactgcaattttgtgtcaaggaagctgagtgcttgttacagttgcacaatacttactgcgccataagcggagggcaggaaatatcaggcccattttacagagaaacaaactgagccccaataagtgaaaggaattggtggttctcttattaagaatgcctgcagcatcatatctggtgtgtaatccatttactttcttctttttaaatagagaaattactaagcattgtggaggcttagggtcctggagatgaaggcagtaaaatgagactaatgctggtgagggtgtatgraggggccctctctagggtggaagtggaagccaagtgggtcagcacttttattggtacaacctgcaaccatcccagataaaataatcaggtggctaggagtggggaaggtcccccctacccctgggaagactcaaacacacagaacattctagctttttgcagtaataatatcatggacattaaagaagaagatcagaaaacagcttcagatgcatcaccttctgtctttctggtgctcctttctaagaggaggcctggatgagaatgcacaagaaagccaggcactc

SEQ ID NO: 115709 - DNA, 449 bp, Homo sapiens
ttatgtattgagtggttcttaagcaggagtgtatccagattttgagaaaattgttgttgytgttgttgttagagacagggtctcattatgttgaccaggctagactcgaattcctgagctcaagcaatcctcccacctcagcctccctagcagctgggactacagccatgcaccaccatgcctggcttcaaggaaacattttcaaatatacatatccaggatttattagacttactgtatcaaaatattcagaaaaagcctagacttgttgattatttaaacattttcctcaggttactgggatgcacaattctagctgaaagctagtgcaacagacaattatttcagtctcatttctcacccacatgaccaattccctttctcatttgaagatttggccaaaaagagtaaggagtaggagagagacccatttgctgaaaacaccacat

SEQ ID NO: 115710 - DNA, 449 bp, Homo sapiens
ttatgtattgagtggttcttaagcaggagtgtatccagattttgagaaaattgttgttgctgttgttgttagagacagggtctcattatgttgaccaggctagactcgaattcctgagctcaagcaatcctcccacctcagcctccctagcagctgggactacagccatgcaccaccatgcctggcttcaaggaaacattttcaaatatacatatccaggmtttattagacttactgtatcaaaatattcagaaaaagcctagacttgttgattatttaaacattttcctcaggttactgggatgcacaattctagctgaaagctagtgcaacagacaattatttcagtctcatttctcacccacatgaccaattccctttctcatttgaagatttggccaaaaagagtaaggagtaggagagagacccatttgctgaaaacaccacat

SEQ ID NO: 115711 - DNA, 591 bp, Homo sapiens
ctcagccagcagatgtttgttaggataatgctttatattgatgttcagttacagctgacatgggagaccaaaagtctacttttattttttttagtttccacggagaagtagcaagctgacattctgtgattttcgacatacatactaacaatatattttgcaccaaacacgttattcagctcaaagtcatctcatagaccatcttayatgactctttttgccgcgcaaatcacaatttcaatatttgggtggcacccattttgctttgattcacactatttccttagagctagtcagcaaatagtcaaatgaccttccagtgactgcacaaaatatggaatgcttcaaagatctgtgctgcctccttatgcagaagccacgctaactttccccgtattgttccaattttaggatatgtgccgccgaagcaagcacaaagccctacttttacacatgattagtgatgcgtcatggacaaggcttggctctgttgagtccaactaacctacttgagattctgagatttctcttcaatggcttcctgtgagctagagtttgaaaatattttaaaatcttgagctagagatggaa

SEQ ID NO: 115712 - DNA, 591 bp, Homo sapiens
ctcagccagcagatgtttgttaggataatgctttatattgatgttcagttacagctgacatgggagaccaaaagtctacttttattttttttagtttccacggagaagtagcaagctgacattctgtgattttcgacatacatactaacaatatattttgcaccaaacacgttattcagctcaaagtcatctcatagaccatcttatatgactctttttgccgcgcaaatcacaatttcaatatttgggtggcacccattttgctttgattcacactatttccttagagctagtcagcaaatagtcaaatgaccttccagtgactgcacaaaatatggaatgcttcaaagatctgtgctgcctccttatgcagaagccacgctaactttccccgtattgttccaattttaggatatgtgccgccgaagcaagcacaaagccctacttttacacatgattagtgatgcgtcatggacaaggcttggctctgttgagtccaactaacctacttgagattctgagatttctcttcartggcttcctgtgagctagagtttgaaaatattttaaaatcttgagctagagatggaa

SEQ ID NO: 115713 - DNA, 537 bp, Homo sapiens
aactcagcaaatttgctcttattttcttcattatttggtttttgaatcagtaaatgctttccacaggggtcatcttrttagtcatcttgtcattttgctgcgtcccatcttcgtccttgcaatttttcctttttcccattttggcatgtattgagaggagtgttatgctgatgaaatgccctgtcctgaattgctatctgattagaacttccctcaatttttaaaatgcttcttgacatggtttggatttgtgcaccccccacccccaatctcatgtggaattgtaattgccagttttggaggaggggctttctggaaggtgactggatcatagaggtggtttctaatggaatggtttagcctaatccccctcgtgctgtctgatgataaagttctcctgagatctgcttgtttaaaaagtgtgtagcacctcccctgactcctttcagccatgtgaatatgtgcttgcttccttttcaccttcttccatgattgtaagtttcctgaggcctccctataagcataagtctgtacagc

SEQ ID NO: 115714 - DNA, 386 bp, Homo sapiens
ttctcctgagatctgcttgtttaaaaagtgtgtagcacctcccctgactcctttcagccatgtgaatatgtgcttgcytccttttcaccttcttccatgattgtaagtttcctgaggcctccctataagcataagtctgtacagcccacggaactgtgagccaattcaatcccttttctttttcaattacccactctcatgtatatctttatagcagtgtgagaacagattaatacactcctcctcagaaagcattcaatttagctgtgtctaaagtatgccaggtgtcctagggtgttatcttagccaataattcttcctcttcagcaagatctatttgcctatgacagcttgacctacagttcctaccatacttgtcagtaaca

SEQ ID NO: 115715 - DNA, 386 bp, Homo sapiens
ttctcctgagatctgcttgtttaaaaagtgtgtagcacctcccctgactcctttcagccatgtgaatatgtgcttgcttccttttcaccttctkccatgattgtaagtttcctgaggcctccctataagcataagtctgtacagcccacggaactgtgagccaattcaatcccttttctttttcaattacccactctcatgtatatctttatagcagtgtgagaacagattaatacactcctcctcagaaagcattcaatttagctgtgtctaaagtatgccaggtgtcctagggtgttatcttagccaataattcttcctcttcagcaagatctatttgcctatgacagcttgacctacagttcctaccatacttgtcagtaaca

SEQ ID NO: 115716 - DNA, 386 bp, Homo sapiens
ttctcctgagatctgcttgtttaaaaagtgtgtagcacctcccctgactcctttcagccatgtgaatatgtgcttgcttccttttcaccttcttccatgattgtaagtttcctgaggcctccctataagcataagtctgtacagcccacrgaactgtgagccaattcaatcccttttctttttcaattacccactctcatgtatatctttatagcagtgtgagaacagattaatacactcctcctcagaaagcattcaatttagctgtgtctaaagtatgccaggtgtcctagggtgttatcttagccaataattcttcctcttcagcaagatctatttgcctatgacagcttgacctacagttcctaccatacttgtcagtaaca

SEQ ID NO: 115717 - DNA, 585 bp, Homo sapiens
tgagatcacagctctacaaaaaccaaaaaaacaaaaattagccaggtgtggtggcacgaacctgtagtctcagctactcggcaggctgaggtrgcaggatagcttgagtccaggagtttgaggctgcagtgagccataatcatgtcactacactccagcctgggcaacagactgagacctcatctccaaattttttttttaataatagcaacaataggccaggcacggtggctcacatctgtaatcccagctctttgggaggctaaggtgggaggatcatgaggtcaagagatcgagaccatcctggccaacatggtgaaaccccatctctactaaaaatacaaaaattagctgggcgtggtggcatgcacctgtagtcccagctcctcaggagtctgaggcaggagaatcgcttgaacctggaaggcggagggtacagtgagccaagatcatgccactgcactccagcctggcgacagagcgagactctgtctcaaaataataataataaataacacaaattttaaaactaatacagtacaataactatttacacagcacttacattgtattaggtattacaaa

SEQ ID NO: 115718 - DNA, 623 bp, Homo sapiens
tattaataaagatgactccaaggcatattattatgccatcttcaaaaatagaggcttgcaatagccaggaatcagtctagttttgtgtctacctaaagcaaatctttatggcaaatggaaaggctgcagctgttgacagcacaatgggatgtctttgcttccagaaaaacaattccaaagataggcttgttgccaacactacaagcctgctgacaccagaaagtcagggacaaatgagaggttggtgtagtaattatggtgaaatctctgggtctattcaaacggccaaatgttttgttgttgttgttgttttcattctctaaaccattcagtacatgtgggaacctttttctaagtcagtaatgtaggtagataacagagggcaaaatttccctggtgctgtactaattggattatgtactgtgtgcttaactgtcaaatgctgaacctcccttggagctagaaaatgttttcttcatcaacaamgtgatgaagacatgaagatagtcatgctttaggtcttgaggcacttaggtttaagaaaagatgctgaaaaagagattctaaagagaaactacttttccagagtcaaaccaggaagatgatttgttatagatgttata

SEQ ID NO: 115719 - DNA, 625 bp, Homo sapiens
ataagattttcatctgcaaattctctaatatgttctctctctatatatatatatacacagatatacacacacacagtcctcctaagcataagatatgtatttaagaagggcctttaggaaatcctatttatgttatctttttctgtgacatacattagttgaatatatataaagtaaaaacttggatttaaacaggaaggaagtggttggaatacaagcatgtaagggaggtgctttgaaactatgaaagacagtcttactctttaattttgcttttgtgatacatctatagaatattcttcttataatccatgattttagtgaagacaccagaccaaaatagcatacattaccaaatactgaggtactttcaatattttttacttaaaatttgctttctttgttcattcattctttctttctgcagggtatgaatgacattttaagataaatatccatctgttactaagtttatctstttctgttttctaaagcaatcattctgctatgaagtgctccactatctgcagggctccaaagttaataaatcaattagcaccaattaatcatttatataactcatgacactagggggcaaaaaaaaaaaaagctcaagagtgcatat

SEQ ID NO: 115720 - DNA, 433 bp, Homo sapiens
tgcctgtccttgccagggcagcttctgctggygctgacgttagccggtctacgtgagccaattcttcgtcctccaggtggcttgcttaggtgccagtggtgacagtggtgggccaggggagtgggtaggtccttgggcccctggtagcaagcatgacatgggcaatggcagtagtagtggagggacaaccctctggttcccacgtggtggtagccccaatgggctaggtgggccagtcccctcctctcagactttgaaatcaatgaggtgggttatgttttgccatggtgctcattcctcagacacctatggaccatggagggcatgagtgtccaacagagactgtgctccctacacctagtggttatattcaccaagttaaagtgagactcacatagaaacttccactcccctgaaagtggtttttattaat

SEQ ID NO: 115721 - DNA, 554 bp, Homo sapiens
attttcttttctgtgtctttctaaatatttattttacgctttttctaacttcttgaggtgcttatttatctaattagttttttacctcttattttttctaatatgtgtatttgagttcctatatttcttyatcatatccatatccacaaattttgaaagttagtgtcttaataattattccattcaaaatactttctaatttgattttttctctgacccttaaataatttagaagtaaatttctaaattttgaaacatgtagaatctagttatctttttgttatctatatctagcttaattgctagagattatgatttaagaacccacactatatgatttcaattcattgaaataagacttgctttatggccaattatgcttaacatttgtaaatgtgccatgtattcatatatctatatatatttatatattctgtgattgttttcttcttacagttttatataagaccattaaggttaagtttgttaattggattgtataaatctcttttaagcttactgtcttttttgcccattttgttctatcaaatttc

SEQ ID NO: 115722 - DNA, 554 bp, Homo sapiens
attttcttttctgtgtctttctaaatatttattttacgctttttctaacttcttgaggtgcttatttatctaattagttttttacctcttattttttctaatatgtgtatttgagttcctatatttctttatcatatccatatccacaaattttgaaagttagtgtcttaataattattccattcaaaatactttctaatttgattttttctctgacccttaaataatttagaagtaaatttctaaattttgaaacatgtagaatctagttatctttttgttatctatatctagcttaattgctagagattatgatttaagaacccacactatatgatttcaawtcattgaaataagacttgctttatggccaattatgcttaacatttgtaaatgtgccatgtattcatatatctatatatatttatatattctgtgattgttttcttcttacagttttatataagaccattaaggttaagtttgttaattggattgtataaatctcttttaagcttactgtcttttttgcccattttgttctatcaaatttc

SEQ ID NO: 115723 - DNA, 588 bp, Homo sapiens
atatactatataccagagaagattaaggcttaataaactccaaagtcgtggatttcttcacttttgacatttgacagagtttttgtgagaagaggacaaaatgaaaaaggagaataatgggcatgtttacatgatttggggagtttgaagtagaaagtttagaccaatagatattacctctgaataacctcattgtgccattcagtcaggctgcatatatatatcatagactcaagaatattaggaaacattaagctaaagaataaaaccagagacttctggcttaaggagatagattgaaaagaattttctgctgcttaatacttaacaaagataactgcattaaaaataaaaagattatctgacattcactaagtgcttactctatgccagggatggttctaaaagctttatctgcattaagtgctttgatcttaacagcaacgctttgaggaaggcacttgacagactggaaaactaacatagaagctaaatagcttcaygcccagtctcattgagcaaagagcgagacttgaagccagcaagtgtggctctagagtttatgcctttatctattctactacagct

SEQ ID NO: 115724 - DNA, 566 bp, Homo sapiens
ttaagctgttaaaaaatcttttctaatcagaaaaggaaaatggctttcctgattgtcctttttctcatttatttaaaaatagtcattaaatagcaaccatgtgccaaccaatgtgtcaaaaaatgagaaagggtgggtatggtatctaagatctggtctttcttttgaggtgttcaaagcatgataggggaaagagtcatgtaaacaaaatccctaagcactgtggcaagcgtaacaatgaagttatggaaaaagcattatgaagtcaccaagaaaattgtgattaacaggtcattgtgggaaagatgttatctaggagcaggcttcctagataaagtcacacttgaatttggttgtgttgttctgtcagtcaggttaggtgaggttatgccatggtaacaaacaccaccmatgcatccgttgctttaatacatgcgcaagttttacacatcactcatgttacacatccaattccagttagcaggaaactactgctcagtacagtcactaggagcccctggtgacagagacttcgtctcaacaggtaacttcatgatagctggagc

SEQ ID NO: 115725 - DNA, 646 bp, Homo sapiens
caggtattcacatgcttaaagagaggtttggtacgtatgctatctttttttttttttttcttgagacagggtcttactttattgcctagactggagtgtagtggcacagtcatagctcactgcagcctcagcctccctaagtgttgagattacagatgtaagccactgtgcctggcctgccgatactatcttaagggtgcttgcaggcctctggtgtggtcagatctcatgggttktaaagtcataaataagttaactgctccatgtttctagctgaatctctgtctgcccttatgtctttaggccaatagcagagagcggtagccttgggaagaggaaataatcactgggctcagagttcttcactgcctgctccacacattacaattcagtatcccaattagattgttccagggacactccctcccttctttccttccttccactgactcattcatccattcattcaacaaacattgatggagcccctcctatggccttatagcagcccccatccggtgagaggaaacacacaagtaagcccttagagtccagtgtgcaatcgagggttagagctgtgcacagcttttggaagagcagagtggagggacacctggctgttggcagtcagggacaaggagatttt

SEQ ID NO: 115726 - DNA, 637 bp, Homo sapiens
gttactttcttctccagctttaatcgcctgtagactctaataaagctaaattagattatttatactaaatattctccacacaaaacctgggtttctaactctcatgacttttctcaagtttttaccctaacctggaacatacttttctatctttagtgtttgttgaaacactgatcttccaattcacagcttaaatatttattattggggaagcctttcctaggttcaaatcctagccttctgattttctgattattggcaaaaagagtttttcacatatcagaaatttagcctgatctgtgaaattgaactatccacacttattttgcaagaattaayttaaatactttctgcaaactgccaagcatagtgcctggaagagaaacaccaaacaaatgctagttattggtattatgtggatcagtacaacttagtagacatgttagaaaccaataaaaatatatttagaattcaaaatgtgataaagtagcattcaatttagtgggggaaaggaaagcctatttgattaatggctttgagatattggactatattatttttgtaagagaataaaattagttcccaccttactcagtaaacaaacagaaattccagattaataaaatatgtacatttt

SEQ ID NO: 115727 - DNA, 624 bp, Homo sapiens
gctctttgacttgcctgaaaattgagcaggtacacaatgacaattacactttagatgaatgcacacttcaaagctcctcagtggaagtgtcctgaattggtcagcttggatatatgtttggtgaatcctattatatggtattcattatttttcatacccatgtggtataataatgagcttgcactttggtattttctggtttaaccttcagaaagttttgtcagtcactcatgggaacaaggtataatatacaaacctaatcaaaatgtataaaaaattatcaaatttgatrtacttacacacaataaagttgctacaagcattagatatgaataacgttgtccatttggaaatcactccaatattcattaaaaaaatatattttaggagtcaattaaagaatttaacattatttttgtttctaaaataagtctggtttgaaagatcatgttattctctaaagtattttcattaaattgctattttatccaaaagtttgctctctgaacaacaaagccagtgtatgcatatttacatttatctcatttgactaactgataacaacaaaacatatatctctgatgcccaataatgacaaagaggggtaacaggtgactgtggttt

SEQ ID NO: 115728 - DNA, 512 bp, Homo sapiens
actcttccattctgtatatctgccataatccagttgtcccaacaccatttactgaatacagagatttttcctcattgcttgtttttgtcagccttatcaaatataagatggttgtatatgtgcagctttatttctttatttctgttttctattttgtcccatttttcctgcatgtcttctcatgtaccagtaccaagctgtttttgttactgtgactttatggtgtagtttaaagtcgggtatcatgatgcctctggcattgctctttctgcttaggattgctttggctattcaggctgtttttggttccatacaaatttagaatatataaaatttttctaattytgtgaagaatgatggtgatagttttatgtaaattgtattgaatctgtaaattgctttgggcagtatgacaatttttacaatactgattcttccaacaatgagcatgaaatattttcccatttgtttgtgtcatttgtgatttctttctgctgtgttttgtagttctc

SEQ ID NO: 115729 - DNA, 512 bp, Homo sapiens
actcttccattctgtatatctgccataatccagttgtcccaacaccatttactgaatacagagatttttcctcattgcttgtttttgtcagccttatcaaatataagatggttgtatatgtgcagctttatttctttatttctgttttctattttgtcccatttttcctgcatgtcttctcatgtaccagtaccaagctgtttttgttactgtgactttatggtgtagtttaaagtcgggtatcatgatgcctctggcattgctctttctgcttaggattgctttggctattcaggctgtttttggttccatacaaatttagaatatataaaatttttctaattctgtgaagaatgatggtgatagttttatgtaaattgtattgaatctgtaaattgctttgggcagtatgacaatttttacaatactgattcttccaacmatgagcatgaaatattttcccatttgtttgtgtcatttgtgatttctttctgctgtgttttgtagttctc

SEQ ID NO: 115730 - DNA, 512 bp, Homo sapiens
actcttccattctgtatatctgccataatccagttgtcccaacaccatttactgaatacagagatttttcctcattgcttgtttttgtcagccttatcaaatataagatggttgtatatgtgcagctttatttctttatttctgttttctattttgtcccatttttcctgcatgtcttctcatgtaccagtaccaagctgtttttgttactgtgactttatggtgtagtttaaagtcgggtatcatgatgcctctggcattgctctttctgcttaggattgctttggctattcaggctgtttttggttccatacaaatttagaatatataaaatttttctaattctgtgaagaatgatggtgatagttttatgtaaattgtattgaatctgtaaattgctttgggcagtatgacaatttttacaatactgattcttccaacaatgagcatgaaatrttttcccatttgtttgtgtcatttgtgatttctttctgctgtgttttgtagttctc

SEQ ID NO: 115731 - DNA, 613 bp, Homo sapiens
tcctgtcattgattcagaaatgatttctttgaatttaatagaaaaaagcacaggaaaaaaactatgtgcaattatatatctgacataagttctatccaaaagtataaataactcatgcaactcaatagmaaataacaaatgatctgataaaaagggcaaaaactggataggtttttcttcagaaaacacacacatggaaaacagagcctaaaagggttctcaacattactaattatcagaggaattcaaatcaaaatcatgatgagatatcacctcccaccacttaaaatggctgttatcagcaagacatataacacatattggcaagaatgtgctgaaaagggaatccttttagggtgtggtaggattggttactcaataaattgaaaaataaagctatcatatcatctggtgatcccacttcttgttatttattcaaagaagtaaaattactatgttaaacacatgctgattgtaagattatttataatagtgtagatttgtaaaagaatttaatgaccatagattgatgaatgtataaagaaaatgtgtatacataaaactgaattttattcagctttgaaaagaaggaaattctgacatttgcaacaac

SEQ ID NO: 115732 - DNA, 613 bp, Homo sapiens
tcctgtcattgattcagaaatgatttctttgaatttaatagaaaaaagcacaggaaaaaaactatgtgcaattatatatctgacataagttctatccaaaagtataaataactcatgcaactcaatagcaaataacaaatgatctgataaaaagggcaaaaactggataggtttttcttcagaaaacacacacatggaaaacagagcctaaaagggttctcaacattactaattatcagaggaattcaaatcaaaatcatgatgagatatcacctcccaccacttaaaatggctgttatcagcaagacatataacacatattggcaagaatgtgctgaaaagggaawccttttagggtgtggtaggattggttactcaataaattgaaaaataaagctatcatatcatctggtgatcccacttcttgttatttattcaaagaagtaaaattactatgttaaacacatgctgattgtaagattatttataatagtgtagatttgtaaaagaatttaatgaccatagattgatgaatgtataaagaaaatgtgtatacataaaactgaattttattcagctttgaaaagaaggaaattctgacatttgcaacaac

SEQ ID NO: 115733 - DNA, 419 bp, Homo sapiens
tctggagatctaatgtacagcaatgttcctgtatttaatactgtgttataaaagtgatttttgctgaaagggtagatcttagatattctcmtctcacacacacacacactccatttaaaaaaaaatgtatgtgagatgatagatacacaaattaccttgatcatgatgagcattttacaatgtgtatctgatatggtttgcaacttgtcctggcctgaatctcgtgttgtattataatcctcaatcctgaagctgggacccagtgggagaggcttgggtcagggggtgggtctttcatgaatggtttagcaccgactcttggtgctgttctcataatattgtgtgagttatcataagatctgtttgtctaactgtgtagacctccctctcttcctgtggcccctgctctggccatgtga

SEQ ID NO: 115734 - DNA, 467 bp, Homo sapiens
cagaacatctaagacaagtttcctcactgtcattggagaagacccaaattctaggaactgggccttatcctccagaacttaaagaaagatatcagtgctaaatagccacattgagtctaggaacactttagtcattaacttatttttggctcccctctgtgtaacggcaacaacagtctttttaagggaaaaacatatttttgtaggtaaaatarctatgtactgaaagtattataatcataaactccacatatctgggctctgagtaagtctattagtccattttcacactgctgataaagacgtacctgagactaggcaatttacaaaaaaagaggtttaactggactcacagttccatgtggctggggaggcctcacaatcatggcagaaggcaaggaggagcaagtcacatcttacatggatggcagctcacaaagagagtttgtgctctaaaactccccctt

SEQ ID NO: 115735 - DNA, 558 bp, Homo sapiens
aggcattgaaaacacaaggtaagaggctggatcgtaatgagagcagtagaaaggtgtggtctgatttatttctgtgtggtaaygctaagggaacaagagggaaaactgcaaaccagttaggaggctactgcaattaacagacagggttaactccctaaatatggagtttcagtgcattttagtgtgatgtaatcagtaggaataaccaggtcaaagaaaattaggaaaccagaatcttgcctacaattactgcgataatcttatgtttattatcctacacttaccatcaaatttgtagactgtttgtgtttattctttcttagtaaagaccctaaatctataccttctttttatgcaagaaggtaccttggatctcccagccctgtcctctgactctgccatcaggacatgcaaacaactgacttgcttttcataatgtgttttagtaatgagaggagatccatgaagcacttcccacactcaattcacaataactcctccaacattttccagttgcttgtttaggtggagttagaaataccttcatttgaatacaat

SEQ ID NO: 115736 - DNA, 538 bp, Homo sapiens
gtttaatttactagtatttccttgagaawtttgagtgtatatttgtaaaatatattgttctgtaattttcttgtgattgttttgcctgattttgatatgagagctatactggcctcacagaataagctaggaagtgttcgctcctctcgtatgttttggaactatttgtgaagacttggtaaaaatttttctttaaatgtttgacataatttgccagtgaacccatctgggcctgagtttgtgtttgggaagtttcaaaataattgatttaaactttttagataccctttggtcaacctagttaagatttgtaaatttctaaaaaaaaaaattcttttttttttgagacggagcctcgctctgttgcccaggctggagtgcagtggtgcgatctcggctcactgcaaactccacctcccgggttcacgtcattctcctgcctcagcctcctgagtagctggggaaaaaaaaaatcttttcaaagagcaaactttggttttcttgattttcttcattacttttctaatctcttcttcat

SEQ ID NO: 115737 - DNA, 538 bp, Homo sapiens
gtttaatttactagtatttccttgagaaatttgagtgtatatttgtaaaatatattgttctgtaattttcttgtgattgttttgcctgattttgatatgagagctatactggcctcacagaataagctaggaagtgttcgctcctctcgtatgttttggaactatttgtgaagacttggtaaaaatttttctttaaatgtttgacataatttgccagtgaacccatctgggcctgagtttgtgtttgggaagtttcaaaataattgatttaaactttttagataccctttggtcaacctagttaagatttgtaaatttctaaaaaaaaaaattcttttttttttgagacggagcctcgctctgttgcccaggctggagtgcagtggtgcgatctcggctcactgcaaactccacctcccgggttcacgtcattctcctgcctcagcctccygagtagctggggaaaaaaaaaatcttttcaaagagcaaactttggttttcttgattttcttcattacttttctaatctcttcttcat

SEQ ID NO: 115738 - DNA, 564 bp, Homo sapiens
gatacagtgtagactattggtagatgttcacatctattttttcaccagtcttgtcaatgtactgaatggaaaggtctgtgtgaagttactttgattccatctacacaygactttcagagtaatcctttaaggaaaactataggatgctgaatagcaaatagagataacttcagaatgctgcattttctttctaaaacttcttttctttttctttgaaaatgagaaaataccaaccttgaacatacattttattgaatgtttatacatctatggttatgaaagcaagaactattaaaaggtacctcatactgttccttacaaagaaacttttggatatcttataagatactatttaaactcattgaaaacattcccaacgaggaagttgaggagggcctataaagaatgatggggaagtactgtcctgaaatgtaatttattatgcataatttgaagatggcaaatcaccacatgtagcacaccaggcctactggcttcacagcacttggaaggtacatggcatccttaacatttatttttggtgctgttagtataaaactgcag

SEQ ID NO: 115739 - DNA, 573 bp, Homo sapiens
actaatattttaaattactcctaagatacaaaggaatgaatataattgcaaatcaatgtcaccagggatttcagcaacctgactggcatatactttatttcctatactcaataaatacagtacaatagacttaaatatatagactaaaacacccttatatctagagaagtgagatccatctataaatttgctataccatattctgagtgctgtaaattggactaggtatgaaaaatcttccgttgaccaaatgtaacagatatggatgttatcaccaaacatgaaaaaagaactctagtcacactctctttgagaggtgggtgccctggacataattttcatttctgagattggatcaatattttagaaaattaaaatctactactaaagatttactaaacatattcaatrttcaacttatacatcacataccagtgtagatgtattttttagaatcatgagtaatttatgggctgattaatgcatcagactacatgttaaatcagtaagatatgtactgtcatgatcttttcacttgttaacgaagcttatttttaatgaacacttttggcc

SEQ ID NO: 115740 - DNA, 574 bp, Homo sapiens
acttttgacccatttgtcagatacacgtgtaagtaaaagatcttattgattatatatttcgatatactgcaatatcaaatacatatttaaacaactttaacctgctgcttgttatcttaagacactttgcttttgatcatcatttgctttggaaacaatattgtatataagattgatttgccattaatattaaaaataaacaatagcttttgtagtgaattttcataattgtatgttgtcttgacacgcattttcaatataggtttaccttttctatcccagaagcagtgattagttgctcttgacagggtttccagttcttcacctcctcccagattttcartgtggttggtacagacatttgtctcacacaaccacctcctagtgaccacctccctatgttgcagctagatacaagctacttgaatttgtcgcacttatccccacctcatacatggactgcccagatatgctacagtaaccatttctcagccacagtgtgactccacagaactcacaggagcttgttttaaactcatgaattagaactccccacaagaaactcacctaagca

SEQ ID NO: 115741 - DNA, 417 bp, Homo sapiens
aactccaaaatctacatctttagctttgacattctccagaacctcagattgctgtatccaactgcaaccctaacatctttatttaaatatctagcaggtatctcaaacacaacaccacttaacacagagctctagatagtcccctaaattttgctcttcatccagtatccaagtaaatggcctcatmatctccccagctgctcagccaagtatctaggcattagctctgattcattcttttctctcatactcaaatctaattcatcagcatgttctttggactgtacccctaaatatttcctgaacctattcaagattctcattcttcactactctcccatgagtgcaatagattgattggaataatggccccaatttttcatatctccttgtatcttttcacacctgtctgaattc

SEQ ID NO: 115742 - DNA, 662 bp, Homo sapiens
cagcctggcaacatagagagagctcatctctacaaaaaaaaattaaaaataacaaataattagttgggcatggtagcaaacgcctgtatccyagctattcgggaggctgaggtgggaggatggcctgagcccaggattttgaggctgcagtgagttgtgaacacaccaatacactccagcctgggtaacagagtgagactttgtctcaaaaaaaatagatttataaaaaatcaagcttgatgatatattaacaataattacaacatatcatggggaaaaaaacctattcacaagagtagctaaaactataaaataggaatacatttaacaagaaaagtataggacttcaaaaacaacaactgtttaactctattcagggaaataaaattaacagattaaagtagagacacaccactttgtttttcaaaggaagaacttagagaacataaaccaattgtaaacatgcttgtttattagctgttttacagtggaaatgtttgagagtatttcactgtcagagtttgcagaaattgtcagatattagaacaaatgaaatgttatgtgctctacagaggcagatccatattttgagggacctgaagcttaaacactttggaggagaaatctttgtcaattaaaaattaaaaataaaactaaaatgc

SEQ ID NO: 115743 - DNA, 662 bp, Homo sapiens
cagcctggcaacatagagagagctcatctctacaaaaaaaaattaaaaataacaaataattagttgggcatggtagcaaacgcctgtatcctagctattcgggaggctgaggtgggaggatggcctgagcccaggattttgaggctgcagtgagttgtgaacacaccaatacactccagcctgggtaacagagtgagactttgtctcaaaaaaaatagatttataaaaaatcaagcttgatgatatattaacaataattacaacatatcatggggaaaaaaacctattcacaagagtagctaaaactataaaataggaatacatttaacaagaaaagtataggacttcaaaaacaacaactgtttaactctattcagggaaataaaattaacagattaaagtagagacacaccactttgtttttcaaaggaagaacttagagaacataaaccaattgtaaacatgcttgtttattagctgttttacagtggaaatgtttgagagtatttcactgtcagagtttgcagaaattgtcagatattagaacaaatgaaatgttatgtgctctacagaggcagatccatattttgagggayctgaagcttaaacactttggaggagaaatctttgtcaattaaaaattaaaaataaaactaaaatgc

SEQ ID NO: 115744 - DNA, 651 bp, Homo sapiens
aagaaagacttcacaaagacatgtgaccaagctcagcctcagaggcagggcaggacttaactagttgaagtggaaggtgtttattcattcattcaccatttgataacttacacaacagccatttattaagtgtttgacacagaggaggcactgtaataatccaggcaggagacatgatggggaaaaagccttggagttggaacattcaagaacgagaggcaggcctggatgactggactcaaagactggggtgggaagaaatgggtaaaaagacaggataggcaggtaaggaaacaaccagaggagatcttgggtgccctccaccactactgcctaaagaataaccccaaactttggaagaattttgaattttaccatgaaaatttaggaactcaactcccagtgcraagctaatacaagatgatggggtagggttggagggcaaggtggaagatggggaaaagctacaattttaccttaaaatgatttcactagttctgaacttcagtttcactcatccacattggtccagtgcattgctgggcactcagtgagatttggaagaagagggacacagcccaacacagccaaagacaatagagtccacaaggcagtaaacagtagatatctagttgatgctagaatgtgagc

SEQ ID NO: 115745 - DNA, 651 bp, Homo sapiens
aagaaagacttcacaaagacatgtgaccaagctcagcctcagaggcagggcaggacttaactagttgaagtggaaggtgtttattcattcattcaccatttgataacttacacaacagccatttattaagtgtttgacacagaggaggcactgtaataatccaggcaggagacatgatggggaaaaagccttggagttggaacattcaagaacgagaggcaggcctggatgactggactcaaagactggggtgggaagaaatgggtaaaaagacaggataggcaggtaaggaaacaaccagaggagatcttgggtgccctccaccactactgcctaaagaataaccccaaactttggaagaattttgaattttaccatgaaaatttaggaactcaactcccagtgcgaagctaatacaagatgatggggtagggttggagggcaaggtggaagatggggaaaagctacaattttaccttaaaatgatttcactagttctgaacttcagtttcastcatccacattggtccagtgcattgctgggcactcagtgagatttggaagaagagggacacagcccaacacagccaaagacaatagagtccacaaggcagtaaacagtagatatctagttgatgctagaatgtgagc

SEQ ID NO: 115746 - DNA, 541 bp, Homo sapiens
tgcttccacatcaaagcaaaacctcttctcaatggagtctgttttcttccgtgtgcaggatttgagggtaactgattcacagtctccctatttcctcctgacttttggtcaaatggtaccatggtgatttgtttggaatcccatttatatatacatacagtagtgcttcacccaagaagttccaaagtgatgtttctcctgcacatagaggtatccctccatggtgtaggaactgatggtcttgtgctcaaggggattytccttcatctttttcatcagtgattcctggcctgtggcttccgactttttggagcacggacttgagtagacctggcttcagatggctaagagattaagttttggctgcagctataagggtctaggctgcccacataaggttggtgtgtcagggcttggcttttgctgttgcaagaagcatccaagcatcaaacttggaggtaatagagaggtcatctcccatcagcaacctttacaaagatgctgatctggtagatgaaactctttcttagtgcagattata

SEQ ID NO: 115747 - DNA, 502 bp, Homo sapiens
gttcttatatattgcaaggtcatttacagggctttttactgactttgtcccttggttcaatgtgttagtcatttttgcaagtaagtcccattctcttttaagttactgaagtttaattattttaatgtttagtaaggcacatccctccttttactcctcttttgaaatatgtacttggatgtaccccagacaaactttggaatcactttgctaaattaaaaaaaacaaacaaaataacctgtctgagaacgttgttgaaattgcaacactccttaaaaatatatatatatattgaggggtcaggcatggtggctaatgcctgtaatccaacactttgaaaggcagaggtggaaggagtacttgagcccaggagtctgagaccagcctggamaacatattgaaaccttgaccttacgaaaaaataaatacaattaaaaaaaataaaattaggcatggtggtgtgtgttcgtgatcctagctactagggaggctgaagtgggag

SEQ ID NO: 115748 - DNA, 599 bp, Homo sapiens
taaattgacttattagcttcaaatattggaatagcatttgtagacacaaaccaagatttcagacggctccactacttgtactggattcctccacttcagtccagatccctctcccaagtcctgtaaaattagaataacataatatgtgtataattatattacagtgttgatgcgatgatttaaagagttaacatatatagggtgcgtaggataatacctgccctaytgtaaccatcatataggtggatatgatgataatggtggtggtagtaaaggtggtggttaaggcagaggggaggtggtgatggtggtaatgaaggtggtgaaggcgatggttgtaattgtattggcagtggtagtggtgataaaatccaagcaccataaaacaatttcaaaaagtctaacatacatgcaattggagtcccaggaagaataaaaaacgaagaataggttgaagctcagtaattccagggggagaaaaaagaaataggacaggagaaatatctgagacatagtactcaagaattttctaacattagacaaaaacaacaaaaccataggtcctagttcagaaaaccctaagtaggatcaacacaaag

SEQ ID NO: 115749 - DNA, 500 bp, Homo sapiens
ttatttatttatttttataatttcaaattttattttagatttagattcagaagggacatatgcaggtttgctacatgggtatattgggcgatgctggggttcaggatatgaatgatcttgtcacccagatagtgagcatagtacccaacacttagtttttcaacccttgcccccctctcttcctctcccttctagtagtctccagtgtctattgttgccatctttatgcccatgagtatccaatgtttagcttgcacttataattgagaacatgtgatatatggtttcctgcttttgcattamttcacttatggtaatggcctccagctgtatccatgttgctgtgaaggacatgatttcatctttttcatggctgcatagtattccatggtgtatatggaccacattttctttatccaatcagccactgatgacctaggttgattccatgtctttgctatcatgaatagcactgtgataaacaacaagtgtttgtgtct

SEQ ID NO: 115750 - DNA, 525 bp, Homo sapiens
tcccctgcacatgctctcttggcctgcctttgtgtgagacatgactttgcgcctctytcaccttcagccaggattgtgaggcctccccagccatgtggagctgtgagttcattaaacccctttcctttataaatcaccccctttataaattataaaggaatttagaaattcctttataaattacccctagtcttgggtatgtttttattagcagcatgagaacaaaaccaatacagtttgattctgtgttcccacccaattctcatgttgaattatgatcctcaatgttggggtagggtacttggtgggaggtgattggatcatgggggcagctaccccttgctgttctcatgatagtgagtgagttctcatgagacctggttgtttgcaagtgtgtagcacttccctcttttctccctcactctcctgctcccccacggtaagacatgcttgcttcccctttgctttacaccatgattgtaagttttttgacctccctgccatgtttcttgtacagcatgcaga

SEQ ID NO: 115751 - DNA, 525 bp, Homo sapiens
tcccctgcacatgctctcttggcctgcctttgtgtgagacatgactttgcgcctctttcaccttcagccaggattgtgaggcctccccagccatgtggagctgtgagttcattaaacccctttcctttataaatcaccccctttataaattataaaggaatttagaaattcctttataaattacccctagtcttgggtatgtttttattagcagcatgagaacaaaaccaatacagtttgattctgtgttcccacccaattctcatgttgaattatratcctcaatgttggggtagggtacttggtgggaggtgattggatcatgggggcagctaccccttgctgttctcatgatagtgagtgagttctcatgagacctggttgtttgcaagtgtgtagcacttccctcttttctccctcactctcctgctcccccacggtaagacatgcttgcttcccctttgctttacaccatgattgtaagttttttgacctccctgccatgtttcttgtacagcatgcaga

SEQ ID NO: 115752 - DNA, 525 bp, Homo sapiens
tcccctgcacatgctctcttggcctgcctttgtgtgagacatgactttgcgcctctttcaccttcagccaggattgtgaggcctccccagccatgtggagctgtgagttcattaaacccctttcctttataaatcaccccctttataaattataaaggaatttagaaattcctttataaattacccctagtcttgggtatgtttttattagcagcatgagaacaaaaccaatacagtttgattctgtgttcccacccaattctcatgttgaattatgatcctcaatgttggggtagggtacttggtgggaggtgattggatcatgggggcagctaccccttgctgttctcatgatagtgagtgagttctcatgagacctggttgtttgcaagtgtgtagcacttccctctttkctccctcactctcctgctcccccacggtaagacatgcttgcttcccctttgctttacaccatgattgtaagttttttgacctccctgccatgtttcttgtacagcatgcaga

SEQ ID NO: 115753 - DNA, 604 bp, Homo sapiens
ctatatccacatctgaggagactttgaaacacaactaatattcagtaggcttaccgcattagagtttggattgaccattctgattacatacgagcgtaaacaccatcttgaacaatggaggaaatatcatacaggcaataatgttatttcttctacggtacactactagaattgggcactggtctgacatatagaacaggaaaagttactaagatataaattgagatacatatctgcaattctctttcatagctatcttttaaaactgaatctgtagaacaaccaaagtggtgtgaaacattctctatacatcaccccttttatctaactggctgacagaaactgtttaaaaaatgctacttctccacatcgtctccagcacctgttgtttcctgactttttaatgatcgccattctaactggcgtgagatggtatctcattgtggttttgatttgcatttctctgatggccagtgatgatgagcattttttcatgtgtcttttggctgcataaatgtcttcytttgagaagtgtctgttcatgtccaatgcccactttttgatggggttttttgtttttttcttgtaaatttgtttgaattca

SEQ ID NO: 115754 - DNA, 604 bp, Homo sapiens
ctatatccacatctgaggagactttgaaacacaactaatattcagtaggcttaccgcattagagtttggattgaccattctgattacatacgagcgtaaacaccatcttgaacaatggaggaaatatcatacaggcaataatgttatttcttctacggtacactactagaattgggcactggtctgacatatagaacaggaaaagttactaagatataaattgagatacatatctgcaattctctttcatagctatcttttaaaactgaatctgtagaacaaccaaagtggtgtgaaacattctctatacatcaccccttttatctaactggctgacagaaactgtttaaaaaatgctacttctccacatcgtctccagcacctgttgtttcctgactttttaatgatcgccattctaactggcgtgagatggtatctcattgtggttttgatttgcatttctctgatggccagtgatgatgagcattttttcatgtgtcttttggctgcataaatgtcttcttttgagaagtgtctgttcatrtccaatgcccactttttgatggggttttttgtttttttcttgtaaatttgtttgaattca

SEQ ID NO: 115755 - DNA, 591 bp, Homo sapiens
ttaattgggacaattctgcttctccctactaagaattatctttagtgcatgcacatacctaaaatggaaaaaaattgcttttgtgtatgcctgtgacagatacacaaccattctgtattacaaacttctcagtcgagtctggtaataacatataattaaaataaatgagttcatcttaagttattagatcacaccatgattttcctaacctataaattataaagattagagaaaacaaatttgcaagggcaaagttgaagctaaatcctatcatcatttctatccctgcctcaattttgttaggatttgatggcagaatctgtgaatcagatgcatgttttccctcccccactccccaatagtgaaaaaagaaaatagcttctaatttttgttttccaatctaccagcttgtgccattgctgctaaatctctggctttctaggtgctctcctggtaacctctccatgcyttaattttgaaggcattgacctctatgacatttgaatgttcttccttgcctttcccaattactccatttttcagtgtgtacagcaagctgtcagatttcctcctccacgtgaaaatcttttt

SEQ ID NO: 115756 - DNA, 591 bp, Homo sapiens
ttaattgggacaattctgcttctccctactaagaattatctttagtgcatgcacatacctaaaatggaaaaaaattgcttttgtgtatgcctgtgacagatacacaaccattctgtattacaaacttctcagtcgagtctggtaataacatataattaaaataaatgagttcatcttaagttattagatcacaccatgattttcctaacctataaattataaagattagagaaaacaaatttgcaagggcaaagttgaagctaaatcctatcatcatttctatccctgcctcaattttgttaggatttgatggcagaatctgtgaatcagatgcatgttttccctcccccactccccaatagtgaaaaaagaaaatagcttctaatttttgttttccaatctaccagcttgtgccattgctgctaaatctctggctttctaggtgctctcctggtaacctctccatgccttaattttgaaggcattgacctctatgasatttgaatgttcttccttgcctttcccaattactccatttttcagtgtgtacagcaagctgtcagatttcctcctccacgtgaaaatcttttt

SEQ ID NO: 115757 - DNA, 604 bp, Homo sapiens
atttgttcctttggattggtatcacaaagtcttaagtctaaacattttcaagttagttcaaaataattgttgtttggaattgtcaactgcatgtcaattaaacgacaggaaatgtttccccaaataatacatttttagaatcttgatttggacattttcttgcaaaggttagaaagcagggtcatttattaataagactgttacagatcatgattgcaaatccatatattcttcataaataagaatatgtatctcatttttcttagaagcaaggcaggcatccagtttattaaaaaatagcatcatcattaagaaacaagttcaaaagaagttggttaccagaacctgtcctttttctctcccggaaattattaatggatcctttaaaggacgactccagatgacctcggcttcagagtagtagtacagtacaaggtgtgtatgagcatagataacttagggtttataatgagattgtacattttggcctacacttgactcctgtccacaagctyaaaaatgaaggaagtaatgattaaaggaagaaaccatataatgtattttctgccagagttccatgcaacgaggtaaaaagttgacagta

SEQ ID NO: 115758 - DNA, 580 bp, Homo sapiens
cattagctatcaataaagattgaatagtcagtgccatgttgccacataaatgttgcctacactttgtgtcttctcaagttatatcacactcttttttttcttttcaatatacattgaattgacagaggaaatcattctccctgaatgactcttctaagactgataccttgaaaaatatttttcctgaggaaaaaaaattatgaggcatattgtgacttttgagtatataataagcctcttgcatggtgcttagacagctctcaagaaaaaaatgtctgagaagggtgtcaaattctttgtgcaaaaggaacttccagtttagggactacatgtcmaaaggttttcaataaaaatgaaattcccagaattgtgtggctacatcctaaaatagtaatcagattaaccattagaaaataattccttacattctatgggtatatacccagtaatgggtcaaatagtatttctgcctctaggtcttcactttgaggaactgccacactgttttccccaatttttgaactaatttacactcccaccaacagtgtcaaagcattcctttttctccacaacctcacca

SEQ ID NO: 115759 - DNA, 610 bp, Homo sapiens
ccacaagcccagaaatgtccaaggttaccagaagctgggagagagaaagaatgattctcccccagaggtttctgagggagcctggccctccattgattgattgtagacttccattatctagaactgtgagagagtaaatttctactgttttaagctactcagtttgtgataatttttatagtaggaaaaaaagaacctttaataatttttaaaaatctgttaacagtaactatatctgggttcctttggtatggtagttctcagcctatgcctataaaaaaaatctcagtcagaatctttttttataacaaatattttataactccctttttactaccctaaaatgaaaatcatacataatgtaacttacgtacgtaatttccaaaatacygatattataccatgattgtaagctaatcaatatacaatattaatttttaataaaacaatatatatttcaatctaaatgttttgacaagacttcattagaagacatagtgaaagagtccattgtttgcacctacatatagaatcaccttgagtgaagcacataggttcacacaggttttgttttgattgttttgtactaacaaatctaataccccaagca

SEQ ID NO: 115760 - DNA, 600 bp, Homo sapiens
ctcccacttataagtcaggacatgcagtatttggtttttctctccttgtgttagtttgcttaaggtaatggcctccagttccatgcatrttgctgcaaaggatatgaccttgttcttttttgtggttgcatgccattctattacttatgtttaccacgttttttaaatccagtttaccgttggtagacatttaggttgattccatgtctttgctactgcgaatagtgcttgtgatgaacctatgcatgcatgtgtccttaggggagagcgatttatattcctttgggtatatacccaataatgggattgctgggtcaaatggtaattctaagttctttgagaaatcaccaaactgctttccacagtggctgaattaatttacatgcccgccagcagcatataagcgttcccttttctccacaacctcaccagcatgttaattttttgactttttaataatagccatactgacattttagccatactgactggtatgagatggtaccacactgtggttttgacttgcattcctctaatgatcagtgatgttgagcattttttcatatgcttgttggccacatgtatgtcttcttttggaaa

SEQ ID NO: 115761 - DNA, 600 bp, Homo sapiens
ctcccacttataagtcaggacatgcagtatttggtttttctctccttgtgttagtttgcttaaggtaatggcctccagttccatgcatgttgctgcaaaggatatgaccttgttcttttttgtggttgcatrccattctattacttatgtttaccacgttttttaaatccagtttaccgttggtagacatttaggttgattccatgtctttgctactgcgaatagtgcttgtgatgaacctatgcatgcatgtgtccttaggggagagcgatttatattcctttgggtatatacccaataatgggattgctgggtcaaatggtaattctaagttctttgagaaatcaccaaactgctttccacagtggctgaattaatttacatgcccgccagcagcatataagcgttcccttttctccacaacctcaccagcatgttaattttttgactttttaataatagccatactgacattttagccatactgactggtatgagatggtaccacactgtggttttgacttgcattcctctaatgatcagtgatgttgagcattttttcatatgcttgttggccacatgtatgtcttcttttggaaa

SEQ ID NO: 115762 - DNA, 600 bp, Homo sapiens
ctcccacttataagtcaggacatgcagtatttggtttttctctccttgtgttagtttgcttaaggtaatggcctccagttccatgcatgttgctgcaaaggatatgaccttgttcttttttgtggttgcatgccattctattacttatgtttaccacgttttttaaatccagtttaccrttggtagacatttaggttgattccatgtctttgctactgcgaatagtgcttgtgatgaacctatgcatgcatgtgtccttaggggagagcgatttatattcctttgggtatatacccaataatgggattgctgggtcaaatggtaattctaagttctttgagaaatcaccaaactgctttccacagtggctgaattaatttacatgcccgccagcagcatataagcgttcccttttctccacaacctcaccagcatgttaattttttgactttttaataatagccatactgacattttagccatactgactggtatgagatggtaccacactgtggttttgacttgcattcctctaatgatcagtgatgttgagcattttttcatatgcttgttggccacatgtatgtcttcttttggaaa

SEQ ID NO: 115763 - DNA, 600 bp, Homo sapiens
ctcccacttataagtcaggacatgcagtatttggtttttctctccttgtgttagtttgcttaaggtaatggcctccagttccatgcatgttgctgcaaaggatatgaccttgttcttttttgtggttgcatgccattctattacttatgtttaccacgttttttaaatccagtttaccgttggtagacatttaggttgattccatgtctttgctactgcgaatagtgcttgtgatgaacctatgcatgcatgtgtccttaggggagagcgatttatattcctttgggtatatacccaataatgggattgctgggtcaaatggtaattctaagttctttgagaaatcaccaaactgctttccacagtggctgaattaatttacatgccygccagcagcatataagcgttcccttttctccacaacctcaccagcatgttaattttttgactttttaataatagccatactgacattttagccatactgactggtatgagatggtaccacactgtggttttgacttgcattcctctaatgatcagtgatgttgagcattttttcatatgcttgttggccacatgtatgtcttcttttggaaa

SEQ ID NO: 115764 - DNA, 633 bp, Homo sapiens
gatgatcatcaatgctggttcttataaagcgtaacacattcgaggtgccagggaactgcagwaacgtgatctcctctagggaaagtcataaaatactttttctattgttaattcgtaagtagtgttatcttgaagtttagctatagtatatattacactgtctttctcccatcaactagtgctaatggtgcttaaaaatagcctaaactaaatattcataatagaaaaagtaaccaagtattttttaaagtaaccacttgtataattttaagtccaataagaaaatgtctatgtaaatattgccagtgttagcttttcttgtgaaggatataaagtattcataatcttgtcttgatgtgttctaaactgccttcactgctcctcttctcctctatactcgcagtaacatttgttttaagtgagtcagctgagatgaaaatattagcttatttcaccagtgacctaattttgaacaatactggaaaacaagacatgctgggtaatgaaaaagactgcttccaattgttctctctctgaaccattctggatggcattctcttagcagaattgttggaaaattataggaaagtttaaaagataaccacaaaagaaaacctggcagaggaatagcat

SEQ ID NO: 115765 - DNA, 633 bp, Homo sapiens
gatgatcatcaatgctggttcttataaagcgtaacacattcgaggtgccagggaactgcagtaacgtgatctcctcyagggaaagtcataaaatactttttctattgttaattcgtaagtagtgttatcttgaagtttagctatagtatatattacactgtctttctcccatcaactagtgctaatggtgcttaaaaatagcctaaactaaatattcataatagaaaaagtaaccaagtattttttaaagtaaccacttgtataattttaagtccaataagaaaatgtctatgtaaatattgccagtgttagcttttcttgtgaaggatataaagtattcataatcttgtcttgatgtgttctaaactgccttcactgctcctcttctcctctatactcgcagtaacatttgttttaagtgagtcagctgagatgaaaatattagcttatttcaccagtgacctaattttgaacaatactggaaaacaagacatgctgggtaatgaaaaagactgcttccaattgttctctctctgaaccattctggatggcattctcttagcagaattgttggaaaattataggaaagtttaaaagataaccacaaaagaaaacctggcagaggaatagcat

SEQ ID NO: 115766 - DNA, 633 bp, Homo sapiens
gatgatcatcaatgctggttcttataaagcgtaacacattcgaggtgccagggaactgcagtaacgtgatctcctctagggaaagtcataaaatactttttctattgttaattcgtaagtastgttatcttgaagtttagctatagtatatattacactgtctttctcccatcaactagtgctaatggtgcttaaaaatagcctaaactaaatattcataatagaaaaagtaaccaagtattttttaaagtaaccacttgtataattttaagtccaataagaaaatgtctatgtaaatattgccagtgttagcttttcttgtgaaggatataaagtattcataatcttgtcttgatgtgttctaaactgccttcactgctcctcttctcctctatactcgcagtaacatttgttttaagtgagtcagctgagatgaaaatattagcttatttcaccagtgacctaattttgaacaatactggaaaacaagacatgctgggtaatgaaaaagactgcttccaattgttctctctctgaaccattctggatggcattctcttagcagaattgttggaaaattataggaaagtttaaaagataaccacaaaagaaaacctggcagaggaatagcat

SEQ ID NO: 115767 - DNA, 600 bp, Homo sapiens
atgaccattttctcattaatggtgtttgaaaaaatattaattaatttgaggaacataatgtcctgtttagagctattatatctgttagtcattgcagaattcaaatactgtgcttttacaaattatttttcaagaagacttactagtgttttaaaaagtactctaaaatatcccattttgttgtagatgccactgttcccatagtatgctgaagctgtgttgagcagcacgtgaaggttcaccttgctgctatattatcttagtggtttttaacatttaacatgctttgtcttgaactacatctctgtattatttctatagctctttactttatgttgtaattttaatttccttcctcaacactttgtttttaactgcrttgtcatttgtatctgggtgtacctcttggcctgctgaatttaatcctgtgtttatgtacgtctgtgtgtgtatctgcacctagaatcagtcactatcttctttctgaacaatgcaaatattttacagactttgggagtggctatctagaaaataaatgcctctctaactcctagaatcgtgcctgtgatccatgttcagctctctggagcttttagcatt

SEQ ID NO: 115768 - DNA, 538 bp, Homo sapiens
ggctgacataattagaataatattctgcacacagctaataacaagccgaagaaataaataaccaagagataacctaattgctgcatgcttaaacgttcttttgaatatgctaaggttagcattttctatttacttawaaagcacacgggtggacttaaaagaaaaatgtagagagtattgcagaaggaatggccaccaaaatgcactgctctctggagggcttagccccttgaatcactcccagtatctgtttcaacagttagcaataaaccttattgagggtctactctgtgtcaggcacaaggctgggtttctggaaggagaaacatgatatcatgggtaaccacccactaatcttgccttccaggggcttatagcctcctgagagtgatgagatatgtataaaaacagcacaaaatgggaaaaggtaagtgtgagaagacagatccaaagagtgttaagaaactccactgagacagacttcattcccaacagattgcaaattcaaatttgttctcaaggaagtacaaataattga

SEQ ID NO: 115769 - DNA, 538 bp, Homo sapiens
ggctgacataattagaataatattctgcacacagctaataacaagccgaagaaataaataaccaagagataacctaattgctgcatgcttaaacgttcttttgaatatgctaaggttagcattttctatttacttataaagcacacgggtggacttaaaagaaaaatgtagagagtattgcagaaggaatggccaccaaaatgcactgctctctggagggcttagccccttgaatcactcccagtatctgtttcaacagttagcaataaaccttattgagggtctactctgtgtcaggcacaaggctgggtttctggaaggagaaacatgatatcatgggtaaccacccactaatcttgccttccaggggcttwtagcctcctgagagtgatgagatatgtataaaaacagcacaaaatgggaaaaggtaagtgtgagaagacagatccaaagagtgttaagaaactccactgagacagacttcattcccaacagattgcaaattcaaatttgttctcaaggaagtacaaataattga

SEQ ID NO: 115770 - DNA, 515 bp, Homo sapiens
ttcctaactagtctttctttgtgtgtaatgggatgactacagggctgctgaggggtacttctggaaaggaaattcatgtatgacagacagtcttttggcttcatgtcctttaaaagctcgcctttactctcagggcacaatctaactctttagaataatcaaggcccctcatggactggcttcaggatcccttcactgttatctctcagtcctttccctctgcatcctctgctctaactttatagagctccctgaaatcttctgagtaaagccttctctacacaccctcacccatctccccactgggtctgtgtctgcacagacaygttaggaaactttttctttgctccctggcttattccttctggttcttcaaaacttaataatcactttctccaggaagtggagaccagatctggcccagatctcagaaacttcttctgaggtccctctctaaaggaacctggaattatgattacttgttaaaggcgtgcctctcctatagagaggatgta

SEQ ID NO: 115771 - DNA, 339 bp, Homo sapiens
caggcccacttgtttgttctgcctgctgctgtgaggatgctctcagctcctacaagtgttgcccaggtctgggctgtgaggctccctaggtctgcacagccagtgctggggaatctcccaygggggaatgtaatctcagggaggttcagtcctcccttataaagagctcagatgattgaattagacccagcccttagcagctattggttcaggatatccctaatctaatcagggatttgggcgggctcatcaattcgtggttctgcccacacccaagggaggggcagacacagggtgagtctctgaggggtgggaaatgcagggggcatttcagaattc

SEQ ID NO: 115772 - DNA, 390 bp, Homo sapiens
tactcaatggtttagtcaactccaagtgggctttttagactcaaattgctgtgggaattgggagcaccctcctcwtctccgtgaggcaactcctcctacttcaaggcccagctcagatgtcacctctgccgaaaggcttgctctaccacccccagactgagttagtcagtcccgctgtgctgctgccacactcagttaaacctcaattagtgccctcattattatttatgagtctcttttccctcttagaccatgagttcctggagagcagaaatgtgtcttcttatattcttagcacttagcccagaacattaagtgccctcggtaaatgttgaattaatgaaggcatgaagaaatgaatgaatgaataaagaatggaggaagagatgg

SEQ ID NO: 115773 - DNA, 577 bp, Homo sapiens
tggttcactattattttgttgaggatttttgcatcatgttcatgaaagatactggcttgaagttttctttttttcaytgtgtctcttccacgttttggtgtcagaataatgctggccttatagaatgagttagggaggcatccctcttcctcaagtttttggcttagtttctgtaggactggtaatttctttatatgtttggtagaattgagctgtgaatctgtctcatccagagatttttctgattggtaggtttttcaatactgattcaatttcagaactcactatttgttcaattttgatttcttcctggttcaatcttgggaggttgtttgtttctaggaatttatccatttcttctatgttttctactttgtgtgtagagaggtgtttgtaatagcctctgagggttttttttgttatatttctgtggggttggtagtaatgtccctttcatcatttctgatagtgtttatttgaatcttctctctctctttttatattagtctagctagcagtctatcaatcttattctttcaaaaaaaccaacttttggttttgttaatctttgtatggt

SEQ ID NO: 115774 - DNA, 574 bp, Homo sapiens
aatgagttagggaggcatccctcttcctcaagtttttggcttagtttctgtaggactggtaatttctttatatgtttggtagaattgagctgtgaatctgtctcatccagagatttttctgattggtaggtttttcaatactgattcaatttcagaactcactatttgttcarttttgatttcttcctggttcaatcttgggaggttgtttgtttctaggaatttatccatttcttctatgttttctactttgtgtgtagagaggtgtttgtaatagcctctgagggttttttttgttatatttctgtggggttggtagtaatgtccctttcatcatttctgatagtgtttatttgaatcttctctctctctttttatattagtctagctagcagtctatcaatcttattctttcaaaaaaaccaacttttggttttgttaatctttgtatggtgtttcaagtctcagttttgttcagtatagctctgattttaattatttcatttcttcagctagctttggtattggtttgcgcttatttttctggttcctttagatgcgatgttgttaattt

SEQ ID NO: 115775 - DNA, 639 bp, Homo sapiens
caccaggaatccaaagtatgctgttttcctgtcagcaccctgtatcaggagaggcagatatccctcagtcctctagaacgtgcgatgcacagttcacttctttttccctcttgagaaagaaaccacaagttgtgcagctcctgattatgttgagtcatgccagctgcagcaagctgacccatgactgtcctttgttctcagagacccccccaggtatacaaactatgctggttaagtcagtagtccgagaggcagaaaccattcccttggggcagccctccaaacaatcagaatattggatgcatgcttcgctattttccctccctcccaaaagagaagcctcaacttgcataccttctctcaatcacactaagtctttctggctgcagcaagcctccctccacctgtttttgttctcagtgatcctactgtcccaccccaagcatccaaatgatacatggggtaagacagaaatcagtcaccaggttagtcttccaaaaaccctgaatgctgaactcatgcatgcaccactcttttttccaccttagaggaagtcacaagctgggctgttctctcccrgtgctaagctacgctgacgtgggtaaaatgaaattgcttttcttacctattcagtgtgga

SEQ ID NO: 115776 - DNA, 570 bp, Homo sapiens
agcattgctatcacgatgcttggagaactgtgatcaagtcttctctggctcagagaaactgttatttttcccttgcttagtaacrcagctaaaagcataggcacagtagagtaagacatttaactaaaccaaatgagctttattctttcaagctgaacaccccaggcaaaggcaaattagctttgctgtgcactacttttacttcttactgtaagtgctgatatcgctgattgaaaactttcacaagaaaggcagagcatgcacatgcttaccagcagcacttcagcaatctgagaggcacaaggtagtgccaacttacacaagtgacagaaggaggaagctgatcctggaaactgagcagtgggctgctttttaaatcctactgccagtggcctttaaaaggtcagtttccaataatattagctcttttggtgctaaacaggagataataggagactgctacctgcaggaaccagtacacactcagtggggatttggtttgaagttccaataaaaatagcatgtttttgtgaccaagagagctgtgaaataggcacatttaaaatactt

SEQ ID NO: 115777 - DNA, 562 bp, Homo sapiens
tggctttggtgcttacataacttaactaggagagttcaggcagcaatgggaataggagggcaaaatgaaaggttaacaatttaaatggatcacctgcagatgcgtgatatggatggagatgaagcctattaaggacctaattttagaagaagctcttgacatcaatcatttgtgaaaagggtttttttttttttcttacctacacacaaggttttgtacacttgtctacaaaccttaagcattgatgcatctgatcatcagcttgtgggattactaacaccaagccactttgaaagagyagtcaaggttattaactttggcaggaaatgaaaatttggccttaatatacatgtgaaattgaattgtctgtagcacaaagctttggagattacccatgcaaaatgagaaaactatctaaatttaaaattgtcctcagtacagggaaagtaattttgcagacagcatttttactgcattgaaatccgtgaagattggctctattaatttaaatttaaacagaggttctgtgtcttctaaaaatcgcaaatgagatggaaaatgt

SEQ ID NO: 115778 - DNA, 539 bp, Homo sapiens
agtagatgccattggaatggcatcctagttcacaaggttcaccactgagatccccagacttggcactgtttctgcttttcctaaggcactattgtttggttaatccagcccttctttgagctaccttggtgtatttccaataaattaccttttctttgacttattgatttccattacttttaaccagaagaaccttaaccaatacaaaaagaaataagattgagcattacatgaattaaatcaatacataatgagaggagatagtctctcaaatgtayaatattttacttaaaatattaccagaaagcttaattgtgctgttgacacaaagaaataatgtataagtgtaaaaacaatttttatagggatctaaagtagttctgggtacatcagagagactgcaattggatcactaaaaaagtttctgttttctgcggtggggtaaatatgttttatctgatcacaaggcaacctagataaaatgtgcctcaagatcatcaccttccatttgttctaattatatgcccactaaacaagca

SEQ ID NO: 115779 - DNA, 580 bp, Homo sapiens
ttctgtttttttaagccacccagtttgtggtacgttgttaaggcagtcctaggaaaccaatacacctaactagaccataagttccttagaaacaaagaccttgtttgatttatttatgtggtcttggcagttgttgcagtgtctgaaccagtaagagggatcggcaaacctggctgaatggataaatgaatgaacacggaacctgttcttttgccttaacctggtcttaaattggaactgccaaaaaattactttaaatcttttttctttccttttttttgagatggagtcttgctctgtcgcctaggctgcagtgcagtggctcattgcaacctctgcctcccagattcaagtgattctcctgccttagcctcccragtagctgggattacaggcacctgctatcatacccagctaatttttgtatttttagtagagacggggtttcactgtgttggccaggttgatctcgaactcctgacctcaggtgatctgcctgcttcagcctccaaaatgctgggattacaggtgtggccgctcctggccaaattactttaaatctattcagtgctactgcata

SEQ ID NO: 115780 - DNA, 446 bp, Homo sapiens
gaattcttggaactgggattaatcagaatatggcagattagcctccaagatggaattgctttaytctcattcaaggtttccctcattcttcactctccccatgctggtcaccttgctgtttgttcctcaaacacatatgaaatgcgtttctgtcttggcagtcatcctgctacctgtaatgtcagcactgctttctgttgtcccttcagtcaggtcattgttcaaatagctctctagacaggctcttccttatcattctacttaaaatagcccccaatcactctgtgtccctttagcctgcttcctcttcctgctatttcatactacctgaaaaaatacttgaacttcctagaacataagctcctaaaagcaagaactgggctccacctctcctctcctctaccccagcactcagaagagcaacagagtcagcatccagtgagtgt

SEQ ID NO: 115781 - DNA, 209 bp, Homo sapiens
  misc_feature (1)...(209): n = A,T,C or G
nnnnnnnnnnnnnnnnnnnnnnnnnnnnnnnnnnnnaacaagggtcccatcttcacacaagttacttaactgctgggaggctctatttcatcttatgtaaactayagataatacctactcacctcaagggtgtatcaagggtttatgtaagctaaatttgtagaaagcagttagcacagtgccaggaagggtccaagaagaaatggtac

SEQ ID NO: 115782 - DNA, 579 bp, Homo sapiens
gtttcaaatcaccagtcatttgaatctaaagttattcctacaagagctgctatggtctgaatgtttgtgttgctccctgctctcccagtttccgtgttgaaattgaatcaccaatatgatgctattaggaagtagagcatttgggaggtgagtagatcatgagagtagaaccctcatgaataggattagatcttttatttttatttttattttcagacagggtctcacactgccacccagcaggctggagcacactggcgtgatctcagctcactgcaacttycgcctcctgggctcaagcaatcctcctgcttcagcctcttgagtagctgggtctacaggtacacacaccacacccagctaatttttgtattttttgtcgagacagggttttgccatgttgcccaggctggtctcaagctcctgagctcaagcaaatctgcctgcctcagtctcccaaagtgctgagattacaggcgtgagccaccgcgcctagcctggatctcttataaaagagatctcagagagttagcacatctgttccaccatgtgaggacacagctataaggtgccatctat

SEQ ID NO: 115783 - DNA, 595 bp, Homo sapiens
actattattgagcagaaattgaagaatgtatcttttaaggaaattatacataatatggggatatttttgccaagtttctctattactgttggaaatagttggagaccttagacgttttttgtcctccaaaagaaattatcttaaaaccagtttatacaaatacaaatgtatacaaattttcaatccctggatattgattcttttgtttctggggttttttttgtttgtttttttttatgcaccctctcttgtctgtcacccaggctggagtgcagtggtacaatctcagctcactgcaacctccgcctctcgggttcatgcaatcctcgtgcctcaggctcctgagtagctgagattacaggaatgcaccaccacccccagctaatttttgtatttttagtagagatggggtttcaccatgtgggccaagctgatcttaaactcctggcctcaagtgatccgcctacctcagccccccaaagtgctgggattaagacatgagccactgtggcagygggccaatattgattctttatagcagtcccaagtgagtttatcaagtcaaagccagaatcaaaatgaatcaggcattata

SEQ ID NO: 115784 - DNA, 559 bp, Homo sapiens
ttatctaggacaccctttccatcctgtcaaatttattgacgtaaggagtgaagataatattgtatagctattaaagattgactaaagggcccagcacaggacaaggcccacaatctaygttttaaaatatttaaagagaaaggaagcattcttccaatagactaacaggaacaagatttacctttccatctgaaataactaaaaacaaacaaaatatatgaagcaatagttttcaaggcactgggcatcagtcagtaaaggacaataatcctgaaagacaggaagcaagtgattgcctgagctttattattgctttaagagaatttttagactatggctcaggaagaggaaaccaaggcggactccctgatttgagaatactaagctgagagtcctgggagaccaaggtggctacagtctgcagaacatactactctggagagttgcatagagagaaaaacctagagatctgaaaagggttcaatcagtgcatgcatgtgaggaaactgacatgggaaaagaaccatctggaaggatcagtacctggaactcacacaga

SEQ ID NO: 115785 - DNA, 587 bp, Homo sapiens
ggtgttgtgcttcaatggtcactttccttgtccactttcatgttcctcccatacttctggttactctttgaagttcgtagtagatagcggtagaagaaatagtgaaagtcttaaagtctttgatctttcttacaagtgcatagaagaaaatgctgacgtatgctgccttccctctctgctttggctacctagaagggaagggccacctgtcccatgatcacatgacttgcttgaccttatcaatcacttggatgactcaccctccttaccttgtcccccttgtattgtttgcaataaatgtcagcgcrcccagccattctgggccactaccggtcccctcatcttggtggtagtggtcccccgggcccagctgttttctctttatctctttgtcttgtgtctttatttcttacagtctctcatcactgcacatggggagaacacctgctaagcccgtagggctggaccctacagaaaatctcatttaaacccctaccccacaaagagcctataatcaagtgacattgacacccctcagggatgatcctttgggggaccaaagttctcatgggttctctgtcagtgaa

SEQ ID NO: 115786 - DNA, 610 bp, Homo sapiens
gaactaacattgactgcctactgtgttccagtcactgtcctgatgttctgttaggttgtcatctatagtgctgtacaggttgttccatttgtgtatggctgcttaacaaactactttaaaactctgtacattaaaacaaccaccactttattatatttccccgatattatgggtcagaaatttgggcagggctctgctgggcatttcttcagcttcacactgggtcactcaatgttatccagctggtagatgggctggtttctggggtccaaagtggcttgactcacatatcttggtaccttggtggaggggctggaagcctgtgttcagttgtgycccacttctcttgtgttctcactgcctctccatgtggcttctctaatgaggaaatcaaccttcttggcttagggctccaagagactaagatagaaacttctagttctcttcaagggtaggcccagaactagcaaatttcacttctgccccactctactagccaaagttgtaacaggccagcccagaattaagaggaggagagaataaaatcccacctctcaatggaaggaatgtcaatgaatttggagccatcttcaattcaccacatagacac

SEQ ID NO: 115787 - DNA, 637 bp, Homo sapiens
taggaacagaacaccaaacactatatattctcacttaaaagtgggagctaaacattgggyactcataaacataaagatggtacaagccaggtgcagtggctcatgcctgtaatcctaggactttgggaggctgaggtgggtggaccacctgagattaggagttcaagaccagtctggccaacatggcaaaaccctgtctccactaaaaatacaaaaagtagccaggcgtggtggcatgtacctgtagtcccagctactcgggagactgaggtaagagaatcacttgaccctaggaagccaaggttgcagtgagctgagatcatgccactgcactccaacctgggcaacatagcgagactctgtctcaaaaaaaaaatggtacaatagacactgggggctgccagaaggggtagggagagaaagggtcaagagttgaaaaactactgggtactatgctccctatttaagagatgggatcactcatatctcaaacctcagcatcatgcaatataccaatgtaacaaacctatacatgtaccccctgaatcaaaaagacaaattgaaatgactaaaaaagaaagaataattattttttaaaagaaagggataagattgaagaaaggaaaaaaacaaaccc

SEQ ID NO: 115788 - DNA, 637 bp, Homo sapiens
taggaacagaacaccaaacactatatattctcacttaaaagtgggagctaaacattgggtactcataaacataaagatggtacaagccaggtgcagtggctcatgcctgtaatcctaggactttgggaggctgaggtgggtggaccacctgagattaggagttcaagaccagtctggccaacatggcaaaaccctgtctccactaaaaatacaaaaagtagccaggcgtggtggcatgtacctgtagtcccagctactcgggagactgaggtaagagaatcacttgaccctaggaagccaaggttgcagtgagctgagatcatgccactgcactccaacctgggmaacatagcgagactctgtctcaaaaaaaaaatggtacaatagacactgggggctgccagaaggggtagggagagaaagggtcaagagttgaaaaactactgggtactatgctccctatttaagagatgggatcactcatatctcaaacctcagcatcatgcaatataccaatgtaacaaacctatacatgtaccccctgaatcaaaaagacaaattgaaatgactaaaaaagaaagaataattattttttaaaagaaagggataagattgaagaaaggaaaaaaacaaaccc

SEQ ID NO: 115789 - DNA, 637 bp, Homo sapiens
taggaacagaacaccaaacactatatattctcacttaaaagtgggagctaaacattgggtactcataaacataaagatggtacaagccaggtgcagtggctcatgcctgtaatcctaggactttgggaggctgaggtgggtggaccacctgagattaggagttcaagaccagtctggccaacatggcaaaaccctgtctccactaaaaatacaaaaagtagccaggcgtggtggcatgtacctgtagtcccagctactcgggagactgaggtaagagaatcacttgaccctaggaagccaaggttgcagtgagctgagatcatgccactgcactccaacctgggcaacatagcgagactctgtctcaaaaaaaaaatggtacaatagacactgggggctgccagaaggggtagggagagaaagggtcaagrgttgaaaaactactgggtactatgctccctatttaagagatgggatcactcatatctcaaacctcagcatcatgcaatataccaatgtaacaaacctatacatgtaccccctgaatcaaaaagacaaattgaaatgactaaaaaagaaagaataattattttttaaaagaaagggataagattgaagaaaggaaaaaaacaaaccc

SEQ ID NO: 115790 - DNA, 395 bp, Homo sapiens
gaattcgacctccagctgtggaagtgaagggacaagcgaagattagaaaggcccgcacgcgaggcgcgttcgttccttaggggatttgcaaagaatgggcaaaagtagggcatgtgcaactgcgtacttgtgrttgggccgaagcccctgtgttccctgtgaagccccggagacgccccttctacctgccgctcagcctcggccactgcgattcccgctcagggccaggactctggacgctccggagcaaaatgcagtcctggcgcccttcctgaggcacgctgggaaatggagtcctcgctgcgcgttggtagcacgggcaggcaccacgtggtgccctgagggctcatgggaactgtagtctcggattctccccactggtaaggtggtcagaa

SEQ ID NO: 115791 - DNA, 631 bp, Homo sapiens
ttgtctcctggttccaaaacatgtggatcattttttggtccactcctgtcttctgcagaagtcctccttggcactcttcactgttacyccatctgccatctttgtcaattttttatcatttctaggaatttggggtggaatatgagaagaaagcaacatatcttcaggacacaatcttgaatcagtagctatttttcacctgtgcattagagatgggaaacttgcagagcacttaacaggacttccctacgatcaccaactagtatttattgaattgtttattagtaggaaacattaagcaattatccttcataaaaacattatgaagtaagtaagcattactatagtcccagttttaagatgagaaaacacagattaaaaacatcctaaagagcagagccaagttacactccaggtggtccgtctcagaagcctgaactctttactaatacactatacgatggcatatccgggtgattttgggaacacattatacttctaccctgccaggagggccaaatgtatttactttgtcatctctgtgctgtaaggggccacatttctacccatcaactcaatctacattactcaagcatgcttgtaattcataggttatttcctcatgccagga

SEQ ID NO: 115792 - DNA, 631 bp, Homo sapiens
ttgtctcctggttccaaaacatgtggatcattttttggtccactcctgtcttctgcagaagtcctccttggcactcttcactgttaccccatctgccatctttgtcaattttttatcatttctaggaatttggggtggaatatgagaagaaagcaacatatcttcaggacacaatcttgaatcagtagctatttttcacctgtgcattagagatgggaaacttgcagagcacttaacaggacttccctacratcaccaactagtatttattgaattgtttattagtaggaaacattaagcaattatccttcataaaaacattatgaagtaagtaagcattactatagtcccagttttaagatgagaaaacacagattaaaaacatcctaaagagcagagccaagttacactccaggtggtccgtctcagaagcctgaactctttactaatacactatacgatggcatatccgggtgattttgggaacacattatacttctaccctgccaggagggccaaatgtatttactttgtcatctctgtgctgtaaggggccacatttctacccatcaactcaatctacattactcaagcatgcttgtaattcataggttatttcctcatgccagga

SEQ ID NO: 115793 - DNA, 549 bp, Homo sapiens
tttaaatctataattcttcttaatttcatctcctgatctcagcacaatgcttaaccactataaaatccacaacttgcagaccaacagttcaatctcccagaaacttgtataacccttgatgtaacaacatttacagtagtttcctgctgtgctctttgacaactatagatccttgcgcttccaccccactgcccccttgccttctcccttctctctcctcttttcacccctacaaggtgagaaaaccagaaagacctaaaactgaggagaagaaagacctggtctaatctgtgctcaagatattagagcacaagaagaagaaagactgggtctgatctgtgctcaaaccacacctgtattctggtttgtaagtctagttctgcccctgtgtggccttggataaataacttaaactttatgtgcctcratctttcttctgtaaaatggggctaataagagtagtcttaggccaggcgtggtggctcatgcctataatcccagcactttgggaggccgaggcaggcagatcacttgaagtcaggagttcaa

SEQ ID NO: 115794 - DNA, 566 bp, Homo sapiens
tctcttttcctttggtcattagagtcctagagaccaagaggatgttgggaaaagaattaccatggatcagctctcagaggcagtaggttctggactcrtgctggctttgatacgtgtgcattggaaaagctcaagtacctggcaatacttggagattaggaagaaaggatgaaaataaaccactgcactaaataacatgacaataatcacttatacaaaaattttaaagataaggaatatttaaagatttattagtttattatagctttatagttggagagtgaagaagaaaataccaaagctttttgtcttaacaaaatggtgcagacagattaacatatattgtcacctatgataaccagtcagcataaaaagtatttagaaaggaatggttatattctctaagagatatattctgatgtcatgttttttgctttagagtctattaatatagccacctttttgttaatgttttcagtcaagctccttttctcgcctttcatttccaacctttctctcactttctggtttagatacaactcctaaatatatcatatagttaattt

SEQ ID NO: 115795 - DNA, 610 bp, Homo sapiens
ccttctttttcttggtgtttgttttctttggctggtaatgcacagcttcttgtggaaaataaatcccttggtagtgtttgtctttcttgtaggtgtgtgggactagtatttggctcaaaagcaagttcaaaccaaatcaagagttccaccgtgtgtgatgaacccaggcagccttcaccttgaacataaagaatgtggtccatccgttcaactggccttttcaggatttcactagcggtgcatgcagaaatccatcacaaaggaatgcagcacttcatttgacatggattcttgcccagaaacttagtaaaacctcagtccagccatttactcaggagcgtgtttgataagatacgggtattagtaaatatgaaaggaagctagggaagttaagcctacccrgaactgcttaaccgactttccctcagtgtataccttccctgtaaatcacattacattgcttcaagtattaaaagtaaaattagcaaccactagaactaatcttgaacacaaataatggtatgtagactaacaatgaaaataggagacatgtgaaagtaaatgaaactccagggtttctctggttttaaaaatgtatatttccagattc

SEQ ID NO: 115796 - DNA, 621 bp, Homo sapiens
tatcttattggtcactcgatgttttttgtgttcttataaacatttttagttttatttaaacttttgggtyttgcttttaaatttgttaggtggggctagagctgtgtgtaatctagaactaaactactttatccaagaccctataaattaggagctttcctagtctcactgaggtagcaggccctattcctacccctatgggagccctgggtgttgttacctctaatccttttgatagattatttccccagcttcaggcagtttcctcacatgtctgtgctgatcaacactcagctgaggattttagaatgaccctctgcagatatctggaggtcactgtgcagctttaatctagtcagatttctctcctgcaaactctagccacttcaatctctctgacctcttaattccatttccttaactctaggaacatgctaggtaccccctgagttctcccatcctgtgccacagcctggcaattctctcacagcaataagctgaagcagtcctagggcttacctcttgttctctccggtatcattgtcttttgtggccttatgtccaatgtcttgcaaatcatcatttcatgtatttgtctatttgggatttttattttaatta

SEQ ID NO: 115797 - DNA, 621 bp, Homo sapiens
tatcttattggtcactcgatgttttttgtgttcttataaacatttttagttttatttaaacttttgggtcttgcttttaaatttgttaggtggggctagagctgtgtgtaatctagaactaaactactttatccaagaccctataaattaggagctttcctagtctcactgaggtagcaggccctattcctacccctatgggagccctgggtgttgttacctctaatccttttgatagattatttccccagcttcaggcagtttcctcacatgtctgtgctgatcaacactcagctgaggattttagaatgaccctctgcagatayctggaggtcactgtgcagctttaatctagtcagatttctctcctgcaaactctagccacttcaatctctctgacctcttaattccatttccttaactctaggaacatgctaggtaccccctgagttctcccatcctgtgccacagcctggcaattctctcacagcaataagctgaagcagtcctagggcttacctcttgttctctccggtatcattgtcttttgtggccttatgtccaatgtcttgcaaatcatcatttcatgtatttgtctatttgggatttttattttaatta

SEQ ID NO: 115798 - DNA, 621 bp, Homo sapiens
tatcttattggtcactcgatgttttttgtgttcttataaacatttttagttttatttaaacttttgggtcttgcttttaaatttgttaggtggggctagagctgtgtgtaatctagaactaaactactttatccaagaccctataaattaggagctttcctagtctcactgaggtagcaggccctattcctacccctatgggagccctgggtgttgttacctctaatccttttgatagattatttccccagcttcaggcagtttcctcacatgtctgtgctgatcaacactcagctgaggattttagaatgaccctctgcagatatctggaggtcactgtgcagctttaatctagtcagatttctctcctgcaaactctagccacttcaatstctctgacctcttaattccatttccttaactctaggaacatgctaggtaccccctgagttctcccatcctgtgccacagcctggcaattctctcacagcaataagctgaagcagtcctagggcttacctcttgttctctccggtatcattgtcttttgtggccttatgtccaatgtcttgcaaatcatcatttcatgtatttgtctatttgggatttttattttaatta

SEQ ID NO: 115799 - DNA, 621 bp, Homo sapiens
tatcttattggtcactcgatgttttttgtgttcttataaacatttttagttttatttaaacttttgggtcttgcttttaaatttgttaggtggggctagagctgtgtgtaatctagaactaaactactttatccaagaccctataaattaggagctttcctagtctcactgaggtagcaggccctattcctacccctatgggagccctgggtgttgttacctctaatccttttgatagattatttccccagcttcaggcagtttcctcacatgtctgtgctgatcaacactcagctgaggattttagaatgaccctctgcagatatctggaggtcactgtgcagctttaatctagtcagatttctctcctgcaaactctagccacttcaatctctctgacctcttaattccatttccttaactctaggaacatgctaggtaccccctgagttctcccatcctgtgccacagcctggcaattctctcacagcaataagctgaagcagtcctagggcttacctcttgttctctcmggtatcattgtcttttgtggccttatgtccaatgtcttgcaaatcatcatttcatgtatttgtctatttgggatttttattttaatta

SEQ ID NO: 115800 - DNA, 457 bp, Homo sapiens
ttcctgataccacacctgacccccatgactgtatctctctgatccacctgacattcaccgcatttccccaaatttccttctttcctgttcctcaccctgatcacgcttgatttattgatggcggttccaccaggcctaatggccacacaccagcaaaggcaggctatgctatagtacaagccactagcccgcctcttagaacctctcatttcctttccatcckggaaatctatcctcaaggaaataacttctcagtgttccatctgctattctactactcctcagggattattcaggccccctcccttccctacacatcaagctcaaggatttgccccacccaggactggcaaattagctttactcaacatgccctgagtcacataactaaaatacctcttagtctaggtagatactttcactggataggtagaggcctttcctacagggtctgaga

SEQ ID NO: 115801 - DNA, 457 bp, Homo sapiens
ttcctgataccacacctgacccccatgactgtatctctctgatccacctgacattcaccgcatttccccaaatttccttctttcctgttcctcaccctgatcacgcttgatttattgatggcggttccaccaggcctaatggccacacaccagcaaaggcaggctatgctatagtacaagccactagcccgcctcttagaacctctcatttcctttccatcctggaaatctatcctcaaggaaataacttctcagwgttccatctgctattctactactcctcagggattattcaggccccctcccttccctacacatcaagctcaaggatttgccccacccaggactggcaaattagctttactcaacatgccctgagtcacataactaaaatacctcttagtctaggtagatactttcactggataggtagaggcctttcctacagggtctgaga

SEQ ID NO: 115802 - DNA, 564 bp, Homo sapiens
ttgcagtataggtgatgatacagtgaagatctgttttcaggtttcttctacccatctcatccatgaggtttttctttcctctgagatacctaaattgtactttaatatgatacaagactagaattgagaggaaactttattttctcatgttttgggagaagaaaaaatagaaatgtgtcattcatgaggactgattgactcagagttgtgcaaattttgacctttgaactctttgttcccatgcccctattttaattcaaaccttatactcaagtctcaacttgtttttagggggttagccaacgtttccctcagaacagtatcagtgcagcaggaagtgccatgttcctcagatttatgaatcctgacattgtctcactgtatgaagcagggattttagataraaagccaccacctagaatcggaaggggcttgaagttaatgtcaaaggtgaattattttgataatctagctatcttaaattccccttccaactaaattttcagcttttcttacagtacttcctcttacatttatattggaaataccctacggttttcagtt

SEQ ID NO: 115803 - DNA, 508 bp, Homo sapiens
cagtctagttccagaaaataaacatggacarttaatatacaaataactacttactacttacgtagaaatcacttttactaaatatactgtatgtattaaaagttatatcacagaaagaggtaatacaattagataaaacaacatacgtaagaattctatttttttctccccataaggtatccagatcacacactttaattcatgccacaccctctctaatgactactacataccgcaaaagaatgtatctgctaattatcaaactttatttttctctaatgaaggttttcaggtcattaatgctgagtctggagaaaagaacagtggctcccatgaacaagggttgacaaatgtaacacacttggttatatttgaatttcaggtaaatgatgaattgttatttgtatatactccagtaattgcttacacatattatacacagatataaaaacattgcatagctatactaaaaagttatttgttgtttaccccaaatttaaatgtaact

SEQ ID NO: 115804 - DNA, 508 bp, Homo sapiens
cagtctagttccagaaaataaacatggacagttaatatacaaataactacttactacttaygtagaaatcacttttactaaatatactgtatgtattaaaagttatatcacagaaagaggtaatacaattagataaaacaacatacgtaagaattctatttttttctccccataaggtatccagatcacacactttaattcatgccacaccctctctaatgactactacataccgcaaaagaatgtatctgctaattatcaaactttatttttctctaatgaaggttttcaggtcattaatgctgagtctggagaaaagaacagtggctcccatgaacaagggttgacaaatgtaacacacttggttatatttgaatttcaggtaaatgatgaattgttatttgtatatactccagtaattgcttacacatattatacacagatataaaaacattgcatagctatactaaaaagttatttgttgtttaccccaaatttaaatgtaact

SEQ ID NO: 115805 - DNA, 588 bp, Homo sapiens
ttaactttgtcaccatttgtttggactaaacttaatttgttatgtgttaaatctaccaaaaatgaattagcagatgatttgtagtgttccaagggcttcctcacttgaaaagagtatatctcatgaaaccctaactagtgagcccctatagtgcactgaagtgctttttaaaaagattcctaattggattgtaggcacgctttaaattattaggagctgaaatcaacaccaaasaggaagaaatgcaaattcttaaattttaattgaaattatatgctgtaatatgatagtgttatgtatctagatgatctgcttaagtccagttctaatatattctaaggtgtactaattacagtggataaaaattttttaataatctgtactgattttctgcaactaaaataaggtagaaggttattgtgtttgtgcactaacaccaaatgtcccattctgcaagatatgattcttgtaataggcagttgggttgcttttatgacctggttccctccctgaacagaaatgctgaggtcagtgagagaccacaaggcagaatatgtctttaaccttggtatctgtgactgacaatat

SEQ ID NO: 115806 - DNA, 588 bp, Homo sapiens
ttaactttgtcaccatttgtttggactaaacttaatttgttatgtgttaaatctaccaaaaatgaattagcagatgatttgtagtgttccaagggcttcctcacttgaaaagagtatatctcatgaaaccctaactagtgagcccctatagtgcactgaagtgctttttaaaaagattcctaattggattgtaggcacgctttaaattattaggagctgaaatcaacaccaaacaggaagaaatgcaaattcttaaattttaattgaaattatatgctgtaatatgatagtgttatgtatctagatgatctgcttaagtccagttctaatatattctaaggtgtactaattacagtggataaaaattttttaataatctgtactgattttctgcaactraaataaggtagaaggttattgtgtttgtgcactaacaccaaatgtcccattctgcaagatatgattcttgtaataggcagttgggttgcttttatgacctggttccctccctgaacagaaatgctgaggtcagtgagagaccacaaggcagaatatgtctttaaccttggtatctgtgactgacaatat

SEQ ID NO: 115807 - DNA, 610 bp, Homo sapiens
taataggctattcagtgtttgcaactacatgaatcattaatgtggcattagctagtgcactacaatttcctgawgtcttctcactctcataggactgctctacatttggcctctgccaatggaaattcagaagtagtacaactcctgctggacagacgatgtcaacttaacgtccttgacaacaaaaaaaggacagctctgataaaggtatgcagtagtcaactatatcagcgtgagatgggtttgatttcaatagatagcataaaaatgagttttctcatttaaatataactagttggtgaaagctgtggaatgttattttgaattcctaggacttataatttgtttttggtctaatactgacaggccgtacaatgccaggaagatgaatgtgtgttaatgttgctggaacatggcgctgatggaaatattcaagatgagtatggaaataccgctctacactatgctatctacaatgaagataaattaatggccaaagcactgctcttatatggtgctgatattgaatcaaaaaacaaggtatagatctaccaattttatcttcaaaatactgaaatgcattcgtgttaacattgacctgtgtaagggc

SEQ ID NO: 115808 - DNA, 610 bp, Homo sapiens
taataggctattcagtgtttgcaactacatgaatcattaatgtggcattagctagtgcactacaatttcctgaagtcttctcactctcataggactgctctacatttggcctctgccaatggaaattcagaagtagtacaactcctgctggacagacgatgtcaacttaacgtccttgacaacaaaaaaaggacagctctgataaaggtatgcagtagtcaactatatcagcgtgagatgggtttgatttcaatagatagcataaaaatgagttttctcatttaaatataactagttggtgaaagctgtggaatgttattttgaattcctaggacttataatttgtttttggtctaatactgacaggccgtacaatgccaggaagatgaatgtgtgttaatgttgctggaacatggcgctgatggaaatattcaagatgagtatggaaataccgctctacactatgctatctacaatgaagayaaattaatggccaaagcactgctcttatatggtgctgatattgaatcaaaaaacaaggtatagatctaccaattttatcttcaaaatactgaaatgcattcgtgttaacattgacctgtgtaagggc

SEQ ID NO: 115809 - DNA, 582 bp, Homo sapiens
attgaatcttactttcatttcattgggtctttatctttatttttcctattttctgtttatttgctacatttacacaaaycatttatcaataatacatggttttaattatacaagcttcctgatatattttataccagtagctaggtctagccccatttccatttgttctcctttaaaagggttttcattgctatattagaatttttttttaaatcttccatataaactttatagtcaacatatttagggaaaggtattggaacaatgtaaaatttatgaattaacttttggacaactgacacctttaggcactccaatcttgctatctaagagcacatatgtcttcatatgtgctcaagtctacttttgtatctttccggagttttacagtttttctcacagacgtttttgcatatttctcatttggttaataggtattttatgtttgaaaatcataaatgggaatcttctcttccatttaaatgttctaattggagatttgctggcttatatgaaggctattagatcaattttacattttgctaatttactaagctctttctcttgtactagtagtggcag

SEQ ID NO: 115810 - DNA, 631 bp, Homo sapiens
gttttttcctcctgcattgtacacagagctttaactcttccctgccctaagcatagtttggtttctttccaatagttccattatttaaaatagaataatttcatatatttaatgattattctctttattcttcccattttcttactcatctctctcctgacgtgacagaacaccactgaatgaaaagtgaaagctgttggaattttcaacaatatgagatatgtccatctggtgttggcccatgttactgtgggttatggtatgtgatgtgtgaatgaaaatawcttagacgtcattcaccacaaaccatctgcaatggcatttttaaaagtgtgaacattttactgggaattataacatagcccttttttcccattccccacattagctcataacttgaaacataactatgtcaaggtctactttcacaactggtgatatataggaaacactcttttcatatgtatcccataaatcaaaccctgggctgtatgtaatcaacaattggatggtgtaaccctctataatttcatcctttgccctctgtttcttgggtgtgagaagacttgagataggatcatgaagcctctcagaaagattttcttttcttaagctttctagcaccaacaga

SEQ ID NO: 115811 - DNA, 522 bp, Homo sapiens
accatcatccaatcaaagagccatcacacatggaagaaggtagaattgctccttttgccactcagtctttttctgtctcagcaatctttatactgggttttatagctatgaacatggtgttgaactgtgatagttggttatttttgagattgggttatgtagaataagtgggaattacatagagtggccatattctccaggaagcttggaacagttagtccaactccactatcgggraaaagcctcatggcagaatgaaatggaagtagatttggtcatttgtaagtttccttagagccctgacatcctatggcttgatgattctaagtagagatataagagactgttttaaacattttacttaaagaagctttgacttccttgtttctcaaactatagatgaaaggattcaacatggggatgactactgtgtaagacagacaccactttgtcttgatccattgagtagctggagctgggacgcagagatacatgaacaggattgtcccaaagaagatagtg

SEQ ID NO: 115812 - DNA, 600 bp, Homo sapiens
ttgtgatttttaaaaatttattatgccattctgtattcacattcagtgttaatattgagatgtggggtactgttccagtaatcatgtttgttgctacctaagactttgttttcttcattgtgttcttattttaaaggacctgtgaattttatgctttcaaggtgtcctattctggtgcatatcaaccttttgtttcaagatttagaaatccttttagcatttctagtctggtagtgacaaatctcctcaacctttttttgtttgagaaatactttattcctccttcattcatgaaacttagttttgctggataaaaaattcttggctgaccattattcggtttaaggaggctaaagataggaccccaatctctcctagcttgtaaggtttctgctgagaagtctgctgttagtctgayaggtttgttttataggttacttggtgcattttttcttattgctgttagaattctttcctttacgttgactttagatagcatgatgaccgtatgccttggtgatgacctttttgcagtgaattccccaggagtcctttaagcttcttgtgtttggttgcctaaatgtcttgcaaggccaggga

SEQ ID NO: 115813 - DNA, 636 bp, Homo sapiens
attatcaaaaagatgaaaattatcaagcattggccaggatgtggagtaaagggaactcttatactccattgatgggaatgtacattagcacagccattttgaaaaacaatatagaggtctctccaaaaactaaaaatagaattaccatatgatctaacaattccacttctgggtagatgcttacaggaattgatataggtatgttgaggagatatctgtgctttcatgttcattgcagtattattcacaatagctaacaattagaaacaacgtaagtgcccatcaacagataaatcgataaaagaaaaagtggcatatagtacacaatggaataataatcagccttacaagaaatgtaattctgtcacctacaacaacgtgaataaacctagaagacattatgctaagtgaaatatccttttgttgaatcacacctgtacatacatattctctcyataaaatatctattaaaaataaaaataaaatatctgttgatcaatgtgtactcatagacttttatttttgaaattgtttcacttagccaaaataataattattttttaaatgatgataattgccctttgatgctcagaaggtcacaattttaatgtaaaagtccttgtaagttcacccctg

SEQ ID NO: 115814 - DNA, 636 bp, Homo sapiens
attatcaaaaagatgaaaattatcaagcattggccaggatgtggagtaaagggaactcttatactccattgatgggaatgtacattagcacagccattttgaaaaacaatatagaggtctctccaaaaactaaaaatagaattaccatatgatctaacaattccacttctgggtagatgcttacaggaattgatataggtatgttgaggagatatctgtgctttcatgttcattgcagtattattcacaatagctaacaattagaaacaacgtaagtgcccatcaacagataaatcgataaaagaaaaagtggcatatagtacacaatggaataataatcagccttacaagaaatgtaattctgtcacctacaacaacgtgaataaacctagaagacattatgctaagtgaaatatccttttgttgaatcacacctgtacatacatattctctctataaaatatctattaaaaawaaaaataaaatatctgttgatcaatgtgtactcatagacttttatttttgaaattgtttcacttagccaaaataataattattttttaaatgatgataattgccctttgatgctcagaaggtcacaattttaatgtaaaagtccttgtaagttcacccctg

SEQ ID NO: 115815 - DNA, 615 bp, Homo sapiens
ctttgtatgctctgagtaggcatccaatatgtggtactgtttcttccatagccaggatccaagaatgcaggaatcaaggggtggaagtggaagtggtgccacttaccatcacctctactgacccactagcaaaattttccttcctgtttctgtgacattatgttctgtgggcctagaggtcttcgttccggagggaggaactttgccaccagaagacagaaagatgattccatcaaactggaagataagtttgccacctggccactttgagctcttcctgcctctaagtcaacaggctaagaagggaggtacagtgttggctggggtgactgacccagactatcaagatgaaatcaaactactactccacaatggaggttaaggaagagtatttgtggaatacaggagatmccataggacgtcacagtattaccatgtcctgtgattaaggtcagtgagaaactacaacaacccaatccaggcaaaactacaaatggcccagacccatcaggaatgaagatttgtgtcactccaccaggtaaaaaaccgtgtcctgctaaggtgcttgctgaaggtaaagggaatacagaatgggttgtagaaggaggtagttat

SEQ ID NO: 115816 - DNA, 569 bp, Homo sapiens
tttatggacataccccaatttacttaccctgtcacttatgtacagttaggctgtttgcagggttatttaatgactgaatcatagagttggtatgcatatttttgagtttataagaaactatgaaacagttttcyaaagtggttgtactactttacatttctaccaataacgataaaatttccaattactacatttccttgtcaacacttggtatagtcagtcttttaaaattttaatcattagtgtgtaacattattttattgtgtttttaacttgtattcccctaatgaatatttgagcatttttacgcaattatttgtgattcagtgatctcctttggtgagtatctattgaaatttttgaccaattcttattggattgtctgatttcttattattaggtattaaaatgtctttgtatgttatggatacaagttttttaaatcagaaatatgtcttttttaatttctcttgtgccactcagtaactctggctttttaaaaattatcatttactgtgttttcttatatgtctgatcttctgttccaagtatttcactttctgtatatg

SEQ ID NO: 115817 - DNA, 569 bp, Homo sapiens
tttatggacataccccaatttacttaccctgtcacttatgtacagttaggctgtttgcagggttatttaatgactgaatcatagagttggtatgcatatttttgagtttataagaaactatgaaacagttttctaaagtggttgtactactttacatttctaccaataacgataaaatttccaattactacatttccttgtcaacacttggtatagtcagtcttttaaaattttaatcattagtgtgtaacattattttattgtgtttttaacttgtattcccctaatgaatatttgagcatttttacrcaattatttgtgattcagtgatctcctttggtgagtatctattgaaatttttgaccaattcttattggattgtctgatttcttattattaggtattaaaatgtctttgtatgttatggatacaagttttttaaatcagaaatatgtcttttttaatttctcttgtgccactcagtaactctggctttttaaaaattatcatttactgtgttttcttatatgtctgatcttctgttccaagtatttcactttctgtatatg

SEQ ID NO: 115818 - DNA, 395 bp, Homo sapiens
tgaattcaccactctcttatgaccagagaatgcccattattttctcagaataaggttttgtttattaacaatggtctctttaattgaatattttaagaacctgtacagaccttcagataagagctcctgtaacatataccttattttaattaaaatagctatcattttagttcagccctattagwgccaagtactaagtgcatttaatgcttgttattgactttaaacccaggccctagcggctattgctatttccttttttattaaaaaggccactcaatttcagctcagtttcataacagtgactctactgataagcagtactgccctcaggcaagtggaacctctacctggggccggtgacggtgctgcccctcagaaacccagtgatttag

SEQ ID NO: 115819 - DNA, 508 bp, Homo sapiens
ctaaaaaccccctgtgctccatctatttgtccctgccttcctgcccccactcccctggcgaccactgatcttaggttcactgtctcttagttttgctgtctcggaatgtcatatcgtcgggatcatacaatatgtagccttttcagattcgtatcagtgaaattttcatactaggtttcattagaatccattggtttcaggggctccatgaggtcaaaatattacagggactcctgggggtttgcagagcacactttgagaaccactggtctggaataataatcatagataaagcagatgtaaaagcattctatgtgccaggtactttatattccttcaagtaatattcaaaagtaaccctaagtggtaattaggtttattgtctgcagtgtgtaaatgaagatcccaaatacagggaagtaaggtaatttstcgcagtctttatagcaagtaggaaggaagaggaagggttcagcctccatctggctgggatgagagccgtgctcta

SEQ ID NO: 115820 - DNA, 558 bp, Homo sapiens
tccagaaagcagacaccaagatggtgttagatgggcaagaggttttttgacaaagggaggaagagaaggcaacaagagtcttcagacttcagttgaaatctgatacctatagaaggaaatagggaagaaagggacatcaagtagtagaagggttggactgcagagcaattcaggagttaatccaggtcaatagagagtccccataccatagtcactcttaggatgagtcctgtgtcttcccagaatgagcctgtcaccctaagttaattatgcccctgcagcagaagatcaaggtagcgtgttttcatggccaccgcaagtgmctactctagataagagatctgttcttcagtgagtcatcaaatacactcttaacaaatacaaaatacacaaaatttaatttaattagcttatccaaattcaaattaacctgtacaaaacaggaacataaaatgatctttgaatatattatgtgatggtacatttatatttcattatatttattactcttcttttaaaaagcatcttccaggtttactatcacctttgcatgcatga

SEQ ID NO: 115821 - DNA, 397 bp, Homo sapiens
agttagctcaagaattctggaattggcttctcaattgctttcaggctaatattgaagtctaaaaagaagaaaaaaataaaaccttaataaattagaaaattaatagattaataaaataataaattaaaattaaaattttatttaaaaaataataaaataaaatttaaaaattaaaaccrtaataaaaagttgtcctccaactaagaaaaagctccaggagtcccaatgaccccaaacactcactcccattaaggtaatctccataaaatgcactgaatgagtgcacaattacaaaataagggagattgtatgcaaatttttgtaggcttttttcccccatattccagagctaaattgagcctctgtctaaaccctcttgtttttctcctcccctgag

SEQ ID NO: 115822 - DNA, 475 bp, Homo sapiens
tatgctgtaagacatacagaaaaatgtgtttttactcattaaaggcaatgagtcatggctaagtactttcacttggagtggtggaatgagatctgacacagagtttataacttccttragatctgaccatctccccaaccattcaagaagcatacacggaatcagagtcatcttcattatagatgggacatccttctcccgaatgagtccttccttctaattcctttccaacatttcatctgaccaggacattatttgacaacaaaagacacattcacattataaaaattgtcccccatgatttgcagagagcaatctacaggtaggagggagaatcacatttagaaataaagtgtcagagtcatgtgaccagtgctttgtaaaagacactgcagagaccagggacaaaggtgacccccactaaggaagaaatatgacaagtgtttccaatagaaacacaggagcacagcaggaa

SEQ ID NO: 115823 - DNA, 475 bp, Homo sapiens
tatgctgtaagacatacagaaaaatgtgtttttactcattaaaggcaatgagtcatggctaagtactttcacttggagtggtggaatgagatctgacacagagtttataacttccttgagatctgaccatctccccaaccattcaagaagcatacacggaatcagagtcatcttcattatagatgggacatccttctcccgaatgagtccttccttctaattcctttccaacatttcatctgaccaggacattatttgacaacaaaagacacattmacattataaaaattgtcccccatgatttgcagagagcaatctacaggtaggagggagaatcacatttagaaataaagtgtcagagtcatgtgaccagtgctttgtaaaagacactgcagagaccagggacaaaggtgacccccactaaggaagaaatatgacaagtgtttccaatagaaacacaggagcacagcaggaa

SEQ ID NO: 115824 - DNA, 597 bp, Homo sapiens
gaagctgaatcaatctgttggaatacctagcccaccactttgcacatgagaggaccttaggaaacagttcctaaatgttgtcaagttcctttaatcatatgtcttggctgcaaaatattggaccatttaatggtaaaacaaaggaaaattgctgttaaatatcatcattaaaagagcaaaagtacagaaaaaccatagtgtcatgtcatgttgatattttgaaaaatcccagtaccccaatattsttaataaattccaaagcaaagaaagttcaaacaacaacttcatcattgaagagatgaaaacttttattaaatttaagtcccaataactgttgaaatatttcaggtgatatttatagtaaaatagtatctaactcttttcacattgtaggactttggctgacaaccaggtctaggaaaaatttttggtcttccattgtaaatgaatttacttcctagggaatttatgtggctgtgtgatgagaggttgcaagcccagttataggtactggagttcagaagattgttaggattctaatttggctagttttaaggtgccatcttatcaggatccccagcagaaggaggttttcaa

SEQ ID NO: 115825 - DNA, 472 bp, Homo sapiens
gaattcttacttgctgatgctagggccagtcttctcccagtcaagaaactccctcagagggggatcatagcagctgtaattcaggaggctctgcttaagtttacataatgtttatttttgtagttacagatttcagatgtttctaatttttataccactttggagggctactactcttttcattggccaactttrcaagttgggcaaatgaccgttctctaaccagaggcaagagttatggcccatagaaggtttgctctgagagaaaagtaccccatacagttaagagcccaaccacatgatttccagacagctcgtatagcctaaagtatgtcagttgaattaccttgcaagttgtaaactaatcgacaaactcagaatcaattggatgttattttaataccctataagagttatgaaatcctaagagtaagaataaatgtaggaatcgagcaaattcaaagttctttaa

SEQ ID NO: 115826 - DNA, 597 bp, Homo sapiens
tcttacttgctgatgctagggccagtcttctcccagtcaagaaactccctcagagggggatcatagcagctgtaattcaggaggctctgcttaagtttacataatgtttatttttgtagttacagatttcagatgtttctaatttttataccactttggagggctactactcttttcattggccaactttacaagttgggcaaatgaccgttctctaaccagaggcaagagttatggcccatagaaggtttgctctgagagaaaagtaccccatacagttaagagcccaaccacatgatttccasacagctcgtatagcctaaagtatgtcagttgaattaccttgcaagttgtaaactaatcgacaaactcagaatcaattggatgttattttaataccctataagagttatgaaatcctaagagtaagaataaatgtaggaatcgagcaaattcaaagttctttaaaggaacaaggacaacatttacacatctttgccaaagagatgcaaatccaatcaagtgatgtgagtggggtaaactcttctgagagaatcagaagggtcttggttttgggctacttgacctatccctctt

SEQ ID NO: 115827 - DNA, 452 bp, Homo sapiens
tttttttgagagtctcactttgcacccaggctggaatgcagtggcacaatctcagctcactgcaaactctgccttgtgggctcaagcaattctcatgcctcagcctcctgagtagctgggattacaggtgctccaccatgcccagctaatttttgtatttttagtagagttggggttttgccctgtcagccaggtagttcrcaaactcttgacctccaagtgatcttgacctccaagtgatctgcctgcctccgccttccaaagtgctgggattacaggcactttggaaccaccatgcctggctgattcttggatattttaatgtatggtggccaattcttctagggaaaggatagacttctgtttaaagaattaagctctttctacattctttttaacttgttctttcttttgcaatatgttgattgtaaatggtagaaatttttgttcct

SEQ ID NO: 115828 - DNA, 638 bp, Homo sapiens
ggctgcccgtggaggtgcatgtgatctttataaggtagctctttttaagccagggcaactttcagagagagagctaacatatgagggctatcattcagctgcactcccagcaactgggggaatggatcctttaatcttgcaggctgaacctgcgaaatgaagcacagggtccactatagtctaccccttgcaccatccagatcgacttctttgagtaacttctggagcagctcctccagtattctggtgggcatcttgatggggaaaaataaataaaaccaagttagtrgggcaacctggagctctttttttctacttaaatttccttgtcccactgaagctggcttcatgatgttcattatctccttcctttttcatcaatttcaggttaatctcccccttagttagcacctttacaggtctaggtggcttgtggtgtgacacagatgctcatccctgaggtgtatgagcctctggtcacaacgccattctcagactgtaattactgcattcattcattcatttgccataaaaactggccaagagtgtaacaagagacgctgaaatggattacctctgtgtcaaatgtatcctttctgttccctttttgtgtgagcagcctccagatcatggtcaat

SEQ ID NO: 115829 - DNA, 563 bp, Homo sapiens
ttgtcataaaatggataaatccaataatgccctttcatgaagtaaaattgcataaacatatatattkaacatttttattaccaaggaatacgaatatagttttatccatctttatgccatagttttctgatctattaacatttataataatttaattagtttatatataaagcatttagaatagtggctgcacaagttgagtattcagtacgtaatataagttaatacaaattataatattggaacaatccaagtgatttcagatttaagatgttatcagtaagcctttttaaatgttctccttcaccagtgaatgcttctttgctaattatgtatatgttaatatatctaatacaagataatgcatttaacaaatttgttagaaaatacaggaaataaaaaatatggcaatatataccaaaatgttacctgatattattgtgtagatggagatttgggatactttttatactgtttaatttctgcatttttctgaatgttgtacaataagcatgctatacattaactttactttcagaaattatatcttatttgtaattacc

SEQ ID NO: 115830 - DNA, 563 bp, Homo sapiens
ttgtcataaaatggataaatccaataatgccctttcatgaagtaaaattgcataaacatatatatttaacatttttattaccaaggaatacgaatatagttttatccatctttatgccatagttttctgatctattaacatttataataatttaattagtttatatataaagcatttagaatagtggctgcacaagttgagtattcagtacgtaatataagttaatacaaattataatattggaacaatccaagtgatttcagatttaagatgttatcagtaagcctttttaaatgttctccttcaccagtgaatgcttctttgctaattatgtatatgttaatatatctaatacaagataaygcatttaacaaatttgttagaaaatacaggaaataaaaaatatggcaatatataccaaaatgttacctgatattattgtgtagatggagatttgggatactttttatactgtttaatttctgcatttttctgaatgttgtacaataagcatgctatacattaactttactttcagaaattatatcttatttgtaattacc

SEQ ID NO: 115831 - DNA, 544 bp, Homo sapiens
atttgaaaaaactgccacttctcccactttttatcagctggcttcatacggaagaccttcatacctgaatcagcatggctataggttccagcatcctctcaaactttttctgggaatgcatcttctttgggtttatacattgcaacatcccaagtagaggtttgccagtttctttttctgsagctgttgctccctctggtatctgtctgtggtactgcaggttccctggtgctgcatcacctctgacctctcctttattcccagtggctcccatgcatccaaagtatgccagttgggcgtcaagttagagagagagagagagcttcaggtaacctcataaaactttccgttccagtcttctctttccctgctaacggagcagctgcaagttgagtgcttcccagccaaaccaacctgttccagcttggggaaggggtatcatgagtataatgcagcagcttttcttatttgttcaatgccactattcttggctttgcacttgtctgtgctactacaacttcttaatggtttatggaactccata

SEQ ID NO: 115832 - DNA, 611 bp, Homo sapiens
tatattgtttttcagttggtatctttatggagaatcaaggtttggagcttcccattccaccatctggctgacatcactctgtttacattatttttaatttttattatattttatttccttgagacaggatcttgctctgtcagccaggctagagtgcagcctcgaactcytgagctcaagggacctcctccctcaggctactgagtacttggactataggcacacaccacataccaggctaatttcttgttttcttgtgaagatggggtttcactctgttgcccaagttggtctcaactcttgggctcaagcaatccttctgccttggcctcccaaagtgctaggattaaaggtgtgagcccaccatgcgctgcctgttatatttagtagaaaatatatctaaaaatatacttatgtactatattgaatccactacccagagcttaactgaactatttttgtgactcattctgtttttttattttttgctttttacttattacaatgaactacaagtatggatatattaatattaattaatataaaatatactggaatctttttatttttttttccttttttcttcaccaaaagcagaaacttaaatatac

SEQ ID NO: 115833 - DNA, 611 bp, Homo sapiens
tatattgtttttcagttggtatctttatggagaatcaaggtttggagcttcccattccaccatctggctgacatcactctgtttacattatttttaatttttattatattttatttccttgagacaggatcttgctctgtcagccaggctagagtgcagcctcgaactcctgagctcaagggacctcctccctcaggctactgagtacttggactataggcacacaccacataccaggctaatttcttgttttcttgtgaagatggggtttcactctgttgcccaagttggtctcaactcttgggctcaagcaatccttytgccttggcctcccaaagtgctaggattaaaggtgtgagcccaccatgcgctgcctgttatatttagtagaaaatatatctaaaaatatacttatgtactatattgaatccactacccagagcttaactgaactatttttgtgactcattctgtttttttattttttgctttttacttattacaatgaactacaagtatggatatattaatattaattaatataaaatatactggaatctttttatttttttttccttttttcttcaccaaaagcagaaacttaaatatac

SEQ ID NO: 115834 - DNA, 600 bp, Homo sapiens
tttgctgtgtaaaatattctcagttggaagttgcattttgttgtcatcgttcccctcagcactttgaatgtgttactcaaatcttctagcccgtaaagtttccaatgagaggtctgttgttagaggtaatgaagccccattatgtgtcattttcttcttttttcctggttcttttaatattttccctttgtcctggaccttctagagtttgattattatatgctttggagtagtcttattcgcatggcatttgcttggtgattttttaccttcctctgcctggaggtttatgtctttctctaggttggacacattttctgttattattactttgatttagctttttagccatttttgttattctattctttctttaaggccaatgacccttacattttctctttttataccaccccatatatctcattggtatcagcatatattgttcctttttaattaattatttatttatttttactttttctctcctgtttgtttcaaatagcctatctttgagtgcacygattctttactttgttttattaattctgctgtggagaccctctaatgcaattttcgctttctctattgtacttttcc

SEQ ID NO: 115835 - DNA, 584 bp, Homo sapiens
ctttgtagggaatttttgattactgattcaatcacttaccagttatagatatgttcagaatttctgtttcttcatgattcaatcatgatagatggtaagagtctagaaatttatctatttcttctaggttattcagtgtgttggcatataaytattcatagtggtctcttataatcctttttatttctgtggtattaatagtaatgtctcctcttcatttctgattttatttacttgagtcttcttttttcttaattagcccaaagaattgtcaatcttcgtcttttttaccaacttaagtttcattcattttttctattgttttactattctgtatttcatttttgctctaatcttcattgttttcttccttctgccaactttctatttagtttgtccctttctagattttttaaacttttattttaggtttggggtacatgtgaatgtttgttacataggtaaacacctgtcatggggggtttgttgtacagactatttatcacccaggtgttaagccaagaacccaatggttatcttttctattcctctccctcctccagaactccctcctcaaggagaca

SEQ ID NO: 115836 - DNA, 334 bp, Homo sapiens
aatatgtcatgtcactctgtcttggcttgtaagatttccactgagaagtctgctgccagatatattagagctcctttatatgttatttgtttcttttctcctattgctcttagtatcctttctttatccttgatctttgggagtttgcttattaaatgtcttgaggtagtcttacttgggatgattctgcttagtgatatataaccttcttatacttgaatattgagccagctataacaaacccacagccaacgtcatactgaatgaacaaaagctggaatcattccccttgagaactggaaaamctagaagaaatagataaatccctagacgc

SEQ ID NO: 115837 - DNA, 641 bp, Homo sapiens
atcacattccctgacttcaaattatgctacagaacataatcaaaaccacatgatacttgcataaaaacaggcacacagaccaatggaacagaatagagaaaccagaaataaatccatatggctacagtgaacttatttttaacaaagatgccaagaaccttagggaaatgatggtctcttcaataaatgctgctgggaaaactggatagccatacacagaagaatgaaactagacccttatttctcaccatacacaaaaataaaatcaaaatacattaaagacttaaatctaagactttaaactatgaaactactaaaagaaatattagggaaactctccaggacattggtcaaggcaaagatttcttgagttataccccataagcacaggcaatcaaagcaaaaatggacaaatgggatcacatcaagttaaaaagcttctgtaaagcaaaggaagcaatcaacagcaacccacagaatggaaaaaagtatttgcaaattgtycatctgacaagggattaattaccagaatatataaggagctcaaaaaactccataggaaaaaatatctaatagtctgattttaaaatttgatttctcaaaagaaggcatacaaatggcaacacatattttgaaaaagt

SEQ ID NO: 115838 - DNA, 595 bp, Homo sapiens
ggtgatggaagatatttctgacggcctataggcaactcagaggcattttctttcttctagaatcttccctgtttagtggaaattggatgcctggaaacaaaattttcagaatcctggccagcagaattctgggttagattctatcaatgagaggcatctgtatgttatttgaaagactaaagactgcttcagcagcggtggatggattcatgaggagcaaactgagagaggcctttttgtagaggtctctgggcatttacttgaatatcacccaccatggagcaagaagacctatgttcattgccagctatatcctgcaatgcttgtaacctttgaagtttctgaaagacactggtgaccctgagagttagtgctggctttttctgaccttcattccaccagtctttccactgattttgtaatcatcgaagttactggatgtaacatcctattgcttgaaacaggtaaaatgaattttgcttttctgratgaatcctggctgatttgggaaataagttttacaatcaaatatgtgactattttctttttatttgtgtattatttataatatatttaaggcgtacgagtgcagatt

SEQ ID NO: 115839 - DNA, 407 bp, Homo sapiens
tgggtaccttgaagaaggtggaggaggaggaggagaagaagaaaggggtctgggaaaggatccggttcaaattaagttctcaagcgctggtggaaggtttagctacaggtcacggagaagatcagggaagcaacaggacasgcggggcaagggagcgtgaggcttatgagcaattagagggagacaaaggttctgctttccaccaaaccttcttcggtctgggccctcccttagcaaccctggggctttagactctctctccaccaatccctgatgaccccggtggtgcctcacaatggacattccaagtagcgcccgcatcatcccaatgacccctcccccatctcagtcccccacgctcctcccaagaccaggtcctctctggaaccttcacaaacctgatttct

SEQ ID NO: 115840 - DNA, 407 bp, Homo sapiens
tgggtaccttgaagaaggtggaggaggaggaggagaagaagaaaggggtctgggaaaggatccggttcaaattaagttctcaagcgctggtggaaggtttagctacaggtcacggagaagatcagggaagcaacaggacacgcggggcaagggagcgtgaggcttatgagcaattagagggagacaaaggttctgctttccaccaaaccttcttcggtctgggccctcccttagcaaccctggggctttagactctctctccaccaatccctgatgaccccggtggtgcctcacaatggacattccaagtagygcccgcatcatcccaatgacccctcccccatctcagtcccccacgctcctcccaagaccaggtcctctctggaaccttcacaaacctgatttct

SEQ ID NO: 115841 - DNA, 407 bp, Homo sapiens
tgggtaccttgaagaaggtggaggaggaggaggagaagaagaaaggggtctgggaaaggatccggttcaaattaagttctcaagcgctggtggaaggtttagctacaggtcacggagaagatcagggaagcaacaggacacgcggggcaagggagcgtgaggcttatgagcaattagagggagacaaaggttctgctttccaccaaaccttcttcggtctgggccctcccttagcaaccctggggctttagactctctctccaccaatccctgatgaccccggtggtgcctcacaatggacattccaagtagcgcccgcatcatcccaatgacccctcccccatctcagtcccccacgctcctcccaagrccaggtcctctctggaaccttcacaaacctgatttct

SEQ ID NO: 115842 - DNA, 535 bp, Homo sapiens
tctttttttcatgataaaagtatttcattgtaccacacatctaaatttagaaatagagaaaaatgggaggaaagaattacccagtgatcttctacccaaacaaaactagtgaacatttcccaaaaattctttcccamactttcttattcccacatagatcattggattctactctataaatagtttgacatattgcttttaaatttttaaaaagttaatacatccatatgccataaaatttaaaagatagcacacattcttctgcatcttatatttaaaaacattttcaatcggcaaataagtacatatatttatggggtacaatgggatgttatgatatgtgcatacattgtggaataattaaatcaggtcaattaacatactcatcccctcacatacttaacatttctttgtggtgagaacatttaaaatctacttttagcagtggtggtgatcagagggtgaggatgtggtagatggggaaagaaagatgttggccaaagggtacagaaggaataagttttagtgatctatt

SEQ ID NO: 115843 - DNA, 641 bp, Homo sapiens
atgatatgtgcatacattgtggaataattaaatcaggtcaattaacatactcatcccctcacatacttaacatttctttgtggtgagaacatttaaaatctacttttagcagtggtggtgatcagagggtgaggatgtggtagatggggaaagaaagatgttggccaaagggtacagaaggaataagttttagtgatctattgcacactatggtgactatagttaatgtgtatttcaaaaytgtaccttgcattattcacttaacggttaatcttggaaatggttctatgtcagtagagagtgtcctcattcttcttttatatgtatgtacgagagattatttaagccagcccctactattggaacacagtttgcttccaggttttaggtcattgtaaccagtgctgcacagctttttgcatgaagctttggtgctagttccaaaggattctctgaaaacaaagaatatagtcaaatggcagggatattttggaggccattgataccgttctgaaattctctctccatagggctgctgtttttgctacttcctccaggagaaaatgaaagggctctgtttgtttatttttattttttattttttctgaaatcattcttttattcttttcatgaaatttcag

SEQ ID NO: 115844 - DNA, 641 bp, Homo sapiens
atgatatgtgcatacattgtggaataattaaatcaggtcaattaacatactcatcccctcacatacttaacatttctttgtggtgagaacatttaaaatctacttttagcagtggtggtgatcagagggtgaggatgtggtagatggggaaagaaagatgttggccaaagggtacagaaggaataagttttagtgatctattgcacactatggtgactatagttaatgtgtatttcaaaactgtaccttgcattattcacttaacrgttaatcttggaaatggttctatgtcagtagagagtgtcctcattcttcttttatatgtatgtacgagagattatttaagccagcccctactattggaacacagtttgcttccaggttttaggtcattgtaaccagtgctgcacagctttttgcatgaagctttggtgctagttccaaaggattctctgaaaacaaagaatatagtcaaatggcagggatattttggaggccattgataccgttctgaaattctctctccatagggctgctgtttttgctacttcctccaggagaaaatgaaagggctctgtttgtttatttttattttttattttttctgaaatcattcttttattcttttcatgaaatttcag

SEQ ID NO: 115845 - DNA, 641 bp, Homo sapiens
atgatatgtgcatacattgtggaataattaaatcaggtcaattaacatactcatcccctcacatacttaacatttctttgtggtgagaacatttaaaatctacttttagcagtggtggtgatcagagggtgaggatgtggtagatggggaaagaaagatgttggccaaagggtacagaaggaataagttttagtgatctattgcacactatggtgactatagttaatgtgtatttcaaaactgtaccttgcattattcacttaacggttaatcttggaaatggttctatgtcagtagagagtgtcctcattcttcttttatatgtatgtacgagagattatttaagccagcccctactattggaacacagtttgcttccaggttttaggtcattgtaaccagtgctgcacagctttttgcatgaagctttggtgctagttccaaaggattctctgaaaacaaagaatatagtcaaatggcagggatattttggaggccattgataccgttctgaaattmtctctccatagggctgctgtttttgctacttcctccaggagaaaatgaaagggctctgtttgtttatttttattttttattttttctgaaatcattcttttattcttttcatgaaatttcag

SEQ ID NO: 115846 - DNA, 399 bp, Homo sapiens
ggggccgttcctgtcagctctgcagatgcagaggtggacgcgagctgggggcagcctccggacactcctgggcacgccatacgggaggtggcctgcrcggggatccctgccggtgcccacaggccccgtgggtgggtgctgctgtgagcctggggtggtgggccctgctctccaggctctgagcctcagtttccccatctggaaagggggacagtgatggggctcccagcgggctgctgtgagggtgggaggatggaggagtgccctgagccccctggcatcccacacccgcccccaggagcctagacgtgtggatcggcttctcgactgtgcagcgggtggaggtgggcccagcgccgcagggcgaggccttcagcctggagagctgccagaactggc

SEQ ID NO: 115847 - DNA, 399 bp, Homo sapiens
ggggccgttcctgtcagctctgcagatgcagaggtggacgcgagctgggggcagcctccggacactcctgggcacgccatacgggaggtggcctgcgcggggatccctgccggtgcccacaggccccgtgggtgggtgctgctgtgagcctggggtggtgggccctgctctccaggctctgagcctcagtttccccatctggaaagggggacagtgatggggctcccagcgggctgctgtgagggtgggaggatggaggagtgccctgagccccctgscatcccacacccgcccccaggagcctagacgtgtggatcggcttctcgactgtgcagcgggtggaggtgggcccagcgccgcagggcgaggccttcagcctggagagctgccagaactggc

SEQ ID NO: 115848 - DNA, 608 bp, Homo sapiens
tgtacttcatgcactgctccatcctcaatgtttagatgtatgaatccaggcactttttctcaaygtatcaataactttgctgaataataagtgtacacagtgggacagggtaggcataaggtactgtgggaggaaacaaagatgactctcattttctgtcttcaaccagcgtttgatctggtggaagaatttacaatcaagatgatactttctattttacccttgctttatctatcatttctagagcaataaaaataataacaagtatgtttttaaaaggagtctatttagagctctagtacacatcaggttgcagttttccatctgtcaactgcagaaacaaatcctctaaaatatagtgaaataaagaaatgtgatggataaaagaagtggaaaacattggcgaaaacagtacttttttgtcacaaaatgtcagtgatcacaaactcagaggaaattaatggagaaggtctacgttattttttcttaaaaaattgaagtcagaataagccacacattgcttacaaggaatttcaaagtaaaaagtaggcctggcagccagagtttgcccactgctccaagtgctattacagtttactcttccctat

SEQ ID NO: 115849 - DNA, 547 bp, Homo sapiens
gatataaccttttatctgcctaggaaaaaatcatctttttagactcaattcatttgcaatctttttgaggattttgtgctatctacccctatcctcccacctacatacagaatacatgctcctcatcttaagctgcatctatgtagaatttgagaatgtattttttcaataatatattttgatagtctacatttcttattataagataatttagaagagatatgctacagagttagaagagttctttgtattacataggaaatcctaaatacattttaaatcaatttatattcaccaatttttatcagagttaaattgtagttacataaaatttagaagacatagtaaccattttaccaacaaaatactttatcacacaattattttacctgtaacatatttctctctgtcaattgtgtactaattttataattttacataattgaaactgttgcatgtgtacaattttacttatagttttgtccattaatgctatracacaaacatttcccatattttgtcatttttcacaacttattttcaatgc

SEQ ID NO: 115850 - DNA, 588 bp, Homo sapiens
gtgtggggagccagaggagggatagcgttaggataaatacctaatgtagatgattggttgatgggtgcagcaaatcaccatggcacgtgcatacctatgtaacaaacctgcacattctgcacatgtatcccagaacttaaagtataattttaaaaaatgcatagaaaaaatgactagacagaatatcccaaaatggcatagcagtcacttttgggtagaaaaaaaaaatcaaactaattactttcatgaatttttttttcctgctttctgacttccatgactttatcaatgactctgatgcactctcaaatcccacgtacaacatggaagcgatattgttgaatctgtttttactcattaagcytcaccagtagtctgctcatttaatccctaattccagtcactactgactgctgtgtaatcttaatgcatcatctcatttctttctttcgaccactctccaaaatcatatcttaatgaccctcactggattattgatgatctcagtaattttccaaatagtgtgcttgattctaaccatgttatttcttagctgatatatgtgtttatcccagaggaaaaaatatc

SEQ ID NO: 115851 - DNA, 588 bp, Homo sapiens
catatcttccaaaaaccacagaggatgtgttgaagtttcyggtgggagtttgaaccctggttctatcccttattatcaggttgactatgaagtttggggaggttaaatttttgccattttccttagctataaagcaaggataataacttttatgttgctttcattgtgtgggacttgcatgacaaagtacaatgtaaaggtatgccaaaaagtaaataagtgttccacaattggttgttgtttatggctttaaaattatttttattaatctgtttcccaccttacctttggacctttccttatatatcgattttatgcattggatgtctggtgtctgtgtgactacagcctctctggttaaaggaagcagaggcggctgcattatttcattgcgaagtgtgaattattcccttcatttctcatgaaggtgaatatctggaagaaggtcagctaccatcgcttttttcttcctcttaccactgttcttccttagcctgtctcttccctcccctccttccttctttcatttttcttccttcgctgtggcagaaatgccagcacgtgcacctgtatgccctgaggaatgcc

SEQ ID NO: 115852 - DNA, 564 bp, Homo sapiens
tacctatttatgcctatcctcttttggaaatctraaagtgatttgaatataatttagtctcatttaagtctaaataagataattatatcaagtaaataagtacttgtaccagaaacatagaagctcctttatatttgatggtaattattagtattctagttacagactaatatttgacagtaaaacaggcaattgacaatggattagaaagggagattcaaattatgtggcacactcttgaaatttagtgagtttcaatgtagaaaaccccaaccatgttgggcacatgttgtcaggacctctggaggctgtgtcatgggtatgctcttaaccttggcaaaatgaactttctaaagtgattgagatctgtttcagatatttttggtttacagtaattaaaatcttgaaataacatactacttttggggaaatctatacctctgaaggagagtcatttgtgaggttctttgtttactgattatcctgatttctaattattttcttgggagttctggaaagctcctcaaggtaacttctcttcctatatgaaatactgttttgaaa

SEQ ID NO: 115853 - DNA, 453 bp, Homo sapiens
tgatgaagtgctttaattattatttaccatagaagaccacattttattgggatataatttcaaatttacagaaaatttccaacaataacaatatattaataataatacaagaatctcaccatattcatcaagtgtttaattttgcttcattcattttatcatttcctaattatcttttcatgcatattgcatttttmttctaaacctttttccagcaagttggggatatttttttccattaccataaaatacttcaatgtattttctaaccacagagtaattattatgatctggaaatgtagcattggcacaatactattattctatccataattcataaaaattttgtcagttattctaaaattgctgtttatagatatttgtatttcttggtacaggtcaagatgacttactgcatttaattgtcatatctttttagtttccttttattgg

SEQ ID NO: 115854 - DNA, 608 bp, Homo sapiens
attatctgtgaaataataatcttcctcttattatttcaatgggtgcatagaattccatkgagtgactctacgataatttattaatctaaaagaatgaatttgggaaatacttgtcttcaattttttttgcacctgttattttaagtaattcaagctgaatatctctgtaaactaatatcatattcataattatttctttcaaatggaatttgtgtccacatgtgtaaaattagaacagtatgcatatttaaggccaataatgtatttttagattataaaaaatcatcaaataagcatgtgctattttcttatacttattaaaaataactgaattagtttgacatctcagttgtctgaaccaaaatggttaatagttatgtccttaaattctaggaatattagttagcttgtagagtaatcattatttcacctaaagaccttaatcataaaagtgtcaaaatgaggacagcataggacctgaattctcatggccaatgtgaaaatagatatatacagaaatagagaaagaatggagcatgaagtagaatatagagtgcactgtctttctctctatatatgtaaaatacatgcacatgtattatgtgcat

SEQ ID NO: 115855 - DNA, 502 bp, Homo sapiens
tgactggccacaggaattctgaattcctctggccacaatgattggctcaacaaaagcatgttacccacccctcctcccccaggcaaatcggaactcttcctatcatgggcgagttgctgttaattggtataatcagctgtgaagatgatgtatgagctgtcaggtccattttctaggtggaaagagtttatctgtgaacacagccaagactgaagaaattagaacaaagaaaaggtgagatagtgtcctgatgatttatttcatatgttcccctagatccagccttgcctgaatgcagatgcaccattataccatgtcaaatgcagaacagtagrttgaactcaggtgctcatccaagcaaagaggtggcttggggttagtgtgtgtgtgtgtgtgtgtgtgtgtgtgtgtgagatgtgcctggcggaaggcatgcatcttgcaaatgcatatttagcagatattatacagcagtgtcatagattcagactggggaactcca

SEQ ID NO: 115856 - DNA, 432 bp, Homo sapiens
tatgaactcacagttccgtgtggctggggaggcctcacaatcacggtgaagggcgaaaggcacttacatcttacayggtggcagacaggacagaatgggagccaagcgaaagaggaaacccctgataaaaccatcagatctcgtgagacttactcactaccatgggaacagtatggggaaaactgcacccatgattcaattatcctccaccaggtccctcccatgacatgggaattatgggagctacaattcaagatgagattcgggtagggacattgccaaaccgtatcagcaagggaggaaatgtattggttcatgtagtcaggaagaattctcagatagcttttgtagaattgaaggaggtggagactgtctgcttccctctgcctggctccatcttctgctttgtccatgtggtggggaagatggcca

SEQ ID NO: 115857 - DNA, 615 bp, Homo sapiens
actcactcattcactcacccaatcagcaaacatacccgtgcagcttgatttcctgcatttcaggaggaaacggttgttatttagtttatgcaaaattctgtatagccctctgctagagccttatgcttctaaaattctgtttgctaaaatagtgttcagaagtagcttgtgttcacaaaccaaactcaatgtttccctaagatcaaattccctgcgacaaattttatccccaaattcggggaaaaaatgagaagaatgcaaarattaatccttggaggcccttaaataagcctttctttccctattttctgtttgctttttaagttttgtattcagagagtaataggtgaacccttctgtggctaattaaaatacatgtaaattgaaaccaatgttcaggccagtaattaaagtgaggtactctctgggtaatatttactttctagctcccagattgtgagttcagttcctcttcaagcagcactttttttttctttcttcctttttttttttaatcacagagattaaagcagcctgaatttacaatagcatcttgtgaaaggagaggggaaaaaagctgcagtggttttagtaaataatgcactttgatgtctc

SEQ ID NO: 115858 - DNA, 587 bp, Homo sapiens
ttttttaatgctttaaaatgacaagataaaatgatgggtctaataattgctctaattctgaaataatgatgagtatacatgatatttcaaaatatgtaacaatacaatgttatgaaaatacctgtgaattctattggtgacaaagtcacaggtactgtgaccactctggttattgcctttattcataattgaagaaaacactaactttcagttatagcagaggtcagcaaacttttctgtaaagggccagatagtaaatattttaggctttgtgagccatatggtctctgtcagcaactattcaactctgctgatatagcttgaaagcagccacagataatatgtaaatgaatgagcatggctgtgttcccataaaactttatttatggacagtgaaagtygaatttcatataagttttacaagtcatgaaatattattcctcttttgattgtgttttccaaccatttgaaaatgtaaaagacaatcagagctcatgggctatgaaaaaataggtggtgagccaaccagatttggcctgtgggccataatgtgccaacccatgagttaggggttagtgagaataaaa

SEQ ID NO: 115859 - DNA, 579 bp, Homo sapiens
atgatcttggataagagcagagtgggattttgaagtcagatacacttgtttttgaatcccaacactgtgactttaagaatttactcacttctgcatctctcatttctgatagaaaatagagacaatgagaatccctaccttaacagatattargatggttaactgggcagcaaaatggcatatccggtatagtgcctggcaccaacaataatagcttccttcccactttgggacagcacagagtacatgattctctgctacgtgaaagctcatctgacatctctatttagagggagggagagaaccaagccgagctccaaccaggcctcttccttgtccagtcctgatcctgaccctgcagtcctgaatcaactgtctccttcccagctcatttgatggaacattacaattttaaattgtcagtcatcagcacatttaaatgtcccaggactagaaaaacaccagaaggaattattgaaagctttattgatttaatcagataattttgcacaaattatggtccacaaaattctgggtgctttgtagtcttccatgagacagagtttcagtgtagcttaa

SEQ ID NO: 115860 - DNA, 500 bp, Homo sapiens
gttagaagcttggagcttccaacccccgcccctcctccccacccacccaacagggagggcaaaaggggtgaagattggatcagtcacyaatggccaatgatttaatcaattgtacctacataatgatgcctccttaaaaattaaatgatggggttgggaagcttctgagttggtgaacacatccacatgctgggagaggggcacactccaacttcatgaagacaaaagctcccatacttggagcccttccagacctcaccctatgtacctcttcatctggctgttcatttgtatcctttatcatgaactggtaaatgtaagtagagtcctttcctgagttttgtgagtcattctagcaaatgatccaacatgaattagcgaatttgggaactccaagtttacacttggttgtcagaagtatagggggcctgggacttgcgattggtacctgaagtggggccactcttgtgggactgagccatttaacatgtaggatttga

SEQ ID NO: 115861 - DNA, 432 bp, Homo sapiens
gaattcaaagtgcacatgtgtctgtgtataaagcgcatscccactgtatttatgaactgtagcaaagtccacaccttcaccatccattaatattgatgggccatgaagacgcttttaggtgggagggcatgatcatagctcagagttaatgggtgaaagaatcgatcccatttcaacctctagggaaaggctgaagttggagctggagaagggtcttgggtactgtccccagagtattagctgacctgggttcctagctctgctggtcatttgcagtgtaaacttgggtaagtcactctccctcactgagcctcagtttcttcatctgcacagaacagaggatctctggggttcctttaagttttgacatttcatgattctatgagagagaggcacattaaatgaagtggagaaaagaggttctcacgtatc

SEQ ID NO: 115862 - DNA, 601 bp, Homo sapiens
gcccacccttctaggcaaaagccactgagtccccaggatgagtaaactagggcagttttttcagattcacccttgggagagaacctacagactagacagtgaatcagtcacggagaacaaactcttggagaagctaagaaaaactcttggctcataaactctcacttgtctcataaacggccccaatccctccctaccatggcaatgtcaagtctagcccctcccctaaaaggtacatgaggtcttgtttttttacgaggaacatgcaagatcagggtcatttttaacttgaaagagagttttaaccagatcaaaaatgttaaagtggaagaaaggtgcttgttttaattatctattgcttcaggacaaaccgccccccaaaaaaagtggcttaagtaaaaaataactagttctcatgattgagtggggtgatgaggttcagctggacagttttactccctgagatgtcagctgggttctgtggtcatctgaaggttcatcttgactggacrtccctggtgacttgctcacacactggcactcggtgctggctgttggctgggagctcggctggagacatcaatagaagcacttcagttcc

SEQ ID NO: 115863 - DNA, 620 bp, Homo sapiens
gtactttctgctcaattttgctgtcaacctaaaacttctgaaaaaaaaatagtcaatttttcccccaagaatgcagactgggggcawtgttagcatgcctctcctatttggaaacacaaaacaatgtgtagaaatacacatggtgaactttttccaagatgcaatgcaagaacttaacgggaaaactgaaagaaaccacagaccttttgaaagaagcagcaggttgcagcctacaccgtgagccaggggaaaaaaggtaagtccccagagtataagaagggggagaactgcctctgggaaatacacttccaccagagaacccagcaatccacaccatggagggaaggccttaacacttcccagcactgaagctgatttagggagtggtggggaatatataaaaaggagcagcagtggggagtgctttgcatgcaatccctgtctccagcatgaatggagaaaagccattcctgattcaaccttgctggaatcttgtggaagcctgccagctaattcaggcagcggttgttggttgcaagaagctcccaactaagatttgtaatatagtctccactgaggacaaactcccttgggcagaaccagtggatgtgtgggaagtg

SEQ ID NO: 115864 - DNA, 620 bp, Homo sapiens
gtactttctgctcaattttgctgtcaacctaaaacttctgaaaaaaaaatagtcaatttttcccccaagaatgcagactgggggcaatgttagcatgcctctcctatttggaaacacaaaacaatgtgtagaaatacacatggtgaactttttccaagatgcaatgcaagaacttaacgggaaaactgaaagaaaccacagaccttttgaaagaagcagcaggttgcagcctacaccgtgagccaggggaaaaaaggtaagtccccagagtatragaagggggagaactgcctctgggaaatacacttccaccagagaacccagcaatccacaccatggagggaaggccttaacacttcccagcactgaagctgatttagggagtggtggggaatatataaaaaggagcagcagtggggagtgctttgcatgcaatccctgtctccagcatgaatggagaaaagccattcctgattcaaccttgctggaatcttgtggaagcctgccagctaattcaggcagcggttgttggttgcaagaagctcccaactaagatttgtaatatagtctccactgaggacaaactcccttgggcagaaccagtggatgtgtgggaagtg

SEQ ID NO: 115865 - DNA, 497 bp, Homo sapiens
aactaatgaacttctggcctgcagaactatgagagagcaaacttcagttgtttcagccaccaaatttgtgatcatttgctctgacagccacacaaatgaatacatatggaatataggtggataaaatagaatgtaaacatgagaagactataccaataaaaaaggttattaaatctgaattgtaggatgtgtgtggatgtataaggcatgacaagataaagcatgtgaaacaatgatgacaattacagctatagaaatgaatatagagtggtaacaaatttaagccacaaattagatgactcaaaacaacagtaattttcttcactcagagtccttgtggctagaaatttaaaatgaaggtgtcatgaagattgtgctcccttgtaagctccaaagaagaacctttccctgcctcttccaagcttcaagtattccctggggattgttggcattctytggcttgtagctgcatcagacactatgaattttgccttcat

SEQ ID NO: 115866 - DNA, 615 bp, Homo sapiens
ctctcaggtgttttacctgaagaagctttacarggggactatttgcagagggcagacatagttaaagggagcaacagtgatagtaaaatatccagagactagcaatggaagaaagatgttacagtctctttgcttagaggggggataagatagatagatggcattactaaagcccagtcaaagctggaatggagtagggaccaccctttaagaggtgtaatctaggaagctcacagccaccacaaaaccacaccaccaaagcaagaagaaagaggatgaaaactaccttaacttctgtctccttctcctttcttaactcctgctgctgcatttcatttgccaagcccaatcaggagtcaactggaaacagcacaaagattgcaattcatagaaatcagtcttccattgcaccaaacaggaaagagaaagtctgagagtggatctggaggaatggccaaatagagaataaacagcacatattgtgaaataaaaaccaaaatagacctagcaagataacgttggaaacagtaaaaataacacctaagaaaactaaattgtcaataaaaattatagaatattaaaaattataaatataaactatagaaacatacccag

SEQ ID NO: 115867 - DNA, 615 bp, Homo sapiens
ctctcaggtgttttacctgaagaagctttacagggggactatttgcagagggcagacatagttaaagggagcaacagtgatagtaaaatatccagagactagcaatggaagaaagatgttacagtctctttgcttagaggggggataagatagatagatggcattactaaagcccagtcaaagctggaatggagtagggaccaccctttaagaggtgtaatctaggaagctcacagccaccacaaaaccacaccaccaaagcaagaagaaagaggatgaaaactaccttaacttctgtctccttctcctttcttaactcctgctgctgcatttcatttgccaagcccaatcaggagtcaactggaaacagcacaaagattgcaattcatagaaatcagtcttccattgcaccaaacaggaaagagaaagtctgagagtggatctggaggaatggccaaatagagaataaacagcacatattgtgaaataaaaaccaaaatagacctagcaagataaygttggaaacagtaaaaataacacctaagaaaactaaattgtcaataaaaattatagaatattaaaaattataaatataaactatagaaacatacccag

SEQ ID NO: 115868 - DNA, 382 bp, Homo sapiens
tgatacagtcttgaagttttgaatttttacgggaaattccttctccccattccaagcccatgctgctgctttaggaaaactctggtggacagagttttcctaattctctcttcatgatttgatggtcycagctttctttaatggtctccattccaacttccttccacaaagtagtaaggcccaaagtcaaactttctgtcaacaattggtcattaaaagttgtctcactgccttatggtcagtatctgggcctcacatcctccagggagtcatacattagctaatttctttggtttgaagttcccttttcatttctggtggcacaattttcttcttttccttgccctttctcccctactccctcccttccatctttccttcc

SEQ ID NO: 115869 - DNA, 534 bp, Homo sapiens
ccaatcaccctatagtctgcacagctgcaggctatatagctatacaatctgcaggacacacacacacacacacamacacacataatataactatgtgtgtgtgtgtatatatatatatagttatatatagttatatatatacacctgtgtgaacacactgggttctaagctccagttttctgaagggatatgggttgccaggacaggaagagcaaaagcaagaacgtagatgagagtcagtcaggaagtaaacagatgtacagattaaaacgggccggtacatggacaaaaaacctggtctgacaaaaactggctttctgccataaaagactacaaaagatatacaaaaaaactttccacatgttggacaagagacagtacaggactgagataatttagaaaaggaaatgaatgagcgcaactccataactattatgactttcttcctggagaaccttcctggactgaagggcaaggaattggagccaaagccaaccacagcagtcttgctgaactgaggaaagagactggagt

SEQ ID NO: 115870 - DNA, 369 bp, Homo sapiens
gaattcttccttctctaaccaggcacagtccagcattacatgaaaacaggaagaggctatcttagctccttgtcccagaagaccattgctaacaacatgctccaattaactatctcttacccattatggagttatgaataacaatggagaaacacagaacatatttttctgctacattagactaayttccaaattcagggtgttagtcgtatatatttaacatacatgttaaccttctggttttataacaacatgaatttagaaggcctgtcattttttatgtctactgaaatttctacttctggtttctattagaaattaagctatacttaaaaaaatcaagtcacaatatgagttgattagaaagaa

SEQ ID NO: 115871 - DNA, 607 bp, Homo sapiens
gttttatacaagaaagtaaatttaaaaaagaaaaggtgaagaattctttagatgtttaagaattagaagcctttagatgtttaatctaaaatgacatgaaaaaggaacaaatgggcagagtacccgccagatctttgatgaaatttttcaggaagcgagagaaatacaaactgcttcttctcaaacttcctaagatatgaaaataccaaagcaaatatacttggcttgtctaagattaggggaatttcagatagagaaaggttctcatgagcctccagcaccagcactgaattccaaaatatctgcttttatttttttttctttttgcaacctttttttttttttttttttarattcagggagtacaagtgcaggtttgttatgtgggttgtgtattagtcctttctcacacagctgtgaagaaatatgagacactgggtaatttataaaaaaaggaagtttgaatcacagttcctcatggctggggaggcctcaggaaacttacaatcatggtggaaggcacctcttcacagggtggcaggacagagaatgggtgcccagcaaggtggaaagccccttttaaaaatatcggatcttgtgggaactc

SEQ ID NO: 115872 - DNA, 639 bp, Homo sapiens
tgctgccttaactatatacaggttttgttataagtatgctcttaattttctgattaaggtatttatatactttttgttcttagaaatgttgagacttagataataaaatcatgaacatttaagtaggttgttttttcacctaaaaagtttcatctgggccacgtatggtggctcatccctgtaaycccagcattttgggaggcctagagagagggatcacttgagccctgctcaactgagcagcatggcaaaaccttgtctctacaaaaacaaacaaacaaaaaaaccagtttcatctgtgtgaaccatacaaaactataaaatgcatttttctgccattgatctctcctaattatgtaatagtttattgttagaactaatattaaaatattagctattaattgtgagtactgcagacattttaagcgtgtcattatatttatacccccaaataatactataaagtaggtgctaacattcccacttgagagaaggctcagaaaagtttaatgccttggccaatgttacacagccagtaaataagtgatctggctaagactgaaagcaggcctatctgattctaaagtccatgcccctatgcaccgcactgtaatgcctctctcaccgtggaatgctcac

SEQ ID NO: 115873 - DNA, 639 bp, Homo sapiens
tgctgccttaactatatacaggttttgttataagtatgctcttaattttctgattaaggtatttatatactttttgttcttagaaatgttgagacttagataataaaatcatgaacatttaagtaggttgttttttcacctaaaaagtttcatctgggccacgtatggtggctcatccctgtaaccccagcattttgggaggcctagagagagggatcacttgagccctgctcaactgagcagcatggcaaaaccttgtctctacaaaaacaaacaaacaaaaaaaccagtttcatctgtgtgaaccatacaaaactataaaatgcatttttctgccattgatctctcctaattatgtaatagtttattgttagaactawtattaaaatattagctattaattgtgagtactgcagacattttaagcgtgtcattatatttatacccccaaataatactataaagtaggtgctaacattcccacttgagagaaggctcagaaaagtttaatgccttggccaatgttacacagccagtaaataagtgatctggctaagactgaaagcaggcctatctgattctaaagtccatgcccctatgcaccgcactgtaatgcctctctcaccgtggaatgctcac

SEQ ID NO: 115874 - DNA, 647 bp, Homo sapiens
actgcatccctttagccttcactaaaaaagcaagagtcagtttccatcacctgtttgcaagagaggccaactcagctcagctaaaatcaaatccatattcatcaaatctccctgtttggatcacttattttgttaaaatgaaaagtagtatttcaaagggattcaatttatgttccaagggacataagaaccattcttaaaatatgaacgattcctgcaataaattattagtggcaacctctggtcaggtctcttagaactgtttcagagaactaaagatgaatttgccatttctcattcccagagttgagaggcctacaagaatgagttttttaatctatgacttactgcctgttactaagtgattctggctgtgtcaataaatttgttcacagctctaattgtgttaatgaattgaacataattaaacttacaacatgtcatgagtttcttctggcagaattcagtagatttttcaaaaaaagatctctgtgkgaaaacaaataaatgtactgcacaactcctgccatcaccatagagtctccgtggacaaaagattggaataagaaattctgaaattggctgtatgtatttattcagatatttctatctgaataaagttttatttaatttgcaatcactgtgac

SEQ ID NO: 115875 - DNA, 647 bp, Homo sapiens
actgcatccctttagccttcactaaaaaagcaagagtcagtttccatcacctgtttgcaagagaggccaactcagctcagctaaaatcaaatccatattcatcaaatctccctgtttggatcacttattttgttaaaatgaaaagtagtatttcaaagggattcaatttatgttccaagggacataagaaccattcttaaaatatgaacgattcctgcaataaattattagtggcaacctctggtcaggtctcttagaactgtttcagagaactaaagatgaatttgccatttctcattcccagagttgagaggcctacaagaatgagttttttaatctatgacttactgcctgttactaagtgattctggctgtgtcaataaatttgttcacagctctaattgtgttaatgaattgaacataattaaacttacaacatgtcatgagtttcttctggcagaattcagtagatttttcaaaaaaagatctctgtggkaaaacaaataaatgtactgcacaactcctgccatcaccatagagtctccgtggacaaaagattggaataagaaattctgaaattggctgtatgtatttattcagatatttctatctgaataaagttttatttaatttgcaatcactgtgac

SEQ ID NO: 115876 - DNA, 546 bp, Homo sapiens
tggccggatatagaatatgcaggtacccgctagactatcctaaacaattagtctttaggctaggagagttaaaaggttttaagcaaggattgaaaaagtgaggtttatgtttttaagaagttttctctggatacaatgtggatactgaattttagagaggccagaatgaatggagaagagacaagtttgtgagcagtagtccaaattatatttaatgtagtttgttctacaagaatggcagtggatttggagagatatgaattaactttagaagtattaagaatgcagataatgttaaaacttgaaaatggattgagtatgatgttttctgattacttttaactttctgcaaaaggctactagatgaatggtattactcattgagactgggaaaagaagaaaagggctaaaattggragtcagttacagagaagaatccttgagttcaatcttgaacatgtttgagtttgaaatgactttaactcatccaattagatatgtcaaataaaatatagaatagaatataactgaatatagaggtgcatt

SEQ ID NO: 115877 - DNA, 583 bp, Homo sapiens
ccagtccccacctccgtcttcattggcattgcctttttctctgcatctctatttctgctcctcttcttataaggacacsagtcgttggatttagggcccactctaatccattaggatctcatctctatccttaactaattacatctgcaaagacgctatttccaaataaggtcatattctgaggttctgagtgggcatgggttttggaggggacactattcaagccacttgactgctgccattgctgcagtctctagaggtaaagggtaagcagcagacagcaaagtgagatggagaaggggcagagagccgacagggtttatatacaggattaatgagaggcatgaaggaaagagaggaatcaaagatgaccctagggttttcagcctaagcaactggaaaaatggagttgtcacttactgagagggtgtggttataggaggagcagatttgggtttgcagtgggagtagtataaaaagttttgtttggggcatgttcaattcaagatatctttagacatccaagtagagatgacaaatacacaattagatatgcagttgtctgaaacagtttgtcttggtg

SEQ ID NO: 115878 - DNA, 583 bp, Homo sapiens
ccagtccccacctccgtcttcattggcattgcctttttctctgcatctctatttctgctcctcttcttataaggacaccagtcgttggatttagggcccactctaatccattaggatctcatctctatccttaactaattacwtctgcaaagacgctatttccaaataaggtcatattctgaggttctgagtgggcatgggttttggaggggacactattcaagccacttgactgctgccattgctgcagtctctagaggtaaagggtaagcagcagacagcaaagtgagatggagaaggggcagagagccgacagggtttatatacaggattaatgagaggcatgaaggaaagagaggaatcaaagatgaccctagggttttcagcctaagcaactggaaaaatggagttgtcacttactgagagggtgtggttataggaggagcagatttgggtttgcagtgggagtagtataaaaagttttgtttggggcatgttcaattcaagatatctttagacatccaagtagagatgacaaatacacaattagatatgcagttgtctgaaacagtttgtcttggtg

SEQ ID NO: 115879 - DNA, 561 bp, Homo sapiens
ctggtgttttactttttaaaaagttttactgagatacaattcatataccataaattcacccttttaaagtgtgcaactytgctgggcatggtgactcatgcctgtaatcccagcactttagaagaccaaagcaggatgactgcttgagcccaggagtttgagacaagcctgggcaacataagcaagatcccatctctccaaaagttaaaaaaaaaaaaaaaattagccaggtacagtgccatgcgcttgtggttccagcttcacagctgaggtgggaggttcgtttgagcctgggttgttgaggctgcagtgagccaagattgtgccattgcagtccagcatgggtgacacagcgagaccctatctaaaaaaaaaaaagtaagtaaaaaataaaagatgcaactcagtgatttttatatatccccaaagctgtgcaaccatcaccacagtctaattcctgaacattttcattatgtaaaaagaaaccccatgcccattagcagtcacttcccatttctccctcacccaactcatgagaaacactaatctcttttttggtct

SEQ ID NO: 115880 - DNA, 590 bp, Homo sapiens
ggaaacgcttttccagaaatctcaagcatgtgtctagaagtgtatcccatggccatccataaccccatgggctctagggaaatgaatttttcagctaggcacactgtcatccctccttcaaaaaaagatgggccacrtccgaggtagagattgtagaggataccttttctggagcagtagaacttcaacagtctgaggggcctaaatccaagattttgagtccagaatttggtgccacttttcccttcgaggcaattaacattcagaaagcagtaatggagagaggctgagaaactagccagagttttcaactgcctcaaggggagtgggtgtgggattgggtgggtaaaaatattgagttcaggacctaaggaggaaagattttaagttggaactgggctataccctggaagtaacttttaattattctcttgattggattaaggtggtctgtccctagtctaaatgactaccaatatgtcacacctcccaatattcacaatcttgtgtagttcctccccacactgacgctgagcttggccatgagacttgctttggccagtgacacattagtaagcatgataaaagta

SEQ ID NO: 115881 - DNA, 620 bp, Homo sapiens
taccatagcatgcatacctgaaaccaccaacatgccttgtgctgccccttgaacttctgcttcaggtgcttctaaaaactcagtagagttgccccactccttgasaggtggattctcagtaatccctgcttcttgggtttgttaacttcaggtagaatctggagttactgcactgaggggcagagtctccatcaggtcccctaaatgcagggaagataagtgcctggtatttgcagtttcttttatgggcactggactcaacttcacacatttggtaattcccaggcataagaaggaggcttagaaggcaggtggcaacattttatattcccttcagcattacctctcagtagcgcttatttccctgcttaaaaattatatttactctatttggctgtttctcactccctgaagtcctttttaacccagtatgaacgaggaagactgctcctaatcgcctcctgcatcgtgcagcatgaccatgccttcatcatcacaatcatgccagaaacagctcacttcattatcaatcaaacccattcatttaggtgtgtggttacagcctcttccctcaatgactggccaaccaagcttcagagtttaatcatgaaaagtcagtg

SEQ ID NO: 115882 - DNA, 618 bp, Homo sapiens
catatccaataggaaattaacaaagatcatttacctttgaattatattgaaatattccatccagaaattctttggtcattatataagtcagggtacttttaatcataagtgatagaacctttgggaagtgttgattaatctaaccaagccagaggaagggcagtaacaaagccaaatccctcaaactagggacctgaatgtagcaaggactccttccccacatcttccatcctgtctccggcaacctgaaaggaatgcctaggggtgtatgtgtgtgtttttctaggagttgcccacaatggctaaggggcccactccttcctttgctgatctctgatcaggaaatcagagtcatgctaagagataaatctcccattctgactctatggctagagtgagggggaagagaggaagctggccaataccatggaagtgctatttccctagcttgatcatttgttcgaawaacattattgacatgtttaatattattagtccaagaagattccaggaatactcttgcaatacactcaccaatatttaataggtactgcctgagtaaaacttgtaaaatgaaatgtgtttgcttaggcccttggtccaattctcaatgctgtc

SEQ ID NO: 115883 - DNA, 487 bp, Homo sapiens
cagaagttaaatacaatagagaattttgaaaaacaaacaaacaaacaaacgaaacggaatatttcagggttgctagaatgaatggatgaaagtattaaagtgtaaaattgagtcctcttgaaggcgaaggtaaagtaacataaaggaatatactaacatccaatcaaattagaataacaaatatttactgagttaagacattattgaatgtgatgaatttgaagggacaagatataaacctataaaaaggtacataacagaaatcacattaattgcttctataaagctggctgactaggaagtrtttaatgcaaactggaactggagaaaccaaagctgggatgatccaatcggagtaattcaatggccaactaaaatggcctttattagtgggagttaagtggagttacttccagatactttcactgtcccttgtttctgcgttgttcccttgtggtacccactaaaatccgtttacttttacctg

SEQ ID NO: 115884 - DNA, 554 bp, Homo sapiens
aaaagggtcttagaagccatttagttgattcccactcttattcaaaaaggacactgaagatcagatgcctacttttaggagggtgtacaaaaggccaggccctagtaagtggctktcctggctgagtaaagagttgggttggaaagagtatgaatcaggaggcagaaaactttgattcaggtgcttctgcctccatgtcctttgggaagtcatattctctctaagcctcagacttcttgacagtaaaatcagggatacaggaaggaagcaatatgtattaagtctcaatatttcttaggcactgtgctaggcaatagttttccatgattcatttaaatggaattgttattgagattcaatgatatgccagtgagtgaattatttaagatgcatgttgccagtcctttgagtcagcaggttagaaattaggcttaaaaatccacatttttaactgagatgatactaaggtagattattctgggacagctgtatttcagaccagactttgcaaaacagctactcaggtagagtctggaatgcaaatatgaaaaagc

SEQ ID NO: 115885 - DNA, 554 bp, Homo sapiens
aaaagggtcttagaagccatttagttgattcccactcttattcaaaaaggacactgaagatcagatgcctacttttaggagggtgtacaaaaggccaggccctagtaagtggctttcctggctgagtaaagagttgggttggaaagagtatgaatcaggaggcagaaaactttgattcaggtgcttctgcctccatgtcctttgggaagtcatattctctctaagcctcagacttcttgacagtaaaatcagggatacaggaaggaagcaatatgtattaagtctcaatatttcttaggcactgtgctaggcaatagttttccatgattcatttaaatggaattgttattgagattcartgatatgccagtgagtgaattatttaagatgcatgttgccagtcctttgagtcagcaggttagaaattaggcttaaaaatccacatttttaactgagatgatactaaggtagattattctgggacagctgtatttcagaccagactttgcaaaacagctactcaggtagagtctggaatgcaaatatgaaaaagc

SEQ ID NO: 115886 - DNA, 554 bp, Homo sapiens
aaaagggtcttagaagccatttagttgattcccactcttattcaaaaaggacactgaagatcagatgcctacttttaggagggtgtacaaaaggccaggccctagtaagtggctttcctggctgagtaaagagttgggttggaaagagtatgaatcaggaggcagaaaactttgattcaggtgcttctgcctccatgtcctttgggaagtcatattctctctaagcctcagacttcttgacagtaaaatcagggatacaggaaggaagcaatatgtattaagtctcaatatttcttaggcactgtgctaggcaatagttttccatgattcatttaaatggaattgttattgagattcaatgatatgccagtgagtgrattatttaagatgcatgttgccagtcctttgagtcagcaggttagaaattaggcttaaaaatccacatttttaactgagatgatactaaggtagattattctgggacagctgtatttcagaccagactttgcaaaacagctactcaggtagagtctggaatgcaaatatgaaaaagc

SEQ ID NO: 115887 - DNA, 394 bp, Homo sapiens
acttttgtctaggttcatctctgtgaagtggagggaatggaaaaattcaaagacaaagattttgccctagatgtcagtgccaaccagcctgtcctggtggctgtgaaaatgctccgagcagatgccaacaagaatgccaggtctgtggtctacattttgaattttcctttakgtatttcatctttaggaccaggaatactcctggatacttctgagcaattttttcttttgagatgggaaggtcagtgagctgcctcccatttccactgttatcctttttcttattccgatggggtcggcagtcctcatctttttctccacctctctcaaacacaaaggtacattttccattgtacttgccacatatttacttcctaaccccctgtgcacaagc

SEQ ID NO: 115888 - DNA, 502 bp, Homo sapiens
tgggaaaatatttgtaacatagaagccaattggataattaacccactatttaaataatgtgcacaaatcratagtaaattttaatctcacccatagtaaaatgaaatcaaattaaaagcacatgagttatcacctttttgcttatcatattatcaaacaccaaaaagttttgttcagggtgtgaaagaacaggcactttcatttcatattgtttgtgatgtaaattgttaattcctttgaaaagcaatttgacaataccaaaattttaaatgcatatacctttaataattctacattttgaaatttatcctaaagatacaactcattaatatacctaaagatatttatacaggactgccatcacttatgcaaaatgtgtactaaccgtgctttagaatttaaaattgcttggagtttagaaaggtaagttggtgtatacaatacagtatgttttgcaataattctactgggacctgggataacaacctgcaatcaaacctag

SEQ ID NO: 115889 - DNA, 502 bp, Homo sapiens
tgggaaaatatttgtaacatagaagccaattggataattaacccactatttaaataatgtgcacaaatcgatagtaaattttaatctcacccatagtaaaatgaaatcaaattaaaagcacatgagttatcacctttttgcttatcatattatcaaacaccaaaaagttttgttcagggtgtgaaagaacaggcactttcatttcatattgtttgtgatgtaaattgttaattcctttgaaaagcaatttgacaataccaaaattttaaatgcatatacctttaataattctacattttgaaatttatcctaaagatacaactcattaatatacctaaagatatttatacaggactgccatcacttatgcaaaatgtgtactaaccgtgctttagaatttaaaattgcttggagtttagaaaggtaagttggtgyatacaatacagtatgttttgcaataattctactgggacctgggataacaacctgcaatcaaacctag

SEQ ID NO: 115890 - DNA, 548 bp, Homo sapiens
acataaattatgaatgtaatgttgaagtaaataaacataaaataatttatttgacacatttttataataattatatggcatrtttctttttagctgtgtcctcatgacttcccgaaggctccacctccaaataccatcacattattgggggacacaaatattcagtccatagcaatattagttaaaatgccttactggaattcgacttgacttctctggctcctcctgaggagaaaagacaggtctaagtgtagatgaaacaccatccaagaaaatgtgctttgcttcttctccctttataagggcctcatattaagagattgtgtgctaagttagattaaccacgtgtgaagccaaattggaataggctgctttgaaatcactgaagccagtccattagccagtctacatttgtgtttgccttatgtgatgaatttcattgatgtgagtttatactaatggctaattgacagttcaaataagcagggtcagattagaattgagatgtgaagtgcagattaatgtttgtcaaatttggggggtcatag

SEQ ID NO: 115891 - DNA, 603 bp, Homo sapiens
aagaaaggggacttatgaaatttactcctcttatagagaactaaaaaataacacgaaattatgccagaggttcactaagctctttaaatgtcctgatttcccaaggcaagtggcagctttcaacttgtcctatttattttaagtgttgtgcaaattatatgaaaatagccgattgcataatatatttttctagttgtggttgaaaaaatagcacttacttagaaaaatccccagagattttcttagatcatttctccataaggaggaataattattctactttgggtagatactgtctcatgctcagggaatacatgtacaacaaatatgaaatcctatgaagaatggaatagaaatactatttcagtatattcagtagtaaagatattttcccttgaagtatatggggtttgaaaaaattatacagtaacattttctaraacttactttggatccacgatatattctgatggactacataaagtcacattgctaatctgtaaaagatgatggttgaaagaatttagaattatcttgttcagacatctgtaggttaataccattttgtgatattaacaaaataaatagtgaatattcatccac

SEQ ID NO: 115892 - DNA, 574 bp, Homo sapiens
ttgcccaaggagtttatgtattcctgctgtattagcaaggcaatgcatagtataaagaaagtgcagatagatttctagattaaaaagcaatgatatgtgtatatctctggaggtacaccaaatgattkatgaagaaacaagagataattttagaatttttatttttgcattaaaaaattatacattgatctcactaattttatgttttcctctccagatgaattttgtttgtgtatatcatgatgatttctattttaactttcatatatatgttttactaaataataacataattttgaaatacttaaatctttttaaccagtatattgtgcgtattttctgcaatctatttatttgcttgatatgttactgaggcttttgtgtgttgacatatgtcaccatagttcattcattttaaccataatgtagtattctgtgatttaaatataattctactgttgatgaacattttaaatgttttttattttaaaacatttttgatttttcacaattgtacgttgttactaacaacatcattataaaatcttttcccacctctctgtaagaggttttt

SEQ ID NO: 115893 - DNA, 549 bp, Homo sapiens
tcgtttcatttgttatggctgtgtattattccatggtgtatacgtaccacattttctttacccaatccamcaacatgggcacctcgttttattccatgtctttacaattgcaaatagtgctgcgatgaacatgtacatgcctgtgtctttttggtatagaatgatttactttcctttgggtagatatctagtaattgaatttctggactgaatggtagttctattttatgttatttgagaaatctgcaaactgttctctacagtggaagaactaatttacattcccgccaatggtgtataagtgtttcctttttttgcaacctcaccagcatgttattttttgactttttataataggtattctgactgctgtgagatggtatctccttgtggttttgatttgcatttctctggtgattagtgatatgcagcattttttcatatgtttgttggctgcttgtatgtcttcttttgaaaagtgtctgtttatgtcctttgcctactttttaatggggttattttattttttcttactgacttgtatcagtt

SEQ ID NO: 115894 - DNA, 541 bp, Homo sapiens
agccttttaacattaatagacttaacaggaaagatcagctttaactctacctgtaagtaaaatattgtgacctgtggtcatgagtttttaattgatacagcctattttaacttttcacagatgtcctattggaacagcactttaagatacattctgacaacttcagttaagtagttttggttcaggatctgtaaaggagagagtaaaggggtaaagagttcttgttyagtgaacttatttagtggaaagttggatttgattttcaccatggggagtcacaatgaaaattgctactgaaatagtcctttattatagcatttcagacctagttgaaaggagatgaatcacacagggaaactttagttcacatgtggtctgaagggatagactgcaagggacaataccatgatttgtattagtggatgttaaaaggagctttgattatagcctgttaataattttatggtgatctactatgcagtcaagatttacataattatatcacattaaaaatgatgatgaaaaataactgtatcagaaa

SEQ ID NO: 115895 - DNA, 541 bp, Homo sapiens
agccttttaacattaatagacttaacaggaaagatcagctttaactctacctgtaagtaaaatattgtgacctgtggtcatgagtttttaattgatacagcctattttaacttttcacagatgtcctattggaacagcactttaagatacattctgacaacttcagttaagtagttttggttcaggatctgtaaaggagagagtaaaggggtaaagagttcttgttcagtgaacttrtttagtggaaagttggatttgattttcaccatggggagtcacaatgaaaattgctactgaaatagtcctttattatagcatttcagacctagttgaaaggagatgaatcacacagggaaactttagttcacatgtggtctgaagggatagactgcaagggacaataccatgatttgtattagtggatgttaaaaggagctttgattatagcctgttaataattttatggtgatctactatgcagtcaagatttacataattatatcacattaaaaatgatgatgaaaaataactgtatcagaaa

SEQ ID NO: 115896 - DNA, 569 bp, Homo sapiens
gtgtatgtctcagtgaacagagctaggaatatatgtatgtatacacatacacacatacatacacaaatatatatccatctatacacctctctatatgtgtcccacacatatctatatctatgtctatatcaatctacatgtgtaatagatcaattgatcaataaacggatagaatatacatagattgatagagaaatacagatgtgtgttggtggatatatatggacaagtgtttatacacgcatatattgaatagacatgtatatgtatatacatgtatattaacacatacacatacatacatatatatacatataagtgtaatcatgagttcattctgataactccaattccaatccagttccacagggcttattctagtcttcctgctttccaaatctgtaaatttcttttggacaatgggaaatctgtttcttattatgcacaacatatatacttattttrctaaatcctagattacacagaaagtaatttcaaaattgcttactgttacctttgtgggggaaaagaaaactacaatcagaattcaacatttgtttacaattctt

SEQ ID NO: 115897 - DNA, 608 bp, Homo sapiens
gctggaaaatacatgtaaaataatgcacttctctgaataaattatcagattgatgagtatataacaataatattgagatcactttacatttgcacataatgtggcagtttagaaagcacattcataagcatcactttgctcaatcttcataatcctctgggtattattgttcatattttatcgatgggatcccacaactcagagaggttaagtgacagctaataagggaatagcaaggtttagtctctggtattctgtctccccacacccttttcagcagtcacttttaccagaaataaccaaacaaaaagatggccctcattatcttttgcctatgctttttcaatggctttttatctattatctctggcaccaatcttccctaccaccctctcttattctcagaagcaattcacatcagcactttcctgatggacccttctgaaaatgtctttgcctacaagttaaatttaactattactttgtcatccagtgtccttcacaatcagacttcaatctggcctcaccckagttcttcattctccggttcctgcctcgcagcctacgttacagccacactgacctcatgattccctcagtctactgtg

SEQ ID NO: 115898 - DNA, 599 bp, Homo sapiens
attgaaaacatcccacaattattatgcatgaatttccctatggttagagatattgcttctggttatcttaactgtgtgtatataayaaaaagtgggatccaaagtctttttcgtgcttatgggtgagaaaatagtgagggggggcatatggagatctgaagatgaggattgagcaaaatggactgccatggggcaatgcacatgtgaaaatagaaatgttaatgaaatatagggaaatatagtgaatgaaatatatggaaaaatgtatggaaaatagtggcgttggggcagggaaggcaagaggttgagaggaaaggagaaggggctatagttaatgcaacctagttgggtagtgaaagagaatataaaaccaaggcccttacaaaataaccagatgcagaaaatataggagtactgtggtttggcaccagtcaatataccaagatgcagaatgaactggagaaaattataatgcagtttatcagcaggaaggacggtctacattcttagaagcctggtctcctagtgctgtaggtactataggaaaagctgggcaaagatgggagaacaaaataaaatgaaaagcgaacattagcatt

SEQ ID NO: 115899 - DNA, 599 bp, Homo sapiens
attgaaaacatcccacaattattatgcatgaatttccctatggttagagatattgcttctggttatcttaactgtgtgtatataacaaaaagtgggatccaaagtctttttcrtgcttatgggtgagaaaatagtgagggggggcatatggagatctgaagatgaggattgagcaaaatggactgccatggggcaatgcacatgtgaaaatagaaatgttaatgaaatatagggaaatatagtgaatgaaatatatggaaaaatgtatggaaaatagtggcgttggggcagggaaggcaagaggttgagaggaaaggagaaggggctatagttaatgcaacctagttgggtagtgaaagagaatataaaaccaaggcccttacaaaataaccagatgcagaaaatataggagtactgtggtttggcaccagtcaatataccaagatgcagaatgaactggagaaaattataatgcagtttatcagcaggaaggacggtctacattcttagaagcctggtctcctagtgctgtaggtactataggaaaagctgggcaaagatgggagaacaaaataaaatgaaaagcgaacattagcatt

SEQ ID NO: 115900 - DNA, 522 bp, Homo sapiens
tagtaaagtaacaaatatttttgccatagacctgtctgattatgcaaaagcaggagatcttttcttactgttgactttataactttacctcagctccctgggcctcagcctccttctctgtaagattatagaactgaactagcatacagccagggtccttctggctctaaaattttatccatctatcatccttaatcagagaataatttgatayatatttctatatgcttttttgttctaagctattgttttcattaagtattgtatctatttaatttactgttttaaaaccgctagtaaagcctccttttttaccaaagcgtttaaaaatattgtctctgggatttgtttctttttccattaaatttagataactttgttcattttcataaagttctagaaaatttcatgtatgtcttctgtgttcacgttttctatgaacatcttcattgcacttcagtaggtcagagtaataagaggttttctgtttatccagatttataaaatgagcgtattaaaagg

SEQ ID NO: 115901 - DNA, 546 bp, Homo sapiens
ttagaaggtggccttaagcaaatttttgaagaaagartaggagttggccaggaggagggctcacagagggtgtattgtactcgggggggcagaaagtacaaagaccttgaacctgtaaattgttggtactttcaaagtggctagagtgtaataacgtgagacgagttgggagtggttcttatagaaatcttgtattttattttaagggtagcatgaccatgtaatttattgtcaaaaacaggacactttggagaactaaagtggacgttggtgataattaagctgcagcaataggtgtaaaccaggacttgcccgaagaaaaccagtacaaattgttacctacttaaatcatatctgaagataattaaatccttgaataaggagagtcataaaattcgattaatggttttgaaatattacaccaagtactgtgtgcagagtggtttataagagaacaacaatggaaacagacgcttgcccgggtctagatgaggaataagatgaaaaacaaaaaaaagaggcagatttgaaattcagtttagatgt

SEQ ID NO: 115902 - DNA, 546 bp, Homo sapiens
ttagaaggtggccttaagcaaatttttgaagaaagaataggagttggccaggagragggctcacagagggtgtattgtactcgggggggcagaaagtacaaagaccttgaacctgtaaattgttggtactttcaaagtggctagagtgtaataacgtgagacgagttgggagtggttcttatagaaatcttgtattttattttaagggtagcatgaccatgtaatttattgtcaaaaacaggacactttggagaactaaagtggacgttggtgataattaagctgcagcaataggtgtaaaccaggacttgcccgaagaaaaccagtacaaattgttacctacttaaatcatatctgaagataattaaatccttgaataaggagagtcataaaattcgattaatggttttgaaatattacaccaagtactgtgtgcagagtggtttataagagaacaacaatggaaacagacgcttgcccgggtctagatgaggaataagatgaaaaacaaaaaaaagaggcagatttgaaattcagtttagatgt

SEQ ID NO: 115903 - DNA, 511 bp, Homo sapiens
tgaacccattaatgtagcttcataattattgttttattcatttatcttttaagtcacatagaaataaaaagaggtattacaaatccaaaatataataataatggcttttatatttacctatgtatacttttactgttgttatttacttcttcatatgatattgggycactgtctagtgtcctttcatttcagtctgaggaacttcctttagcatttctcattagcaaggactaatagcaatgaactccttcagcttttgttacctgggaatgtcttaatctctttcatttttgaggggtaattttcctagatataggagtcttggtttacattttaatatagcctcccactgctttctagctttcatatttcctgatgagaaattggctgttaatcttattgtggtgtccttgtacatgacaaattgttttttcctgtttctgctttcaagagtttttttttttttttttggcttttgaaaatttggctcaatatggatttccctcagttt

SEQ ID NO: 115904 - DNA, 295 bp, Homo sapiens
gaattcattattttatctatttgatattaatgtttaaacacttctaaaattctaattctgataataatggtttatcaaactaaaaattcttctgacagtaacaataaactctgcactctccataaaaatamtgcttgatggcactgcaagtttatgaaaagcataaagaaagtggaggagatagaatcttttaaaaagggaaacatatcatgtgaatctatatttaattgacttttccattgaaggcacattccagtcaatgaagcacatagggaccatagcttaagtagtaaat

SEQ ID NO: 115905 - DNA, 600 bp, Homo sapiens
aatgttgcttaaaaaattaaggaatcattaaggaaaaagtaccaacttattttcgaatggtgtgtgtgtgtgcatatgtgtgtaagcatgtatatgtgtgcatataacgatgctgaggcactttataaatctgaaaaataaaatggggtgacttggttaaagtgtgataaggtttggctatgtccccacccaaatctcatcttgaattgtagtttccataatccccacctgttgtgggagggacccagtgggagataattgaatcatggggatgtttacctccatgctgctgttgtcatgctagcattaggttctcacgagacctaatggttttataaggggcttctccccgtttgctcagcatttctctctcctgccgccatatgaagaaggacgcatttgcttccccttctgccatgattataagtttcctgaggcctccycagccatgtggaattgtgcaaattaaacctctttcctttataaattaccctgtctcaggcagttttttatagcagtgtgagaatggactaatacaaaatgtaaagatatctgtataaaataagtaccatataatgatgttgcatatagataaacaaa

SEQ ID NO: 115906 - DNA, 462 bp, Homo sapiens
acttctgcatatggctagccagttatcccagcaccacttactgagtaaggaatccttttcttattgcttgtttttgtcaggtttagcaaagatcagataattgtaggtgtatggtttttgcttaggattgccttgtctatttgagcaactttttggtttcatattaattttaaaatagtttttctagttctataaaaatgtaaattatagtttaataaaaatagcattgaatctatkaattgctttggggaatatggacattttaacaacatcaattcttcctatccatatgcatgaaatgtttttccatttctttgtgtcatctctgatttctttgaatagtaacttgtagttccatttctttgatacctacttttccgagaatttgtatcaaaagagatgttgggttttattgaaaactttttctgcatctattgagattatcatttggtttttgtttta

SEQ ID NO: 115907 - DNA, 556 bp, Homo sapiens
ccaacactataccaccaataaatatcagaaccaggatttatacctggtttaagtgatttccaaggccaaagtgtggacaacaggattttaggtgaaacacaagttaacaaatgtatttcaatagttattgtattagtctgttttcacactgctataaagaactgcctgagactggataatttataaaggaaagaggttttaattgactcatagttcagcatggctggggaggcctcaggaaacttacaatcatggcagaaggcaaaggggaagcaaggcaccttcttcacaaggcagcaggaatgagaacaaatgcaggagaaactaccaaacacttataaaaccatcggatcttggccgggtgcagcagcttattcctgtaatcccagtactttgggaggccgaggcaggtggattacttgaggtcaggagttcaagaccagcatggccaacatggtgaaaycccttctctactaaaaccacaaaaattaaccaggctggtgcgtgcctgtagtcccagctactcaggaggctgagatgggagaattgcttgaac

SEQ ID NO: 115908 - DNA, 528 bp, Homo sapiens
gagtgctggtggttgtggttctgtgaataatggattgttccagctaaagggaattacacagtatccagtccggcgggctytcagttgagatgtgacggtacagcagtgcctgaggcaggattggagtcccgaacatgggaagaccaagaacatgcttggggcaccagcaaagtagacgcatcaaaaaaaaaaaaaaaaaaaaaaaaaagactcatttggacatttttttaaaaagcaccaggaaaggatagaacgttggaatttgctttaaaataatctggctgggaagagtggaaagataaagcaagaactgattataaaatgataaatgttgaggctgagtgataggtacatggaagtcagtttattatactgtctgctttggtatatatttgaaccttttaatggtaatttttaaaaacatcgaagcatcatagaaaaattaaaactttgttgcaattccttatactgaagttttttttcagtttggaactgggttaaagaaaattcctaagtgaggctgggctc

SEQ ID NO: 115909 - DNA, 528 bp, Homo sapiens
gagtgctggtggttgtggttctgtgaataatggattgttccagctaaagggaattacacagtatccagtccggcgggctttcagytgagatgtgacggtacagcagtgcctgaggcaggattggagtcccgaacatgggaagaccaagaacatgcttggggcaccagcaaagtagacgcatcaaaaaaaaaaaaaaaaaaaaaaaaaagactcatttggacatttttttaaaaagcaccaggaaaggatagaacgttggaatttgctttaaaataatctggctgggaagagtggaaagataaagcaagaactgattataaaatgataaatgttgaggctgagtgataggtacatggaagtcagtttattatactgtctgctttggtatatatttgaaccttttaatggtaatttttaaaaacatcgaagcatcatagaaaaattaaaactttgttgcaattccttatactgaagttttttttcagtttggaactgggttaaagaaaattcctaagtgaggctgggctc

SEQ ID NO: 115910 - DNA, 528 bp, Homo sapiens
gagtgctggtggttgtggttctgtgaataatggattgttccagctaaagggaattacacagtatccagtccggcgggctttcagttgagatgtgacggtacagcagtgcctgaggcaggattggagtcccgaacatgggaagaccaagaacatgcttggggcaccagcaaagtagacgcatcaaaaaaaaaaaaaaaaaaaaaaaaaagactcatttggacatttttttaaaaagcaccaggaaakgatagaacgttggaatttgctttaaaataatctggctgggaagagtggaaagataaagcaagaactgattataaaatgataaatgttgaggctgagtgataggtacatggaagtcagtttattatactgtctgctttggtatatatttgaaccttttaatggtaatttttaaaaacatcgaagcatcatagaaaaattaaaactttgttgcaattccttatactgaagttttttttcagtttggaactgggttaaagaaaattcctaagtgaggctgggctc

SEQ ID NO: 115911 - DNA, 557 bp, Homo sapiens
ctccatgcccactaccctgcccagcgtctagcaaccaacattctagtstctatctccctaagttcaattaatttttaggttccacaaattggtacattctagaatttcactcatcatgtttactatgaaagggaaaccatcacagagagtgttgacttcacttcttatttgcagatatagttactgtttcattagaaactgtgtaatgtgatcattttgagaaaaaacagtcaagatttaggtgaacagaaaacatactggaatcttatgtagcaaataaaaaggaataactgaacagatgagggaatgagatggctctttgtgctggaatgaaaagatgaagtatctgttgcctcctagttctatgatattttattccctttatatataattaaataatggcagtttctataaactctctaataatatgccaaaaactgataatcattctgtatacctttctctatgtaagcaccatatctaatttatctataagtcttgccgattacacctttaaaatataacactaatatatccatatttctccaacttttcta

SEQ ID NO: 115912 - DNA, 557 bp, Homo sapiens
ctccatgcccactaccctgcccagcgtctagcaaccaacattctagtctctatctccctaagttcaattaatttttaggttccacaaattggtacattctagaatttcactcatcatgtttactatgaaagggaaaccatcacagagagtgttgacttcacttcttatttgcagatatagttactgtttcattagaaactgtgtaatgtgatcattttgagaaaaaacagtcaagatttaggtgaacagaaaacatactggaatcttatgtagcaaataaaaaggaataactgaacagatgaggkaatgagatggctctttgtgctggaatgaaaagatgaagtatctgttgcctcctagttctatgatattttattccctttatatataattaaataatggcagtttctataaactctctaataatatgccaaaaactgataatcattctgtatacctttctctatgtaagcaccatatctaatttatctataagtcttgccgattacacctttaaaatataacactaatatatccatatttctccaacttttcta

SEQ ID NO: 115913 - DNA, 557 bp, Homo sapiens
ctccatgcccactaccctgcccagcgtctagcaaccaacattctagtctctatctccctaagttcaattaatttttaggttccacaaattggtacattctagaatttcactcatcatgtttactatgaaagggaaaccatcacagagagtgttgacttcacttcttatttgcagatatagttactgtttcattagaaactgtgtaatgtgatcattttgagaaaaaacagtcaagatttaggtgaacagaaaacatactggaatcttatgtagcaaataaaaaggaataactgaacagatgagggaawgagatggctctttgtgctggaatgaaaagatgaagtatctgttgcctcctagttctatgatattttattccctttatatataattaaataatggcagtttctataaactctctaataatatgccaaaaactgataatcattctgtatacctttctctatgtaagcaccatatctaatttatctataagtcttgccgattacacctttaaaatataacactaatatatccatatttctccaacttttcta

SEQ ID NO: 115914 - DNA, 557 bp, Homo sapiens
ctccatgcccactaccctgcccagcgtctagcaaccaacattctagtctctatctccctaagttcaattaatttttaggttccacaaattggtacattctagaatttcactcatcatgtttactatgaaagggaaaccatcacagagagtgttgacttcacttcttatttgcagatatagttactgtttcattagaaactgtgtaatgtgatcattttgagaaaaaacagtcaagatttaggtgaacagaaaacatactggaatcttatgtagcaaataaaaaggaataactgaacagatgagggaatgagatggctctttgtgctgraatgaaaagatgaagtatctgttgcctcctagttctatgatattttattccctttatatataattaaataatggcagtttctataaactctctaataatatgccaaaaactgataatcattctgtatacctttctctatgtaagcaccatatctaatttatctataagtcttgccgattacacctttaaaatataacactaatatatccatatttctccaacttttcta

SEQ ID NO: 115915 - DNA, 596 bp, Homo sapiens
ttaatagatatatcttgaaagataaaaggctacaaatatttttctgaataaaatgatatagagataaatagaaaaatacaatcatgtgtaccctgttaatgcatatacagaactttgttcatgctagaaattttagtttacatttttttattctgtattgggagggtgagatgtgtaaatttataggcggttgatatgggaattatattcattactgtaattatayggaaaaatatgttcttcaatttttatttcttatattttgctgtgctgtttaaaaatccagtagtgtttcaagttggtttggagatttaattcattttcggttctaaaggttcaagtttatctcattagtttcttgacaacacatttaatttagcaacggacattagggaaattgttctggatgacataatttagtgtaatgtaatctgaaggattaaatctagtgtttgttacttaactcacagtatgctttcaaatgagtgtgagcggcctgtactcactgaaggcagtgcctaaactgacatagtttaaactgtcaatgaatttaatttctaaaaaaatcaatctgtcatgtcatctataaatcactc

SEQ ID NO: 115916 - DNA, 596 bp, Homo sapiens
ttaatagatatatcttgaaagataaaaggctacaaatatttttctgaataaaatgatatagagataaatagaaaaatacaatcatgtgtaccctgttaatgcatatacagaactttgttcatgctagaaattttagtttacatttttttattctgtattgggagggtgagatgtgtaaatttataggcggttgatatgggaattatattcattactgtaattatatggaaaaatatgttcttcaatttttatttcttatattttgctgtgctgtttaaaaatccagtagtgtttcaagttggtttggagatttaattcattttcrgttctaaaggttcaagtttatctcattagtttcttgacaacacatttaatttagcaacggacattagggaaattgttctggatgacataatttagtgtaatgtaatctgaaggattaaatctagtgtttgttacttaactcacagtatgctttcaaatgagtgtgagcggcctgtactcactgaaggcagtgcctaaactgacatagtttaaactgtcaatgaatttaatttctaaaaaaatcaatctgtcatgtcatctataaatcactc

SEQ ID NO: 115917 - DNA, 644 bp, Homo sapiens
ccacaatctatttcatacattcacacacacacacatagacscacatattcatttactctctccatttgagatagtgaagattatttctcaaagggaataaaaatgataggcatattaatggattaaatataaagatatttgaaaaggatagaggaaagactcagtgttgaggaagagcaaagtaagtatcacttttgagtcacagattgtaaaatgagaaatatattcataaagaaaagaaaatagacattttagataattctaattcatgaatctctatccagctgattattattattttactatcttccaataaaagatttctttcttgattcttgcttttttaattatgaaaaaataaatttaagtcaagtagctgagcctatcaaagaaaacaggaaatgtaatttttaaaaggaagaattaatatgaaggtttggaagcatgtggtaaaaactattgggttacaattccataaatattatctgaatatttgactttccgtatcttccattccattctttagctttacaattcaattctgaagatgaagtatctgtgtgaacactcaactatcctattaattccttcacgtttgagccttccctctccttgaggcagtgtctgtgtgttatgtcttacaa

SEQ ID NO: 115918 - DNA, 188 bp, Homo sapiens
ctaaattttaaaggagtcataggtgtgtctaaccccatgatttttgtaatggcttgagttagcttttcagggatttgggggatttcctttgtccaagggacttagtgtcaaaagacttatatttaattaaacattctaggccagacaggaatgsatatgggcagatactcattagcccttaaattatt

SEQ ID NO: 115919 - DNA, 520 bp, Homo sapiens
aggtcttcactaaattttaaagttamtaagagttaaaaattctaatttatatatataatttttatataactatatataaatatataattgtataaagtgtgccaaaaataagatatgtttttaatttttaaaaattatgactaaggtataaaaatgtgatatttattgaaaaaagtataatttgttcttattcagaagttatttgaaggttgctttaaaatataaatttaggaaggaaatagaagcaacagagaaagaaaccaaacgtaggagagagagatgtggggaaagttacagatatgaaaatgtatttttgaaaagaaaggctaaaatgaagagaaaaattttgtataaaaaagaatcctgtatggtaactgtttctcctaaagtaaaataacagattatttaagaaagagaaactataggacaaaagagaaatccaagcatgccatatatggtctgtgtaagtcataataagattcatgaaaaagaaacttatgaaaggagttatgtgtgtgat

SEQ ID NO: 115920 - DNA, 632 bp, Homo sapiens
gtcaatggaagtctcaagcacacagtttagaaggcagcagaagcctgctttagaagagctgctactgttcttgcttgcagctgtgggcacttcctgagaatctctcactttggcattgcaggcagttgagaccattggtggaagcttttccctgcatttggcctctgttcttttgaatttccccaaagagttcttcctaacatttgcccctcccacttcctgatggttctgtaataattttttktgtgtgttaaacctcttcctatacaaaatagctggagtggctttaaaaaaattaatttattttaataattattattttttagagatgggtctcgatatgttgcccaggctggacttgaactgaatttgagtaagcctcctaccttggcttcccaagaagctgggattacaggtgcctgccactgtgcctggcttggagttgacttttattttcctggctatactctgacttatacagagaatgattctctagaaaatagacactgactttctttgaagagcagtgttagaaggattaaaatgaataatcaatctgtgcaatattcttagaggtaaacaaatgcttaaaaatttctttttcttgtacctatgagacatatacatggaag

SEQ ID NO: 115921 - DNA, 567 bp, Homo sapiens
tttggtaaacaggatgtgactgttaagcctttgcatcagtcttcaaatatgaacttctggaaaatggaaatgggagtattagttcattgagcaactcacttcctttaatttaattttttttccttggggtctgtcaaaggtatgtctcaggggccctcacaagcttctctacagaggaggttcctaatatcttgcaaggcaattgaaacctcccaggtaccctttaagccattttctcaatcagcaattccaacttggttgtattcaagacctcagtaagtgttgacatagaagcaggtgcatgtgtgtgatggggatgaaggatctaggaagaaagggaagatgggaaaagggaagaggtgacagaattcaacctctgtcacattcagttctattccactcatttgtggatttttcaactayaggttaatgccaaggccccccagtaacaatatttttggtcctagaatggctgcattttcactgcctttcagggtttttagaactagagtagtttctttcctttccatattcttccttcttgcctctatctttagtggttttgtg

SEQ ID NO: 115922 - DNA, 606 bp, Homo sapiens
ccataatatcatctcttatgtcccttgtgagctctaacattttataatcctaataaaaagagagggaatattgctgtttgtggaccccagtgtagattcagattcttcctcctgtgtttctgtaaccaagcctgtgtgatatgatcatcaagtgtttattttacttattttcttttctctttgtccttttctttctccatgcatgattacttgcacatagtcattttggtagagcgtggtcactaattcactaatcattgattaactttatatcctgacccctggggctgtctgcaagattaatgaacttgtttttctttcaaagaacaatgatccttaggtcacayagaccttcttggaggcatccagaagtttgatggccgagagacgcaagtagctttgatcactggaaatctcacctcccgcatgcctaccttactcataaatcccccagtgatgttcaaaggcaagctggatttaaggtttgcctctcccgtcctcacactatggggacaccaaataaacctttctctgctcctaagtgctgacatgttagtgtttggcttactgagcatcagatactagaacctagcttttgaggttcta

SEQ ID NO: 115923 - DNA, 600 bp, Homo sapiens
cgcacaggtgatttttctttgcttgctttttaagctcctttctctgaatgaatatagattaaaagagggatgggacgaggggtggacagcactaagggtaactgcatagcagcaagaatgactcacgtctgtgttgctggtagtttctgagttcaggtcctgggtgctgggaggagacagctgcctgcagagtggtgagaaattcttccaatcttttttagatgcttcccttttctgaagtaaagcctgaatatgccattaagagaagctgtggtaggttttcctcccacctagttccatctgccgtgtggttaatgaaacatctttccatattttccatgtggttattcatcaagcctagttttggggatggtgtgagttttgttttgttttgttttgttttctggagggtgagaaaagttgcattttagggttgctgataagatctaattaaaacccatttttaaaatattagacactgagagaattttcctcagaatagcataataatggccattaaatatgtgcttccccyacccttaatcagctctatactaggaattagcactaaaaatattagaagagagatgttatatttac

SEQ ID NO: 115924 - DNA, 582 bp, Homo sapiens
ccattatttaattaggttctttgcaagaaattgagaaccgcagttggtcaggacacattgcgtttgtgagtgagaacacagaatgaaggtagccctagagctgagggacagctttggttcggggcagcatttgtgagtccacagctttctgatctgtctcgcactgctgtgtaagmtgcatttccttctctgtgtggaagtgctcaccttcctggtgtctgtgcgtgtgcagcagccagatgtgggggattttcacactgctcatcgcaactttgatggaggtgctgatgacacatttccagtatgttccacacagaggaactcagttgagaagcagaggtctaattactgctcagctcaggaaaaccaccctctggactccgtggcgcccagtgaggatgatgggagcagtcccgggggagtgaggctgcctgcagccttcccacgtgctgactgaagggttttgttttgtttgccagggctccatgattccaaggcgcatcttgagtaggcacataggtaggcatttccggacgttttaccatccaggcacctccattcttatcatcctctgctggtttt

SEQ ID NO: 115925 - DNA, 582 bp, Homo sapiens
ccattatttaattaggttctttgcaagaaattgagaaccgcagttggtcaggacacattgcgtttgtgagtgagaacacagaatgaaggtagccctagagctgagggacagctttggttcggggcagcatttgtgagtccacagctttctgatctgtctcgcactgctgtgtaagcygcatttccttctctgtgtggaagtgctcaccttcctggtgtctgtgcgtgtgcagcagccagatgtgggggattttcacactgctcatcgcaactttgatggaggtgctgatgacacatttccagtatgttccacacagaggaactcagttgagaagcagaggtctaattactgctcagctcaggaaaaccaccctctggactccgtggcgcccagtgaggatgatgggagcagtcccgggggagtgaggctgcctgcagccttcccacgtgctgactgaagggttttgttttgtttgccagggctccatgattccaaggcgcatcttgagtaggcacataggtaggcatttccggacgttttaccatccaggcacctccattcttatcatcctctgctggtttt

SEQ ID NO: 115926 - DNA, 502 bp, Homo sapiens
aagtttgtctgtggatttgtggcttcccagggcaggtgagcctggaggaaggactcgtatgtgtgttgtttttctatgccaggagtcagaggttgggctgggtcccatgatcagggctgctgtttagggccggggtcttcctgtcttctggccttgtgaatggcctggtgctttgcctggcgagaggagtcagactttcctctcttgctgcagtgtgttgttgctgctctgctgtctagcagctaccgttgccatggagcagcaagaggtactgtgccagtggcccccctcccactgtccttgcaacagctcctctgtctgcctccttagccctcagccctgccatgggatggggacagaggagactgcagcagcaagtgtggctgattttaattgatttctgcttggtacacatttactgrtgagctgtaggtcagcaacttccaacagagctgagatgggaagagaatggctggctgcctagttgcttcctgggactttg

SEQ ID NO: 115927 - DNA, 518 bp, Homo sapiens
ataaaatatttaactggtcataaaagaggtaactggcatttctttaaagatttttaaaaatccataaatgaataccaaataaatgttaatatatcacatttaacttcccttttctctatctgtcctaatacattmccatgaaaccaatatataatcctgataaacacattatttaaaaaataagaaaacttgtttaaatgcacacactgcaagccaaattttaacaataaaccatttttatagctatttttgtattcccaactgaaaacattaggtgactttggaaattctaattcctttataatccagcagcaccaaagcaaacagtcatgaccccttaagaggataaaatgcccattttaattaaagactaaattatttgacttggtgtgcaatttttgcatctgtattttgagatgtatttataaatcctgtgcttttcattaatgaaaaactgtacaagtataataattgacaaatagcctatagaggcagtcttaaaaggtgtcttgaattct

SEQ ID NO: 115928 - DNA, 591 bp, Homo sapiens
caatctaattgcacatttgtatttaaatttatgtgaaaaaggaaaaaaaactttagaggagacataaaaagaaatacccctatggactgctgtactcttacttaggactgagtctaattttcggtcccttccatttscttgtgagaccaacctaatttggcaaaattgattcttaggctttttatgcaagaaaccctttactgggggtattgattagaatgagaaaatggtataagccatctctttaataacatccacttcaacagtcttgagatgctgtgcacttcattgacgaagcttcccagagtgtggattccctcttccatgtaaaaacacattgttcatgatcaaaaactctgaaacaaattctacaaatactattttctatagcactgacagttatttatccactggtaatatccaagagccagatttgtctcagatggtgtattctgtaacaatcacacaaaacaaacaaaagaaaacacagcttagagatgtctcctgatctgacccagagattcagggttttctgcttttcaaagaggctgaaataggaaagagtcgatgtcccagctatactaaatacca

SEQ ID NO: 115929 - DNA, 591 bp, Homo sapiens
caatctaattgcacatttgtatttaaatttatgtgaaaaaggaaaaaaaactttagaggagacataaaaagaaatacccctatggactgctgtactcttacttaggactgagtctaattttcggtcccttccatttccttgtgagaccaacctaatttggcaaaattgattcttaggctttttatgcaagaaaccctttactgggggtattgattagaatgagaaaatggtataagccatctctttaataacatccacttcaacagtcttgagatgctgtgcacttcattgacgaagcttcccagagtgtggattccctcttccatgtaaaaacacattgttcatgatcaaaaactctgaaacaaattctacaaatactattttctatagcactgacagttatttatccactggtaatatccaagagccagatttgtctcagatggtgtattctgtaacaatcacacaaaacaaacaaaagaaaacacagcttagagatgtctcctgatctgacccagagattcagggttttctgcttttcaaagaggctgaaataggaaagagtygatgtcccagctatactaaatacca

SEQ ID NO: 115930 - DNA, 581 bp, Homo sapiens
gttagctcttctttctcttgcttcatgatatttttccccttcaagatatattgcatatttccttcaagatatattgcaatagtttgtgaaattactcattgctaaattccaattattcrcttttcttttgatctctgcatgtttttgatgttcatgtatcttcttttaagagtttattgagctatattttaaatgcaataaaacaaaaagatcttaattgttagatgagttttagctattgcatataatcaaataatcactaataaaatcttgaaataaaataacataatttaaaaaatttcaagctatatttgtctattctacagtctttacattttcataaaaatttcagcatcagctcatctttttttaaaaaaaactttgggctatgttttttattttattgaaacaacatatcagcatgatgagaacagacatcataaaaattcagtctcctaacttatgtgtatggtatagctctgtattaatttagaacaatttatttataatttgtcattttttactctgaaataattttaaaattagaaagttgcaaaataataaaaacattcctgctatac

SEQ ID NO: 115931 - DNA, 592 bp, Homo sapiens
aaacacaggagtcctccatcgtcaaaggaagctgatagatcaagaattagaaatttaaaacaaaatgagaattagaacaaaatatcaagaatggagagtaagtctattgagtgcggtagagagcagttgctgacagtacatcataatgacaataattattagagcaagcagctcctgagcacatgtaatgtgccagagactgggcccaggcttttgtgcattgtctcactgaatccccacagcagccctaggagataaggtaggctgattagcattgtttttcaatgaggaaacaggcacctaatgcctctagtagcttaatcaagatgaatccaggcagaggggtgtggagattggaatttggaaaaaggtttgatttagtgactgctgatatgaagaagaaacgttctacaggtaaggtgggcaggaactatgattctaagatgctaaaggttgtaaacatggatgttgatgtcgctaagaataatgatggataayaaggtgtaaaataaaaaaaaattcaaactaagtcctgaaatatctaatgaaatacgggatgtgaaaatgttatacaatactgggaaaacagaaa

SEQ ID NO: 115932 - DNA, 549 bp, Homo sapiens
gatcgcttaagcccttaagtttgacactgcagtgagccacaattgtaccactgcattccagcctgggcagtagagtgagacgccatctctaaaaataactctagtcttgggttggctgaacctgttgctgtctgtgtgacatgcaactcacttaacttctcttgatcatagcttccttgyctgtaaaatgaagagaaatattcactgttactaccttaaatatttatcacaagcattaaaaagtttttcaaatttataatactctgtagacaacacattataattagaatttcacaatctgggataaagagattgccactaaaaattattatagaaacagaaaatacttgcttcccaatgaacatacattatatgtaactggtgaaataagtaaaaacaaactagaaaaatacatctatcaccttgtattatatgtagatatgcagtctttattatttaataaggtttgcactatcagtaagatatagtctggtaaaggacttaaggcaggactgtaagaacaacaaaattaaggttattacagaaaat

SEQ ID NO: 115933 - DNA, 567 bp, Homo sapiens
caagtgatattggtagcactcgatggtgtaactgaatcagagatctggggactatctcaaccaattaacacagatcttttaaaatattttgtgtaaataataaataataaaaatattcattttaccattataaagtaagaaaaatgagtttgtatatcaagttctatcaccatgtacaaatgacatgttgtrgaaaacttattaaagccagagtttataaaattgattactactattcccatatattcaaactcttctttggctcctttaaaaacaaaaggatgtctcctgtaatcctagcactttgggaggtcgaggtgggcagatcacttgaggccaacagttcaagaccagcccggccaacacggtgaaaccctgtctccaccaaaaaatacaaaaattagccaggcatggtggcatgtacctgtaattccagctactcgggaggctgaggcacaagaatcccttgaacctgggaggcggaagttgcagcgagccaagatcacaccactgcactgcagcctgggcaacagagcgaaactctatcaaaaaaaaaaaaaaaatcag

SEQ ID NO: 115934 - DNA, 567 bp, Homo sapiens
caagtgatattggtagcactcgatggtgtaactgaatcagagatctggggactatctcaaccaattaacacagatcttttaaaatattttgtgtaaataataaataataaaaatattcattttaccattataaagtaagaaaaatgagtttgtatatcaagttctatcaccatgtacaaatgacatgttgtagaaaacttattaaagccagagtttataaaattgattactactattcccatatattcaaactcttctttggctcctttaaaaacaaaaggatgtctcctgtaatcctagcactttgggaggtcgaggtgggcagatcacttgaggccaacagttcaagaccagcccggccaacacggtgaaaccctgtctcyaccaaaaaatacaaaaattagccaggcatggtggcatgtacctgtaattccagctactcgggaggctgaggcacaagaatcccttgaacctgggaggcggaagttgcagcgagccaagatcacaccactgcactgcagcctgggcaacagagcgaaactctatcaaaaaaaaaaaaaaaatcag

SEQ ID NO: 115935 - DNA, 620 bp, Homo sapiens
aatgtttctttcctctatttaccccagtttacttactttgcaggatcattcttaaatataactctttgtaaaagtttttatcctcacacagataattgaattattaatcattttttctacctaattcctagtacacaccttaggaagaatccaaagtttttggaagttgatacacatttactttagggggaaccctctttagaaaaaaaatactgtaattgcaattaacagctaaatttaaatgcaaatatgtgtttatactaagaaaaagtacaacaaagttggatttttaaaacctgagaaatacaaagaacatcacaaaattcaaaaaagtaacaatatttttattaactaattggtcagcacacctctatacccattttccacatatattttgactgcagtttttgttaaaattgtcataactcaataacttgttaacattttctataaaaaatgaagaaagatgattcagctttgcctctggcatgagaaatcaaatttttaatgtatatttagagtgcataraatatgcatgttcccacaaaatgtactctcactttacactatagattgtgttcacaaacacacacacacacacacacacacacaaaatcttc

SEQ ID NO: 115936 - DNA, 589 bp, Homo sapiens
atgtcggtggcaacagagacaatattttggccaaaaaattcaagccaaaacaatttttcattatacagagagratattaatattctgttttttcttatatgttgggccagcattctttgaaaagaggtattttatatttttcttttggatcatagacttgttaacggaaagacagaaacggactctagagatacaaaggttaataatatttttgaagaagatgtaaagacaagtggtttctctaaagtcttgttgcttatcaccctagtattaaagggaaacatgaattgactttcttaagaaacatttaagaacagcagctcccaaaactgtaagccttagtttacatgtttccaaatggaaaatgtattacttcatgttaactaacaggtgctcatcataaatacttgctgaaaactaaagaaaataacttgtgtggaacttgaaatggaaaaaggaagcctaagcataaacctccaattctgaagcaattaagctatggaaaaattttcaaagttaatcaaattagaaattcatttaaacaatctagggaaaaatgattaacttattcttctgatttaataactaa

SEQ ID NO: 115937 - DNA, 432 bp, Homo sapiens
gcggggctggtagcggccggagccgtgcgagttctctaccctgcttcgcgagcgggcgagagaacgcgagtcccaggatccccggcacccasttctcttccactgcattcccccggcgcgtgtgggaccgaggtggacatggatccgcaggtgagtaggggcggcgcaggtgtcctgccctggggatggggacgacggctgaccgctccgatgctgtcgcgcccccggctcccggtcggcctttgtcatgtctaccgggagagcgaaggtccgtgcgcccccgcacaagtggaaaggggcggaggcaggagtggagacggcttagagcacccggggaggtcggaaggcacgtctgtctgccctcccctagcttcaagtttctggagcccctcccttaactttcatgtctccgagatttctcatttcgaattc

SEQ ID NO: 115938 - DNA, 403 bp, Homo sapiens
gcggggctggtagcggccggagccgtgcgagttctctaccctgcttcgcgagcgggcgagagaacgcgagtcccaggatccccggcacccagttctcttccactgcattcccccggcgcgtgtgggaccgaggtggacatggatccgcaggtgagtaggggcggcgcaggtgtcctgccctggggatggggacgacrgctgaccgctccgatgctgtcgcgcccccggctcccggtcggcctttgtcatgtctaccgggagagcgaaggtccgtgcgcccccgcacaagtggaaaggggcggaggcaggagtggagacggcttagagcacccggggaggtcggaaggcacgtctgtctgccctcccctagcttcaagtttctggagcccctcccttaactttc

SEQ ID NO: 115939 - DNA, 562 bp, Homo sapiens
ttccactaataacttgaacatccttaatgaccttaggattcaccttatcctatttcaccaccatcaagcaatcaggagctctctccaccaggatagggagcaatgtacagctaactccttgacattgtctggtcactaggatgcattatcccttactgtctttggttttcaacagtatgcagagcttcctgggaagtggggagggggagcttctcttccatatactattcggcttgcaaagattttttatgggtccttctagtgaatgtacttttcctgcttattrcatcaccagtattgttaatgtgattataaatatggggtcatggagagtcagagagggagaaagatctcttaaaaccacggggtgacagtgctgatttgtatacacaatattttaattcaaagtcctgtgatttgaaatctatagctctgctctacaatatactcccctaagccattgcctatgcagccaacaagaccttcatggattcattaatgatatgtatatccatatctatatatacatttaacatgtatattttatactcatacatataca

SEQ ID NO: 115940 - DNA, 562 bp, Homo sapiens
ttccactaataacttgaacatccttaatgaccttaggattcaccttatcctatttcaccaccatcaagcaatcaggagctctctccaccaggatagggagcaatgtacagctaactccttgacattgtctggtcactaggatgcattatcccttactgtctttggttttcaacagtatgcagagcttcctgggaagtggggagggggagcttctcttccatatactattcggcttgcaaagattttttatgggtccttctagtgaatgtacttttcctgcttattacatcaccagtattgttaatgtgattataaatatggggtcatggagagtcagagagggagaaagatctcttaaaacyacggggtgacagtgctgatttgtatacacaatattttaattcaaagtcctgtgatttgaaatctatagctctgctctacaatatactcccctaagccattgcctatgcagccaacaagaccttcatggattcattaatgatatgtatatccatatctatatatacatttaacatgtatattttatactcatacatataca
